United States Patent Application Publication US 2004/0031072 A1 - sequence listing, part 26

SEQ ID NO: 119144 - DNA, 746 bp, Glycine max
  Clone ID: PAT_MRT3847_78596C.1
cccgttctagtggatgaccacgttgttctctatgactctttcgccattattatgtatttggaagataagtatcctcacaattcttttctccctcatgatatttataagggagcaatcaatttccaggctgctagtgttgtttcctcaacaatacaacctcttcataactcgagtttactgaactacattggggagaaagttggccctgatgaaaaacttccttgggcccaaagtataattagaagaggctttaaagcactggaaaagctattgaaagaccccccaggaagatatgcaactggagatgaagttttcctggcagatatatttttagcacctcagttacatgcagcatttaagagattcaacattcacatgaacgagttccctattttagcaagattgcatgagacatataatgagatccctgcattccaggaggctttgccagagaaccagcctgatgcagtaccctagttgaaccaataatttgggacagtttttaattttcaactctattattgatcccaccccaaatatgagttgatattaagttggagaaattgcagcaggagctacttattcagcatccggatgaattcgttgttaaagtattaaaatatgattggcagcattggttgcattagatatttgaatttgaggaattcattgcttccctcaagggccatttgaaaaaaaaaaaaaaaaaaaaaaaaaaaaaaaaaaaaaaaaaaaaaaaaaaagaa

SEQ ID NO: 119145 - DNA, 1071 bp, Glycine max
  Clone ID: PAT_MRT3847_78597C.1
cggaaagaactgacgctgtattcgtattggaggagctcttgttcccaccgagtccgaatcgctctcaacctcaaagggcttaaatacgaatacaagcccgtcaatctgctcaagggagaacaatctcgccctgagtttctccagctcaatcctgttggttgtgtccccgttctagtggatgaccacgttgttctctatgactctttcgccattattatggtcactcctctctttcacttttccaaatcatgcgttccctgttacttagtttctcttcaaatacgtatcacattgttttctcttcacatgcatgcagtatttggaagataagtatcctcacaatcctttgctccctcatgatatttataagagagcaatcaatttcaggcctgctagtgttgtttcctcaactacaccctctcacataacttgagtttactgaaactacattggggaaaaagttgccctgatgaaaaacttccttgggcccaaagtataattagaagaggctttaaagcactggaaaagctattgaaagaccacacaggaagatatgcaactggagatgaagttttcctggcagatatatttttagcacctcagttacatgcagcatttaagagattcaacattcacatgaacgagttccctattctagcaagattgcatgagacatataatgagatccctgcattccaggaggctctgccagagaaccagcctgatgcagtacactagttgaaccaataatttgggacagtttttaattttcaactctattattgatcccaccccagaaatatgagttgatattaagttggagaaattgcagcaggagctacttattcagcatccggatgaattcgttgttaaagtattaaaatatgatactcaatatagcaataaggttgccacatgcaatatttattgcacacatcatgtacaattgaaaaaaaaaaaaattggtttcgggtgtatgtctataaagccttatgtttattttccatttcatattcttcccagaatcccagtcaatgtagcttgatggatgattcttaatggtgtttatgg

SEQ ID NO: 119146 - DNA, 187 bp, Glycine max
  Clone ID: PAT_MRT3847_78598C.1
gtaatgtgctgattatgttggcggagggggtgttatgtacacactatgtggtctcagaacttagaatggtcggaatcaaataacacgacactgctatgatgtccagagaggacgaacatctgtgtaagggtgcatagcacatgattgctgaatggtacgattatgtatgtgaggaggatctctgtca

SEQ ID NO: 119147 - DNA, 243 bp, Glycine max
  Clone ID: PAT_MRT3847_78599C.1
cccacgcgtccgggaagatatcccacattcagcttgggaccttttttgctgggacagtgagaaaactttgccaaataatttttctggagaattgctctcttggaaattggatactggtactggccaatattattctgagtgggcttcaatttattgtggaggtcattgacaaccaatttacataactgtaagggattatgtgagaaagcgagatgtcagcattgaatatgatgcatgtacaat

SEQ ID NO: 119148 - DNA, 774 bp, Glycine max
  Clone ID: PAT_MRT3847_7859C.1
aggagcaaagttcataaataaaacatttttcataatttccgttggtcatctattgatttaggtaaccaaaacaaaacgcaaaattctgaattccgattgaaatggttctaataatgtctggccgaaattctcaggactaacaaacaccaaacaggaaaggaattcaaaattgttggcctatcaaataaacagaatcactttcttttccttttctggtcaccaggccaatgattgtaccaattcagcttcgtgctcacgtttctaggtcaacttggtggagattgcaagactgcaatgaacatctatatcatctttttgaaataatcaaactctgatatgaagctgaaaatccttgtttcttcctcaatacgcaacaattgatgtttgtaattgctctacagggcttgggaggtccaacagcgaaaatatataaactgcattaaaataaaaaaatcgagaaggacacatccccccagcatctactagccatggcaaattcggtctgatttttgaccaatccaagctgatcacaagtatactcgctacataagtggcattcccaattacagcaaacaggaacatcaaaggattgagtccctcaacatgacctcttctgatatttaaacaaatttgaggcagtcttccacccaaatatataaatgtcattgcccaaccaaagaaggtccctatgcttccagaaacatcagtttttggcagctgatcatcactaacctgaaaaagctttcgtccaacataaatcacaaattgttgtct

SEQ ID NO: 119149 - DNA, 237 bp, Glycine max
  Clone ID: PAT_MRT3847_785C.1
gcctttttcccaagccacgaagaataccatacccttctgcatgaattgaagatggatgtagtaccacacaaacccacgtaaccataaataaattcatttcccatatagaacttccatcactgttaagtttgtaggaattgacaataggagggagccaactaatttgaagaggttgcctttgaatttgggtgttgggttgttgaagaagcacgttttgtagagaatgagtttgatttg

SEQ ID NO: 119150 - DNA, 740 bp, Glycine max
  Clone ID: PAT_MRT3847_78600C.1
gtcgtttgtgaagcttgtggctgacgtggagcttgtgatggatgtaagcaagagggactttctcccttcacctaaagttgattcttctgtggtcataattcgccccaagcatcaaattcccaatgtggatcttcatgaatggaggtctttcaccaggacttgttttagtagtaataggaacaagacactcggggcattgtttaagcttaaggggaaagtttttgagttgtttaaaatctccaatggaaatgatgaatgttctctccacaagggtgatgaggttcaagacgaaggagggttgacctcgttcaaggaaaagattattggagtggttagaacgggtggctttgaagataaaagacctgcaaaactttctctccaggagcttctgcatttgctctctttgttcaatcaagctggcatttattttaatcaccgtggacgtcacaagattgaagatatgcttgacgacaatgatgaatagtgcaccctgctgagatgcttatcaactgctttgtgtttaacattatcattggtttgttttttttcactagaaagcaagcattcttgatttgatgatattttgagaaaaagtaatgcacaccaaagcaaaagtgagagtatgaaaaatgagaaaagttcactctaaccattaaatcttgcttggttggtcaagattggttttacttaaacaaaacatcaatgtgagattgaataaccaaatcagctcttttatgctc

SEQ ID NO: 119151 - DNA, 134 bp, Glycine max
  Clone ID: PAT_MRT3847_78601C.1
tcaaaccgctgcgagacaacgacagatcggggcacaactgagtttgtcgatctacatcactagacagactgtgactcacacgaacgtccctgttttcttcgttgcaaggggtctggtagagggccaatgcgagg

SEQ ID NO: 119152 - DNA, 288 bp, Glycine max
  Clone ID: PAT_MRT3847_78602C.1
gccggaattcccgggtcgacccacgcgtccgaggaatattgattacacatatataatatatggtagatggcagatccctgttgtattaggattctgatggttataccactattaatgcgagccacatatctgtgatcactactagtagaggacttactgatgttgatttaactggtgctgttcagaacgatacagtgacaaatgagatggtctttgaaggtggagcattcggtgcagcgaatatggccatatgtgcctttgaggccatgggcaagatcgacgagatcc

SEQ ID NO: 119153 - DNA, 417 bp, Glycine max
  unsure (1)..(417): unsure at all n locations
  Clone ID: PAT_MRT3847_78603C.1
agagaccgatttctcactggggcatggcatccaaanaaacaggttaagagaccttcacatcagccatgagctaacactctaaaactaaaatctcttggattacttgcaagattctaccataagcaacaatagtgaacacaaatatgacaggaccaaaatacaatgtaccaacagctccaaggatgatttaagtgagatgaattagatctttaaagcagagatgtgttaggggcaagaattttaacacagaaataagattatattactgataaactatctggttaaagaccaggcttagagtacaagcacattaacacaaggtttccgcccaacacaaaaatacctgtttcaaacacaccacaaacaacaaactacacaatgtaaataacttgctgatgccattcctaacaaaacaca

SEQ ID NO: 119154 - DNA, 205 bp, Glycine max
  Clone ID: PAT_MRT3847_78604C.1
cgtggggctttttttctctgtctaaactctattttttttttttgtcttttctttcttgttacttggctttgtttgattgattgccccaaggccgcggtggccatatatcagcggccgactacaatctctcgtgggcgccagaaaccgatccaaagggagggcggcggaagccccactaacgttaacatatggcggcagcgattca

SEQ ID NO: 119155 - DNA, 179 bp, Glycine max
  Clone ID: PAT_MRT3847_78605C.1
ataaattatttgtcacaacgaactctataagccataaataagtcgcggggcgtaatttgagagggggacggataatatatcttaataggaatcgcattgagcatatcttttatcagccgggtgaagacaatgtgggacaattgccaagacttcaaaatggggcaatgggcttcttggaa

SEQ ID NO: 119156 - DNA, 396 bp, Glycine max
  Clone ID: PAT_MRT3847_78606C.1
gccttgcatgcgctaaatggatgaacatgggaccagtgtgaacactacagatgttttttctggcattgtagcatggtgactggcacagaaactctccatatcatgaaggggaccgcagaccttggatcaccagacacagggagtggcaaaggcaaaagatcggaacacattacacatggttatcgcttgaagaggggcttacccgggcatactatggaagatcatttagtttgagaatgtcaggagcgataacgacagacgaacaaagctcgtttgcgagtatttgtggccacgtatgccatgagggagcatgctatgtgcagaaccaccttttccctgacattctgcaacaccatgacttttggactgagacagaaagcgcagtgaaataagcat

SEQ ID NO: 119157 - DNA, 595 bp, Glycine max
  Clone ID: PAT_MRT3847_78607C.1
gttctgttctgttctgttctgcgtgcttcgcttccactttccccagcaaaaaatcccaattccgccacaaaataaaataaagaataaatcgaattgttattttttttatggggaaaaaatcgagtccggcggagggggaagaagcggtgccggagcatctgcggtgcagccgtacggacgggcggcaatggcggtgccggcggcgagtgaaggaaaacctaaagctgtgcgagattcactacgtgcaagctcggcgtcggcagcacaagaagacgctgaagcttaagagaaagaggcaaaacgacgccgttgaggttcagattggggccaagcgggaccgaaaatcgagagaggcattggtcaataggaggaaccaattggagctcataaggatggttctgcagagggaggttgagaagaagaagaagaagcaatcgcaattgaatttgaatttgcatttgcatttcaatcacgagttgaagaaggaactgccgaatggggttatggctattgcgtccaatatggcatcttctcgttacttcaggtccaagaatgctgagaggggctctgttagtaagttgcagtgtggacaaag

SEQ ID NO: 119158 - DNA, 227 bp, Glycine max
  Clone ID: PAT_MRT3847_78608C.1
ggctcgtgaaaacaccgctaatacacacccctcacaaggaagaagaccgctagggcctgtagctagtgaacgccagcgtacaacagcggagaatggcatctcaaccgctgagagcgagggtgcaacaactgtgatgggagggcatcctcaaaagcgtccgaaaaaggggaactttgtcgaaccaaccctcagtcctgaggcgactacatccgaaacaactttggcga

SEQ ID NO: 119159 - DNA, 294 bp, Glycine max
  Clone ID: PAT_MRT3847_78609C.1
atgatcctactaggagccaagaagtgcagttcaaatgtttttcccaaacttcttcaccatcatttcttcctctgctcatcaattgctaagccttctgaaatagcttctttccatatcccaagtgcagctcaaataaccctgcatttgcctctgatgcagggaaacattttggccgggttcctacttactggtcttgtttctatttacatcctggctattcctcttgattggttcaacgcttgggttaatcggttatggtgtgcagtatctcttcataaatatggttggttatga

SEQ ID NO: 119160 - DNA, 270 bp, Glycine max
  Clone ID: PAT_MRT3847_7860C.1
ctctgggactcacagtcgtgatgtctttcaagagggaaggagacgattggagtcaactcaatgtgctcaaaaaaagaagagtcggggacctcctagccagttacattccagaggatgaggcgctgatgcttcgggatggacgctttgcttgtgccatctgcccccatcgaccggtactggacaccctggccatgctgactgcccaccgtgcaggcaagaaacatctgtccagcttgcagcttttctatggcaagaagcagccgggaaagg

SEQ ID NO: 119161 - DNA, 218 bp, Glycine max
  unsure (1)..(218): unsure at all n locations
  Clone ID: PAT_MRT3847_78610C.1
agtttaaattacagncacaggtgcattgcggtgagtaaaaaaacttctatgttacaggtaattgcgggaaaatgctgttgatacagttgcaattgtattgcggtgagtcaaaattccttgacattgtggccgcaattgattgcagaacactatttaaaatcatggtatcaatgagaacatggtaaaaaaaaaaggatgattcattcctttaaagcaaa

SEQ ID NO: 119162 - DNA, 251 bp, Glycine max
  Clone ID: PAT_MRT3847_78611C.1
aaaaaaaaaacataaaaaaaaacaaaaaaatatctacataaaaaaaaaaaaccaaaaagaggaagggctaacatacaactatataactctgatttaagatctcctaaattctattaacttgaacgcataatgactatcacattaactggtaaaaccttcgtgttacaacactaaatcacctagcaactcatactcatttcgccagttcctattatatctaaaattcccctaccaatcagctttatcaacaa

SEQ ID NO: 119163 - DNA, 407 bp, Glycine max
  Clone ID: PAT_MRT3847_78612C.1
ggcacaatcaaaagtattatagagtaaaacttaaaatgtacaagaggctgttaggccaagctcttatgcagacaaaactttatcacgcacacacagaagggggacggggggagaagaaaaggtgaggtgagacagcatatacttgggtctacacttatattcattattgaataatattttttaccacaaaattcccaaatgagaccaaaaaatggagcatcccaccaacaaagattagtctgccccttttcttcgacttaccttcttcacaatcacatccaaggtataaagtgcaagaaaggagccgatattatatttccagagctattaacattctccaggaggaggaggaaggtcagtgttgaaagaacagcttgtatcaactcgttgattttctgagtcttttt

SEQ ID NO: 119164 - DNA, 206 bp, Glycine max
  Clone ID: PAT_MRT3847_78613C.1
ggccattcgcagcactgccctcgagctaagcgcggcgtagatatgcattgttgcagtctcggagaatgtcgcggatcaggctcaggatgaatcggaggtcaatacgctcgtgaacgacatgcacgggaataactactgcgacagctgattggaatcttacggcaggacaacttatcgcagtgaccacacgactactgattatgtcc

SEQ ID NO: 119165 - DNA, 239 bp, Glycine max
  Clone ID: PAT_MRT3847_78614C.1
ggttgtgtgggtttttttttttttaaaatcagaaggatgattcaagcgttgagtttattgactatattataaacattgggcttattgaaaaggttaaaaaaataaattcctaggcccatgagtgggcctccacttgggtgattttgaaaggcaacattttttgggggggggagaaatgaattttgaccaagggagactaattttattggataacgaaagagatttcttaagggggcgag

SEQ ID NO: 119166 - DNA, 442 bp, Glycine max
  Clone ID: PAT_MRT3847_78615C.1
ggaggggaaggagcaggatgtgtagctgggagcgaacaatttccccgagagacagtcaattgggacggcggcgcagagccaagacgacggcaaggactaccaggagccggtgccggcgccgttggttgacccgacggagtttacgtcatggttcgtttacagagcatggatagcagagtttgtggccacttttttgtttctttacatcaatgtcttaaccgttatgggagtcgcctgggctaagtctaaatgtattaccgtagggatataaagaaattcttgtgccttttgtggtatgatcttttgcctcttttacttgtgcgctgtctttttttgggggcacattataaccgcggtgatatattttgtttagttgtggagaaaatttgttgtccaagatgtatatttcatacttcatgcaaatttgctggttattatatgt

SEQ ID NO: 119167 - DNA, 508 bp, Glycine max
  Clone ID: PAT_MRT3847_78616C.1
cggggtggtggttttttttttttttttgtcaaggaaaaaccttgcttgtagtgttactatcggaaagtgtgagctaataatgtttataacaaatcttagggaagacaggattactatcactctatgggaaggcactctaaaaaggttgtttaagccacagatgaagaatgtgtacatcagttggaccagggtaccatataaaaattctacaaagtcacgggaccctattcattgagtgagtaccaccaaacactaatttttacttaactgactggtgcttattgtgtagtagccgccaaccacaggtagtcattgaccagaatacatgaggcctccgatcttgctactgagggaaagaataagaactgagaaaccgggcgagaaaatccgggcttgggacagcacaattgcggtcttgccagaaacaggcattaaagcgaccgaattaacttggggtggcgaaaacccgggggttatgacagtggtaaaccctcctttgttgcccata

SEQ ID NO: 119168 - DNA, 374 bp, Glycine max
  Clone ID: PAT_MRT3847_78617C.1
caaaaataattaattataaaaatcaacaacttattcatacgggcgggataattctatgatggtttacgcttataaccgtaggtgctaaaatcattctcctcttttacaaacaatataaataaaaaaggagagaagttcccgtgtttgctaacaaaacaaacacttttttttggggtaaataacagaacatcccctactttattaatgtctttagggcactgcactgatttgccaaaatgaaaaacaaattcgactatagttaatttgggggcaaagtgaaggaagactctccccaatttgagggaaggatttgacctttcaaagactagggggggtccagtggaattgcaaacgtccgtatcaaactctgaaaa

SEQ ID NO: 119169 - DNA, 412 bp, Glycine max
  Clone ID: PAT_MRT3847_78618C.1
aacctttgggctgatttatgtgcttgcatggtcgtgagaagatgatagaaggggacaatacagccgccgcgccccaccagacggagccgtcttcccttcgccagacgaacaactaaacggccgtagcccgcgcacgccagacggagccgtcttcccttcgccagacgaacaactaaacggccgtagcccgcgcacgatgaaaaaaaaaaaaaaaaaaaaaaaaaaaaaaaaaaaaaaaacaaaaaaaaaaaaaaaaaaaaaaaaaaaaaagtggttgcctcagaggacttaagtccatgcatgtgcgtacgtgatgctacagtctcctcacagcgctattcaaacctaacctatcggttgctgccccataatgctgcgatcgggaaaatttcggtgccatttaatccaactg

SEQ ID NO: 119170 - DNA, 120 bp, Glycine max
  Clone ID: PAT_MRT3847_78619C.1
cggctcgagatcaaggtcggtcctgtaaactatcattaccatactgattgaggatacaaatacattggaatctgtgtgatggtctgtgaaagtggtaagtgcttccctctactcttctgc

SEQ ID NO: 119171 - DNA, 1797 bp, Glycine max
  Clone ID: PAT_MRT3847_7861C.1
gaattcgacctcggtacccggggatcctctagagtcgacctgcagccccgcgaattaattgcctagcactgttcgcctttcctccattctccacttttattcggagccccatgaattgattgtcattcatgcatcctccaccatcgagtatgcagccccgcgaattgattgcctagcgctgttcgcctatcctccattctcctcttttattcggagccccatgaattgattgtcattcatgcatcctccaccaacgagtctggagccccacgaattgattgcctagcactgttcgcctatcctccattctccagttttattcggagccccatgaattgattgtcattcatgcatcctccaccaacgagtcgggagccccgcgaattgattgcctagcgctcttcgcctatcctccattccccacttttattcggagccccatgaattgattgtcattcatgcatcctccaccgtcgagtctgcagccccgcgaattgattgcctagcgctgttcgcctatcctccattctccactattattcggagccccatgaattgattgtcattcatgcatcctccaccaacgattcgggagtcccgcgaattgattcccaacctctcttcgcctatcctccattctccaattttattcggagccccatgaattgcttgtcattcatgcatcctccaccatcgagactggagccccgcgaattgattgcctaggactgttcgcctatcctcctttctcctcttttattcggagccccatgaattgattgtcattcatgcatcctcgaccaacgagtctgcagccccgtgaattgattgcctaggactgttcgcctatcctccattctccacttttattcggagccccatgaattgcttgtcattcatgcatcctccaccaatgactctggagccccgcgaattgattgctttggactgttcgcctatcctccattctccacttttattcggagccccatgaattgattgtcattcatgcatcctccaccaacgagtcgggagtcccgcgaattgattccctagcgctcttcgcctatcctccattctcctcttttattcggaggcccatgaatatattgtcattaatgcatcctccaccaacgagactgcagccccgcaaattgattgccttgcactgttctcctatccttcattctccactttttttcggatccccatgaattgattgtcattcatgcaccctccatcaacgggtctggtgccctgcgaattgatttcctagcactgttcgcctatccttcattctccacttttattcggagccccatgaattgattgtcattcatgcatcctccaccaacgagtcgggagccccgcgaattgattgcctagcgctcttctcctatcctcaattctccactattattcggagaaccatgaattgattgtcattcatgcatccattaccatcgagtctgcagccccgcgaattgattgcctagcgctcttcgcctatcctccattctccacttttattcggagccccatgaattgcttgtcattcatgcaacttccaccatcgagtctggagccccgcgaattgattgcgtagcactcttcgcctatcctccattctccacttttattcggagccccatgaattgattgtcattcatgcatcgtccaccaacgagtctggagccccgcaaattgattgcctagcactattcgcctatcctccattctccactttttttcggagcacccatgaattgattatcattcatgcatcctccaccaacg

SEQ ID NO: 119172 - DNA, 705 bp, Glycine max
  Clone ID: PAT_MRT3847_78620C.1
tggaaattgggttgggggagaagattcaggaatccctatgttttctgtctgtaatatcaatgttgtccacttctccttccattcctccaccgtcataaacccacccacaaacaatggaaatcaaatcatgcttagttaatactacaacattgaaaaacaattaataaaatagaacttgatgaaatggctcttctcttctccagaagcttccattgtctctggttaccatgctgcaatgttccaccaaaatcttctgaaaggcttagaatttatgctcctattccacttcccaaaccttgggtcagcttcacacaccatacccgcctgcttcccaatgccacttcttccccaaactctgatcctgaagattttgatattctctcttcaactgaacattccgatggtagttttgggttccggttcgccagtgctaatgagattagagaacaattagatgaattgaacaaaaagaaaaaatcagatgcattgaacaaaaagaaaaagaaactcgctcgtgagggtgttttggaagaaagcgaaactggtgttccagctttggtgagtgaaagtgtgtaaaaattgaacactgaggttgatcgtactttagggggtgaaattgagtcttcttcaactgtagtaattggtgttgctgatcaaaaccctcagcttctcttgaatgatttgcaaaagatcgatagacatttg

SEQ ID NO: 119173 - DNA, 538 bp, Glycine max
  Clone ID: PAT_MRT3847_78621C.1
aacaactcttgcattctcgaggtattgtcttctgctttttctgcccctatggtttttctaactagtagtaataaaaagaaatggataaattcaacgatacatcttcctgtacgatttgtctataaatatactatcatcaaatattcctattcctattccatttataatttaattaatatatttttcttgtcataaattattactcctcgtactctaggagtacataactattatatgatgaaataacttcttccctcctaatcttcctctttgaaaataaaaacaaaacatacccaatagtacttctggtatattatatgcctttcctaacatataagttttcatgaactattatattatataaaacttatattagatatattacttaattactatatatctaatatgagagttgctataatatatacccagtaaaatttaagcgttttgataagttgttttttgaattaatagttaaatgagtatgaacacatacatcaatagcaagagagaaagagagaaattcttaataaccaaa

SEQ ID NO: 119174 - DNA, 372 bp, Glycine max
  Clone ID: PAT_MRT3847_78622C.1
ggaattgaatataataaaataaatcacgtaatattatataattaaaaaaatacattattacacgcaataataggaggggatcgaaattcttgagtcatcatcacacttaagaaatttggtttttgggagaagcaacacatgtttggtgaaggagggagtttaacgtggagcaggatgagccaccctcttgcgtagccaatttgggcatttttgccaactccctgactttttttgtgagttttttccccttgacttcttccatcacctgcttgacggttttattaaaaccttacctttgtacaaaccctctaaccgacccataacaagtttacagcctgaaacccaccttcaattactcctacaccattcttg

SEQ ID NO: 119175 - DNA, 313 bp, Glycine max
  Clone ID: PAT_MRT3847_78623C.1
ggaataatcaattagaaaaaataaaagttcattcaaattatgctgggatttatgcaattaggttaatttaattccctgcaagaggaaaaatgtggaggaaaagaaggtgatttggtatctagtaagaaggtcttgcattcaatccgttgagcatgttgatcaaatttggttcctaactttgtgtatgaaaaatgcactgttaggagatctattcacttgctagacaaaacatcatcctaaaatagtacgaggtgttttactccatgtaatctttgaaattgaagagaaaggaaattgtcatgttataaggctt

SEQ ID NO: 119176 - DNA, 1645 bp, Glycine max
  Clone ID: PAT_MRT3847_78624C.1
cggccgctcgagccgggctcatcgacaagagaggaggaacatcaatgtgcttcttgttttgcctgctcctgtcagggccagtgtcactgccagagaaggaagggattctgttcctctctcatggacaagagaggaggaacatcaatgtgcttcttggtttgcctgctcctgtcatgaagattttccaagatttgatgcagatgtaattagggtcatacatatattatatcttatgtgattatttttctaagcttattattattattattattgtgattgtgagaaccgtttactgcttcaaaactgatgagagggggaatgagaaggctggggaagtgatgaagaatgctttgaggaaggttcttgtccactattaccctcttgctgggaggcttactataagctcagagggtaaactcatagtggattgcacaggtgaaggtgccttgtttgtggaggctgaggcaaactgttccatggaagagattggtgacatcacaaagcctgaccctgggactcttggtatgcttgtttatgacattcctgaagcaaaacacattcttcagatgcctcctttggttgctcaggtgaccaagttcaaatgtggaggctttgcacttgggctgtgcatgaaccactgcatgtttgatggaattggtgcaatggaatttgtgaactcttggggagaagcagccagggacttgccactctcaatccctccagtgctagacagaagcatgctcaaggcaagaaaccctccaaagatagagcacctgcaccaagaatttgctgacattgaagacaagtccagcactaacagcttatatgtagaagatgagatggtctacagatccttctgctttgaacctgagaggctaaagcagctgaagatgaaggccatggaagatggagcactagagaaatgcacaacatttgaagtcctctcagcatttgtgtggatagcaagaaccaaggcacttaagttgctgccagaccaacaaacaaagcttctttttgctgttgatgggagggccaagttcaatccccctctcccaaaagggtactttgggaatggaattgtgctaacaaattctgtgtgccaagctggtgagctaacagaaaagcccttctcatttggtgtgagtctcattcaagatgcaatcaagatgggcacagacagttacatgagatcagctattgattactttgaggtgacaagagcaaggccttctcttgcttgcacccttctcatcacaacttggtctaggctttcctttcacaccactgattttggatggggtgaccctgttctgtcagggccagtgtcactgccagagaaggaagtgattctgttcctctctcatggacaagagaggaggaacatcaatgtgcttcttggtttgcctgctcctgtcatgaagattttccaagatttgatgcagatgtaattagggtcatacatatattatatcttatgtgattatttttctaagcttattattattattattattattattagtctgttgtttcctggaagaaaaagaaagagtacttattctgtttatgaatttgttggtgctaatcaataattgaagtcttcccttcttaaacttatttaattttacaaagtaccaaaaatctc

SEQ ID NO: 119177 - DNA, 213 bp, Glycine max
  unsure (1)..(213): unsure at all n locations
  Clone ID: PAT_MRT3847_78625C.1
aaccgcacctcctccatgccctgcagcttccccttatggtgctcctccatgcccttcttctgcttggacctaattgtttctttctttgaagcttttgacctagcttgatttttgttagtgtnaattaccaccgtgaggtttntgatggccttgatgatgcttatatataaatactangtagncccgtgtgaggngaaatgtgncacatctcaa

SEQ ID NO: 119178 - DNA, 231 bp, Glycine max
  Clone ID: PAT_MRT3847_78626C.1
gtctccttggcccaggccaagattgagaagatcaagggcagcaagaaggccatcaaggtgttctccagtgccaagtaccctgctccagagcgcctgcaggaacatggctccatctacacgggcgcccaggaccctggcctgcagagacgctcccgccacaggatccagagcaagcaccgccccctggacgagcgggccctgcaggagaagctgaagtacttgcctgtgtgt

SEQ ID NO: 119179 - DNA, 372 bp, Glycine max
  Clone ID: PAT_MRT3847_78627C.1
gggcttagatatttagcgtaatgggggaatttttagaaaatgaattggtctgcataacaaaacttaccaaacaggaaaaagtggggaattttaaactactcttatacatgcgggggtcaatctcactaattccaaacaaacacaattcatgaaggcaagccagttttcaaaacagccctttactttcagccctcttgaatagagatgctgctccccttgaatgaaagttcagctctaaattatatacagaacttcgccctagatcaaagaatttatcaccacttaatgaattcccaaagaatatcttactggacaatggtacaaccatacgtgtgccacacaaactcaattatgacaacctcagtttaaaac

SEQ ID NO: 119180 - DNA, 328 bp, Glycine max
  Clone ID: PAT_MRT3847_78628C.1
gtagttggacctaataaagggtttgacatgtggagatctgagtgggtaaatgatttttcatggaatattgagtatccgaagtgacaatcggagccagtctacagtttttggaaatgtcttgggaatctctcaggattttgatattgctggtaatactcttatgccagctttttctgttccacatgctactgccagatcttctgaagatacaggatcctctgcatgatctggaattcgtgttttctttcgcattgtcctttggtttaagtcagtacaggaaatttaggcatgaacctcttgtttagtatgctctgcctatctgaaaatt

SEQ ID NO: 119181 - DNA, 346 bp, Glycine max
  Clone ID: PAT_MRT3847_78629C.1
attaaaaaaaccccccaagcaaaaacactaaggaaagggggaaaagaagagggaaccctaaaaaaaaaggcccgggcccaggggccccctcaaaggaaaagccaaaaccccccaccccctaaaaaaaaaaacgatgcctaaaaacgtgcccttcaaaccagggttcccccaagaccggcccggccaccctgggtaccaccaaaaaaatacccggggcccaacgtggcccccctgggttaaacggcctttaaggggggaggcccctgaaaaaccactttttgaaagggcgaaacccggaaaaccaacaacgggtcgcgcgcaagccaaattccaagtcttcgaaccg

SEQ ID NO: 119182 - DNA, 251 bp, Glycine max
  Clone ID: PAT_MRT3847_7862C.1
ttttggttttgttattggaaaacacctcaaggacgacaaggcgcctgatttaagagaaaggcatacagggcatccccaaaaagataatgacacaagccctgcacattattgagaagctcacagggcgtaataatattcttccacaaatgttgtgtggggggggaacccataattatggccccaacacgccatttaacaaccacgggggcttttaggggggggccaaccctgcggagagtctcttttttttt

SEQ ID NO: 119183 - DNA, 439 bp, Glycine max
  Clone ID: PAT_MRT3847_78630C.1
cataaatgcagtgttttgtgaacttcttttgttatatggtggtcaatcaatccatgcacatgtagaactgaacatgtgtgtaagtcaccacaaagtctctacccacaaagcccattcagcgaaaccaacacaatcataaacatgcacacatttttctttatttttctaccattaagatcaatcaaacaataatattctgcatccatgtatatattttcaaaagtcaaaatcatcctgattaggctttggggagggtaacaaagcccggtagaggcgaaacctgacctcctccatggaaaaggaccttgacaaaggcctcctaggccttattaaggacaatggagtcaaagtcaacctatgcttggacctcctccatgcccaatggaaagggcccaggcagcccaatgtaccttcccccccctgggggagtaaataccct

SEQ ID NO: 119184 - DNA, 354 bp, Glycine max
  Clone ID: PAT_MRT3847_78631C.1
gggcggggccccaaaaaaagggaagggggacacctcccaaatttaaagttgggtaaaacaaaacccaaaccgagcttccccaaaaaaaaaaaaaactttccacacccaaaaaaaaaaaaccccgtcgaagcttaactccgccccggaaatcccccccctattgataaacctccaacgcgaccaaccccaattaaaaaaaaaaaacccgaaccccccatttgttaaccaaccccggatcccccatttttctaaccaaaaagggacacaaacatacccaaataactgggcgcaaaaacctaccccaaatccggaaattgggagctaaaaacgggggcaaagttaggcacatccccc

SEQ ID NO: 119185 - DNA, 369 bp, Glycine max
  Clone ID: PAT_MRT3847_78632C.1
aaaagaaggattaaaaggttatttccttctaagggaggggtttcaaaaagccagggaggggaaaagaaatgctttaagggaaaaaaacagaaaaggtagcaaacgacagaagaaaaatgatcaaagccagtggcaatacatgagaggcagttttagcacagaacagactcgactcgactcgaagatggaagtactggggtgtttgcctgttatgggagtgtaccctggaatcagttgcatgctctaatctagggcacatttttgttttgtttttaagaggtatattttaacttccatctgcaaaggtgtatatcagaaagaaaaaatattcctttttcgtggcatcaattaattggagtttattttctt

SEQ ID NO: 119186 - DNA, 2177 bp, Glycine max
  Clone ID: PAT_MRT3847_78633C.1
ccacgagccgatgcccctgaaggaacgtccattacgaatcccccagcccatccatcgttaggcttcttccttcctttgatattagggtttccggaatctccaacaccttctccttctccgacgtggatttcaatgcatttctgttgatggttcagctgatgaagaattctccgaagccccgatacggcgtcgctcgtgaagttggagatcgttgaggactcactagaagaagagcatgcccccctcaacaagcgctgcaaaccctctgcctcgcctctgcctcagcctcagcaatggaatgcttcggatgatggttctgtcagttctccttcccatctgaacatactcgatgagccgagccccttgggttttaagcctcaggaagagcccttctctgttggatttgattcagatgaagctttctcaaggaagtgcgcagcagaaagaagatttaagctccggggccaaaagggagagcaggtgtgccagtgctgctgcggcatcgtctggtgccggtgccgctgacaagctcaaagcttcaaacttgccggcttcgcttctgaggatttgttcgtgggagtataaatcaagatacgagggtgacttggtggcaaagtgttactttgctaaacataagcttgtttgggaagttcttgaaggtggtctaaagagtaaaatagaaattcagtggtcagatatcatggcacttaaggcacattgtcctgataatgggcctagcacattgactgttgtgcttgctaggcagcctctttacttcagggagactaatcctcagcctagaaagcatacactatggcaggcaacagcagattttactgatggacagtctagtaaacataggctgcattttttgcaatgcccacaagggctgtggcgaaacattttgaaaagcttatccagtgtgacatgcgtcttaatttcttaagccaacagccggagataattttggattcaccacattttgacacacaaccttctgcttttgaggacccagacaatccaaaagatcatgatctgcttcaagtcagtggtaaaggatcctccacgtcttgttatcaagacagtggatcacctcaggcatccctgtcatcatcatttaagattgaacacaatgatcctcctggaatgatgttggatagtctcccccgagatgcaccttcacccagttcagttatggagtgtacttcaattgaagggagtacaagctctgaaactgattcgaagggcccaagaaatggggatcagataaaacttcctggacttcgaccttctatgtcagtgagtgattttattggccaaattgaactctgcctgtcagagcaaataacctccgggaatccaccattttctgatggaggatcggagtacaaggagatcctggaagacattgctcaacatcttctcaatgacaatcaggttgcagcaacttctgatgaaaaatcactcatgtcaagggtcaattctctctgctgtcttctgcagaaggaccctgttacagttcagaattctcattttactgaagataatactgttgaaggacctgatgatggaaaagatgtcaagcctgctgtggaggaatcaaaggacgcttctggaggcaagcaagcactaggcatgtctaggaaagactcgtttagtgatttgcttctccaccttcctagaatcgcatctcttccaaagttcttgtttaacatatcagaagaggatggtaacagtcatgccaggtagttattctcatatttggaatttcaaattgggcaagtatggagctatctagcagtgtctagctgcatagggaatattttatgtctttgtagacatgtgcaagtttaatttctaccctaggaactactgggatttggaaaagttgttttaatgaagaatcctggtagagcccatgtataaattgtcaagtagatgttttagctctgtatttgttattttattttattgtttgatttctgggtgttatgcacagatgatgtctgcttgtaagtaaatcatgtgttgcctattcaattatgtggatggtatccatgacccttggaatagataagatcgtaaagctgtagctgatattatcactggcaagctcagtttgcataaatctaataatataattagatcgtaaaaaaaaaaaaaaaaaaactcgagac

SEQ ID NO: 119187 - DNA, 673 bp, Glycine max
  Clone ID: PAT_MRT3847_78634C.1
ccacgcgtccgcatttcgtgaagctctaattgcgatgaggagcactgaacactgagggtgatggaagactatgatagttacatagcgcagagtggtaggggagaaaatggagtgatagtggcatcgcgtgcttgttcgcgcgacgaatttcgcccacgtggcggaaaagtactatcgcgagttgctgctgttgcggctgcaagaaatggttcttcgacttcaagttacgatatagctgtgacgaggaatattaagaaaaagcaaaagcgtaagggtcttcgggaactgtttacaactgattacattgtgaacagcgtgttacggaaggatggtcctacacttggtcaggaatttgattttcttccttcaggacccaaatatttcacttctgcttgtcaagaggaccaaagatccttcaaaaggaggaaggttcccaacagtgcattttaaagtctcgccaattgtaatatgaaagcacctgtgaagaaacatggcattggcaaaggcctgatgacagtttggagggaaacaaatcctgatgctggagaccttccattttggtttgggcgtttctggccaaagaagttcctctaatctcaaattctataggacagaaaccagtcccgtaagaacaacagggtcatggtaaaaaccgtaaacagggaatgggaat

SEQ ID NO: 119188 - DNA, 489 bp, Glycine max
  Clone ID: PAT_MRT3847_78635C.1
ccacgcgtccgctcttttgtacctcttcttctgttccgtctatggaggtagccaccttactgctataataggtgagaggccacaggatacagcacacattcataatctggctatacagcattacctgtcttgcagactcactacccactgtttaacctttagtgaacaagtcttgcaggctgtttacttaccttaatattgagaggcactacactgggctggttagatgaacaccaggattttcaggtactgctcgtggttcaacaaacaaaggggtgagcgtgaaacaagagtaaccattgatattggtatgatgcagttctgaacaacagagcattattgccacaattggatgctcctggacataatgcttacattaggagtattgatactgagacatcccatatttactgcactcaacgtattagtgattcgaccacttctggcaatgaaggatgaggtttgcaagggttgtcagactaggaaaca

SEQ ID NO: 119189 - DNA, 270 bp, Glycine max
  Clone ID: PAT_MRT3847_78636C.1
ttattaacagttgttgttatttatttagcgtagcgtaggcccaatcacatagaactacattactatgtgacgagcgtgaaaacaaacataaaattcatacttgaaacggactgatgagaaaactaaggatggttcacactggtttaactgcaaatatacatatattttatcaaaatatatgtgttgtgttgttacgctgagcccttaacatggattgaggggcttccaagggaaactttattttttcccaaagcgagaggcttggagaag

SEQ ID NO: 119190 - DNA, 652 bp, Glycine max
  unsure (1)..(652): unsure at all n locations
  Clone ID: PAT_MRT3847_78637C.1
tcctctanagcggccgcttttttttttttttttttttttttttttttcgccataaaaaaaaggtaaaactccgaacttttcgcatttcccaccgaaaggccatacagtgtatatgtagtatattaacaacagcaaatttatactgggcaacaaaataacagcttgatcgggagggagttgcaacttgcaatgtattatggaacaaacgttcattccaaaaactcccaaccccccataatatttacacaactgctaaaccaaaatttgcccgatgcatgccactgcctcagtgaacaagtccattcaagtttaacttcattagctcgaaaccaaaaatcaaaagcataagccaaaaatgttggcagcaacaaaaaactgtatgtggtcaatgaacctcagttaaattttagacttcagcttagctttgagtttactcaactcctcaccttgttgctgatacaacattctccatgatttgtttgctctttcttgcagcaagcaccactctatgcccatatcatattccatattgatgggctgataacaatgtgaagttgatacaacatcttttttctctcgttgcatttgcatcatcccaagttgatcgacaacatgatgaccattaaatatttgccttcttttatggaannna

SEQ ID NO: 119191 - DNA, 261 bp, Glycine max
  Clone ID: PAT_MRT3847_78638C.1
caataacaactctaccactctcaaaacttctttcaaaactccaatcttaattaaacaatcctacaaaatgtcttcccagtccgagcagcttaccgccatcgcccagtccttcaagggcgtgcccggctctgagcccatcactgccgccattgaggactttgttcagttcttcaagccccagaacgctatccaagttggcgacaaattcccctcgttccgcctgagcgatgccaccggcaaggaggtgtcgagcgacgacct

SEQ ID NO: 119192 - DNA, 2372 bp, Glycine max
  Clone ID: PAT_MRT3847_78639C.1
ggctcgagtgcagatcttgttttagtggcaagagaggttaaagaaatttatgaggatagtttattgggacaagagacacctttggtaagtgttaaatcaattgatgagattgatcttttgagggagcaacaagagattctatcaggagaagttgctcttcattcaagtgctttgaagagattgtctcaggaagctgcaagaatatcctagaaggatcagattcatttgtgatcgaaggttgcatgagaaaatgcatggtcagaactatcagaggacactgtggcaaaggacacacacgtttcgcgaaaccggcgaaacacgccgccggcaaggtccgcatcctcatggacggcgccggcgccactgacggcatcctcgccgcgaagtccctcgcgcacctagaggcctgtcttcgccggaagtcaggcgacgcgaacgcgcgcgtcgacgattgcttcgacgccggcgtcggctccggggtgacgctctctctttctcgagaacgacagaaggggacacataataacacgcaattttcttctttctctctcccttagtcaaagggattcatcgttcttctcccaggttatttagaaaagcaaaatggtgaagatttgctgcattggtgctggatatgtggggggtcctactatggcagtcattgcacttaagtgcccatccattgaagttgctgttgttgatatctctaaatcccgcattgcagcctggaacagtgaccagcttcctatctatgaacctggccttgatggtgttgtgaagcaatgccgtggcaagaacctcttcttcagcactgatgttgaaaagcatgtctttgaggctgacatagtgtttgtctctgtcaacaccccaaccaaaactcagggtcttggagctggtaaagcagcagatttgacatattgggagagcgcagctcgcatgattgctgatgtttcgaagtctgacaagatcgttgtagagaaatccacagtcccggttaaaacagctgaggcaatagagaagattctgacccacaatagcaagggaatcaaattccagattttatcaaaccctgaattccttgctgagggaactgcaatcaaagatctctttaacccagaccgtgttcttattggaggcagggaaaccccagagggccaaaaagctattcaagcattgaaggatgtttatgctcaatgggtccccgaagaaagaatactaaccacaaatctctggtcggcagaactatctaagcttgctgctaatgccttcttggcccaaaggatttcatctgtcaatgccatgtcagcactttgtgaggctaccggggcaaatgttcaacaggtgtcctattctgttggaacagactcaaggattggacccaagttcctcaacgccagtgttggttttggtggatcctgcttccagaaggatatcttgaaccttgtttacatctgcgagtgcaatggccttccagaggtggctgagtactggaaacaagttatcaagatcaatgattatcagaagagccgttttgtgaaccgtgtagttgcatcaatgttcaacacagtctcaaacaaaaagattgctattctgggatttgccttcaagaaagacactggtgacactagggagacccctgccattgatgtatgccaggggctacttggtgataaggccaacctgagcatatacgatccacaagtaactgaggaccaaattcagagggatctatcaatgaacaagtttgattgggatcatcctatccacttgcagcccacaagtcctactactgtgaagaaggtcagtgttgtttgggatgcctatgaagcaacaaaggatgcacatggcctttgcattctaaccgagtgggatgagttcaagactctcgactaccagaggatatttgacaacatgcaaaaaccagcatttgtttttgatggcagaaacattgtggatgctgataagttgcgtgagattggcttcatagtttactcaattggtaagccactggatccatggctcaaagacatgcctgctttggcgtaaaatagatcattgatcaagtacactgcaataccagtcaaatgttgaggcagtcagtttaattctttattattttttgtaagagtttttcttttcctgcttaactttctcataatagttggtgacataaatggggtataaattgtgggaaatgggagggtttatgttctatgttactttgtactccaatcttttatgaatgtactagggaaacttgttttgtttgattaatcttctgattcttctcttaatatcatattggtgaaagttttgtaaaaaaaaaaaaaaaaaaaaagcggacacatataagcatcccataccccgcaata

SEQ ID NO: 119193 - DNA, 746 bp, Glycine max
  unsure (1)..(746): unsure at all n locations
  Clone ID: PAT_MRT3847_7863C.1
gaaaacttaagttactactgcaattttttacattaactgttttcctgtgatgcagcctcttgtatcaggtgctgcactgggattggaagggcaggtatatgtctaattattttttttcccagcatttaagttgaataatgcttcatagagcgacaagtactcctgtgtgcttgattatatcacataactttgaggattaactatggaaacttttactgcagcttactgtctacaattacaatggtggtccttgctatcgatgcctctttccaactccaccacctagaacagcatgccaaagttgtgctgagggtggagttctaggagtagttcctggtataattggctgtctccaagctcttgaggctattaagattgcagcttctgttggtgagccactctcaggaaggatgcttctcttggatgcattgtctggacggattcgtattgtatgttaagaactccaaaatgtctattaggattttacaagtggggcatcacataattgtttgaatgtttaggatttcttataaattaggattttatttcaataaactatctggatgacaagttaggngttttgtatcctagtgggattggaactattaggataaaggttttcctacttaaggatactccttagaggaattgattgacattactattgagtgattctcatattcacaccaatttttctgttactaaatataattgtcatgcagaccaatcattttctttataattct

SEQ ID NO: 119194 - DNA, 361 bp, Glycine max
  unsure (1)..(361): unsure at all n locations
  Clone ID: PAT_MRT3847_78640C.1
ggctnnttcttacttcccctattcctcgtcactcctctctcttagtcctcctcctcttcgggggcttggggggttgccgggatgggagggggcgccttctacacctactacattctgatccgtcaggtggggccagatgttggcgaatccgtataggagggcatccttgttaacgcctagcaccactttgcgagcttcaagggcaaggttcgcaagacctacgccaccaaggaggagcacgatcatcggttgtggcgcgttaagtccaaccttctcagagtcagggtggacgccaatgtcaagctttttctggggtccactgggggcaccaaattcttcggatctaactgcctgtctgggt

SEQ ID NO: 119195 - DNA, 236 bp, Glycine max
  Clone ID: PAT_MRT3847_78641C.1
cttgcccctacattaattgtacgggctctttgtccataccattgggaaatatggctgacgatcccatcaatcttgtggcgtttccacacatgctggtgctgtgtgtagagattcatgaaaaatggccttagtactgtcagcagacgaatttcatacagctcgatcaactcacgtgcagccggcatcaactctgatgactgatgggtgtacatatttagactgcaacagggcatgat

SEQ ID NO: 119196 - DNA, 379 bp, Glycine max
  unsure (1)..(379): unsure at all n locations
  Clone ID: PAT_MRT3847_78642C.1
agctcgnnntcggctcgaggaagggcctaacagcaacattaacagctgcaagaccaaactttttggggtgtcgctgcagtccaagaaaagggtgcacccggattatggatctaatccagagaccaacaaggctcgtttggttttggaaaaggatgacttgggcttgaatctcatgcctccatccacttgttagttccactactgatgattaattctaagtatgatatgatatcccaagctagctatatagctgcttaaattaattttcttttactacttgctttgatttgttttctattttaacttttaaatcaccacactcaagttttgagtcttggaggatgcaaaaaaaacataatccgggtgcaccctattcttg

SEQ ID NO: 119197 - DNA, 260 bp, Glycine max
  Clone ID: PAT_MRT3847_78643C.1
gggttctgagctcatactctgcaatgtttcttacgatagaaagtctcttctcatggggggtttgaggagaatgggggccccacgctccattcactatcccagaagcacccctaatgtttgtgatacattttctacactctttatgggtttcaatcttaaaatgtgtttcaagctctgcgttgtgtagttggcttcaaatgtggcaggatctaattcggaaggccatacacggaggacttggtgtcatagacacttatgtc

SEQ ID NO: 119198 - DNA, 242 bp, Glycine max
  Clone ID: PAT_MRT3847_78644C.1
atttgtgtgaaagtgagacggatctgtggcaattttcgctttctttatgttattgtgctgttcaatttcgatgttgtcttgggatttggttggtgggtttttgttgtcaacttgttttgactatggatctgttgggattagtggttttcggcattgaaatcacgtgcatttagttcgtggttctgcatttgttgctagatctgcttttgtctgagtggtcaaattatagtcatgctgaagct

SEQ ID NO: 119199 - DNA, 398 bp, Glycine max
  Clone ID: PAT_MRT3847_78645C.1
ggcgggcataacctattctccatctcaacacggaaattacgactttaccccaacgcttgatcctactaacttgggctctggtgatactgatatgaggggctcgttatcatccaaacactatttttcataacgcaatatcaaaccgatctcattttttcaatacaaacccaccagcttattattttgataagccatttggatcaaatattaacactaactcactttcatttcatggagctcaatgccccatctatataactaatacccttcctgccaacaccattcattaatgttcatacacgcaaatagacacgctaatcgccttttcagcaatggtgaataacacttaaacgtttaatacagatttctacaacttgaacacaatcaacgatacctat

SEQ ID NO: 119200 - DNA, 462 bp, Glycine max
  Clone ID: PAT_MRT3847_78646C.1
atgtgtagtggtgctttcactagggactcgggaatggaagctgttgctcaagaccaagctaacttggtttccaaaggtcgtcttttcatctccaatccagacttggttttaaggctcaagcttcatgcccctctcacaaagtataacaggaacccattttacactcaagatcctgttataggctacacggattatcctttcctcaacggaacaacctaaacaaattaagtaactatctaagtgcacgtacgcccttaattttaaatttttaatgtccatttggctttctatataatgttcataacatccaaaactctttagttgagtttaaaagaagcaaatcaggtgactcgtatacttgttaggatgtttagatcttatgccagtatgcacattttaatttcattcctatttgtattcggtatttcatttagaataaaataacataagctatttgccctg

SEQ ID NO: 119201 - DNA, 774 bp, Glycine max
  Clone ID: PAT_MRT3847_78647C.1
acgaggaaagtttaaaaaatgtgtaatattttgaattaatctatttttaaagtttacaattcattaaaaaaaatcttttaagaacaattatattgattgctattttaaattgaagtgacatgcatgtggacattaaataaagggtatatttggtgctcaacacaaccaaattgaggttgaaattatcaataaagaggagtagaagaggaattggcatgacatgatacttaaatgaaacaaattgggttgaaattatgttttttataaacaaaattattttataatttcatttccagtttataattataaaaatatcttaattttctaatgaaacaaataatttaaattttagaataaattaattaagttttcttatatttaaatccatatccaaatccagatctatactaaaccttaagtaatcatcactaaccttacattcaacgccaagccaacgataccactaaagttgtcgagtttgtcatcaccaccaacgtctacaacaccatgatctttctttgccttctacaacccaaatctagaactaaaccaaactctcaccaatcttcatacacttttattatttgtgatttttaattaaattaatattaatttaatacagctactaataaaaattaattactaataaccaatacatcagtgtgtcacctcaccgattataggttaacatcacaagcctaatgatcaacaaaagtcaataaacaaagatatcaaatcgataattttaaaaggtaagaggaccaaatcttgcta

SEQ ID NO: 119202 - DNA, 468 bp, Glycine max
  unsure (1)..(468): unsure at all n locations
  Clone ID: PAT_MRT3847_78648C.1
ggggaaccaaaaaaaatggggtttttaaaatcgtttcccaattttagagacttcttgcccaggtttggaggttcccccctccctttttgtttaagcaaaaaaaaaaggggtttttaaaacccaaccaaaagaagggggcccctttgcccccgttggttgggaaaaccccttttttttgggtggaaaaaaaaaaccccccaggacttttgttttttgcccataaaagtaaaggggggcccacccctggggggtaaaataacccgcttaattttttccgggtttttacccaaaggggggtggccccaaacaaatccaaacctcccccggggacccttttttgggaaagcccccggggggggggaaaatttgggcaaaaagggtgttttttcctgtggnggccccgtacccggccttttttttttttccctggggattcccttaactaaaaacttttttttccggccccgg

SEQ ID NO: 119203 - DNA, 360 bp, Glycine max
  Clone ID: PAT_MRT3847_78649C.1
tcgggcttagagagaggcagagtggaccgacttgcgtgtttcagttgataggcacaccacaacacaacacacagatctcttctttaacgtttacttttggtgtctgagaagaaagaaaaaagaaaataaaaatagagtagaggctctctaatcagtgagcgatcggagagtttggtttcatccttgctgtgctgctcagatggattacaacaataatgaccagtaaatcatttgtttcttgtttatctgtttttatttattttactttttatttttatttttgctgtgattggtatggctaatggatattaggtggttcaggaagtcaatttgtgagattatagttgtgggttttgattt

SEQ ID NO: 119204 - DNA, 787 bp, Glycine max
  Clone ID: PAT_MRT3847_7864C.1
attcggctcgaggtgagtcagaaaaccaagcgctctgagtttgtacagcgtcgaaccaggagaccattctctgtgactgaggtagaagcacttgttcacgcagttgaggaacttggaactgggaggtggcgtgatgttaagttgcgagcttttgagaatgcagaccataggacttatgtagacttaaaggataaatggaaaacattagtgcacactgcaacaatctccccccaacagaggaggggagagccagtacctcaggagctcttggacagagttttggctgctcatgctttctggtctcagcaccaagccaagcaacatggcaagcatcaagctggaccaggaaccttgaagattacagaagcctcagctgaaagaccttgtgtgtgttgaaggtgaaggtgtccacttgtgatatgatgatggtgtagaaaggagtggtggtgttgacaggaaaagaggaagacaaaaacttgtacattttgatttgattcaatttcatgtaatattctcacaccaaattctttgccggccattaattgcatgcagggttggcatttgtaaatgatttgatgcaataagattgttctaacaggaacttatgatgttctttgatttttttttcttgatttcttttgcatttatgaatgtttgtagaaatgtaaaaagaacatagaacatgacgacccaaaggaaaaggtgaaaatgttcttgttattatctttcatttcatttatggaaattattgttcccacttgtttgatacttaactttctgtttgctg

SEQ ID NO: 119205 - DNA, 290 bp, Glycine max
  Clone ID: PAT_MRT3847_78650C.1
agctcgagccctttgtgactccacacattttccttttaccaactcatttcattcacaaggtcaagttcttcacttccaactccctcattccccccaaatctttaataccacaataccaccccctcatttccaacatcaggccacggctccggcccaagcctggcccatccccttccatcctcgccggccacgccgcccagcccgccaaaaaccccgtagttaccctacaagcccaagcccgcagcccaacatgtaggaaacccagccgcggcccgagcaaccaaatgggg

SEQ ID NO: 119206 - DNA, 253 bp, Glycine max
  unsure (1)..(253): unsure at all n locations
  Clone ID: PAT_MRT3847_78651C.1
acaggacgcccaccnaaaaacgggtactaaagcaagcgcccgtgatttaagaaaccctcaattgctcctacttcatagtgaccaattcaacgggaaagaaaatcactctctgcgctggccacagaccacgtgaatcatgcactatgccagtctaggataatacgctgaacactctcctatttgatataagactacgcgtcagactaaaacttctcctgtctctttctaagacctctgtttaaattcaagcaca

SEQ ID NO: 119207 - DNA, 221 bp, Glycine max
  Clone ID: PAT_MRT3847_78652C.1
tttcctccctaatctaaaaataccgtcctgtgattttacccacccctattttcccatattccttcacccgcctttatttataaactctctcgtcatattcatgtattcatcacctcccccatgcctcatctctaccactacaaaactcatctctcatgcctctaaccattcttttctggacaccatccatccggaaacatttaaccctacacaaacccatt

SEQ ID NO: 119208 - DNA, 2151 bp, Glycine max
  Clone ID: PAT_MRT3847_78653C.1
ggctcgagtcaagcctggaaggcaaaatttattttaaagttaaaggagagatcgtaagggggaaccagatggaagcattaggtattcaaaatctgctatttctgggatgttagttgcatctattatccctggatgcttgggttcccctttaggggttcacattgctggacaagattatttcaagatggggtttaattttgtctattgtttgtgttcatggatcactatcatgtcctgtgaatatagctatggaaggtgaaacgatgctggttatggtagtatacaacgttaagggcgaagatggcattcatcggcaacgggtgagacaattgagaacaggttgggctgatggctcataataaatatcccagtgtggagttatagcggcacacatctatatctaaaactttactcttagggggtgtgtaccatcaaggctaataaaagcacatacttgtaggaaataaaacacggtgtgcatgccaccaaagtttccctctctgccctgtgagggtgaagttgtacacaaaggccacacggaaaaagtcatcatattgagtgaatggtggaaatcagatactgaagctgtaataaatgaagctttgaaatctgggtcggctccaaatgtctctgatgctcacacaatcaatggtcacctaggatctgttcaaaattgtgcatcacaagggggatacaaactccaatttcaacctggaaacacctacttgctaagaataatcaacgctgcactgaatgaagagttgttctttaaaattgctggtcaccaactgacagttgttgaggttgatgctgtctacacaaaaccttttaaaactgacactatagttatagcacctggccaaaccacaaatgtgcttctaaaagcaaaccgtgccgctggcaaatacttagtagcagccactcccttcatggattctcctattacagtggacaatgtgactgccactgccacattacactacacaggctcacttggttccaccatcacaaccctcacttcattgcctcccaaaaatgccacaccagttgctacaaacttcactgactcactcagaagcctaaactccaaaaagtaccctgctagagtgcctcaaaaggttgaccattccttgttcttcactgtcagccttggagtcaacccttgccccacatgtgccaatggtagtaaagtggttgcagccatcaacaatgtgacctttgttatgcctaaagtttctctcctccaagcacatttcttcaacataagtggagttttcacagatgattttcctgggaagcctccagtggtttatgacttcacagggacacaacagccaacaaatttgaggactaatagagggacaagggtatatagacttgcctataactccacagttcaattagtcttgcaagatactggaatgataacacctgagaaccatcccattcatctccatggctttcaacttctttgtggttggtaggggacaagggaatttcaaccccaaaaaggacaccaaaaagtttaatcttgtggatcctgtggagagaaacacagttggtgttccatctgggggatggactgctatcagattcagagctgataatccaggtgtttggtttatgcattgccatttggaaattcatacaacatggggattgaagatggcatttgtggtggacaatggtaaaggaccaaatgagtctctactaccacctccaagtgatcttcccaagtgttgagaagaggactaatacacaatcttcgcttaaggaggaagagggggaaacatgtaaagaaaatataatttccaaagggagtgtgtaccatcaaggctaataacaagattttcttggagcaaataaaaaaggataagctgctaatagggaaaataagaccaattaacatgtcttcactttctatgttttttccctgtcattttttgcattatttgtacttctcatctctctccttgaaagatagttttggcttcatgtaattatatatacagtgtgaatcaaaatttacaggattttcagaaatgccttgctttacttacttgcatcagacgttctgctaacttgtttttatgtacaatagtactacaaagtctcagcactgattatgcagtataattgaagcgcatgaaa

SEQ ID NO: 119209 - DNA, 412 bp, Glycine max
  Clone ID: PAT_MRT3847_78654C.1
aaaaaaccccaacagggtttgaattattattaccgtttttgttacttaaaaaaatttgaattaaaaaaaaaaaaaaaatttgggccccttgctcccaaacttggtataaaatcttaaaactttaggccgttaaggacccgaaatccaaaattatttacatgaccacaattccttgggaaaattgatttggagggacccaaaaaaccttccttgttcacattttaaacctcggaaaaagcttttttcaagcttccattgtttttttgatacccccattgactgaaaccccttttggataatttccatgacctttttgaggacatttatatttgaggggcccttgcccttaacggattaggcatttacaaaacttttttccccttgttaggaacccttgcttttttccagggga

SEQ ID NO: 119210 - DNA, 261 bp, Glycine max
  Clone ID: PAT_MRT3847_78655C.1
ctcaattcatttaaatagtgagaaaagtctttcacgagctggtgatcctaacaagtttggactgatatattaacgtagaattctgcctcatcatataactagtagcacacatccacttattgatgataatacgtacatgcctgattactatccaactcatctacatcgctctattcgatcttatcatagtcattaccgcaagaataccctttctcactcgactctagtcaaaactttgcacctgactctctaagtatacta

SEQ ID NO: 119211 - DNA, 375 bp, Glycine max
  Clone ID: PAT_MRT3847_78656C.1
tcgttccaggaaggtttcccgtcatcactgtatgacgtcctccttctttgggggggggggggggttggaaggggtagtataggggtagacaacaagaataaaagagagagacagcgaaagcgacgactaggttagggtgcattagctcccaggtaaaaaaataattaagcaacaacgtaaaaaaccggtaagtgtaacggtacgcaccaacttaaatcgtaccaggcgttagtgccgtaaatggtgacgcctgatagagtgagtgatagtaacaacgtgttataatgtacggtatagcgtacgacgcgaccaagcaaggaccggggaacgtcgaaggccgtgcaagcaccataaggcgatatacctggcggataa

SEQ ID NO: 119212 - DNA, 144 bp, Glycine max
  Clone ID: PAT_MRT3847_78657C.1
ccacgcgtccgcggacgcgtggggtttggtggcctgatgatcgtgagttttacagaggtgttgttgattcctttgattctgccaaaaagaacacaaggggtcttgtacgaatgaattgggtgatatgaagaaacattaaatctt

SEQ ID NO: 119213 - DNA, 259 bp, Glycine max
  Clone ID: PAT_MRT3847_78658C.1
ttttcgagccagtataggtcagaagtctgctctgaatttatctgagagccgaacagagggaaccagtttgtgaactaaagctgactcactggaaactccgtcgaactccaaatggcgaaacttgaagctaagctaggaatgatcgtggactccgggtttttttttctgggggggaaagaccatcttccttattgcgactcctgacgtcctcgctggaagggaaagagagtgatcgggaggcttgaaaaacaatcatcct

SEQ ID NO: 119214 - DNA, 1070 bp, Glycine max
  Clone ID: PAT_MRT3847_78659C.1
cattctcctcctcctcctactattatcactctccaccacctcctaagcactctcctccacctccctactactaccactctcctccacctcctaagcattcacctcctcctccatactactaccactctccaccacctcctaagcactctcctcctcctccatactactaccactctccaccacctcctaagcactcttcgtcgtttccatattactatcattctccacccccaccaaagcactcacctcctcctccctactactacaagtccccaccaccaccacctaaagagccctacaaatacccatcacctccacccccagtttacaagtacaagtcccctcctcctccctacaagtacccatctcctccacctcctccatacaagtacccttctcctccaccaccagtgtacaaatacaagtctcccccacccccagtttacaagtacaaatctccccctcctccctataagtacccatctcctcctcctcccccttacaagtacccttcacctccaccaccagtttataagtacaagtctcctcctccaccagtctacaaatacaagtctccacctcctccctacaagtatccatctccaccacccccaccatacaagtacccatcacctccaccaccatacaagtacccttctccttcaccaccaccatataagtccccatctccaccacccccagtctacaagtacaagtctccaccacccccagtttacaagtacaaatctcctcctccaccctataagtatccatctcctccaccaccaccatacaagcacccatcaccaccacccccagtttacaaatacaagtctcctcctcctcctgttcattcaccacctcccccagtttacatctatgcatcccctcctcctccatatcactactaggtagcggttttgcgtagcttcgcaagttttaagcttcttcataaaacctacattttcataataatggcttgatctgtgcgaacttacgtttaaatactctttacatgcagtcacatgcaacacattaagttttcactgaaaataaaaagagaaatgttt

SEQ ID NO: 119215 - DNA, 5494 bp, Glycine max
  Clone ID: PAT_MRT3847_7865C.1
aattcggctcgagggtgaatattcagatcacagtttggccaaggcttttctggattctaaagaattcattgagaagaagaggtgctctactagtgcttcagaagaagaagaatcttgtgctgatgcttgtgatgagatgaacccattggcaatagtgcctgtgcagaccaatgatgctgcttctaaaccgggttggcccctgcttcgtaagacaattgtatctgacaggaaatgttctcaaagatcgctcttgtgccagatctcggtggtacaatgggcaatgcagttaccctctagagatctttcatatgctgcacatcaagaccataaaacaaacaattgtggcccaaataaggatcagtttctggcccttgatagcaagagtggtgctctggaagagagagttgaacacttttctccctcgctctctccacatcttcacatcttcacatcaccctctcccgaagaaacttctccccactattcctcccccgacttgtcgcaacactacgcattctcttgcagttctaggttaagcgactctttggtggagaaacaccccgagttgtgcgtcgagtttttcttgtgggcgagtcgaatcggttacgcccaccctccagtggtgtacactgcactaattgagttactgttgcaatggcgataatgatagagtgtctgacaagttcttgatgcaaataggatgatgactgggagctgctcgctcaatgttctcattcaaaagtgtcgtccggggtttatctatctattattctatctactattgtttcgttccatctcacaaaaacaagagagaaaaaaaaaagaaaaaagaaaatgaaaacgaaaacttcacgttcctgaaagagagagagagagaaagttaaggacttaaatggtttgtttcagttcgtgaattccattagatctcttgcatttgtaaacagttttgcggggtttttgctttgtacgcaacaagttgtacttttttttcctgtgtcggaaaatgagtttcatcggaaacttcgttacttgatcgaagtttggttcatcggatcgagttcgaatgctgttttttcaggagtgacaaaagaatctggtgtatttatgcttctggttattggatgagctgtatatgttttaactatggtgttgaagaagagagtagatcatggatttgatggcttacgagttcctgttatacctaaagctcctagatctgcaagaaggaggattgctttcaaaaaagcagttgaagatggtcaagtttgtgctattgaactactggcatctttagctggtcagttgttgcaggagagtgaaggttctgcttccagcaatgcatctgaaggaaatcatcatcccccctttagccaaggtgtcattgagcaagatatacaagatggagttaaaccattaaagaaggaggaaattcatcagggaagttgtgtagagagtacttttaagaccgaggtagcctcacaaaacagtagtttcaaacctctttcacatactaagactggacatgtttcagttaataatagttctgactgttgtgagaaagctgaagctgatgtgaagtctgaaattttcgaatgggataataaatttgggaattattctaatagattagtagaaacacgtgaaaaatttagggtgtccactcatggtaacataaagaatggatttaaatgggaacaggaggctggaagttcatgcattcggggatcaaatttagctgataagtgtagtttggaggatcacttagaattgtatgtatctcctgcactaattgactcgaaaagtaatattaaatctccatttcataggaaattttttcccagtgcttccttttccaggtatgggaatggcattaagttaggttttagagatgatgacgaaaactttttaaggtgcaaaaagttttgcacgaagccaaaggcttttaggtctccacgacgcattgcacaccgaagaatcaggaatttgatgtcttccaaatactggaagacagctccaaagttgaaggactctgaactttctagatctgatctaggagtacctcgttatcataagaggaagacttgttacggttttgaaagatctcagcacaatgccattgttaaaaagaggaaattcgttgaccgggtttcaggagtaacttctgatggaggattcagtagtgagagtgtgtccaattcaccacagaaagggatggatggagacaagcctagctcatctgcaaaattgcatgtacctaaggcggcggattctcatgtaaagtttagcataaagtcaataaggattccagagctttatattgaggttcctgaaacttcaactgttggggctttctctctgcactcaaattcgtggccttactttttcatttacactcactcacgcacgctcacgaaccgcgaccacataaaaggacaacaacgtgagtgtctcattaaaagcatgaaaaatgctgccaacctgccacagcggcgccggtgaccgcaccgtggtggtgggcatgaagatggactctcacagcaccgagttgctcacttgggctctgttcaaagttgcacagcctggtgatgttgtgcctgctcttcatgttcttgggaatgatgaaattgtgaatcgagaagggaaatcctcgttgttttcacttgtcaaagcatttgactctattcttgccgtttatgaaggattctgcaatttgaaacaggtggatcttaagttcaaaatatgccggggttcatcagtgaggagaattttggttcgagaagcgaatgcttattctgcaacacacatcatagttggaagttctcaaggtcttcatatatttcggccttgtatatctgtggcaaggtactgtgctaagaagttaccaaaggattgttgggttcttgctgttgataatgggaagctagatgatgatggtacagagattcatgaaaagggttgtggtaatggtgaatattctttgaggcttttttggattctaaagaattaagaggtgcctatttgtgcagaatagtctatcttctgatgagaataaccctttggtgcctgtgcagaccacttctaaaccaggttggccgctgcttcgtaagacaattgtatctgacaagaaatgttccaaggaatcactgatcccttgcgccaggcaccctgggtgccatctcggtggtacaatgggcaatgcagctaccctctagagatctttcatatgctgccataaagcaaacaattgtgaccaaaagatcattttttggctctggatagcagctcttgttccagtggatgccgaaataggaactgctacttcgcgtgaactcaattcgagaagcattccaaaggaattatgtagacttaaaggattaatggaaaacattcgtgcacacagcaaatttctccagtcaacaaaggaggggagagccagtacctcaggagctcttggacagggttttggctgctcatgctttctggtctcagcaccaagccaagcaacatggcaagcatcaagctggaccaggaaccttgaagattacagaagcctcagctgaaagaccttgtgtgtgttgaaggtgagaaggtgtccacttgtgatatgatgatggtgtagaaaggagtggtggtgttgacaggaaaagaggaagacaaaaacttgtacattttgatttgattcaatttcatgtaatattctcacaccaaattctttgccggccattaattgcatgctgggttggcatttgtaaatgatttgttacaagaagaagcttttaagaggatctgaagatgtaataagaaaaatttgtgtttggttggtctgagagatacaagatgttttattatctgagaattttaaaccccaattcggtgactttggacttgcaaaatgtgcatcaaccttgtcatcacatataacatgcacagatgttgctggaacctttggttacatggctcctgaatacttcatgtatggcaaagtaaatgacaagattgatgtctatgcattcggtgtagtgctccttgagcttctttcagggagaaagcccataagtggtgattatccaaaaggtcaagagagtcttgtcatgtgggcaagtccgattctaaatagtggaaaggtgttaaatgttagatcctagtttgggtgtatgatcatgaagagatggaaaggatttgtatcagacgtgctccaagggctaggcctctaatgagccttatctctaagctccttggaggtgatcctgatgtgatcaagtgggcaagactagaagctaatgctttggaagcaccagaaatgcttgatggtgaagcttgtccaccttccaatttgcagtcacatctcaaccttgcattgcttgatgtggaggacgactcgctctccatgtgcagcgttgagcaaaacgtctcgttggaggactacttgagaggccggtggagtcgctcatcaagctttgattaagcaaactactgcaaattgctagaagaagaaggattgtgttttttgaaatctaaatccttttgtaaataattttgctgtgttgcatgtgctgtgaatgtttttatagatgggtttaggatgagaggttgtttgtgtgtgccctcctccttcccttgcttgccaaggaaattatgccttgtaatttttaaggctagatatcctttgtcgttttactttatttggtgctagtttcaatccttaatctcaatttgattgagtgtaatatgttctggtgcgaagaataaaaaatgaaaaagttgtatcttaaaactacataatgagtactgttctcatgcattttaaagttttcactaaagaggactatcgtggaggcagtgatggctatacttggaggtggtgcacatgttggtgttcttcttcaggggaaaaaagttagagatgacaatagaacacttgtgcagactggtatatcttgcaatgaaaatttggataccctgagtttcatgttggagcccacttcactacaagcttctccaactgtttgtgttggtgatccttcttctcaatgtgaaacatcccagcctaccaggtccacagaaattcctgtcttagattcaggaattactgataccttgcacgactcacccttgctgacatatccgggcaacctaattgaaagtaaccatgagcctacttcttcacttgcggacactacacttgacaaactaacacctgattccagagcgaagttgttgttccagctaccacagaaacattagctgtggttcctggcaaaagcgctctgagtttggcatttgtaaatgatttgacgcaataagattgttctaacaggaacttatgcttttctttgattttttttttaatttatttcccataatgaatgtatgtagaaatgtaaaaagaccatagaacatgccgacccaaaggaaaaggtgaaaatgttcttgttattatctttcatttcatttatggaaattattgttcccccttgtttgatacttccttcct

SEQ ID NO: 119216 - DNA, 813 bp, Glycine max
  Clone ID: PAT_MRT3847_78660C.1
ggttgttaaatcagtttaaacatgaggaaagaccagattcatatattttcaaaaattgaaagaataaattcataaatttgaaagttcgagagccaactttgtaacatcattcaactttcatatcgtccgtataaatcatggatcaaattgtatttatttctctgctgataaacattacataattcaacttttatatctctcttaatattaaattaaataaactatagataatataaaatttagacatggccttatcatgttaaaaacttaaaattgaacatatgatccattcccatgtgaactcgacctcccagatagatcatttactaggacgaaattgaaagatactgccaaatgaaacaacctttgaatttgctcaaaaaaatcattttaaatgaatcattctccaaaactagaaaatattaaaaactttggactaacattgattcattgaaggaaaaggatacaaaaatgcacctttaacattaaaattttcttcattgaatattagctgcacaacagacaccggcgttaaaactcccgagtttcaaaaaagcgaagctctcatttcaaaaacaaccctttaacatacgtattttcttgtttcttcacataaatttccagaaacctttcaccaaaaagttgagttttcatctcctggaaactctgcttcgtcttgtcatctgagttggaggagttgaataataagctatatccattgctcttcccacatcccgatcatcttcctcatcactcgcatcatcagatctccatctaggtgcacccttgatgttttcttcagtatttaattta

SEQ ID NO: 119217 - DNA, 149 bp, Glycine max
  Clone ID: PAT_MRT3847_78661C.1
attcggtcgacgtcttagcgacaagacactgtctcccgagtgaacacacgttacagcaatggttcctctgctacaattggcaactcattacgacacacagcaaccacgcacgttagttcacgaactgcgatcacccccttcgttttctc

SEQ ID NO: 119218 - DNA, 479 bp, Glycine max
  Clone ID: PAT_MRT3847_78662C.1
gtatttggttgcagtctcagtcatcataagattcgctcgttcttgtgtttgtcttgccctctttccttaacggagaaaaaaccaaacaagattaagattcatccaaatcagatcccttcctttgattcttgtgctgttctctgtcattcgattatgttcttttcacccttcattccaatcttgggattcttagctcacttcttttgcttcatgtttacaaatgcatggctttccttaatcaccaagtcaccaccatatttatatttcttcttgctcgaaacgaggatctaagtgttcatctctcaacatggccatcacagtttttgtgtccaaaaggatgacatacaccttgttcttgaacacttgtttcctcctggtgattttttccttcatgattgttcatttccacaccccagaagttgtggttgtgaccaaaatctctgcctttgataacatcaaagagcaagagtgtgagagct

SEQ ID NO: 119219 - DNA, 131 bp, Glycine max
  Clone ID: PAT_MRT3847_78663C.1
atggttattgacaataatttcagcagaattatcaaagacgtgctgatgcactcacgctgtcggcgaaaggtagacagatcaggttgctctggcggtgctcaactgcgccataggatgcttccacgtggcat

SEQ ID NO: 119220 - DNA, 842 bp, Glycine max
  Clone ID: PAT_MRT3847_78664C.1
ctcgagccgaatcggctcgagcaaaaccctttgtttcgtttgtgtgttgagggtttggagtggagggaggtgcagagcagaatggttctatcaaacaagaaactgaagcttaagctgagagctgaattagcccaaagaaactccaacgccgccgccgaacccccttcatcttcatcttctactaataataacaactctctcaaaactcttctggactctgccacccctaaagccagattctccaaaagagagaagcgaaggaagcttcgatccgaccaaccttcacaacaagccaacaaggaaattcaaactgaaacagaagctgagggttcgcccaataagaagagaaagaggaagaaggtagagggcgatgacgtggcagcaaatggagtttccgacacaccaaagaacaagaagaagaagcaaaaacagaagaagaacaagaacaagaacaagaagaaatccacaacggcggaagaaaacgaatctaatggtggaggggaaatgccagaggctacagagttaaccaaaaccaatacaactaccagtaaagacaatggtgatgctcctacaaacacgaaagcttatgttggaggaattccctattattcaaccgaggatgatattcgaagttattttgaaagctgtggcaccataactgaagttgattgcatgacttttcctgaaactggcaagtttagagggattgccattattactttcaagactgaggcagcagctaaaagagcattggctcttgatggagctgacatgggaggactctttcttaaaatccaaccatataaagcaactcgagccaataaagcctcagattttgctcc

SEQ ID NO: 119221 - DNA, 307 bp, Glycine max
  unsure (1)..(307): unsure at all n locations
  Clone ID: PAT_MRT3847_78665C.1
gnggaaaacgtaaaacctaattaattagggttccgagactgagaattctggtattgctcgcaatcttgaccaagcttcttgtgtagccagccagggcttgggttggttgatcgcacggggggatttcgttatccgcacaatcgtgaacgcggcagaagctttagtctccttctgggaaattagaaagagtcttttgccgccaacttatgatccgtgcaagccgttttgtgttgaaccaacccttatggtcctattcatacaaggccgtcattgtgtgtgtttcaacacctccatatggagaaaccat

SEQ ID NO: 119222 - DNA, 342 bp, Glycine max
  Clone ID: PAT_MRT3847_78666C.1
gagctctgacaaggttttgggttaaatatgctgatgatgacatgttttctgcacttattgcattctttcttaccactgatgacgaatactcgacataatacatagataagaactgcaccatctcatgctagtcaagaatcatatccttgatgatccaaagactttccctgatacaaaccttactcacatcaaagacattatgcttcaattgccctattctacattctactcattcccctatatctctctgacacaaagactcaccaagattacctatacattcgaatgcattcttagaaacttgaaatgctggctattgcatttactaaagataacctccca

SEQ ID NO: 119223 - DNA, 359 bp, Glycine max
  Clone ID: PAT_MRT3847_78667C.1
gttgccgatggccaacccacgacccgcaagcgagcgggggcagggcacgcggagacaagcaccgcaacaaccacgcgcacagcgaagagaagcagacaacacacgcgcaggcacacggcagaaacgggagcacaaggagacaaaaaaagaaggcgcgggagaaagaaccccgcaaagacagaacagagcagaaacaccagcaggaagagcagcgcaaccccaaggcaagggggcgcccacaagcacccagagaacaacggaaagcccaaccgaggcaaacaccagggggcagcaaacaacacaaacagcaaggggcccgcccccaaggacaccacaacgagcagaagggggcgaaaccc

SEQ ID NO: 119224 - DNA, 703 bp, Glycine max
  Clone ID: PAT_MRT3847_78668C.1
ttggggactaaaactatggtaatataatggtgggggttggtctgaatccttggtatttggctttgatatctgatgcaagaaagaaacattaaagtgtttttttctgatgtatactattgtatctgtatttctggaaactgtttctcgattgtaattcaccattaattaattagtatcttttttcttccaggtgttaggcaggatggttgatacccttgaagaaaaggtgactcctgatatgaaaaaggatccaattgttgttgttgttggtactgatgctcagcccggcaatgatctggcggagtctgaaataccgccagagtctgagccgagcaatttggaaacacggcctaacaaggaacttcctgcttctgaaacactggctactaatggtgaagcagtggcggcattacccaaccaatatttgggcaactctgaagaacctatgaatgaccatctggagaattgtgaatcactaaccagcaaccagccagacaatgctgaggcctcatggagcagtcagacaggtgattccaaggcagttcccaccaatcagtctgctaactctgaagatttgtctaacagtggtcagttggttagttctgaagcacctcttgatatgaagatgaaggcttctcaacccagcaaccagcaggtgaatactgaggcattgccaaaccataataatgtgggtaattgtaat

SEQ ID NO: 119225 - DNA, 200 bp, Glycine max
  Clone ID: PAT_MRT3847_78669C.1
agctcgtagagcaactagaggtgtaacagaactttgggtatattttttttcaccgttagactgtaactttcataggattcagatttgtgaccgtcgccttttagaagtgggtgagagattcgatcgcatgaatgaacgtccatttaccttgacggtcgtcacatcactgtcaacgaagctcatacccgctccagccgtgg

SEQ ID NO: 119226 - DNA, 757 bp, Glycine max
  Clone ID: PAT_MRT3847_7866C.1
actggaagacagctccaaagttgaaggactgtgaactttctgatctaggagtacctcgttatcataagaggaaaacttgttacggttttgaaagatctcagcacaatgccattgttaaaaagaggaaattcgttgaccgggtttcaggagtaacttctgatggaggattcagtagtgagagtgtgtccaattcaccacagaaagggatggatggagacaagcctagctcatctgcaaaattgcatgtacctaaggctaaggattctcatgtaaagtttagcataaagtcaataaggattccagagctttatattgaggttcctgaaacttcaactgttggttcactaaagaggactatcgtggaggcagtgatggctatacttggaggtggtgcacatgttggtgttcttcttcaggggaaaaaagttagagatgacaatagaacacttgtgcagactggtatatcttgcaatgaaaatttggataccctgagtttcatgttggagcccacttcactacaagcttctccaactgtttgtgttggtgatccttcttctcaatgtgaaacatcccagcctaccaggtccacagaaattcctgtcttagattcaggaattactgataccttgcacgactcacccttgctgacatatccgggcaacctaattgaaagtaaccatgagtctacttcttcacttgcggacactacacttgacaaactaacacctgattccagagcgatagttgttgttccaac

SEQ ID NO: 119227 - DNA, 420 bp, Glycine max
  Clone ID: PAT_MRT3847_78670C.1
ggctcgaggacggctacagaatctgctacctatgaagataccattgctgatgtgatggaacagtatgacgaatttcttagttcaatgctgtctcgctcagctagattacagatggattataaatgttgagaaagaaatgatgttaatgatgtcattgccatattgacaaggattgatgatcatgctgggacagcagacgtcggtagcactataagggaaaaaagtgatactattacacttgagatatgtgctggtcttctgccactattaactgatcttctacaaagtgtaatgtgtagacttctatgaatatccgtggacatgctattgtaactgggcagaatatgtggttcaggcatctattgaaccgcatgaactacacagcctgttggaggtaatatcgacgcataggacaggctg

SEQ ID NO: 119228 - DNA, 758 bp, Glycine max
  unsure (1)..(758): unsure at all n locations
  Clone ID: PAT_MRT3847_78671C.1
ccgataaggactttctcccaatataaagaatatgtgcaggagtttcaagataaatatgatagttactgctccttgaacaagattttggagggataccgggatcagtttcagaaactaggcaacgatttagaacttgctaaaggcagggatatggatagatactatgacatcgtggagcagctgaaggaatcctatcgacgctgtggaccgaggcacaagagattgaggaaaatatttgttgttcttcatacggaattggagaatctcaagcgaaggatcaaagactttgcaaactcgtataataaatgatgaaaatacaagaggactatattagataaaattgaagcctgtttttcaaggttaagaacttttgggtgatacatgatgcgcagttgagtagatggattcttttctaggttgggtgtgcactagtttttgatactatttcttggtagagccatatatttgtatataaatgaaattttgtctgttgcttttgcgtatgggtctggcatatttttggcttagcctggccttcattttgtctccatgtctagataaattgtatattctttaataccgtttaacatattcaccgaggtactagagaaatttgagaatgtgcattttaagttcacaagccaaaaaaatgttacattggacctttaccatgtcacatgggtattatggaaaaactgttgtccaatatggcaaggaaatgaaatgggcattctttttnaaaaaaaaaaannnnnacc

SEQ ID NO: 119229 - DNA, 428 bp, Glycine max
  Clone ID: PAT_MRT3847_78672C.1
ctgcttttttggtataggacttcgtgggtagactcaactgctttcctgctgactttcactcaatgtgtgctactgaactggaatgacgtgcaaagtgcgaaagtctgaaagacccattgcgctgctggtgacaaagtgtgttttactaatgttcactggacgacaacaagctcactgcgtaaaccattgtgaatagcagagattcagacatcttgctggtgtattatacaatgacggctcaaatcagaaatagtgtctaccgtattatattagggaggaatatgaatgccaagctgatctaaattctgcaatcttgaatcactgctgctattaaatataagccgaaaacgggaaatattcatataaaccgcttatcttacgatggctgatacaaagtgtggactaaacacgataaaaatgttggtttg

SEQ ID NO: 119230 - DNA, 256 bp, Glycine max
  Clone ID: PAT_MRT3847_78673C.1
ggggaaaaaatattggttagcataaaaaaaaagattcatcccccccccaaaaaaaaaagggttttttttggggccccccaggcctattctggtggggggggcaaacttccgaaaaaaattaggaaaggtcttggcccatttggataaaaggggacccacctggggtttttttggggacccttaccttgaaattttttttcttttggccccttttggctttgggaaggaaattaaaattgggaaagtcataaaaggc

SEQ ID NO: 119231 - DNA, 495 bp, Glycine max
  Clone ID: PAT_MRT3847_78674C.1
gaacacccttaaaaggcttcaattaaaataataaaatttgtccctaaataaataaatcctaaccattaaccaaaaaggcaaaaacaaacaaaatgtctaaagctaaaattgaaagaaaaaaaaaaaaaaactagatactagtactattttgattttgtattcaagttcaaggctttgaagagggtggtggttgacccaaaaattgaagctctttcttgtcataaatttccaaagagaaatccctgagcatttgagtggttgtagcagcggaagaaccagaagcagaaccagagccagaactggtagtaacagtcaccgtgctcatagtagaacccacagtggaagaagagttaacggaatccgaggctgcaccgtttaaagagtggtggttgtcatgctgcatctgcaaggcggaaacgaaccccgaaatgggccgggcctggacgttgaaaaacggggccgctgtcgccggaatggcccaatactgaggcgggt

SEQ ID NO: 119232 - DNA, 240 bp, Glycine max
  Clone ID: PAT_MRT3847_78675C.1
agtttgtactattgatgtctggtgtgatgaatgtggtgtcccttctggatttccgcgcagagttatttgcaatagcattttctatgtgatgctcattagatatggctatgactaattacttcgccatgctagagctccaagtctgtgtttacaatccttcatgaatgttctttctgtgtgtgtgtatggtgatgataacttaattagtgttcatgaacatgtcaagccttactttagtgg

SEQ ID NO: 119233 - DNA, 2382 bp, Glycine max
  Clone ID: PAT_MRT3847_78676C.1
gcttcttctaatggccatagatcaccgaaatcagagttggaaactcaagaggttgagaaaattgcatcaggagaaggtgaaactgcttctggctctcattctgtcactacttatagtgaacagaatgatgaacacgttgacaagacagtaacaaatgatgagttagatgataatcaacaaacccctgcactcaaagatgttagggctacaactgaggtggtggagcctcaaacagaaacttccaataaaggggatcaaagccatttgggtttgggatttgagatctccctttgtggtcatgaacttaaggtgggcatgggttcagtagctgctgctgaagcgtttgaagcacatcgcatatccgtagttgacttcacaagttctgctccatcaataattaaaaatcaaaatcttgttatcaagtttaaagagaggtacatgacatgggaaaaggctgctcctcttgttcttggaatggctgtttatggtttagatttacctgttgagtccaaagatacaattcctgtggaacaggatcatgcattgaagtccagggatgatgatctgggatcatcttcgtctggacgcatagatggacgactttctattccttttcgaaaggtcaaaacatttgagcatactaatagcaactcatcaaatgaggatgtatttctagattctgagtctggatctctgatagaaccaactccaacatccagtaccctgggatctactcataagaaatttcgaaaaacaaatgtccccaatacgtggcagatagcatcataaaatcgcaacgtgggacaaaatttggtaaacttcagtttctaacgaatggttcttgggacacaacaggttgatgctcatatttatttatggaagtggaatgcaagaattgtaatttcagacgttgatggaactattacaaagtctgatgttttggggcaattcatgcctttagttggcaaagattggacacaatctggagtggcaaggcttttctgtgctattaaggaaaatggataccaactactttttctgagtgcccgtgcaattgtccaggcatatctaaccagaaacttcttgcttaacctgaaacaggatggaaaaaccttaccaaatggacctgttgttatatcacctgatggattatttccctcgctttaccagagaagtgataagaagagcacctcacgagttcaagattgcttgttaagaggatatcaaaagactttttccatctgactataatccattctatgctggatttggcaataaatatacagttgacctgaatcagagaaggaagagaatcccgaatggcaaaatatttattatcaaccctaagcgtcctccagctcttaaccggggcataatcggaaagccgtctccttcgttacagaccctcttccaagacaacagcccaacacttttcttggtcgaccaggaggactacaacgtcatggaattattggaaaacaccattgccagatattgattagtgtcattgctcaagatacgcatttagtttttgatgattgtccactgttaggggaggtgaagccttcctatatgtttaacgaaaaaccagacattccacctactcgaccctttcatgaccataactaattgtaggttatccgtctatacttgcttaacctgaaacaggatggaaaaaccttaccaaatggacctgtggttatctcacctgatggattatttccctcactttaccgtgaagtgataagaagggcacctcacgagttcaagattgcttgtttagaggatatcaaaagacttttcccatctgactataatccattctacgctggatttggcaatagagatacagatgaacttagttacagaaagattggagtcccgaagggcaaaatatttattatcaaccctaagggtgaggtagctattagtcaccgtattggtgcaaagtcgtatacgtcattacataccctcgtcaatgacatgtttcctccaacttctttggtcgagcaggaggactacaactcatggaattattggaaaacaccattgccagatattgattagttcattgcttaagatacttagttcctttttgataaggatccgttggtatggaagttgaaaccctcaaagatgttaaccgaaaaaccagaaattcctcctacgtgaccctttcatgaccataattgattgaagtatccttctatacaggtttcattgatggggatgatcatgccattgctttccttctttttgatctgcattaaatcccgatttcattataatcctcctatcaacagaattgtataacatttagcttacttgttatattgtactacaccttgtatattttaaaaaaaaaagggcggccgccgtcta

SEQ ID NO: 119234 - DNA, 277 bp, Glycine max
  Clone ID: PAT_MRT3847_78677C.1
acgaccgggagaagcaaaacgaaaatcggatatcgccgcaaaagtcgctatgccatggttaacatgatcgaacagcaacgatcaagatgacactttcaaaattcaagcgagacaactaggccaactagtatccggaatcagccgtgaaatttgatgatattaacgacaatattatatatgactgctacccttcctagatcagataaaatgtacacaactgatctcgaatgtaatatacacatcaagaatgcatagaattcggaatgaaaaatgctgt

SEQ ID NO: 119235 - DNA, 182 bp, Glycine max
  Clone ID: PAT_MRT3847_78678C.1
gagtggtttgaaggtatctattgtatgttggtttagacgctatggtttacaatatattttccttcgtgacaatctcgtgctcaggctgctgatgcacggatttgcattctttttgtccatatgtgaggcatctagttggaaataccaataacaccgcaagcagggcgcggtccggcggtacc

SEQ ID NO: 119236 - DNA, 207 bp, Glycine max
  Clone ID: PAT_MRT3847_78679C.1
ggggagtcggatgtacagcttttcgagtgaacttgacgtcagacttgagccattagagtgcagagaccctgagacagggatgctgcagctgacggagttgatgcatcaggcagaagcggttaccttacctatcgtggcatccatcgtcagactcgagttcatgacctccgttatggatacatcctatggttcactgcatcttgcatg

SEQ ID NO: 119237 - DNA, 247 bp, Glycine max
  Clone ID: PAT_MRT3847_7867C.1
agacaacacatccaaaataaaaaacacattaaaaaaaaaagaaaaacaaagattacagctcggaaagaatgctatactagatagagaacacaggacaacttggaatacttcgtagtgagataattgtactgtatacatagacgatatcgttccatcctccatttcgctgacgtgaattacttcattgcttcttcactttttcactcactccttctgatctcaagcagtttcccctcatggatcgctt

SEQ ID NO: 119238 - DNA, 709 bp, Glycine max
  Clone ID: PAT_MRT3847_78680C.1
gggttttctttttttttttttttttttacaacagctctgcttgatattgcgcttaaaaaaaaggtacacctaaattttccgtgcatactgttcaacatatgtgccaatagtcaatacctgatggaaggcacaacaatatcaggtgaggaaaatctactatagcatcacaattaagttcagaatgagcagaccatcgaaagcaagtgtgagcgaagtttgttttcctgtttctgtatccatctcatctcacaaaggtataaaacatggaaatgacaaacacatagacggtgattacataaaaactaaagagcacaccaactaccaaaaattggaagaagaaaaaatcctaatctgcgcatggttatttccgaatgcccacttctcttgcgctctctcaaatccctcggtataataaatacagaatctacacaaagcccacctttagagtgtgtacaatcaatctgtttcatggagaatcttactttagttgtaggttctgatccactgacgataaactcacccaccttgtaatctacccaatgtccacgcttgtgattgccgtgtaaatcatcaggttcagtttcatccaagtagcactcagatgatgcttgctgaccatccatggttgacaactcaaatctcactggttttatatcccaaccatgggtatgttcataactgcagacacgtcaaatctcactggttttat

SEQ ID NO: 119239 - DNA, 524 bp, Glycine max
  Clone ID: PAT_MRT3847_78681C.1
acgagcatgctttgatcagagcattgcaattgaatgtatctctagctgttgcttggggatatcttgggaagctgtatcgtaaagtggatgaaaagcaattggcaaggcaaatgtttgatcgtgctagaagtattgatcctggccttgcattgccatgggcaagcatgtcatttgagtcttgtgtgggtagggagcttgaatcagatgaggcatttgagagctgttcacgggctgtgcagataatgcctttagctgaattccaacttgggctcactaagcttgctttgttgagtggacatctctcatcttctcaggtttttggagctattcagcaggctgtgcagctttctcctcactatcctgaatcccataatttacatgggctggtttgtgaggctcgaaatgattataagtctgcttctactttttataaggtagcacgtcatgcaattaacattggctcacggggtatttacaactcacatattagggggaatatcaataaatttggcccgaaccctttt

SEQ ID NO: 119240 - DNA, 1021 bp, Glycine max
  Clone ID: PAT_MRT3847_78682C.1
atccaaacgcatgaaaactcaaataaattttaacctttttgtatcttacaagaataataatgctccttactattaacatattttgctaaccaaattctacaaactactgagaataatccttaaaaatattatattaaattcaacgatcatgtcttgattctccttttgttaatgtggcatcatttctgccgaatgtaagctttactactccattgccgccaagaataacttcaaggaatattttctcaaaaaatcagaccaaccacgagtaattagtaattactatactttttattttgatattcattgaacatattttattcccttttgattaaaagaaaggagaaaaataaggtatcttttacttttaagaaacaccccctggaaaaggaacagtccatagaaattaatcatattctcaagaaattgatgggtatttatatcttgtatttcctttattacatcagccacctttcattgcattccaaaaaatttattctgcaatataaattttaaaatgagaggtcaatcatcttttattacattccaaaaagttcttccgcaatataaatttaaaattgagaggtccagaataatagaatgcagaatacaatagccaggattgatgtttactagcttacgggtaaagttggcaaaatggcccagcttgttgggccaagcgtgaaaagtaggccactctgagttctttatgtagctttgtagccagacatggcacggtgaccggttgggccaaatcaaattagctagattttttctctttaaatttacataactttaaacgaaaaaaaataaatagcatatgaaaataaatcccatttaacttgggcttgtaattcttaacactggcttagcttgtcgagccaaatgggccatgccaaattagttcgattttggggcattgttatgtgcacccagcaattatgcaattttcttattttgctcttttgtaaaaaggataccgatcagttaattcataagtttttttttttttatttttttt

SEQ ID NO: 119241 - DNA, 144 bp, Glycine max
  unsure (1)..(144): unsure at all n locations
  Clone ID: PAT_MRT3847_78683C.1
aacttccaaaactgnttctttcaaacaatctttctcagcaaacccaaaaggccaattaaactcagngaaacaagtgggaaaatggagaacttgtttcgcctagttgactatgaggacatgttctcaaaacgttgcattgggtga

SEQ ID NO: 119242 - DNA, 1943 bp, Glycine max
  unsure (1)..(1943): unsure at all n locations
  Clone ID: PAT_MRT3847_78684C.1
tggttcttccattcaacacaaaagtgtagaacttgtgatgcaggacacncaagcattcttggtgctgaaggacaccctcattctttgtactgctttaacttctttgcagttggtcaacgttatggtaactttgatccaaataaggaccctgcaaacttcaatcttcttgacccaattgagagaaacacagtgggagtcccatctggtggatgggttgctatcagattcctagcagataatccaggggtatggttcatgcattgtcacttggaagtgcacacaagctggggtcttaagatggcatgggttgtgttggatggaaaactcccaaatcagaagctgtttccaccgccagctgatcttcccaagtgttaacaaagcctcgaattccttcagtttgtttcaacaatgagcaattgcttctaaccagttgcttcaatttttttattttttatttccgttttcgggtgaaaaagaagttgaggcttgaattgagattgaggttggactttttcctttctttggctgagaattttatttatagaaggcgtctttgtctacaaaattgtaatcaattaatttgaatgaaaaatcttcatgaatatattattattatcaaagtattttattttcatgttactctgaaaaaaagataatattgggattttaccgcttgcgaagagaacaaaagcgtattctagatttcgaataggaatagaaataggtcacgccttaaatagtggcttctctgagattgtcccttgtcaaccccaaagacattggcatccttgtcgtcaactacagcctcttcaaccccaccccttccttctcttccatgatcgtcaacaagtacaagctccgcggtaacgccaaaagcttcaaccttggcggcatgggctgaagcgccggcgcgtcatcaccgttgacctcgcaaaagacatccttcaggctcaccccaacacctacgccgtcgtcgtcagtaccaagaacgtaacctagaattggtactttgggaacaacccttctgtcgtcttccccaattgccttttccgcgttggtggggccgcgattcttctctccaacaaaagctccgacagagcaagagccaaatacaagctggtgcatgtggttaggactcacaagggggcagatgacaaggcgtttaggtgcgtgtaccaggaacaagacgaggtcggaaaaaccggtgtttctttgtccaaggatctcatggctattgctggtggggctcttatgactaacataaccacgttgggtccccttgtcttgcctataagtgagcaatttctcttctttctcacacttgtggtgaagaaacttttcaatgccaagatgaagccttatatccctgatttcaagctcgcctttgaccatttctgcattcacgctggtgggggctcgaggatcgatgagctggagaaagaatctgcagcttcggccggagcacgtggaggcttcgaggatgacgctgcataggttcgggaacacttcttcgagttcgatttggtacgagttggcttacacggaggcaaaggggaggatcagaaaggggcacagggtttggcagattgcgtttgggagtgggtttaagtgtaacagtgcggtgtgggaggcgcttagacatgtaaacccttcacccaacactccatgggaaaactgcattcataggtaccccgttcacattcatacataataattaccactatcgctttcaagagacttccattcatctctaattcatcgccgtttctttaattgaattaattgggtcagtcagggaacctctttagaaaatcagagtcaattattcattctgttttcgtcggtcacttgagctttggacatgactgtattgtgaatttgtgatttgattacatcatttttttttcattcaaattcttcggattagtgttaatttttttttt

SEQ ID NO: 119243 - DNA, 172 bp, Glycine max
  Clone ID: PAT_MRT3847_78685C.1
gaattcccattccgacccacgcgtacgcgacaacaacaatgtcggcgaaatctagatccagttctacaacaaacatggtgactcttaggtctgggtcagttctcccgcaacgcacgcaaaacatccgataagtataccatgttgaacgccaattaccacttggtcaacttca

SEQ ID NO: 119244 - DNA, 1616 bp, Glycine max
  Clone ID: PAT_MRT3847_78686C.1
cggatccaatccgttaagtaattaattggcatattatcgctcctaaatcctaatccgacgctgagtgagatacagggaacagacaagacaaggagtgagtgaggaccgaggaacacacaaagacaagacaaaggttcgcttttccatccctcccaatcacaaacccagaaccagaagaagggccttcaccttgaacatggcacacaccccagttacccttttagctgttgagcaacacaaagtgataatacccaacaagcacggtgaaaaactagtgggtatattacatgaatctggaagcagggagattgtaatcttgtgccacggttttcgctcctcaaaagaatccaattccttagtgaatcttgctgctgctttggaaaatgccagaatgagttctttccgctttgactttgctggaaatggggaaagtgatggctcatttcagtatggttactattggagggaggcagaagatttgcgtgctgtaattcaacattttcatgaatcaaaccgtggagttagtgccattgtcgggcacagtaaaggaggtggcgtggtgcttctttatgcttctaaatatcatgacattaaaacagttgtcaacctatctggacgctatgatctgaaagtaggaatcgaagaacgccttggaaaagatcatattgaaagaattaggaaggatggtttcatagatgtgacgaggtcaggaaattttgagtaccgtgtgactttggaaagtttgatggatcgcttagatacaaatatgcatgaagcttgtcttcagattgataaagaatgcagggtcctaacagtcgcgtccgctttggacaaagttgtccccactgatgatgcatatgagttcgccaagattataccaaatcacaagttacatatcatagaaggagctgatcattcattcactaatcatcaagatgaattagcctcggttgttgtgaacttcataaaggaaaccttgcaccaggataggagtactgctaactagatcttgcagtttcaagccagttgaattcctactgatgacaattattttttcttgtcatggatgaacctgcctttgatgttctacaacatatttgagctcttctagtttttgcctattaaattagtgaatcttgcatcattgtgaaaataacggcgaaagcagtatctgcgagtgttatttacctctgatcagatgcatgtacaaagttactttgacattatcaatttatgaatgcaaacagttatctcatggtaccaccctgtggccagggcaaaagccttagaggggttatataactacaaatgatcatatataacggtcatcctagttatgtgtgtgctaagttccacatctcatattcgttgtgggtaaatgttatgacatggaaacttcctagtttttacactatcttctattagtataatttatttcattttattttttacatgtatttctctcacattcgaaaggtgtgtggagtggggacatcttgtattattaccgaaggaaaaaaaaaatctcatgctaggaacttcctagtttttgtttaaaaaaaaaaaaaataaaacaaataacactaaaaagaaaaagaaatataaaaaagaactaa

SEQ ID NO: 119245 - DNA, 515 bp, Glycine max
  Clone ID: PAT_MRT3847_78687C.1
ccgggaacacagatttgtatatcaaattaaacaacacaaaagcatatcacaaaaatcacaacttagatttggtaaaaactgaatcaccaaggttggttctgggtcgcgcggagggttgatgatggtggaggtgttgggttgcgccgaagatatggacagttcttatgaggacggagaagaccaattggagtgggcggcggtgcaccggcggtgagaaggtcagcgtgagccttcatggctcgcacttgcatctccaaggctgcgcagactctcctcaacgacgtcgttgaagcacaagatcgcgattcctgattttctaaccctacaagaatcccgagcctttctcgtcgtccttctcaacataccgccaacaggtagtacaagacccctcaacgtcatctccccttcaatttatatggtaacatattgtttgattgtttggtttaatataaacaaaatggcacccaaactatttgcacttccacagaatgagaacaaacttttcactgcttaag

SEQ ID NO: 119246 - DNA, 956 bp, Glycine max
  Clone ID: PAT_MRT3847_78688C.1
ggtttctaacgacccattttgcatatttcataattagtaacggatcatgtgttgccttagtaaaaggagggactttaatagctctgctggaatagtgaagacttggggtctttgatgagaaaaatgtacgctgcaggcggcgattcccgtcgaccccaccgtccgaaataaacactacaccaaattgtgtacacaatttttacaccaaatcaaattataatctttggacacaagatagtatcaatcaataatatctgcaatagctcttcaatttttggtgcatgatcgtttagggtttgtgcttgttgttgccgccttagtgacaataatcgcgccaactcttgtatgatccatcactcagatccttccaattccgctgtctcgctttgaccgccgccacaccaaactagcatgttcttcagtgtttccctttcagatatttgatgcttggaaacgtagggaaagttgcccaatctattcttagaacccatagaagaagatatttggaagcaagtagaaatgaggcttttacctcagttggaccaaatatcaagcaatgcaggatgtacatgcaatataagtttccaattgaaggatgtaattcattcttgtggcactggacaagagaaaactttcacaaaggctgttcttttagaaacttctctgtaacttctgcaagaaatgtagcagcatataattctcgaatagcttgggaagttgctgtacaaaaaatactcttccaatggttataatggatttacctccataaatatgattgctcaagcagtgagcctggctttgactcgttcttatttgctggttcctgggtttttagcatttgctagtggaaagctagcattggctcagcaaaatggggcagacacagaattttacccatcacagaatgcattgtatatgcatgcacaagatgggtatgggtacatgtttgcatttgt

SEQ ID NO: 119247 - DNA, 898 bp, Glycine max
  Clone ID: PAT_MRT3847_78689C.1
tacggctgcgagaagacgacagaagggggtacgtcacaattgtgaagcacagaaaaatgaaaaattctgagagaagcagtgtaagaaagtacaacaaatctgaacttccacgcctgcggtggacacctgaacttcatcaacactttgttgaagctattcaaagtctaggtggatcacacaaggcaactccaaagcgaattttgcagcagatgcgtgtgaaaggactgaggatcgctcacatcaaaagccatcttcagatgtacagaaacatgaaaggacatgccattgttgcaccagtggatcagttgctggaaggaaaggcaaaagatttcaaaatatgctccaatatttgtccaaccgaaaggaatctcaagcgggaacttcatttgttagactacaaagatgggctttcacaaaccagtgaggaaactgattatgatctaaaccaggaaccacagtcaagtgcagtactcttgcttagtgatgatgtgtcaaatgaagaagaaaattttgctgatctatcattgatctcctttagcatgcctctaatttccatgatgcaaagtgagaataacaaagagataatgcgttttttgtcatcgactgcagctgcagctgctaatcattccgtcgttgattccagtttttttacgccgtcttttgcaaacaattacataaacttagatctaacaatctgaatatgtttattaattagtaattctttttatttacttacacgtgcgcaacactataattacatgttaactttttaggcaaagacttataattattagttagctaattattgtattctttattacagtgttaggcttgttagcagtaataaatggttctctttcttttttcgaaaaaaaaaaaaaaaaaaaaaaaaaccaaa

SEQ ID NO: 119248 - DNA, 171 bp, Glycine max
  Clone ID: PAT_MRT3847_7868C.1
caactggtcagaaggggtggctggatgaagtaaactatctaggccagctttctcatcctcatctagtgcaatcaattgtccattgcttttactatgcacaccgacttctgccctatgaatttacgcctactggccacttggaatatcacttgcccatgagaggctcgaatc

SEQ ID NO: 119249 - DNA, 475 bp, Glycine max
  Clone ID: PAT_MRT3847_78690C.1
tcccacgcgtccgtacggctgcgagaagacgacagaagggggagagctttaccaacttcaaaacttggagcttttcatttcattgatggcgttctctctcttcatccccagccaacccttccctttggtgccaacccttcttcttctcgttctcctccacgcttctctcttggaaccctctcacggcgctagaatttccaaggatgcttcaactcggcacctgtttgagtcgaggaacactaagcaccccaacaagtgtggagagttggtggcgctgtctcagtgctcgcagaactcaaagtgcagctggtgcaccagtgaggtccttgatgacatgtgtttcaccaaatctgaggcgtggaggttgccacaacaggtttactcttgcagcttgatccggtgagatcccattatgttttgctcctatttgtcattgggatctgtgcctcccaaagctgccatttttactctcatt

SEQ ID NO: 119250 - DNA, 426 bp, Glycine max
  unsure (1)..(426): unsure at all n locations
  Clone ID: PAT_MRT3847_78691C.1
tttttatgaagaaagcattttgatttaagcggtcggggactagaaaaaacttgctaccttacaatactaatcatttacctacggcgggggttattattgcctttgaaattgacacttaagtttcaagggaaggtaagcaggttggtggaaacctggactatttatttaaggggcatattggtatagggaaaaggctaggttcattacccccagagggggggaaaggtggcctttgtggcttaatggccttccttgcacctaattcgtgtttttcctaagaccccataaaagctataggaaccgtgccctnttntacttcctttgcacgacctcgttgccaatcttgaagaagtttgttcaccgcattaaccgctgggaggatctcgaaattattgtttgtcaggtacattttgtagtacccatttt

SEQ ID NO: 119251 - DNA, 496 bp, Glycine max
  Clone ID: PAT_MRT3847_78692C.1
ggtgtggtgggtttttttttttttttttttttttttttttttttttttttttttcgcaaaaccctttgggcattgaattcaacaaggggggggaacaaaccccaaacactttggtgccccccctccatttcccctacaaagggggagcccccctttttggggggggggaaaaaacctccctttttcttaaaacccaaggtttgacaacaaagggaagcgcccaaccctacctgggcgggagggcccaacctcattaaataaaaccccccatttaacccccttcccaacaacaaattaaggccccctcaaatttaaaaatgacccatcatccggttgccgttgttcctcccactgtttttttttttaaaaccctggcctccccctttgcttccctgggggcgggttcccttgggtcccttggagctggcccccttgcatcccttggaggggccccccttgggccctgggccttggcttgaaaatcccgcccaacccc

SEQ ID NO: 119252 - DNA, 1141 bp, Glycine max
  Clone ID: PAT_MRT3847_78693C.1
ggctcgagctgcaatattgtgcacatgatgggatgtttgactgcttacacatgtgctcagatgcgcatgaatgcgtttagtagaaaatgtcctgttaggtagtcatcagcaactgtcttctctgggttccatgccctcgttggcatgcaccataggatgccgagtaaatgctgatgcagataattgcagtttctcagtattctctcaatctcttgaagaaaatggtgtggtcttgcctctatgcatctgcttaccttctgtgggcctcctgtgtgataataatttctttctttagtacccaattgctttgtccggcctagggcagcacaaaatgctgcagatgaagcaaaagctagtttaggacacattgatggggatcatctcacgctcttgaatgtataccatgcctacaagcaaaataggcattgaaatcagcggacagtgttagacaacaacttgtgcgaatcatggctcggtttaacttgaagttatgcatcactgatttcaatagccgcgactactatgtcaacataagaaaagctatgctagctgggtatttcatgcaggtagctcatctggagcgtacaggacactacttgacagtgaaagacaaccaggtggtgcatttgcatccatccaattgcctggatcacaagcctgaatgggtcatttataatgaatatgttcttaccagtcggaattttattcgtactgttacagacatacgtggggaatggttggttgatgtagcaccacattactatgatttgtctaatttcccccaatgcgaggcaaagcgtgtcctcgagagactttacaagaagcgagaaaaggaaaaggaggaagccaggagccgcagatgaagtcagccatccacactatttttgcctttgggtttggatttggattggatattttgccttctgcagctgagacttctacatctgaaaggaatactgaatgtcgatagtttagttcaaaatgagctaagtttcttgtaccatttgctagagtaatagtgaacatttttttaatcaccgtccatcttctgttgtacctttagtccaaatttgtttctggattttattctcgttaaaggatagattataaatgtctggatgcctggatatactaagctggg

SEQ ID NO: 119253 - DNA, 297 bp, Glycine max
  unsure (1)..(297): unsure at all n locations
  Clone ID: PAT_MRT3847_78694C.1
gcacgcacgcntacgtaagctcggaattcggctcgagntttgcctaatagtntcttactatttccatgcccctcacagaanaaaactatcatctgcaaaacaaatattctccatattttngggggatggtgttcctcagattatttcagtggngacacactgaaatgagtatgtnactgaagatttaaaaggcactcgatgctagccacaggggctcttccaagaggcagtagagacacagattatacattgcaaatgaaacaacctttgtcccccccaccccccatattagtnngg

SEQ ID NO: 119254 - DNA, 323 bp, Glycine max
  Clone ID: PAT_MRT3847_78695C.1
agattaggtcgttaactctcatcgtcacaaatgaaactctctgtaatcactctctagtatctacaaaatgcgaaagggcttttttcactattaggcggggcttatttttctatattaattcatttattgaccatctctacttattaatctcctaacttgtcctacatactaatacattatgaacacgcccccttcatttccacagaccaaaacaatacacactagttctacaaatctcttttggcttacaatatgacattgttgtataccatataccctatactacttacactgatgtatagcatcacgtaaagatacccata

SEQ ID NO: 119255 - DNA, 1009 bp, Glycine max
  Clone ID: PAT_MRT3847_78696C.1
gctcgttgtcagtcctgaattcaactgttcaaatgagattctgtccgtttctgccatgctttcagtacccaattgctttgtccggcctagggaggcacaaaaagctgcggatgaagctaaagctaggttcgggcacattgatggagatcatctcacactgttgaatgtctatcatgcgtacaagcaaaataatgaggatccctcttggtgctacgataactttgttaatcatagggcattgaaatcagctgataatgttagacaacaattagtgcgtatcatgtcccggtttaatctgaagctatgcagcactgactttaatagccgcgactactatgtcaacataagaaaagctatgctagctgggtatttcatgcaggtagctcatctggagcgtacaggacactacttgacagtgaaagacaaccaggtggtgcatttgcatccatccaattgcctggatcacaagcctgaatgggtcatatataatgaatatgttcttactagtcggaattttattcgaactgtgacagatatacgtggagaatggttagtggatgtagccccacattactatgatttgtcgaattttccccaatgtgaagctaagcgtgttcttgagaggctttacaagaagcgagagaaggaaaaggaggaagccaggagtcgtaaatgaagtcccctaccatccatgcctttttttgcctttagattggaattggatatttagtctcctgtaatttgacatcgtaattttgtcaggagaaggtttccgaatgtgagtgttttattacctctgaagtctgaaggacctattgatagttaattttagtgagaaataggctgtgttttttttttttttttttccatatatataacataggctgtgtttcttgcactatttattagtgtattagtaacgttttatattcgtcgactttttgctgttataccttcggaggccttatcattgcattttctaataaaatatgttctgttctataatcat

SEQ ID NO: 119256 - DNA, 3973 bp, Glycine max
  Clone ID: PAT_MRT3847_78697C.1
ccacgcgtccggcaaggccttactcccaaggtacttcgagattttggagaagagaaagaccctccccgtttggcaccagaaagaagagtttttgcaagttctcaaagataaccagactttgattctcgtcggtgaaactggtagtggcaaaaccactcaggtttgtttcgttcaactcatgttttatgtttttattttttgtttttccagagattggttttatttagtttcaataatatgttttgtagcgtgttttagggcatttttttataaaaaaaatcatttggatacacaaatgttacgatgatagatgtgtcttatctaggttacaccatgtgtgtatgtctctaatttatgaaaagattatgctttttttttcttggggttacaatgcatttaccgttaaatttagcccggctctcaaacagtttctaggagcttccaccgagagctgccgatttattaattacggaatttgcgatcacgatattaatattagggttttgatgggtacggagcggaagaggaaggtgagcttgttcgacgtagtggacgacgctgccgccaagatgtccaaatcaaacggcggcgccgtcgccgccaacaacctcattaaccggtggaacgggaagccttattcgcagaggtaccacgacattttggagaagaggaaaaccctaccggtgtggcaccagaaggaggagttcttgcaggctttgaaggataaccagactctcattctcgttggcgaaaccggtagcggcaaaaccactcagattcctcagtttgttttggaagctgtggatatagaaaccactgataaacgtaggaagatgatgattgcgtgtactcagcctcgtagagtggctgcaatgtctgtttccaggcgtgtggctgaggagatggatgtgagtattggggaagaggttggctacagcatcagatttgaggattgcagtagtgccaggacagttttgaagtatcttacggatggtatgcttttgagagaggcaatgacggatccgctattggagcgatacaaagtaattattctggatgaagcacatgagaggactttggctactgatgtgctatttggccttctgaaggaagtgcttaaaaatcgacctgacatgaagttggttgttatgagtgcgactcttgaagctgaaaagtttcagggttattttttcggtgcccctctcatgaaagttcctggaaggctacatcctgttgaaattttctatacgcaggaacctgaaagggattacttggaggctggcattaggacagtggtacagatacacatgtgtgagcctccaggagatatacttgtatttctgactggagaggaagagatagaagatgcttgccgcaaaataacaaaagaaatttctaatctgggagatcaggtgggccctgttaaagttgtacccctgtattctacacttcctcctgctatgcagcagaagatttttgagccagctccacctccactgaaggagggtggacctcctggaaggaagattgtggtatcaacgaacatagcagaaacgtccttgacaattgatggtattgtttatgtcattgaccccggttttgctaagcagaaggtttataacccacgagttcgtgtggagtctttattagtgtcaccaatatcgaaagctagtgcacatcagagatcagggcgtgctggaagaactcaaccagggaagtgctttagactttacactgagaaaagtttcaataatgatctacagccacagacctatcctgaaattttgagatcaaatcttgccaacacagttcttactttgaagaaactgggtatagacgatttagtgcattttgatttcatggaccctcctgctcctgagaccttaatgcgtgcattggaagtgttgaattacttgggtgcactggatgacgatggtaacttaacaaaactgggtgagattatgagtgaatttcccttgcacgcacagatgtcctaagatgctcgttgtcagtcctgaattcaactgttcaaatgagattctgtccgtttctgccatgctttcagtacccaattgctttgtccggcctagggaggcacaaaaagctgcggatgaagctaaagctaggttcgggcacattgatggagatcatctcacactgttgaatgtctatcatgcgtacaagcaaaataatgaggatccctcttggtgctacgataactttgttaatcatagggcattgaaatcagctgataatgttagacaacaattagtgcgtatcatgtcccggtttaatctgaagctatgcagcactgactttaatagccgggactactatgtcaacataagaaaagctatgctagctgggtatttcatgcaggtagctcatctggagcgtacaggacactacttgacagtgaaagacaaccaggtggtgcatttgcatccatcaaaatgcctggatcacaagccttagtgggtcatttataatgaattatgtacttaccaaggctaatgtaattcggagttttacaggtgctgcgtgaagactgcctaggggtatgcttttgccatatcaatgagaaatgtttcaataatgaccttcagccacggacctatcctgcaagagtgagatcaaatcttgccaacacagttcttactttgaagaaactgggtatagacgatctagtgcattttgatttcatggaccctcctgctcccgagaccttaatgcgtgcattggaagtgttgaattacttgggtgcactggatgacgatggtaacttaactaaactgggtgagattatgagtgaattgcccttggaccctcagatgtcaaagatgctcgttgtcagtcctgaattcaactgttcaaatgagattctgtcagtttctgccatgctttcagtacccaattgctttgtccggcctttggaggcacaaaaagctgcggatgaagctaaagctaggttcgggcacattgatggcgttctccgccctcgggtggctcactatcctgcggacgagccaaatgctggggttcccccctggggcggggatcatctcacgctcttgaatgtataccatgcctacaagcaaaataatgaggatccatctcggtgcatgtcccggtttaatcatcagctatgcagcactgactttaatagccgtgactactatgtcaacataagaaaagctatgctagctgggaagttcatgcaggtagctcatctggagcgtacaggacactacttgacagtgaaagacaaccaggtggtgcatttgcatccatccaattgcctggaccacaagcctgaatgggtcatttataatgaatatgttcttaccagtcggaattttattcgtactgttacagacatacgtggtgaatggttggttgatatagcaccacattactatgatttgtctaatttcccccaatgtgaggcaaaacgtgtccttgagagactttacaagaagcgagaaaaggaaaaggaggaagccaggagccgcagatgaagtcatagctgtccacactatttttgccttcggatttggattggatattttgccttctgcagctgagactttcatgattcctcgtgacacttaccttgtaatatccttcacatccgaaaggaatactgaatgtcgatagtttagttcaaaatgagcttaagttccttgtaccattgctagagtaaagtgaacacttttttaatcaccgtccttcttctgttgtacctttagtccaaatttgtttctggattttattctcgttaaaggatagattataaatgtttggatgcctggatatactaagcagtctattatgttttagttattctttctttcttttataactaatttattgttactcctattctcagttctcactacttggacatgtagccacttcccaactatcatgcagtattacctagatgtttggcctaaatatatgattttcgtgg

SEQ ID NO: 119257 - DNA, 285 bp, Glycine max
  Clone ID: PAT_MRT3847_78698C.1
tctggtaaaatttaatgtatatttgttttttgggttttctacaattgacaagtcaaactcatgacattctagatacagcaagtgtgcaaccgcacttagatgtaacatactgttgaggtttagatccatctccactctccaatacccaaaaaaggaaatgtcattgctatcaaaatccaatccaactctacatccggaaaattaatgagtcggataaaaaatcccaaatcaatctgaacagaaaactcatcatcgtctctgatcatgccactttctatttccctg

SEQ ID NO: 119258 - DNA, 369 bp, Glycine max
  unsure (1)..(369): unsure at all n locations
  Clone ID: PAT_MRT3847_78699C.1
actttnaatcttcttgatccttcttttttttcttgaactcaaacatgacanatcgcgcggttcttatagatttctggccaactccatttgggatgagggtcaagattgcacttgctgaaaaaggtatcaaatatgagtacaaagaagaggacttgaagaacaagagtcctcttctcctccaaatgaacccggttcacaagaagattccggttctcatccacaatggcaaacccatttgtgaatccctcattgctgttcaatacattgaagaagtttggaattacaaaaatcccttgttgccttctgacccttaccagagagctcangctagattctgggctgattattttgataaaaaaatatattatc

SEQ ID NO: 119259 - DNA, 389 bp, Glycine max
  Clone ID: PAT_MRT3847_7869C.1
aaaaaaaaaaatttttaacatggtcttattcttaaaaaacgaaaagagatttgccttgaaaattgaatatacgtcttgggaaatagagaatgaacattaaaaaatgttaaaacaccctggatttacaaacaagaatgcctcttaaaaaaaaacaggcgcaagtaaaaaaccctacagatttcttaaaaaccgctcgaagcaagcattataacatttaccgtcctactatgtgatgaaggttgtatgacctcaagaagaaagccccaaaatgagcattaagcccgggaaccagagagggtcccactgcttatttagaaaaaacatatacccccactataggcgtaacttacaaaaaaatctggagacctgcccccatagagggaggaccc

SEQ ID NO: 119260 - DNA, 122 bp, Glycine max
  Clone ID: PAT_MRT3847_786C.1
tccctccatgaaccacttttgcttctgctctcagcaacacctcaaagacctttctccctcactcaattcctaaatgctaatcccccctttacaaaccaaatcccgatggccatgccaaaccc

SEQ ID NO: 119261 - DNA, 406 bp, Glycine max
  Clone ID: PAT_MRT3847_78700C.1
acctcaaacaatttttcaaaccacaacgattgcattggaggggcttaaacaacatgctgcaggataacaagccacatccaacaaaacaaattcataatgcgctcatgagggagacatgtctgatgtcccaaatagtgtcgagccctatgctaagaacaatgggcatgagccggcatgcaggccttctgactctaacatccgactacgtaacgcagcatctatagctgctactgtttacacttcaacaccaactgaacctcacaatgttccaagtcaagccttacatagtgatgctaaactacctgatgacatcaaagtcaagctagctgctaagaagacttgatttatgatgagcttatcatattccagagaggaagaatatcatgattgtatcatacataagact

SEQ ID NO: 119262 - DNA, 423 bp, Glycine max
  unsure (1)..(423): unsure at all n locations
  Clone ID: PAT_MRT3847_78701C.1
cccacgcgtncggttcgattcttcaaaaaaaaaaaaaaaaaaaaaaaaaaaaaaaaagagnnttnaaatagggggggcctttttaaaggacccagggtgcgccccggggcgaaccctcctatttaccttctttatagggccccctaatgtgtttttttaggccgtgtttttaacaaaaattgggtgggggaaacccttcgttttccccaattgaaaaaacctttttaaaccccccttttttctaggtgggagacatcccaaaggggcccgttaaaaaggtttttacaaacagttggaacacctttttgccctatgggccccccttttaaacgactttttaaggggggttttcttggggttaacccccagggtggcggtttttttaacccccccttaaacgccccccccttccctttttttccc

SEQ ID NO: 119263 - DNA, 394 bp, Glycine max
  Clone ID: PAT_MRT3847_78702C.1
gcgcacgacgcacggatccttatagcggcgcccccaccgtcggattctggattttcattattaaacagttatcaagaaggcacaacgatttgtttaataaaaacctaataaaaaaaaaaaaaagaaaccataataaaaaaaagtaaaaaaaggaaaacaaaaatgccgggggcggggggtaaaaggaaaacctacgaccctgcagcaccaaattcttttaatggggcacttaaaaaaacccgtgccgggtttaacaccgttccggcgggaaaaaccttgcgtaccaattttaaatccttgaagaccacccccttaaccaaagcgcgtagccaaaaggacgccccaaccccctttccaaacagtggcccaccttcaatgaaaaagggacaaaccc

SEQ ID NO: 119264 - DNA, 536 bp, Glycine max
  Clone ID: PAT_MRT3847_78703C.1
ctcaaatagtttgctcaaaagattccattgaggaactttacctatgcttttataagaactttcagccacgagattgtgctcttggatctgacattaaaatcgacatggttacttcaaaaaaatcttgtcccaaatatgttagcttgccagaatctgtatcagtggggtacaatggacttcaaagtcgggtctctgatgatgtagctctttaaggttatggcactgtgcttctatttgtaaatatctgtaccttgcgaacgagcaaagccgcacgaataaagttattaggatgtggtaccatttatcaattagtgataaatgaatatagtgaagagctggacatttgaattgggatctagacctgctaaagtttagccagaaaaaatggttgaaagtattatttgggaattgggagctggtgccatgtatttggagtctgggttttatcattttctttattattggaagaatgtacaactgtataatggaatacgttgttgtatcacgtggaattatgaaaatatgtacctttcctt

SEQ ID NO: 119265 - DNA, 187 bp, Glycine max
  Clone ID: PAT_MRT3847_78704C.1
tcggagcgagaggcatatcataacataagaccacatagctgtgttgcgcgttgaagagcgggtaggtagaagatgtcgggtatgggagatgggtacgttggcacacgccaagactcagttaggattcgacggttggggatgcatagagaagctgatcgtcgcagaatccaagagctgaaaaccaagt

SEQ ID NO: 119266 - DNA, 341 bp, Glycine max
  Clone ID: PAT_MRT3847_78705C.1
ttttgttgttttgggtagatgatactggaggataatacaatagcaggcctaaaataatcacgatattaacacatacagacaagaaattggacgatgatccacttgaatcaccatctgggaacgacaggtgatataactgactgccatgcacatatttaaacgaagacaatatcgctacatgtggatattaaacaaacaaaactattaggatgctcttgttcaggactcttctgaccatagatacagggattcctaaacattcacaacatacataaattctacccatgcatcatagactatgaggccagagatgcatataggggccagaaaagacgaaactc

SEQ ID NO: 119267 - DNA, 237 bp, Glycine max
  unsure (1)..(237): unsure at all n locations
  Clone ID: PAT_MRT3847_78706C.1
ttgcaacacaaaagtggaaagaatgagagacacaaaactanntgaagtagtattcttgctactcttcacnttaattnntgcatcnagatttacgnaaggtcatcgtcatgtcacactnnnctacntganttcttcatntcatatgagttccattcaattctcaccttattntcacctagtttcttctactctctctccttttntgattttggatcttcgtctcatactanagngtcc

SEQ ID NO: 119268 - DNA, 380 bp, Glycine max
  Clone ID: PAT_MRT3847_78707C.1
aacttgccaaggtgatgaactggtgatggctggcagccaatttttcataatgctagttttcttgtagcactggtgggaatcttgccagaggacatgttttttcataatattctgcctcccatccccctcaaattttggtgaatcatataataatctgttaggttcctcttcttaagaattccaattttcatgcatcttattaaatcagaatcaataactaatttgtttcaccggatgcattcatttatttgaagaattgtgcaatattgaagttttgttcttctgttggcccaaatgtgaagtggcattgctttgcatttctcattgagactagtggcttttgtttatcagggcgttctcgatctcgctcaattaccaga

SEQ ID NO: 119269 - DNA, 814 bp, Glycine max
  Clone ID: PAT_MRT3847_78708C.1
ggttttcatgggtctatggagtctggtttgatcaaggatttgcctgaaatccaccaagaacgaacatcaacattgcattcctcttcaactccaagtggttccttaaatggcatggttaatgagcagcatgtgaatcttgaaagaatatcatccacaggttcggatgacgagtctgccagctcagatgaagggagtgtggattcagttgaccaatcattaatgtcaccatctacaagggaatcctccaatgccttaagctcagaacaatctcaaactgatgttagaactacttctcataacaatactcctctgctatcaaccagttcagtccacagtcaagatgcttctggagaattgaattcagggccagatgctgttgccatgccaactcgtcatagagaacctgagttttcaccccaattggcggtgccaaggtctcgaagccaaactttatggcaaaggtcatctgagtggcttgttcctagggtagtgtctaatcctatcgaaacaagagctgatctttctgctgctgaaacccaggttcggaaattattggagcagttaaagagcgattctgttgattctaagagagaggcaacagcagaactccgccttcttgctaaggaaaatatggataaccgaattgtgatctcaaattgtggagccattagcttaatagttgatttactgcaatcaaccgatactaggatccaggaaaattctgttacaacactccttaacttatcaatcaatgataacaacaaagctgctattgcaaattctggtgcaattgaacctttgattcatgtccttc

SEQ ID NO: 119270 - DNA, 507 bp, Glycine max
  unsure (1)..(507): unsure at all n locations
  Clone ID: PAT_MRT3847_78709C.1
nccnnttatttttccttatatttggagcccgcaaggaaatctttcgggtcaagggatacaaaaggggccgagggagcacatccactttatcaccggtgaacttgggcaaacatacacaccatatgcaaaaagcagcacccgattcctttacctttctgatacccctaccgattagtaggagcgcccactctcgtagactgatggaaccaatcattcaaaatagggggaggggatgttacaacacctgggcgaccaaaaaatataggaacccccattattgctcacgaggaagtgtgaatcctatgttgtatgaccaaacaagataaaaaccttggccttgggatgtatcatcacctattgtaattatttgcatgcagggggcaacatccaatgaggaaatcaccggctgcggcatatcattctgtctcggggggagccgacactgctctgtctaagatccagggccgggcatggggatgtgagattaatcgaccccttcctccctct

SEQ ID NO: 119271 - DNA, 381 bp, Glycine max
  Clone ID: PAT_MRT3847_7870C.1
acaactacaaagggtttcaatataagctaatagcttctctagctaaactgataagagcttactctgctatacgagtatgtttaacattccccttgcagacttggtggataaaattggctaaacagcataagctcatcttgacgattatagaacctagtttgtacaactcctagtgaggacatgacgtgattagcctttaatggtttacttttgttggtttagacgtaccttagaggggaatatatgtatgtgtctatgtgacaactaggactgatggattgaatcaacttatattacattgacaccgatgcatttaatgagttaatgatgattgcttaaagattttatatgaaaatgcgatactttatctatggaaatatg

SEQ ID NO: 119272 - DNA, 281 bp, Glycine max
  Clone ID: PAT_MRT3847_78710C.1
ccgatgtgcataggttatgtcagtctttttttatcccatagacgcacccctgtattatatattgaaaaagggcggagcatgggcaataatccttgaagatcttattctgtttacctttccaccttgttcttcaaaggctattcaaggaacatttttttcaactaatgatttgaaacactttacatataagtattttatctccactccaatctttttgtccactgtgaaactctatgcgcacttctcaaagtctttctctgcattgtactcaagtcacacaa

SEQ ID NO: 119273 - DNA, 317 bp, Glycine max
  Clone ID: PAT_MRT3847_78711C.1
gagtacgcagaccgatgtacatgattcatagttacatgtgacaaagatccggccaaaattacgaggcatatatccatgcatcaaaaaggatggtaagctacgtatcccaagacaaacccctatccccgaaaattaaaataccctattatcaccacctgcacctcacagtagcaaactaccatactcaaatctgcttttcagcagtactctatcaatcaacgagctttccgctgatgaatgagacctatactcacgagggtcacaatagtctgatctcatagctgcagactctaaaacatctttttcgaactcttcta

SEQ ID NO: 119274 - DNA, 322 bp, Glycine max
  unsure (1)..(322): unsure at all n locations
  Clone ID: PAT_MRT3847_78712C.1
ggaacttcccgggtacgacaccacgcgtatcgaccgctcgtncgtcaactcgtacgtactgctgcaatgtgcccacagccgggcatcgtgggtgattgtaaggacctcgaagtctcactaacgctcagtgagccgtgatctctgataaaagcgattcctatattgagggtgcatgaccgtgtggattcgctaacactaactcgtcaatatgcgatccaatgcggcatcttacgatgcatcggtagctgatcctggaacgctatagtatggattcgtacctatacatcagataggggcatctatggattacatcgctctggct

SEQ ID NO: 119275 - DNA, 2701 bp, Glycine max
  Clone ID: PAT_MRT3847_78713C.1
gtacaagtcaatgtttagaagacgaagacgagacagtagctgaattgcacacacgagtcatgagaaagcgggatttggccattctcatgctctccgctttcgctattttcttcactcttcagcaagatggcggtatttcgttcaaagacgcatggatgcacctaaccgatgaatatccaatcaaatatgaagccgaacgccttccgccgccgctcgtcgctgatctcaacggagacggcaaaaaggaagtacttgtggctacacacgacgctaaaattcaggttttggagccccatagtaggcgtgtcgatgaaggattcagtgaggcgcgtgtgttggctgaggtgtctttgttgcctgacaaagtacgtgtgatgactgggagacgccctgttgctatggcaaccggctatattgaccgctataaaattgggcagccgcagaaacaggttttggttgtggtaacatcgggttggtacgtgatgtgttttgattccaacctccaaaagttgtggggaaaataatttacaggaggattttccacataatgctcaagatatgggaatggggcaatctctataagcaattatactctaaagcatggagatacaggattaataattgtcggtggcaggatggaaatgcagccacatatttttatggatccttttgaagaaatgggggtgggtgcaagaaaagccgagcaacatcgaagaattgctgatgtaaaggaggcttattaaaacaccggaactcagggagctgagcgcatcgcgttgaatgcctttgctggtcgaaatgcggagaattgaaggaactgatgaggaggtgctgaacagtcgcagactgttgattgtaaaatttggacagaatgtaggaaatttgatgttataatattataagggaatttatgctggccgcttcagggagaaaaaaaaaaaagcaaaccatcaaacaagcccgagacgacccaccaatcagcgaagagcgaagacactttattgaagcttgcccacggcaggcggcacaagaggaaagcttcggcgaaatctcccgggcaccctcctgaggttccctcctcacccgcctgcgctcaaccttgccgcctgcccagggctcttccgtcttatcgcgacgcagctctggaagccctgctagacccgcgcgtccggcaaaatctaagaagcaccttccttacgttcccaccataaccaactacactcaagtttggtgggttcctaatgttgttgtggctcatcagaaggagggcatagaagctcttcatttggcatctggtcgaacaatatgcaagcttcatctccaggaaggtggtctacatgctgatattaatggtgatggagttctagatcatgtgcaggctgttggaggaaatggtgctgagcagactgtagttagtgggtccatggaagtgctacgtccttgttgggctattgcaacgtctggtgtaccaatacgtgaacaactcttcaatgtatctatttgtcattatacccattttaacttattccagcatggagaactatatagaagctacagtcaaggttcagatattgcttctttagaggtagcaacacctattctaattcctagaagtgacggtcataggcatcggaagggaagccatggtgatgttatcttcttgacaaatcgtggagagattacatcatactcccctggcttgcatggtcatgatgctatttggcagtggcaacaatcaactggtgttacatggtcaaatctaccttccccatcaggagtgatggaaggtggtggtctggtgattcccacactaaagcctctttccttgcggttgcatgataatcaggaaatgatccttgcagccggggaacaagaagcagtgataatatcacctggaggtagtttattggccacaattgaactacctggtccaccaacacacgtcttaattgctgaggacttttcaaatgatgggctcactgaccttattcttgtcacctctaatggagtgtatggctttgttcagaccaggcaaccgggtgctctcttcttcagcatgttggttggctgtctcatagtcgtgatgggggttatatttgtcacccagcacttgaattccacaaaggggaagcctcgcccctcatccggttcacggtaaaaagccggaattgaaattatactcgcttaactttgcaggcactattgaagaaacagaaaacagtgagctctgcgcaaccagtggagagtcaaaagtattcaaaatgcgtagaatttaaggaaattttgaggaggtgacgaacagtcttatagactgttgattgtaaaatttggacagaatgtaggaaatttgatgttataatgtatgctgtccgcttcagggatttttgactgccgttatgaggaaagctatactgtacacacttgttacctgttcaaaattagttgatgcacaagagaaactcaccagccggtctttcctcccaaggattttcttgctttaaaggtggtatatatttcaccgtcccaaaactcctctccatgtttaggccaactgcccaagttccttatatataaatctgaatgagaataagatgttatatacagttcttgaaaaatgagtaaatgatggtttgttgagaaaaagacatttttttttataatcttgagaaaattcttgttgaaaagtgttttttttccattt

SEQ ID NO: 119276 - DNA, 396 bp, Glycine max
  Clone ID: PAT_MRT3847_78714C.1
actactactacttttaccaccttaacccaacccaaccacattatcaacatgtctgacattggacgacagtcgctcggagacaaggccggagccgccctcaagcccgactcgcagaagacctacctcgagcaggccggcgacgccatcaagggcaaggccgactccgccgcctccaccggacagccggaatcccagaagtcgtacacccagcaggccggtgacgctctctcgggcaaccagaacgagaacaagggctcgctcctcgactctgccaaggacgcccttggtatgaacaacaacaaccgagcttaagtcgatcgttatcggtccggcgccggttggttgatcggagggaaggaggaagaagacattcagtagcctttattactatgagat

SEQ ID NO: 119277 - DNA, 680 bp, Glycine max
  Clone ID: PAT_MRT3847_78715C.1
gcaaaacatgaggatgacatactaccctccatgccctcaaccagagttagttatgggcctctctgctcattctgatgcaacaggaataaccattcttaaccaaatgaatggagtgaatgggctgcaaattaagaaagatggggtttggattccagtgaacgtcatctcagaagcccttgttgtcaacattggggacattatagagattatgagcaatggggcatacaaaagtgttgagcacagggcaacagtgaattcagaaaaggaaaggatatccgttgctatgttctttctccccaagtttcaatctgagattggacctgcagttagcctcacaaacccagaacatcccccgttgttcaaaaggattgtagtagaggagtatatcaaagattacttcactcataataagttgaatggaaagtcctacttggagcatatgaggatcacagacgatgaaaaatttaccaacgcctctatctagcacctgcaacacacacacatatatatatatagtgaagggttgctaacttgttatataggtatatatgtgtgtgttgcacaatgtcagtgaaagtaaaatgtgttggggaattattattgatgaattaatatatatgtaatatgttgtcatacatgcatgtgcgcatgagtataataataaaattaagtttggctta

SEQ ID NO: 119278 - DNA, 262 bp, Glycine max
  Clone ID: PAT_MRT3847_78716C.1
aatttataaccagcttgctatgtttaagtctccctgaaaatcttgccatgggctgtcactgctattgcaccttttttttcccaccaccggtctacactctttggtataaattctgaagcacatggaatctgtcattgtggaaaacctttggcaccctgctggtcgaagagcctggatggcctcacaaaccttggttttgtggtactgttactcctcaatagatacaatgtcactggaaaagtgtatgagcctccctttggac

SEQ ID NO: 119279 - DNA, 284 bp, Glycine max
  Clone ID: PAT_MRT3847_78717C.1
atataaccggcttatgggaggacgtgttttacaaattctggactatttaccagaaaaatcttgctttgacagaagaggaaaagatggaagtgattacaaacaaaggcattcctgctgatgttcttgcaacgcgagctcatgaattcgaaaaacactgttgctccatgaatagccctcaaggactcaaatttcctggctgttgacaaagtttgtattctactaaggttaatagtctgcaaaaattattaaccttagacaaagtgccgttggttattcataaaact

SEQ ID NO: 119280 - DNA, 398 bp, Glycine max
  unsure (1)..(398): unsure at all n locations
  Clone ID: PAT_MRT3847_78718C.1
ccccgcatatagaatcgaccaccaaagncccaccncagccgcaagcggaaaagggaaacggcgacagacccaacccccgacgnagagaaaccaaaagcnccggaacaggccagagcaaacaggcgggcagaacccaaggncccagagagacaagacacacgccagaaacagacgaacaaacacccacggccaacgaaccaaaggccgaagcaaaagccgaagacccgggcgcagggacaaaggagaaagagcaaacncgcgcacagcagcgaaanggaaggaaaagcccgacaaccgcncagggancgaaaaaagaacacagcnacaacaagacacccaaagacgccaagacagaggcccgagcaaaggaacagcagcccaggacccagaaccaggac

SEQ ID NO: 119281 - DNA, 297 bp, Glycine max
  Clone ID: PAT_MRT3847_78719C.1
atcaacttgtatcttaagaactgaaatcgcacattcaccctgaacagcatttcaaattttaaaattagagatcaaaataaaacaaaaaaattacaagatataccaccataaaaaaagtatatactttttgccttgaaaacttacaagatataccaacattaaaaaaaagaaaaagtatatactatatgtacaaggtcactcccaaagtactggtttttccttaaaaacaaatggtaaatcaaaacaattaccgcaacacattactgtttccacctcccccaagtgcaaccatggcag

SEQ ID NO: 119282 - DNA, 167 bp, Glycine max
  Clone ID: PAT_MRT3847_7871C.1
ggggggggaatgcaaaccaggggtgaaagggcctgggctttattagattacatggggggaccaatatgctgaatgccacccaccgggtaaaggagattgggtacccaaatgggttgggttgggcccaaatattcaaaccctgggggttataatcaaatgcccgggga

SEQ ID NO: 119283 - DNA, 1029 bp, Glycine max
  Clone ID: PAT_MRT3847_78720C.1
ttggtatttgttacggaaagaaaatatttagctcttccaagtcatcatcagaagaaacaggattctccagtgctgggtacagagttttgctatcttcaatctcctttccattcttcatatcctccagctcagatttcagcaatccaattctctcctctaagtctgagatatgatgttttagtgcctctcgcctttgaagctcaacagatcgagccaatgcctgtcttcgtgtcaacaagtttttgggtctcacgacacgcgggctgaaatagttcttcccacgataaacaataattgtatgatggcctctggtgtccttatctacagacactagcactccaccactctcagcttccaaagatattgagatatgcttgacttgggctgaatttctcccttttacaattaactttaccaattcacgatatttccagtgtagatgcatgttttctattgtgccagcataaacatctcgcctccctagaagtaagtatggcttcatactcagaccaatcttcctaaataagaatctctcttcattagttaatgtttccaaatcactaggaatatcagctgggtccagatcacgctgaacttttgctaaagccttctcagccttcctgaattttgattttgctagagctagtttcttctcatggtgttttactaaagcagaaagtttattcatggcagaatctctgatcatgttctcaatttcttgtttacttggttggtgtccccagttggtggttgctgccctagtctcagtaagggtgccagcaattaatggcacttgagctgctttgctatttgatacagtaatagatgaggcaatttgtcgtgctttgtcttcctcatcttgttgaaggagggttagtttctgtctctcattcagagtgttggtaacaacaggaggcaagaagtcattgcctctgtaaaatacaatatattctttatttctggaaagtagagttcccccagtcaatttcctgagttcttcagccatcctgtcattacatgtattaggaa

SEQ ID NO: 119284 - DNA, 400 bp, Glycine max
  Clone ID: PAT_MRT3847_78721C.1
tccacgcgttcgaccacgcgtccgtgcggctgcgagaagacgacagatggggacagcgaaacagagagtgatttctatgagtgatcggtgttcacttgatctcatcataatagtacgcgtcgattgaagaaaatgccgatcacaatcatcgccgtaggaaggcctgaagaggcgactcaccccgacacgttgttggctgctttggctgagttcatctcaaccttcatcttcatgttcgccggctcaggctcctgcatcgcctactacaagctcaccgacaactgtgctgccacccctgccggactcatgtacgcctccatcgaccatgcattcgccctcttcgtcggcgtattcgtcggcgccaacattttcggcggccactttaaccccgtcgtcacct

SEQ ID NO: 119285 - DNA, 1197 bp, Glycine max
  Clone ID: PAT_MRT3847_78722C.1
ccacgcgtccgatgaaattgtgaatcgacgacgtattttggtgcgtgcaggtcccggtgttagaattggggtttccgtttcgattgtacctaccggccaacttagggtgcagtcactctcgatctcaccgatcaccaacgtgccttcttctcctcaggttcccttagtcaactttcggttttttgattgttgaggatggtgctggttttagccctgggggatttgcacataccccacagggcacctgatcttcctgcaaagttcaaatccatgcttgtccccggcaagatccagcacattatttgtactggaaatttgtgtattaaagaaattcgtgactacttaaagactctttgtccagacttgcatataactcgtggtgagtatgatgaagagacgaaatatccggagaccaaaatactaaccattggccaatttaagctgggactatgccatggccatcaggttattccatggggagacctagactcgctggcaatgctacagaggcagcttgatgtagacatccttgtcacaggtcacacccatcaatttacagcttacaaacacgaggggggtgtggttataaatccaggttctgcaaccggtgcctacagcagcatcacttatgatgtgaacccaagttttgtccttatggacatcgatggtctgcgagttgtggtttatgtatacgaacttattgatggagaggttaaggttgacaagattgattttaagaaatcatccacaagccactctgctcattaaacactgggattttggtctactctcttttctctttctcttatttggctgtttagttttctttttcctccttcaaacttttcaagggtactgtttttagttttattttgctttgtatgtacacttgtatttggccatatcataggattcttaggatttggttaatatgtgatctgcgccaaacgtaatgactgattgatcacaatggctttgtgttattactccttttaccagttatttacccagagatgatatgcagcaaaaagaaaattttattgtaaaaacgtaggaattaagttgggaattgatcacaaaaattggagagggatacaagtggattattgtatttgtgcttgtcaaagtaattaaaaaagaaatagaagcaaaagaaccaattattttacccttgaatagaaatctcttaattttttt

SEQ ID NO: 119286 - DNA, 529 bp, Glycine max
  Clone ID: PAT_MRT3847_78723C.1
tataatcatttttggatttgtatattacttatcaaaaatttataagtttctttttttagttagtatttcactaggttttaaaataatagattgatcaaatacgtttttaaacaaacttttaaataggctcataggctaagcgaaacttttatgtaagccgagtcgagcctttgataaaagcctatgacagagaatgagtcaaactgaagtcttacctattcaactcaagtcaagtaaaacttggcttgctcggttcatttccacccctactcatgacatataaatttcaaatccttcaactacacacaaaaatgagagaaagaaaatcataacaataaaaaacaaaagaaaattaataaaaggcaaaattaattttaaaaattaattaaaaatataaataaaaaaaacacacaagaagacaaataaaaagtttataaaatatgaaatattttctaactttatctattccattcatcttctattctcttttcatataaaaactttgtcaacgcaaatattatatatattt

SEQ ID NO: 119287 - DNA, 536 bp, Glycine max
  Clone ID: PAT_MRT3847_78724C.1
accagagtcctgtcacccaagacggccgcgaagtatgctgggtaatgggttagctctgcggtgaccagccaagctggctaggctgggacgtgcgccgaatgcgcggcgcgccaacccgctgttaataatgttgggcagaatgaggctgctcataaactgacgactgcaacggtggcacaccaataaaggattgccgctaagaggtattgtgggtgcgccaccgctgcataggccgtacctaagactaaaacatatttctaggttttgccgggtagggatgccaacggtaaaccggcctggcagccgttactaaatacggaagcacacagggcctaaagctggctggcacggaacgccgaataagctaagaagacgtagccagcagctacagagtaaaggcctgcgatcagtgaggggcgggctactgcacccgatgctgccgtacttcgcgataatggcttcgacatgcgggtgctagcaaacgagggatctacagcgatgacattaatggaggccacgtggataataacgtataa

SEQ ID NO: 119288 - DNA, 373 bp, Glycine max
  Clone ID: PAT_MRT3847_78725C.1
ggacgtattttggggtttgggtttgggtttggattgtaccggccaacttagggtggactcactctcgatctcaccgatcaccaaccaacgtggcttcttctcctcaggttctctaagtcaactttcagtttttgattgttgaggatggtgctggttttggccctgggggatttgcacataccccacagggctcctgatcttcctgctaagttcaaatccatgcttgtccctggcaagatccagcacataatttgtactggaaatttatgtattaaagaaattcatgactacgtaaagactctttgtccagacttgcatataactcgtggtgagtatgatgaagagacaaaatatccggagaccaaaacactaa

SEQ ID NO: 119289 - DNA, 1127 bp, Glycine max
  Clone ID: PAT_MRT3847_78726C.1
ttacggctgcgagaagacgacagaagggggggtttgggtttggattgtaccggccaacttagggtggactcactctcgatctcaccgatcaccaaccaacgtggcttcttctcctcaggtaaatggaaaattggtgaagcgggctattttgtataaattggaggaaatgttttaattttgtttctcaagttcagcttcttgctgtacaagtaatagactattattagacttgccagaaatcaccaactgggttgctctttctaaccaggttctctaagtcaactttcagtttttgattgttgaggatggtgctggttttggccctgggggatttgcacataccccacagggctcctgatcttcctgctaagttcaaatccatgcttgtccctggcaagatccagcacataatttgtactggaaatttatgtattaaagaaattcatgactacttaaagactctttgtccagacttgcatataactcgtggtgagtatgatgaagagacaaaatatccggagaccaaaacactaaccattggccaatttaagctgggactatgccatggtcatcaggttattccatggggagacctagactcactggcaatgctacagaggcagctcgatgtagacatccttgtcacaggtcacacccatcaatttacagcttacaaacacgagggaggtgtggttataaatccaggttctgcaacaggtgcctacagcagcatcacttatgatgtgaacccaagctttgtccttatggacatcgatggtctgcgagttgtggtttatgtatacgaacatattgatggagaggttaaggttgacaagaatgattttaagaaaacatccacaagccactctgctcattaaacactagggttttggtcctactcttgtttgtctttctctttcttgtttagttgtttagttttctttttcctccttcaaactctccaagggtgtactggtgttagtttttattttgctttgcatgtacacttgtatttggccatatcataggattcttaggatttggttaatttgtgatatgcgccaaacgtaatgactgattgatcaaatggctttgtgtattactccttttaccagttatttacccag

SEQ ID NO: 119290 - DNA, 402 bp, Glycine max
  Clone ID: PAT_MRT3847_78727C.1
cgcgtggggttcccaggagctattgttttgtaaatccacacaattctttcgtgttaaataggtggatggggaaactgactttcccccaaggtccattcccgaagttgtaaaagaatgcctcttattatagggggaggagctggtgcaaagaatgctattctcatgaatatgccaaatgctgttctttcaatgtggagatattgcgttggagacctagtctttgaagtttttaagatgactactccctacattaaatgtacagtctctttcttgattagcatttggaaatttggctgatgacaccattaattatgaggctatttcccaccaagcttggtgcaattaggagagattcatgaaaaagttgtatttgaaattttcacaagaggaatttctttcaga

SEQ ID NO: 119291 - DNA, 579 bp, Glycine max
  Clone ID: PAT_MRT3847_78728C.1
atctaacaacattctatatatagctttcctttattatgaagatatggcatagcagtaaggttttaaattgcgatcacaattaccttgagtagtggtaatttaaattagtagagatgagtttggtcactacgcttaatgctcggtaacaaaaaattcaaaacaacttaactgctgaggcatgaagactactcagggaaaggtttgctaccgagcacttgcagggtggtgatgatcgagcttaattattatatcaatagaggtttggagtagtttgcttttggtttaattaataacatgtggctgcctcaagtgatgaagtagatgaattttcttctcatatagcaacagagagtagtagtgttatgtcatgtttagttttttgtagcctcttcaatatggaggaaatttatccgcttcatcactgaatggtaaacctcattctagctataggactttatagcatgtaaagtcttgttaaaatctttgtgacgctttgatgtgaatttgcggttataaatggatagccaatgtgttttattaaaaaaaaaataaaagggcggacgctcctcgagccgaatt

SEQ ID NO: 119292 - DNA, 493 bp, Glycine max
  unsure (1)..(493): unsure at all n locations
  Clone ID: PAT_MRT3847_78729C.1
caggttaagggctnntttatnaaaaaaaacacacacttcacacatgattacgacaattaaaagaggcgcggaatttttcagataggcagatcctactcaacaagagggtcctgcctaatttcctttattgatttaaacaaaccaacaagctttttgaaaacagggatgtccagatcatgcagaggattccgcattttaagaagatctggcagtagcctgtggaacaaaaaaagctggcataaaattattaccagctatttcaaaatctagagagattcccaagagaatatcaaaaactgtagactgtttgggattgtcaataaggaaactcaaacgccatgaagtttgatttgcccactcaaaactccacatttcaaaaccattattaggaccacatacctctattgggaagattaattcccaagaatgtggttctgattttgtccactcacatgcatcaaaatgctctctactgctgctgttagttaaaaac

SEQ ID NO: 119293 - DNA, 401 bp, Glycine max
  unsure (1)..(401): unsure at all n locations
  Clone ID: PAT_MRT3847_7872C.1
ggtggtgtgggaaaagaagtgcattgattgaggcttaggttatgtataccattcctttaattccacctgtgcaaatatgggataatcattttggcttatgtttcttttatgttagttctttgtgcttctgtggttttttcatacaaagctattcttctagtacagcagagaggctctgggaaagagtgaatccaatggaaaaaaaattgattagaatgggtggaggatgactttanaaaactttgggggaacattctgctctaataagtagttttagtgtgatttttagttggtttttgagaaagtccaatggagttaattgatccttgttgccaaccccatttattgggataggcatcgactgatttggtgtgagtaatgggacacactggggatcaaaa

SEQ ID NO: 119294 - DNA, 385 bp, Glycine max
  Clone ID: PAT_MRT3847_78730C.1
aaaaaaaatcggccctggggttgggcaattatcaccccaaagggtatatataaaacaaaaggaccttcctggtgaaaaaaacaaagcttgaaggaggggtgaggggctaaactctaaaaaaagtttatgaaaaaaaagcaaaggctaaaaaggaaggggaagaaaaaaaaaaaaaaacgggcatcatgcctaaaaccaaattagggtcttggaggggggtttttcttttaaactttcctttcttttcaaacactttgggcattggaagcgacttaacttgaaagcatcaggggggccaccttgcccatggcattttgaagcaactccattggataacacccagggccatggcatccaactacccctgggggaatatttattcccc

SEQ ID NO: 119295 - DNA, 419 bp, Glycine max
  Clone ID: PAT_MRT3847_78731C.1
aaaaataacacccccttcacacattattacgacaattaaaagagggggggaaattttcaaataggcagagcatactcaacaagaggggcatgcctaatttcctttattgaattaaataaacgaacaagcgaaagaaaacacaatttccaaatcatgcagaggattccccattttcaaaaaatctggcagtaccctggggaacaaaaaaagctggcataagagttttaccagcattttcaaaatcttgagagattcccaagagaatatcaaaaactgtaaactgtttgggattgtcaataaggaaactcaaatgccctgaagtttgatttgcccactcaaaactccccatttcaaaaccattattaggaccacctaccttttttgggaaaatcaattcccaagaaaggggttctgatttt

SEQ ID NO: 119296 - DNA, 513 bp, Glycine max
  Clone ID: PAT_MRT3847_78732C.1
tttagtgttaagaccttcaaatatgacataatgggtgctggatcacattcttcagaagattatcctgaacaggaagatcaagaaaaacctcaatagattgatgccggattgagacaaagaatagatccttaatacaatgaggttcaggctcatatggaaacaaatatggttaaattgtctcttgatgatggtgaaactcctaaaggttccatgttggatcttaaaatttcttaatctaaaattgcacttcccaaaaacacagttggaggaaccattctgcgtagggagctatgggcaaattctatgacagagggcaattttagagcaagtgttgatttgcagcgcactcatcgtattaaaggaatgattaaaagggcggccacagttggtatttctgtgaatacaggtttagcattagcctgtgctatgaaaaggttctttatggggcgcgccagtctgatattacaccatctgctcacagactgtgaatatggaattcttcttgtcaaaaac

SEQ ID NO: 119297 - DNA, 371 bp, Glycine max
  Clone ID: PAT_MRT3847_78733C.1
cgttcgcgtggggtttaaaaccatgtgggtcaaatacccctaatggcacaggaggaaattctgtcttctagtgcaagtgattccagaactgcaatggtgagtaaaaatagcaagcctcaagctactgcaatgcatgtgggagctatagaaattatcattgatatgttacgcaagtcctgactgcaacataggtggtgcaatgcttttggttgatactcatcataccaatcctgaaaatgcagctcgtagtatttttgcagcgcctatcagaggcggaaggcccattcgggtgggtacatttgcgaataccatcgtgcagattgaaccacacatgaattcaaggcatcagctttagagtaccactaccaatg

SEQ ID NO: 119298 - DNA, 409 bp, Glycine max
  Clone ID: PAT_MRT3847_78734C.1
cccacgcgtgcggttcttggcgggggagatatcactggacctcattagcatactaggtatgctgacgggttaacagacaccctaccatgagctacaatgggagcaggatcacttgctgcaaagtctgaattcgaggataagtacaaggaaagtgagagcatggatgaaggcattaagctagttggtgaggcgatatgtactgacatatgtaatgacctaagaagtggaagtaatgttaataccagtgtgaaaaccaaaggacataaggaatatcttatgaaccaccttctaccaaatgctcatacctatggcaatccaaaacgctatgatacccccaaaaagacaaaagacctttcaacaaagaatgcaccggtggaagagaatgtaggagagactgaaggagatgctc

SEQ ID NO: 119299 - DNA, 497 bp, Glycine max
  Clone ID: PAT_MRT3847_78735C.1
aatttgtttttgcttggcttatgtttatgatgagtgaaaaatcatagttactggttactacccggctttgtgttgtatgaatccattgttgtgcagatattctggtgaattaatattctcaattagggtaagtagatgctttaggttaactattgttttggatgtaatattagtatgtttaaaactgtggttgcaagtttgttttcaaatgtggctgcaattgagatagtggagatctcgaaaaccatgatggtgtgggttcagttgtggtcacagagcattttttaaaaccttgaatattaatcagtgtgttgttttgttgataggaaattgggggagttaatgttttatatctggggttcatttaagagtgaaaacagtttggtgtatagtggtgtatggaaaaaggtatgtgatggcgttgatttttcattccatggtccagaatggtgtctgttatttgttttttgggcttcttaatttgaagataagttgtg

SEQ ID NO: 119300 - DNA, 440 bp, Glycine max
  Clone ID: PAT_MRT3847_78736C.1
aaaaaaaacacacacttcacacattattaccacaattaaaagagggggggaaatttttaaataggcagagcattctcaacaaggaggggcatgcctaatttcctttattgaattaaacaaaccaacaagcgaaagaaaacgcgaattccaaatcatgccgaggattccccattttcaaaaaatctggcagtagcctgtggaacaaaaaaagctggcataaaagtattaccagcaatttcaaaatcttgagagattcccaagaaaatataaaaaactgtaaactgtttgggattgtcaataaggaaactcaaatgccctgaagtttgatttgcccacttaaaactccacattttaaaaccattattaggaccacctacctttattgggaagattaattcccaagaatgggggtctgattttgtccacttacatgcatcaaa

SEQ ID NO: 119301 - DNA, 432 bp, Glycine max
  Clone ID: PAT_MRT3847_78737C.1
aaaaaaaacacacccttcacacatttttacgacaattaaaagagggggggaaattttcaaatgggcagagcttcctcaacaagaggggcaggcctaatttccttttttgaattaaacaaacgaacaagcgaaaaaaaacccaatttccaaatcatgcaaaggattccccattttcaaaaaatctggcagtaccctggggaacaaaaaaagctggcttaaaaattttacccccattttcaaaatcttgaaaaatccccaaaaaaatatcaaaaactggaaactggttgggattggcaataaggaaacccaaatgccctgaagtttgatttgcccactcaaaactccacatttcaaaaccttttttaggaccacatcccttttttgggaaaatcaattcccaaaaatggggttcccattttgcccacttacaaa

SEQ ID NO: 119302 - DNA, 491 bp, Glycine max
  Clone ID: PAT_MRT3847_78738C.1
atagtctacaacaccaggggattcggccatgggggcttattttggcaaccatacccaatatgtgcgcatatgggctcaatcctggcatttcaggttctcgtctttagggcaccattccttagtccattccacagcatactgaatggaatcaaatggcaacagtgagaacaccattgaattttgatcctagcaagcagagcttttgtcaattttctattgaccttctcggtggaggaatcttagcggacaaaactggagattggatcacacttatacaaagatgctccaattagtaacgttgttgagagttgctgcttgcaagaaaggctgtttaatggttaagattgtgatggctgggaatgcagcatgcaaaaggagtgattgtgcctcatcggcaccagtgtttttaacaaacagctacagtacagagtatgttgatgctaggtagcggacaaaacctgataccccaattcctgggaattgatcttccc

SEQ ID NO: 119303 - DNA, 1869 bp, Glycine max
  unsure (1)..(1869): unsure at all n locations
  Clone ID: PAT_MRT3847_78739C.1
gcattatttagacagacatgcgtccattaaaatgaacagaacacacaacacaacaattgcgaacaaagaaagaaccttttgcttttctttttttccctctctctctccgaaaagaactgattctctctctctctctatctctgtgccttttatcttttttctttctttcttttttaacagatcgttcttcttcttcccactcactctcactctctgtgttggtgagatgggtatgtcatggctgtgctgctgagaatggctcagcctcacaatggcaacaccaacaacacttcaaaccagcaattggtactccatgactttctgggtatgaggcccgccgccgattcccccaaaaccgccgatgtcaggttaccggagccttcggcctccgcctcttccaccggaggacgcggccccttctccgccacctccgacatcgcttccgaaaaacaggtaggaaatcatctcgagggagttccattctatggcccgaggagtgatttttctggcactgagataagcaacagattagtgggaagcaagagaagtaattctgattccacttttatgggttcctccagagatgccttccaattggtccctgattcctttcaaaactcacatttgatgaaggttctccggaatgcagctggaggagaaaggcctagaaggcccaatgatgatgcagtgttacttggtatgcagtcaatgaagccatcttcttctcagatatttcagcctcccaccagcactaagattgatgccaataaatgggaacggtctattctcatgaatgttggcccttccatgcagcatccaccgcgtggggtgcaattggcaccttttgtgcaccaaatggcttcaagcaagattagggataccaatgctggcccttcattcatttctcagtcagctgctgatgaaggttctagaactggaatcaagggccctggaattttaagttctgcagctgctacagccactgagaaaagtattccatctgctgtgatgcttggtggcagcaggccaaagcctggaactaatgtagtagaatcatccacacatccaagcagtcaacatgggctaacttctgccagccgccagatgactattttttatggaggtcaagctcatgtttttgatgatgtccaccctcataaggcagatgttataatggctttggctgggtcaaatggaggatcttggtccactgcattctctcctaaatctgttgtaaagatggttagtgatggtaacttgcatggtggagaaaatgaaacaggtctagttagtaatgtggcattcccacaggagcttcatgggaaattgtctattactggcagttctagccatgccatcgggcttggtgatcgagtaactactccagcaggggcacaccaaggaagcgtttttgcaaaagatacaagaactttggtccaaccaccagatcccagttctgaagacaaaagaccacagtgatagtagtttgaggctgaaagatttttgtcttcctatttattggaaggctcatcctgattcctgttggggtatcatccactttgacaaattttctttcaactccacccctcccaattcggtcttttcttccccttttttcaatgtatgcggggagcaagagtaggatggttgtttaaagaagcctgatagatatatcaagataatttatgaagtgacgttaggaatatctttattgcagtttctaaacagtcaacttattgagttattattaggagtagtagtagctatgctagtcttgtgcgtccatttaaacactattaaaagataccacaggatgattaaagaaggtgaaaattttagtctaaaaacaanaaaacttatatatattat

SEQ ID NO: 119304 - DNA, 307 bp, Glycine max
  Clone ID: PAT_MRT3847_7873C.1
ggccactgctaatggtgaagacacagatactatgaggcacaagattgaacaagaggcgagtatgaattggagctggacctttatagctcctccctgcgagaacaaagacattgaagcttgtgcagctactgatgatgaggcttgcatggaccctgccgtgcctgacttgcgaatggcgtgtaaactgctcttaaggtgcgtctctctaccgaatactagctgcactgtgaggaatagggcctagggatatacatttgtcatgagactagtagacctatttgattctgaggatcctagtgagcgtgaa

SEQ ID NO: 119305 - DNA, 431 bp, Glycine max
  Clone ID: PAT_MRT3847_78740C.1
aaaaaaacccccactttacacattattaccacaattaaaagagggggggaaattttaaaatagacagggcattcttaacaaggggggcatggctaatttcctttattgaattaaacaaacgaacaaacgaaagaaaacccaaattccaaatcatgccgaggattccccattttcaaaaaaactggcaatagcctgtggaacaaaaaaagctggcctaagagttttccccgcaatttcaaaatcttgggaaattcccaagagaattttaaaaactgtagactgtttgggattggcaataaggaaacttaagggccctgaaatttgatttgcccacttaaaactccacattttaaaacccttttttgggccacataccttttttgggaaaatcaattcccacgaatgggggtcccattttggccacttacatg

SEQ ID NO: 119306 - DNA, 1894 bp, Glycine max
  Clone ID: PAT_MRT3847_78741C.1
ttgtcgcgtgggcggacgcgtgggcggacgcgtgggcggacgcgtgggcggacgcgtggggttttatcaaaccgttgggccaagctaaagagtcaaacctaatatgtcatttaacaccatgggatattgctatgatgtctttgcactacatccagaaaggtctactcttcaagaagcctgcaacacttgttgatccacaagatttcatggagaatctgttagagaagctgaaacactctctttctctcaccctcttccatttctatcctttggcaggccaacttgtcacccaaaaaacccaagtccgtctcttatactgtttctgttgattgcaacaacactgatggagccagattcatctatgcaactctggatatcactatatctgacatcctctctcccgttgacgtcccactttcttatggtctcagatccgttgttcactcattgtttgaccaccacaaagcagtcaaccatgatggtcacaccatgccccttttgtccatccaagtcaccgaaatagttgatggtgttttcttaggttgttccatgaatcacgctgtcggtgatggcacctcttattggattcaagctcatgctaaagggcacgacactgatgttcccatttcacaccaacctattctcagccgctggtttccgaatgattgtgctccaccaataaatcttcctttcaaacatcatgacgagtttatcagcagaattgaagcacccttgatgagggagagagtcttccacttctcagcagagtctattgcaagactgaaagcaaaggccaacatggaatccgataccacaaaaatctcttcattccagtcactatcagcacttgtttggagatccataactcgtgcatgctccctaccatatgagcaaagaacaagttgcaggttaaccgcaaacaatcgaacaagaatggaaccacctctgcctcaggaatactttggaaactcagtgagtagggtgagtgcagaaacaacagtaggggaattacttgagaacaatctaggatgggctgcatggaagttgcacctggctgttacaaaccataacgacagagtagttctgcaatcactcaaagagtggttacagtctcctttaatctatcaacttggtcagcccatggacccgtacgttgtgttgataagtagctcgcccaggttcaacatgtatgggaacgagtttggaatggggaaagctgtagcagttagaagtggttatgccaacaaatttgatgggaaagtgacatcatacccaggtcgtgaaggaggggggagcatcgatttggaagtgggccttttacctcatataatgagcgctctggaatctgatgaggagtttatgaatgttgtctcggtttccaatcccttatgctagtttgctattgttcccactgttagtaaaaaaaaaaatcgtctattttaatattctcaagtttagagaatttatcctctatggacttgtatgatacaaatatccaacgccctgattctaatcatttgagtaatgaaaatgattttctgactcatccgatgtttcaaccgtatgctttccagcaagtcttcaaaagcatttatttaagtactgtaacttttatgtaaatgttgtagtaataataatttaaataaaacttttttaatcgatagagtctaacttaattaattgattgagcatgatatatgaattgtgttttaaagaaaatggtgtaatatttgtatctctggtggagcggtagtataaatgatgttttaagaataattttttaacggaattataacagaaaattcatgaaaaaaatgaagtgtcatgtatttaaatctactgggggaaggaagagtaatttttaactttagagggaagaacggtaaaatattca

SEQ ID NO: 119307 - DNA, 493 bp, Glycine max
  Clone ID: PAT_MRT3847_78742C.1
atgagatgattttcctgccgtccatcgtttttagagaatccttatatgttgttcagctcctccgttcaatcgtccattcgtcagatcgctttgtttgtcatatcatcgagacgtcctttgggcgaacgtcaggcacgagctttgggagtcgtgctaaaagtcgacgtgctgtcgagaggcgtctatgcgccaaggctggggaaagcgctagagtcgctgaggttaggggcgttgccgccacgaccaccgttaggagcgccagcagcagcaggagcaccacgggcttcgccgcgaccacgtccaccacgaccctcaccgtgagcgcggtcaccaccacggccacggccctcaccgccacggaaagatccacggccctcgccacggccacggtcgtcacggtcaccgcggccaccgtgcgatccaccctcacggggagggggcgcgagcatgcgcttgctgtcaagctcgacgtgaaccttctccttgcgctggc

SEQ ID NO: 119308 - DNA, 185 bp, Glycine max
  unsure (1)..(185): unsure at all n locations
  Clone ID: PAT_MRT3847_78743C.1
tacacacgtgctaacttttatctgtactttangatgtgacaactgaagatgacaagctcgtctactcctcatccatacgcaagtacttactgaacgccagtttctccgtctcaacaccaattgccttggactgcaacatagctcagtaagcaaggccaaccgaacgctctatactggtcgatggt

SEQ ID NO: 119309 - DNA, 145 bp, Glycine max
  Clone ID: PAT_MRT3847_78744C.1
agaatagctagttgaatttatttcaacctttaccaaacccaacataattgggtcatattggtaaataataaagttagtttttaatatgacccaattatgttgggtttggtaaaggttgaaataaagaatagctagttgaatttat

SEQ ID NO: 119310 - DNA, 256 bp, Glycine max
  unsure (1)..(256): unsure at all n locations
  Clone ID: PAT_MRT3847_78745C.1
aattcggctcgagcggaaattttatatgtcctccaatatnaagagagagatagatgtaaacgaaaccaatggaaaaatggggggcaccgtacaaaccaccacctacaacctacttcttactttgttacaattgccctccttgaatcctaccaagaatccttatgaatctttgctactacaccgccacaatacccctcaactactctcactcttctcttttcccgtctctttctccttctccctatcttctacctga

SEQ ID NO: 119311 - DNA, 151 bp, Glycine max
  Clone ID: PAT_MRT3847_78746C.1
atcattttgggacaagaggatcacccacgaggatcttggtgctgctctgggtgaggatcctaaaggatatgttttcaaaatctaccgtggtcgtgacaaacaaggattacctatgaagcaaggagtgctgaaccctggtagtatgcacgtt

SEQ ID NO: 119312 - DNA, 188 bp, Glycine max
  Clone ID: PAT_MRT3847_78747C.1
tgataagagcatgcggtccaaattatacaaaggaaagccggaaaaagcgcgcaacaacaaagaaaatccccgataacagaggagaaattcttcagaaccactacaaactaaaaagtagcgggccagaaacaaggggcacttaagaggaacaaacccggatgagggggagcaccaataccagggctccc

SEQ ID NO: 119313 - DNA, 219 bp, Glycine max
  Clone ID: PAT_MRT3847_78748C.1
aactcatttggtaagccgtattttgtataatatttctctgcaccaatcataagggaggcatcgcctgctgctagcattactcattcctccaccattcacttgacgggaagtggaggcatgaacaagcacagtgcgtcttctcaactgctttgcctgttaagaagacaacactatctgcgctgctcgaattgtgactgtgactcttgatacattctcaag

SEQ ID NO: 119314 - DNA, 511 bp, Glycine max
  unsure (1)..(511): unsure at all n locations
  Clone ID: PAT_MRT3847_78749C.1
ttttgattatgaatctctgaagaaactaatgtaatggcctccttcagggacctcacaaggctcttcaatggcttttccctaatcgccaaccaattcgcgaaccttctttacctaactccacaacctcagatttccaaaccctaattaagagagctctcgtctccgccaccgacctctccggcatcaccaaaggaaaggttcgccacttccccgatactcctccctcctctaccgccacacgacgccacgacgctgctgcgtctagttccgttgtttttttctccgacgacattccttcttctcaatcccattctacaccgacaacaacctctacagtaacaaatattgacgatgttgccaagtcttcttccgacgcaaatcacgattccaaaggaggagaaaagtgaggttgtgacctctgctgaaacggttaatcaagttgaaagtgaggaagtggcaccggcactggcaccttctccgcccccgttgaggaaacgaagaccgngggaga

SEQ ID NO: 119315 - DNA, 123 bp, Glycine max
  Clone ID: PAT_MRT3847_7874C.1
gttacaattcactttttcactcaactcaaacactccagtgcttacgatctgtagagcggacttcccacatagcgggttgcatttcaacagcataaccctgcgatcgaccccccgtggtaccta

SEQ ID NO: 119316 - DNA, 314 bp, Glycine max
  Clone ID: PAT_MRT3847_78750C.1
gaattaggaaggttctcctaaatttgatgcgtatggaacactagcacatgatgatgatgatgtcttgtgtgtatgggcaggttcagctcacaccaccattgactcgatatatgactaggtcctaagttttcaattgtatcacagcattctcactttcccacctctttctttggtctttccattatttgaggtgggccctttccttaaaatcacgcgtctaatattgttcctggcttaatcatgcaccgaaattgccttgtatttcctccttattacatacgcatatcccagtccctcctatataatggacgaga

SEQ ID NO: 119317 - DNA, 498 bp, Glycine max
  Clone ID: PAT_MRT3847_78751C.1
ggtgtttttttttttttttttttttttttttttttttttttttttttttttttttttttttttttttaaaaacagggaataaattgccccaatttttttttgatcgttaattcaaccctaatcaggggggccaagctaaacaacaataaaccctttaaggggttaaacaaaaaaaatttttttttaattttctccccccttttttttttttgaaaataaacccacccccaatttttacaaaaaggtaagccaggtcattctttttctctttttggaataatttttccaatgcaaacatccgaggccccttggttaagaaaaaataatggttgttttaaatgaacaattttttgggggggccaaaaaggggggaaaaagggggggggttcaatgggaaataccctacccggggattaattttttttgcccccgtgataatattcgaaaaatttatttttccccggaaaaaaaaaaatttgggggggggttttaattttt

SEQ ID NO: 119318 - DNA, 2499 bp, Glycine max
  Clone ID: PAT_MRT3847_78752C.1
gttggacttgaacaaccacacaagcaaagtgtcttctctttctcttcctttgctttgcatccttcgttaagaggatagcattggggtgaattaaaaaattcagttctgagtgactagcctgacaagaaaaggagcaaccgaagcaccatcgactttgctttgcatctatcgaattctagatccaattctctcttcatctacatatgcaatatcataatcgttcataaaattggatttgcattgatttcaaaaatgcagatcaggggatcgagtcacagactccccagtatgggcaataatcgatcccgcattccaccgcaaattgcatccgtatactttacttccactaatataattggggtagggggacgtagttatgtataccttggtcggctgaaagatggtagcaatgtggcagttaaacgactaaaagaccaaggagggccagaagcagactctgcatttttcaaggagattgaactattagctagacttcaccattgtcatttggttcctttgcttggatactgctccgagttaaaaggaaaacatgttcagagattactagtatttgactacatggccaatggaaatttgagggactgtttagatggagtttctggaaaacatatcgattgggccactcgtgttatgattgcaataggagctgcaaggggcttggagtatctccatgaagcagctgctccaagaattcttcatagagatgtcaaatcaactaacattcttctggatgaaaattggcaagcaaaaataactgatcttggcatggctaaaaacttgagatctgatgacctccccagctgttcaaattcaccagccagaatgtaggaagcaatgggttattttgcacctgagtatgccattgttggtagagcattgtcttgagtcagaggtcttgagattttggggtggttcttcttgagcttatcagtggtcggcatcccatccataaatataccgacatttggcaaagtttatataaatgaactgaactattcttcgtacctaggcccagaataataagggagttggtatcctccttattgaaaggaaacttcccagaagaagaggtgcagataatggcatacttagcaaaggagtgtttgctgctggatcctgacactcgaccaaccatgagcgaggttgttcagattcttttgagtatttccccgggaaaatctaggaggagaagaaacattccagccagcctctttcaggaaccagaggatgcacaaaagcaaaggcaagctccacctagtaaatttccaacacatagttcaatgccaatatataatgatcacaatctttctgttgagaacaaaaataaagcagaagatgcactttcagctgagtatatggagagtttgatcctcttgacttcgaaatctgatggctcttgtgcatcagaagaggaaatagtagacctgactgagcctaggtttgaatcattttgcatcacaaatggcaatgtcccatgaaaaattaacaccaggcacgggcagatgtgcagatggcagaaatctgaggagtttatgttgtgtgaactggtgatacacctctgttgcttgttctaccacccgtcactgtgcatggctctattgagatatcataagagatgctgcaattattctgttttaattatcttggtctacatgtttttttcatgttttgaaaggaaaagctcacaggtgttgtttgatgagcactgaaaagtattcgtttgtttcttgtacagaaaatcataggatgataggaaattctggttcttctttatttggagaggaaccggatgacatacacattaaattaaaggttttggtcacagaaataattgtcttacaattatatttgataccaagtcttcttgaagtagatgaaataaactttcttaataatgcacaatcatatcgttttgtgggactaaaaaactcgggagcagacgacaaacgtaattcttaggagtcatgaatggttagaaggtttgcatcctaagattttttaatatctactggaagcgaagtgattcatagagatgtctgttgaaaagttgcttctgattatagacttgatgtccatcgaacaatatagtttcattagcttatgagcacgggtggcaaggtgtgcggttgaaggtttactagcagctattactataggcatgcaacgtcgtacagcaaataaaaaaattcagcttgtcacctataaggatttttattttttttactagagctggccacctataagttggtttctatcatactctgtttctttccttcatttcatgagcgtaggggaagatgactcctgagtagaagaacttccaaaaatgtactagtgatatttataggaacgacaatctctcttgcagtaaagggaacttttgtttttgtatatgaaataggcagggaaatttgagtcgtaattatgttttattcatacaattcgcaatttgaatcatataattcatcatttgataaa

SEQ ID NO: 119319 - DNA, 1067 bp, Glycine max
  Clone ID: PAT_MRT3847_78753C.1
ttcacgctttcgcccacgcgtccgcccacgcgtccgggaaaatgcaacagaaaacttttcatcttccaacctaattggggtagggggaagtagttatgtataccttggtcggctgaaagatggtagcaatgtggcagttaaacgactaaaagaccaaggagggccagaagcagactctgcatttttcaaggaggttgtacctaatcttggaatatcagtattcttcggctggttattttatgttataatgtcccatagtttctagataaaatgatgagcctaaaacatttttattgctgtacagcattcataacaattaaccatgtttttgtttgtgcagattgaactattagctagacttcaccattgtcatttggttcctttgcttggatactgctccgagttaaaaggaaaacatgttcatttggatagaagtaaatttggaagagggaggttgaagtgttgttttcagttagcaaggggttactttctgcaaagatgagtatgccattgttggtagagcttctcttgagtcagatgtcttcagttttggggtggttcttcttgaacttataagtggtcggcatcccatccataaatctacaggcaaagaagaaagtcttgttatatgggcaacttcacgcttacaggatagtaggcgagcattaacggagttggctgatccacaattgaacgggaacttccctgaagaagagctgcagataatggcatacttagcaaaggagtgcttgctgttggatcctgacactcgaccaactatgagtgaagttgttcaaattctttcaagtatttccccgggaaaatctagaaggagaagaaccattccagtgagcccttttcaggttcttaactgcagtgttctagtttggacattgaacatgtttcttatctttcaaaatttttggttgatacttagacttattctagctgccattatagatcatcctcactttgtaatagaaacaaatcatatcctgacttttttttatgctgagcatgtaaaggaaccagaggacttggagaagcaaagacaagccccaccaagt

SEQ ID NO: 119320 - DNA, 435 bp, Glycine max
  Clone ID: PAT_MRT3847_78754C.1
aaaaaccggaacaaacaattttttttaaacacaatatcctcaagacaatagttacccccaaaaaaaaaaagcactacgttggaaccctagggggtttaaccttttttttttaaaaactcgggttttatcaaacggaaggtggggggcaaaataaatcatggacgaccagggaatccgcataaggggtggccaactttttaaaaagcagtttatttaaaggaaaacgttttttgcctgaaagagccacatcagcatcaacaaggggggggcccttttttttgaaatctccccttaaaacccccatagaattttttttttcaaccaagggggggaccactttttaaagggggcaacctcgcaaagtggggggagagccgcggggaccggggaaggggcgagagggggggggggggggggggggggggcggggggggg

SEQ ID NO: 119321 - DNA, 1146 bp, Glycine max
  Clone ID: PAT_MRT3847_78755C.1
tttggatagaagtaaatttggaagagggaggttgaagtgttgttttcagttagcaaggggttactttctgcaaagatgagtatgccattgttggtagagcttctcttgagtcagatgtcttcagttttggggtggttcttcttgaacttatcagtggtcgccatcccatccataaatctactggcaaagaagaaagccttgttatatgggctactcctcgcttacaggatagtaggcgagtaataagggagttggttgatccacaattgaaaggaaacttcccagaagaagaggtgcagataatggcatacttagcgaaggagtgtttgctgctggatcctgacactcgaccaaccatgagcgaggtcgttcagattcttttgagtatttccccgggaaaatctaggaggagaagaaacattccagccagcctctttcaggaaccagaggatgcagaaaagcaaaggcaatctacacccagtaaatttccaacacatagttcattgccaatatataatgatcacaatctttctgttgagaacaaaaacaaagcagaagatgcagtttcagctgagaatatggagagtttgatgctctttacttcgaaatctgacggttcgcgtgcatcagaagaggaaatagtagacctgactgagcctaggtttgaatcattttgcatcacaaatggcaatgccccatgaaaaatatacacccggcacgggcagagagatgcagatggcagaagcctgaggagtttatgttgtgtgaactggtggtacacctctgttgcttgttctaccacccgtcactgtgcatggctctatgagatatcataagagatgctgcaattattctgttttaattatcttggtctacatgtttttttcatgttttgaaaggaaaagctcacaggtgttgtttgatgagcactgaaaagtattcgtttgtttcttgtacagaaaatcataggatgataggaaattctggttcttctttatttggagaggaaccggatgacatacacattaaattaaaggttttggtcacagaaataattgtcttacaattatatttgataccaagtcttcttgaagtagatgaaataaactttcttaataatgcacaatcatatctttttgtgggact

SEQ ID NO: 119322 - DNA, 148 bp, Glycine max
  Clone ID: PAT_MRT3847_78756C.1
cgttgtctcctttaaataaatggatagatataggacgcgcgtgttatttacgagggcggctccctatatcccctctattatctcaagggcttgctcaattttgccgattcacaatacatgtctgtactttcttattacccccccaaaa

SEQ ID NO: 119323 - DNA, 394 bp, Glycine max
  unsure (1)..(394): unsure at all n locations
  Clone ID: PAT_MRT3847_78757C.1
cttcgcttccgatttcattggtttatttatttatctgtggggcaattttttactacacaggttcgcaattctcaatctttgctttatttattgcctattcatgtagaattaattttctgccatcgtaacttttgaaactcccttttaatcggtttgaatgttaattgtttcttttttgaatttaacgacttggatggtgtaataatcgatgagatactcaaactgagatgtattaaattaaatgatttgttcttggtgtatttatgctgcttattatgatatgggctatgataatatatggctaataattgttctggtttgagctacagcacanattgtgagaggtcatcgtgacaaactccagcagttcttaacaataactggagccagcgag

SEQ ID NO: 119324 - DNA, 1075 bp, Glycine max
  Clone ID: PAT_MRT3847_78758C.1
agtgcggggcgagaaaaaaaaagtcactagcgcacgggattttggttggtaatcaaagggagaagaccattttaggtcgtggtttcctttccttcttttttgttcatttggtgacaattctgtattgttcagatattgtccggtccaaagacctctctgcacatttcttctgtttttctttcgatccttgatcaggagctttctttccttcttttcttttcctttttctttctcccattctttgattgggaattttctttctcttccttttgctttctcccactctttgattgggaatttcctttcttttcttttttgctttctctttgattggaaattttccttctcttccttttagctttctctttgattggaaactttccttcttttcctttttgcttccgagggtaaggattacggtgagttaggattttggctcaaggtttgtagagtggctagacatgatacatgtcggggtttggtttggctcaaggataaaagggatgccccacattatttccataacacaaatgcaaaaatgatgatttggaaactttatgcaaaactggtcatgcatgcatctacgcagacactcaaatatcaactttttttggtcatgtgacactaggactcaggattcattttccctacttaagtcaacctagtgtttccaaaatatgttttttatcaactcatgcattcatccgagtccattttgggcgttcgggaaaattttcacagtactcacccttcaggtgtatacacattttttttcaaaaactggttatgatcagtaaatttttcaaagaaaagctggaagttatctcttttcacaagcatgttgttttttagctagacaacctttattattttttattttctattttttttcttccttcttattcttttcttgctcgctctctttttgctctcttttttcccatgaggtattttgctacctaaacatacatatatttttgtgaagtattttgctatatacatgcgtgtcccaggtatcttgctacctaaacatacatatatatgttttgtgagatatttttgctatatacatgaa

SEQ ID NO: 119325 - DNA, 692 bp, Glycine max
  unsure (1)..(692): unsure at all n locations
  Clone ID: PAT_MRT3847_78759C.1
tnataattttaatgtaannnnncattttttttaaaagggtnnnaattgattgaaaggattttagaaatttgtagttatgtcatattacaaagtaaaagtgatttaactgtatatttctatacataaatttcaactattatccaaatgtacaaaattatacaaaatgatttaattaaatttgtccttacctcgcaatgctaaggacttcctctgcattgaagggggaaatcgtccaaccacgaatcatccataagtgggggtgaagattctatttcagagggccattcacagctacaatctatttcatcaaagatgataggttcagattttgcttctctacgtttgaaaatggtttgtaaccaaagattgctatgcacaaaaaccaactcgctgaatttttccagctccactctgttacgttttctgttatgtatactctcgaaagtgctccagttccacctgtaccaaagggaactacaaggttggctaagtattcgcactgcagctttctggagtgtggggatttcataaccataactggcccaccagtcgccaggggcattcagtgttcttcccaagacagcaaagtcagccccaagtgcaccttgggngntgatgtaagtaggnngctctttggtgatttccattttgtctttatcagctattgccaacctgagcatggcttcttgaac

SEQ ID NO: 119326 - DNA, 594 bp, Glycine max
  Clone ID: PAT_MRT3847_7875C.1
ggttgcgtgggccccgcatagctcgtgccatatatgcaccgccggggatgattcgcaggcgctgatttgggacctttcttccatgggtcaacccgtggagggcgggcttgacccgattcttgcgtacactgcgggtgcggagattgagcagcttcagtggtcgtcttcgcagcctgattgggtcgctattgctttctccaccaagcttcagattcttagggtttgaaattttattaatgattactcatcacttctgcttctgttccctgtatgtgcatgcgaaaattggggatacttcagatttgaagacacagttgtattgttgtgtcttttattgttgaaaccaatgttaaccttggtaatttctggctttgggacgaaagtagttttgattagggtttagggcgtaaaactagccttagtttgtttctgctaagttagtctgcaagtattttaaagaaattttccgtcacatcaatattggcttcaatgtcgaggtttttggattatctgtggctgcattgtgaaggattgaggcgaaactgcgactgatattttgcaagttcgccgcaattgcgggaaattgtggacaaa

SEQ ID NO: 119327 - DNA, 486 bp, Glycine max
  unsure (1)..(486): unsure at all n locations
  Clone ID: PAT_MRT3847_78760C.1
atatcagtgcaagcctcagactatgccccgccactggtntatggatcttttcataatgactgttttttatttaaggggcttatctttggcattcggtaacttttggatgcctggtatgtggagatgccactgaatcatataatgacaagtacttctttctgggttgttatcacgttattttctcttgggcagctatggccactaagactgagggaaaagtatgtggtggtagggtgcaccttaaagttgtgacctcattgatgtggtgaattgaacaacggaattgagtacagactatcatgttgtttataaaagttcaattctatttctatcccattttaaaatgcacaattccttagtagtgctaatatgtagatgatcatggcttaaacttttagaatatgaattgtatgtatgattagtctgaaaagtcattctttgaattcacatatacatatacgctgcatatcaatttcttgtccnggg

SEQ ID NO: 119328 - DNA, 768 bp, Glycine max
  Clone ID: PAT_MRT3847_78761C.1
cccacgcgtccgtacgtgctccgccaaggcttcagaagggggataacaccataccactagacaacgtgtttttctactagagatctcttttctctagctagtgtaatatcattaatcaatggctggcactatctttggataccctttcagacacttcatctggggtcacccaccaattttcaaagaatggtccggctcaacagccctcttagattggctcgaatcacccactgcccacatcttaaaaattaacgttccaggattcagcaaggaagacataaaggtgcagattgaggatgggaatattcttcacatcaaaggggaagtttggagagaggagcctcaagcaaaggagaaggatactgtttggcatgtggctgagagaggcactgggaagggagggttctcaagggaaattgaattgccagagaatgtgaaggtggatcagattaaggcacaggtggagaatggagtcctcactatagttgtgcctaaagatgcaacacccaaaacgcctaaagtgagaaacattaacatcactagcaggctttaaggttttgaaatctagaatatgtttctatgaataataattgagaacaagaaaaaaaaaaatgtgttaatgatgtactaaggaataagacaatatcggttcttttgtatgtgtgtgtgtgtatagtgtcccctctttgattgatatgaaccttgtgtaaatttcatgttactttgttgaaaccttgctaaataaaccaagagcttgcacttgtctaa

SEQ ID NO: 119329 - DNA, 321 bp, Glycine max
  unsure (1)..(321): unsure at all n locations
  Clone ID: PAT_MRT3847_78762C.1
cctcnaaaanaangggggaaactttcaaagggaagggggggnngaacaaaacaaaccaagcgggggggacaagaaacaaggggggccgggcgacncaaaaacaggggcccacaacaaaaccaaaggaaggggcaaacaccaaaagggcccgcacagcgcgaaagaaagcacaagaacccgacagaggggccagggggggaccgcnacaagcagcggaagaacaaaagaggggaaagggaaccaaaaacgggccaccagaaacagcaagcaccaaacgcccggaacccggacgaacgacgnaaaagccgacaaacaaacacc

SEQ ID NO: 119330 - DNA, 398 bp, Glycine max
  Clone ID: PAT_MRT3847_78763C.1
agtggagttatggtcggaggttgtaatggggtctgggaacagcagtgggaggatcttcaagaagaacttgatggggagagtcagggatatgggtggggccaagattaccaatttggcctgctcggggagcaccatgttcttgactaggaaggatcagcaatgtgttgaggtgtggcagagttcttctagggaattttgatgactttgttattttcttcaatttttttaagaaagatggttggttgcattctgtaaatgaatttggcccgcctgtagattttttgaaaagtttggtgaggtaccaactaccaactttgacattattttccttttgtttgacaaattgttttaatctttttctaagatatcaattacactgcagtctatcatgattcatg

SEQ ID NO: 119331 - DNA, 979 bp, Glycine max
  Clone ID: PAT_MRT3847_78764C.1
agtagtagtagaagctgcaggaagaggagaaggagaagagattggtgtggtggaaggttccttttgaggtgttgaggtattgggtgaaccctctgcctctgcctctccctgtttggtctctctctgtcgctgccgccgctgcttttctgggactcttcttcctgggacggaggttgtacagaatgaagcgcaagactcaaactttgaagctcaacctcgctctcgatgataagaaggtgtctcagctcatgggtcgtgttgctcgtcttaatgaagcattttcagtagtgagacgtgttcccatagtgcgaccaccatctctgccatcttcaagtgtgactctgaggcctgtgatgagtatgagatgaagaatttgacaaattacttgattgaaagtagtgtgaaatgcaataattgtttaatactataagaatccttttgtatgaatacatgtatgtatgaatctattatgtgtgtggcagttggattttatgaagcttttcagtagcttcttgtatatgattatgatatcctaccatactcttactttttatgtcttgtaaaaaaaaaaaaaaaaaaaaaaaaaaaaaaaaaaaaaaaaaaaaaaaaaaaaaaaaaaaaaaaaaaaaaaaaaaataaaaaaaaaaaaaaaaaaaaaaaaaaaaaaaaaaaaaaaaaataaaaaaaagggggggcccttttaagggacccaatttaacttcccggggtttgcaaggtaaaattttttttatgggggccccaaaataaaattacttggccgggttttaaaaacgggggaaggggaaaaccctggggtttccccaattaaatgcttttgaagaaaatccctttttcccaagttgggtaaaaagcaaaaaggccccacccattcccctttccaaaaatttgcccaccctaattggaaaaggggccccccctttaaggggcctttaaaaccggggggggggggggtttcccc

SEQ ID NO: 119332 - DNA, 753 bp, Glycine max
  Clone ID: PAT_MRT3847_78765C.1
ggttttcttgggtggaatcaaatccatggacgacgcaaaacgcgaagtggaagagtgggaattgctccatccaaacaacgacgacgattcaatcgtgttcgctgggcccccactggactctatccgccccgatcacttctctctcctagacgacaaccttaaccccaattccagttgcagctccaattcctcctccgaggtcgatcgcaacttcgacgattcctatgtcgccaatcagatattccccaatcagagcctctggaacggagattccgattccgattccgatattccccgatcagagcctgtggtggaagaagctcaagaagagaaaatacaacaagtggttgagaaagacaagagattggtgtggtggaaggttccttttgaggttttgaggtattgggttaaccctcttcctctgtctctgcctctctctgtcgctgccgctgctgcttttctgggactgttcttgcttggacggaccttgtacagaatgaagcgcaagactcaaacttttaacctcaacctcgctctcgatgataagaaggtgtctcagctcatgggtcgtgttgctcgtcttaatgaagcattttcagtagtgagacgtgttcccatagcgcgaccaccatctctgccagcttcaagtgtgactctgaggcctgtgataagtatgagatgaaggatctgacaaactacttcgattgaaagtactgtgaaatgcaacaattgctcaaaaccataaaaatcctt

SEQ ID NO: 119333 - DNA, 297 bp, Glycine max
  Clone ID: PAT_MRT3847_78766C.1
gattccattgtgtagtaaccagtcagcgttagttcttcagtaacttattgtgggattcgattctaagattttgagattgtccagctgtgggtgtggaaacagctgcagctgtggcagcaactgcggttgcaacaagtactcatttgacctgagtgacgttgagtcgacaaccagagagactcgagttttgggtgttgggcctgtgaacgctcagttggaaggtgctgatatgggtgttgcatctgagaacggtggctgcaactgtggatgaagctgcacctgtgactcatgcatctg

SEQ ID NO: 119334 - DNA, 578 bp, Glycine max
  Clone ID: PAT_MRT3847_78767C.1
cgcgtacgtaagctcggaattcggctcgaggctttctttattagtttgctctggaaaagataagagatttcttcggaactaaagtcaagtttggaatgctctcttttgtaatgctgagttgggtggctaattttcttgaggtggaaaagtatctaattttcgtgctgcaatacaaagttccgttttttttttttcgttacatctgatgtactagatttcgtagcactaaaaaggctggtttccaaggaggcaactcttgatttgatgtactgaccaaggaggcaactcgtgtaaatcataaccctgggaaactatgtgcaccatctattggcccttatgttgtaaaatttagctcattattattcctttccaaattttgaaataactcttacattagtctgtatttggaagttttggagagaatcttacagagatagaatagtagggaaagaaaaataggccaaatggcttataaacagaggttgctttcctcactttgatgctttatcatattgatgctttgtaattagatagtaatataaagtatcttttacaaaaaataaaaaatatggtctgtt

SEQ ID NO: 119335 - DNA, 425 bp, Glycine max
  unsure (1)..(425): unsure at all n locations
  Clone ID: PAT_MRT3847_78768C.1
cagaagctgagttctttnaactcaaaccctaaaagggggaggtagccttttttgggttcccttcgccatgggtggggggcttccctcacatcacttctcgcgccgagacccacccttccattcgacgccggcctacgagctcnccgggtacctcaaaacgagggggctcttcnaatccctctgcgttcatttccgcggggttcnagatggggaacaaatttgagaggtagaggggggggtttcnaggggtggggttactcgagagtgtggggatagaaaatcgggtgtgcgtataattttttgagggcgtgngttcnatgtgtgggtgggtagggagtanaggcggtgtgtactgtgttcaaagagagaaaanagagagagagagagagagagagagagagagaggaaattatnacaaagggagt

SEQ ID NO: 119336 - DNA, 1519 bp, Glycine max
  Clone ID: PAT_MRT3847_78769C.1
gctttctttattagcttgctctggaaaagataacagatttgttcggaactaaagtcaagtttggaatgctctcttttgtaatgctgagttgggtggctaattatcttgaggtggaaaagtatctaattttcgtgctgcaatacaaagttccgatttttttttttcgttacatctgatgtaggctcgaggattggtcgaggtcgaaatctcgaaggcgagaaataaattgaaactgaagcagcatatcatatgattccacgatggaagtgtctgcatcagcatcaaggaggaggaacaacagcatatgcataaaaatctcgttgcttattctcgtaatctttcacttttcatccacaatcactgctatcaggaaagatgttggctttcaaatcattcatccctgcaaaaccaccgttcaaggaagatacctcctttcagatgataacggttatgtgtgtaatgccgcgtctgttaattcacgctctcgatgctgccctcaaagaggggagaaattctcttgccatggatgcaaccttctttcacaatgttgcaactcttatgaatattgtgtttcctgctgcctcaatcctgctttaataagtaaggaacaagtgctgaagatgaaggttgccaagcctactactgcgaggacttattcaagtgtttttgactactgtgctgggagatgccgtcatagttctgagagtgtggtccatgaaaatgcttatattagtgacttccaccactgcttttctctgtcatcaaattcttctgggaaaaatagtactctcacagaagcaagactgagtggcatcaatgttgttgttgggaggcaaggtgaatcatgtaattcagtttgcaaatcaagaggacaatcatgtgtcccaaataaacttgtggtgcttaatagttgtgacattattcagaaatatatgagctgcaagggatcttgcttggcaagtgtcggagctgatcaacctgctgaagttgtttatgatgccccagtgcatctgaatccaggatcatgtttgtacactgaaacacagtctatactttcttgtgatggtttacatcagcacacaagaagactgtgcccctgtgcatagtgttagctggatttcgttgcactaaaaaggttggtttcaaaggtggcaactcttgatttgatgtactgaccaagaaggcaacttgtgtaaatcatcaacccttggaaattatatgtaccatccatttgccctcatgttgtaaaatttagctcattattattcctttccaaattttgtaagaactctactttagtctgtatttggaagttttggagagaatcttatagagatagaatagtaggaaaggaaaataggccaaatggcttataaacagaggctgctttcctcattttgaatggactatcattggagggaatgagaaggcaaaatgttgtaagtataaaattggtatttgtgatcaatgtaaaaacttttacattgtgtactaatcataatagttattataaatgtca

SEQ ID NO: 119337 - DNA, 562 bp, Glycine max
  Clone ID: PAT_MRT3847_7876C.1
tcgatctatggctaggaatgtaccagagtgccgtgcatttgtgtggaatgtgtgatggttttgagtataatgttggtatggtttgaaggttttatatataggtggcgggtgtgcagcatttataatatagttcgggtacgtaataatagaatgaaggaaccggtaggttatgtgtaaatctggaagctttttgtggctagtgatctaggtggaaggggactgggcatggctgggctggactggacggaagggttcacgcacacaaaccccgaatcctgatcggtttttctaggcaaaggccggatggcatgactcggagacgaagtagtgcggggcgtaaattgggtatatgcatgtaatatgtgatttggaggggcgtggggtgcagggtttgactaggctaacggagctcgcgaacagaacacgacgaaccttaaccttacgcaaacgtactacgcgttgtggctaattggaatagaacaagcaagtgctacataaatatggcaaacgctgtcaaagtcagtcagtacacatagaatactcatatcagcgcttgccagct

SEQ ID NO: 119338 - DNA, 152 bp, Glycine max
  Clone ID: PAT_MRT3847_78770C.1
acgcgaacgtccgctaggaattcggctcgagggtggcctatgctcctaagcgctgctctgtgtattactaattctataccctcaagctcgggggtactattagagccccctacatgacaatcctccgcctgtgaaggctcctgagtctatgc

SEQ ID NO: 119339 - DNA, 384 bp, Glycine max
  Clone ID: PAT_MRT3847_78771C.1
ccctctttattcggaactgcaaaacatacacctctcatctctgttgctgtacactctctctatccctccctcttcaacgcacatggacattgaaaaccaaaacaccgtggacagagaaatcaagcccacccacaggagaatgcatgcgtgctggagcgcctgatgatgacgacaatcagtggccaccatggttgaagccactgatgaatgagagcttcgttgttcgatgcaagttgcacgccgaatcgcaccatagcgaatgctacatgtattgcatggactagttgaatggccctatctgctctctctggcacccccaccacaaagagcaccgtgcaatacatattaggaggtggtcataccatgatgagatcaggggtctct

SEQ ID NO: 119340 - DNA, 414 bp, Glycine max
  unsure (1)..(414): unsure at all n locations
  Clone ID: PAT_MRT3847_78772C.1
ggtgttaaatacacaactaacacatatganataattaaatgagggcgcgaattttcaataggcagagctactcaacatgagggtcatgcctaatttcctttattgaatcaaacactcgagcacgcgagagaaaacacacattccagatcatgctgaggattccttattttcataaaatctgacactaacctgtgggacagaaaaagctggcataagagtattaccaacaatttcaaaatcttgagaaattcccaagataatatcaaaaactggagactgtttgggattgtcaataatgaaacttaaatgccatgaagtttgatttgaccaatcctaactccacatttgaaaaccattggtaggaccacatacctctattgggaacatctattccccagaatgggggttccattt

SEQ ID NO: 119341 - DNA, 284 bp, Glycine max
  Clone ID: PAT_MRT3847_78773C.1
attttatcgataattcatttttaataaaaaaaatttgattgacggtcttccaatcacctttttttccatcaacaaaattatttcagaatctcatgagaaaaaaaagataaagtatataattaactgaattaaatggtttttttgtttttatgtattcaaagattgttctcgaaataaatttatcgagtaacccatctctatttttcttcgaattaatatttaataaatatttttcttattttgttctgaaaaatagttgttcaaaattatttgtgtgatttttc

SEQ ID NO: 119342 - DNA, 265 bp, Glycine max
  Clone ID: PAT_MRT3847_78774C.1
gtctcaagcaaccatggcaatggcaacccaagcctctctcttaaccccacccctctccggtctcaaagccagcgaccgcgcctccgtgccatggaagcaaaactccagcctctccttctccagcccgaagcccctcaagttctccagaacaatcagagcagcagccggcgacgagaccacagagggaccaagaaaagttaggggttaaccggtcgggtttcaccccaggaattgtagcaaacacccttccccgatcttcgggggc

SEQ ID NO: 119343 - DNA, 392 bp, Glycine max
  Clone ID: PAT_MRT3847_78775C.1
accgcccacgcgtgcgggaaactccggctgccaccggcgcatagaatatgctcctcggggaggacatgttcagactgatttcagactcatgcgaccctgtaccaaacgtgactactcgaatactcatgcaataatctgaacaaattgcatgcatgatgcctggatgcctaacgagttattcacgccaatgagtcagatgcaatgatagaacatcatggcttttattgtaaagctgtgtatacaggacgtaatcaagcagaatgtcccgatgcatgagactatttaaacaactaatgatcacgagacagcacttgtacttgcgatgccttgcacttgacaatcgacgatttttatgcgtgcatggatacttattatacttctgttcacaaaga

SEQ ID NO: 119344 - DNA, 328 bp, Glycine max
  Clone ID: PAT_MRT3847_78776C.1
aggcgtgcgaacacgacgacgacagactgcgactgtgccaagaattcataacaaggtagctacaaaatcgaatggataggaagcgatgtgcccatatgcataagacaggtcatggaacttgggatgactataagatcactgcatgcttgaaagatgattgccataaggtcaaagcacctgtcattgtagcgttcgctgccgacgtatcaaacatcgatgacgacgagcctacatcagatgcatccgtggacccgacgcagctgatgggcacaagctgctgcacatgcatgtgcactgtaggtaggcacatccttcgacggctcaacat

SEQ ID NO: 119345 - DNA, 432 bp, Glycine max
  Clone ID: PAT_MRT3847_78777C.1
ggctcgagcttttaccgacggaatgcaattcccttacggttctcacttttggggactacaatttctgcgatggcgcccgatcctactcgcgccgtgcctagcgccagcgtcaacgacgtcagagacgactccggggtcaaaatgaaggtggacaacgaagatctgctcaatgaggatttggtgctgaaacagaaataggagcagtacgtggatcggggacaggatcctgtcctgggatcgcagatggatgaactctggagcgtgaggcaggactttctagcttccacgagctgtatgacttgtggtactcagccgtagaagttccttcgtcgtcattacggcactcttaaatcgtattatgcagctgttgccagatgctgatctgaagaacgtccttgagggtatattgtaagatgaggcactgacaatgtc

SEQ ID NO: 119346 - DNA, 257 bp, Glycine max
  Clone ID: PAT_MRT3847_78778C.1
cccaaacttacaaatatccgaaggcttatgtattcagaatcctgctccctgttatccgagggctagtttccttgatctgcctggaatagagaattttaggtctacaatatttgtctctaccttttaccccctaacaaaaaaataaagagccctgaagctctcataattaagggcgttcattctaaaggattcaatctttacttacacgtgcatgccagctcatagctcttataatacgtcacctaagtacaatttac

SEQ ID NO: 119347 - DNA, 424 bp, Glycine max
  Clone ID: PAT_MRT3847_78779C.1
cccgcgttttttttcgccagaagacgcagacggggcgggggtatttgaaatcatattcccttcccaccgcacggcgcactcccacgcaaaggccaccaaacaatccttggctagcccatacaagcgagcattaacaccaatgaagaaagccgtgctaacggcgggctcacatgatgatagaatcaagcgaaaagttatgagaacagcatctggtctttcaggggctgaatgcaagattcctattgacatgaaagaccgagaaaatgaccctattagggaaccatgacccagtgaatgcagtggggcagccacgaaagcgtggcaaactgaaaaaggtacagctggtccagcaaagaggataaggggaaagagaagggggagcccgtaaaagaacctggtcccttaaaccctatggagccaatcc

SEQ ID NO: 119348 - DNA, 527 bp, Glycine max
  Clone ID: PAT_MRT3847_78780C.1
ctacttggtttcattgaaaaaaatttttgctctacagggcaacaacaaaaggaggagggaaaaaagaacaggaaaaccaaaaacaacccggccccaaaaaaaagaaaaaaagagggcaacacaaaaacaataaaaactaaaccaaccagccccaaatataaacacccacaaagaataataggaaaaggaaaacaaaaacaaaaacggggaaagaacacaaaaacaaaaaaaaaccaaaagaaaaccaacaacagcccaaaaaaaaaggaaaaaatccaaaacaaaaaacaacaactatcacaaaacaagaccaaagccgaaaaccaagaagcagaaacgacaaccctgaagccggcaagcagtcaaaatgaagaccacatcagctggggcatgcccaaccattacaatacccggacataaattaaccaaaaaaaaccccccccctagctcttttaagggaaaaccaacaaaggggcgacgatgaaaattgaaataaaaccacacatcactctggaaggaaacccaca

SEQ ID NO: 119349 - DNA, 342 bp, Glycine max
  Clone ID: PAT_MRT3847_78781C.1
aattcggctcgagggggcatagattgtgggagaaaaaccgatgccaaatcaagctctaatgatggagctatccccagatggcgtcgtgtgttattcacccagcatgaggccaaggaccaacacttaccgaccacatcaagaggccaaggtcaagaagaagaataaccctttcaaaaagttcgacacagaaaacatagtagccgctaacacaatgggagtaggggtgtctggttaatatcccgcacatacatcgacaagtaataatttagtcacagggactacccccgaatccacgccaaaaaatgacagataaaaaacgtcttacgaatccaccacatgaac

SEQ ID NO: 119350 - DNA, 361 bp, Glycine max
  Clone ID: PAT_MRT3847_78782C.1
attctgttgtttattttttataggattaattgttctatttttacttatttttactaatttattcacgaacctacattgtgctctgagggttaacaggggcccacatcacagaattagaggcatgggatcgtctctggcggtctattggcctgaatatttgttggcatactacgagaatgctgggaaatccactggatattcattctaccaagaggaccctcattcgtgaaagatgtgagttgcgccgaaactgatttggacaagatatcacggtgcgggcagaaaagggccctggggaacgtaaagacagaagccgtggaattatcacttgcaactgagctgtaggaaagattggattctt

SEQ ID NO: 119351 - DNA, 878 bp, Glycine max
  unsure (1)..(878): unsure at all n locations
  Clone ID: PAT_MRT3847_78783C.1
ccacgcgtncgtacggctgcgtccctgaggattgggtgagtcacagaaaaacaaaatcctaacaaaccctacgaaggaaaacgtcgtcccaacaatcttgattgagttcagcgatggcccttgttctccgtctaggaagcagaagcagaagaagaagcgtgttgttcttctccaccaactccaactctcccttatcttcccttttcaatgacaatctcaaacaatcctctccctcaaacaccacgcgttcctcctttcgcactccccctaactcccaaccaggtttcaccgacgacatcaacaaaaacctccacgaattccgcgcccggaccaccgcgcctccaccgcagcaaacctcgttccagaagcaaactattcgtgattatctcagacgtaacttcgatcagttggatcagaatcaaactgagaccgctaagaaagcttcacgccagagacttagcgtggaggagaaattggggatgttgaggccggaggaaacgaaaaaggattggttttccgtgagcgagaggcctggcatgatgaggaagatggaggaggaggaggagtgatttaacttgatttcgtctggcttgaagctttgtttggtattaaatgttcagtcataagtaaaagcatatgacttgagatgttgagattagcttgcttccatgtcatttgtattcacatgttaaaaattgtagtttcctatattttctgagtgtttcacttgttttacgtggaggacagtttgatttttagtttcatttgattcctagagcagggcaaatatattgttctgacttctgttaaaatcttgaatatggtcatagatagaagtttgaactggttnnnnnnnnnnnnnnnnnnnnnnnnnnnnn

SEQ ID NO: 119352 - DNA, 263 bp, Glycine max
  Clone ID: PAT_MRT3847_78784C.1
attttataagtacataaatttatgagaatctcaattatttttttagtataattataattacaccataaccacatccaaattcgatcaggacaaaaaaaattaataacacttgacctatcacatagaaattggtcaagtttatggactagatggtggttcgaacaacctaataatttctattcgacaagatggtggtaaaatatagtacacagtagacaatacaattccagcatgtgacatgttatgtagaataaacggtccca

SEQ ID NO: 119353 - DNA, 354 bp, Glycine max
  Clone ID: PAT_MRT3847_78785C.1
gagacatagagagatactgccatgtccatgccactactatgatgcacgtcacaaccatggatcgctacatcacttaccacctataggaggccgagaggacatttgatgttaattgtgcaacttgctcatttgctgccaagaatcacatagatcactgtcatctatcctggacttacaaggagtggggcttaaaagcttcatcagacatgctacggatcttgatactcgccttcaaaagatcgacagtgacaactctccagagaccttgaaccgcatgttcctcatcaatgcaggttctggattcatgatactgaggaacaccgtagaatccttccttgatcctgacaccactgg

SEQ ID NO: 119354 - DNA, 282 bp, Glycine max
  unsure (1)..(282): unsure at all n locations
  Clone ID: PAT_MRT3847_78786C.1
ccggnccggaanncccgggtcgacccacgcgtccgcacacattcaattcatcctgataacatagttgccttatatctcacttccaataaaaacaaagcgctgaggtgtcatcacgtactttgagcactccaatctccctacattactcataacatgtgtattttacacccccaactcatgtaagtactcatgagcgttttttatgctctttgtaatttactgcacattgaaacataatttctacattttataatacttttattctacttaactatataatat

SEQ ID NO: 119355 - DNA, 948 bp, Glycine max
  Clone ID: PAT_MRT3847_78787C.1
ggcacacgtcagatggtcacggtccacatcctggaaacttgaagccgtttgacattacgacataccaatccgcagagactccaatttccggttgccacctcaccggtgatggctataggcgtagcagtttccggtatgtacacgctcactccaactctctcttcattcaagcaccccacgcgcctcttctcacgcgctgctttcactgcaaagcttccacttcaatttcgagcttcttcaacgtccttcatcgacaccgaaaccaatccaagagaatccaacgtagtagtagttgaaaaggacgtaagcagtagaagcagcaattcgttggcttgtcccgtatgttacgattccttgacatggaacggtgatcctggtttctccgtagatactatcactggatctagttttcaatgcagcacctgtcagaaaacatatattggtaaccaaacgcatctcgatctcaccgctacaggtggagctaagagctatggtgaatcgatgccagcttccacagagcttttcagggtgccattgatatcatttctctatgagaggggctggcgtcaaaccttttctgtgtggggtggttttcctggtcctgagaaagagtttgaattgatgaagggtttcttaaagccaatattgggaggaaatatcattgatgctagttgtgcaagtggattattttcaagattatttgcaaaaagcgcgcggtcgtctgtcattgttgctctagactactcagaaaacatgttgcagcaatgttatgaattcattcagcaggaagacaactttccaaaagagaacttcatcttggttagaggcagacatatctaggctcccctttgtttccagttctgttagatgctgtacatgcaggcgcagctctccactgttggccttcaccattagctgctgtagctgaaataagtcgtgttttacgac

SEQ ID NO: 119356 - DNA, 1239 bp, Glycine max
  Clone ID: PAT_MRT3847_78788C.1
ggaagagagggggcgaaggcgaacaccaccaacaaagaacacacacaactcaaaccccccttctcccttctctcctcttctcttctcttaataatcgcaaagttttctttttttctttttcatattttcttgttctttctattgttgttctgtgtcggtgtttggatcgaattgtctttgattcgagagctgaacgcagagtggggctccgtttggatctgaatttgagcttaatttttgttgaatttgtagctctgattattcttgttgttaccatcaatagtcggtgacaagactgagtgaggttttgatttttcttttaaaaagattattgttttgatgggggaaggtgaagctgaggggagtgatggcgctcccaagaatgttgtggcaaacgacgtcgttgccaatgcgctgttgccgttcgatgttcccgccaagaagttagcgcggcagctcgatttcaccggcttcggcgggatgtcgacgacgccgcagccgcagccgccggtggttttgccgctgcggccttctacttctgtcagggttggaatctcctaaatcaagaccgaggcctggctttgaaattaaagaagctaccccgaagaagcagaagcagtgcaattgtaaacattcaaaatgcctgaaactatattgtgaatgttttgcttcgggaatatattgtgacggctgcaactgtgtaaattgttgtaacaatgtggaaaacgaagctgctagacgagaagcagttgaagctactttagaacggaatccaaatgcatttaggccaaaaatagcaagtagccctcatagaacacgtgatatcagggaggatgctggggaaattttgatattgggaaagcataataaagggtgccattgtaaaaaatctgggtgcctcaagaagtactgtgagtgcttccaagccaacattctttgttctgaaaattgtaaatgcatggattgcaaaaactttgagggaagtgaagagagacaggctttgttccatggagatcaaaataacaacatggtgtatattcacaagcggccaatgctgccataactggagctatcggttcctctggctattcttcaccaccaatatcaaagaaaggaaaaggtcaagaactcttattttcgtgaaaacctggactcatcaaaatagtttgcttacaatgtatatctacccgaggacgtagtatgtacccttgaaattgggcttcccgattcaaaaagagg

SEQ ID NO: 119357 - DNA, 694 bp, Glycine max
  Clone ID: PAT_MRT3847_78789C.1
ccacgggtccgaaggcgaacaccaccaacaaagaacacacacaacacaaccccttctcccttctcttaataattgcaaagttttttttttctttctttcgttcttctgtgtcggtgtttggatcgaattgtctttgattcgagagttgaacgcagagtcgggcgccgtttggatctgaaaccagtgaatttgagcttattttttgttgaatttgtagctgattattgttgttgttattatcaataatcggtgagaggagtgagtgaaattttgatttttctttttttttttttttttaaattattgttttgatgggggaaggtgaagctgaggggagtgatggcgctcccaagaatattgtgtcaaacgacgtcgttgcgaatgccctgttgccgttcgatgttcccgccaagaagctcgcgcggcagctcgatttcaccgatttcggtgggatgccggcgccgccgcagccgccggtgattttgccactgccgccttctgcttctgtcagggttgggaaaccagaatctcctaaatcgagaccgaggcctggctttgaaattaaagaagctaccccgaagaagcagaagcagtgcaattgtaaacattcaaaatgcctgaagctatattgtgaatgttttgcttcgggaatatattgtgacggctgcaactgtgtaaattgttataacaatgt

SEQ ID NO: 119358 - DNA, 975 bp, Glycine max
  Clone ID: PAT_MRT3847_7878C.1
ccacgcgtccgaacactatttatctatggcatcatggttgccattatcatctcttttgtttataataagtttgtcagattttctaaatttgaagtcttacagtgcatttgaagcacattgaagaacacaagcaaatcaacacagtacaagaagctgagtcacagcacttcttttttgtctattgtttgatggtcaatgcatagcacaagtagtttaggaggtggagcaagccagcaaggggttgcattgggcactactacctgatggggcttattggttgttaaccattggtgttgacaaggtttagccaaattgatggatattttttacctttgggggttgcgtgtgagacaagagttgttccaggtttaaagagtaataaatatttagacttttgtcctgtgcctcatcttttgttttgttctgttatatgaccattattaaaatccaacatggaacatatgtttttgtactatccagttcttcatttttcagcaaatcaaatacacccttaaaaaaagtttgataactgcaacatagagagtaattcaattttttgtataaatttttcatttcataaaacaaatattaaaataaaatctccatgagaaaaacccacataataatagagagaagccaaaatggaatcacattaaagaaaggaaattttgcaatgaatgtaaaactataaaaggcaagggtgacaacgtagatgaaaagccttgttgggttgttatcccagacatcagtttttattcaaaagtttaatgaaattttcataataggtcattcaattgttgattagagcttattcaaaagttactatagctctggattactttgaaaactgaaatagggccaatgttgaaccttacaaaataactttctttctaattgggtatctcccatcaacttatgttaataaagatgacccatccaagctgccaaaaagttttcccatgtcagctgtgtaag

SEQ ID NO: 119359 - DNA, 385 bp, Glycine max
  Clone ID: PAT_MRT3847_78790C.1
aaccaaggcttcagccaaaccgcggccaagccttcgttacggtggcaaaaaaacaacagaagggaaccttaagggatttcagttagacacaaaccgctggaaccccctggagttaaaaaaggaaaagtcgactaaagataaggtaaattggatgtcatgcatatatacttctgatctcaagaaaattgttccccattttaaaactcatcctatggactgttctgcatgttatatttcttcttaattaaatgggttttgcagctaacaaaaaattgaacaaaattgtcctgatgatgtcaacaagataaatccagcatgtacaacaagagaagaaactgatgagtcagaggatgaagaaaacaacatcgacgatatatccaagaat

SEQ ID NO: 119360 - DNA, 561 bp, Glycine max
  unsure (1)..(561): unsure at all n locations
  Clone ID: PAT_MRT3847_78791C.1
acgagcactccctcgcacaggcatcaggtgagtttgttgtgatttgaatggagggaagtggaggtggcggtggcantggcagtggttcaccttctacacctataaaacaatacttacaaaaattctcaaanctttttcantactatctaaataaatccactccccataccctctacaaataaattaaaactttcataattacatccatctacattctacatattatttatttaccaaaattttacattatctcctaccgacctcaaatctaccttctcaatctcttaattaactttctctcccctttaattaatccaaanctcaatccctccaacacccctatccttccaaccaaagactccaataagttcaaacccttcattcnccncctccctaanttcaagttctagtattctttcactaaacctctctacataacatttataatacctttttttccatgttgatattcctatcttgttacctatattactgttttgctaagttttgttctttatcgttacaataaaggctcaagttacgcacataattagagaccaa

SEQ ID NO: 119361 - DNA, 261 bp, Glycine max
  Clone ID: PAT_MRT3847_78792C.1
attcaaggccactaggacggagggaaaaatatttataactggcaccggattggtggtttacaaacccggaatattttataaaagagccccaaagggcaacataatcaaacaggggcattcctatgattatttcctccccactcgaacttgctccaggaaaaaaaaaggccctggaaagggttaagtgatagtcaccattataggtggcccgcttctcagaaacttctggctattctagcaacaacaaaaaatcgatgctgc

SEQ ID NO: 119362 - DNA, 568 bp, Glycine max
  Clone ID: PAT_MRT3847_78793C.1
ttgacgtggctacatgtgtagcagtgccgcctgcttgggggggggggggggttgaaggcagaactaaagcaaagacttacaagagtccctaaagttaaagaagctgctaggcgtatagacgtgatagaattgcccaaatgaatactaagtaaagagcggtcttagggccaaggccaagggcaagataaagatacgctagtaagaagagaatttgagcgatatacttaagagtgcatgcaaagggcagatacaagacgagtaagggcgagtagaagaaaagcctatacacaaagggagcgcaaccgaaaccccaacgcgagtactgccgcggggaaggtggtcgtgggtagggatggtagtaggcctgttggttgctatcggtatagggttgggagtgctggaactatgctgcattggcggtggatctttaaaccgttaagccccgggacttccacgatcttgtaagcttggtatgttcaagcccggcagtggctgtggcacatagcggttactagaacgcggctacagcccagacgtcggaccctactaatgcgacgccgtagtatac

SEQ ID NO: 119363 - DNA, 288 bp, Glycine max
  unsure (1)..(288): unsure at all n locations
  Clone ID: PAT_MRT3847_78794C.1
aattcggctcgaggccctctccttttctctctctagaattctcagatttgcggggcgagaagatgcaacaaccaagacccggcatggcacctcccaccaggggccaggagccgcancaacagtaccagcagcagcctccgccgcagcagcaacaaccctacgtcatgatgccgccgcaacatcaagcgccgcatactatgtgggccccaatacgccaaacttcgctgtccgaacagcctgctaacgcccaccagggccgaaccctctggatcggggatctgcaatact

SEQ ID NO: 119364 - DNA, 249 bp, Glycine max
  Clone ID: PAT_MRT3847_78795C.1
cgacgagttccggatagccaaggccagatccacaggcagattcacagctcctgatcgcggcctgaagcgaaactctcctcctgaggccatgtcagggtccgtagccccagccactagatgccccgactcgtacacgttgctggcaatatcatccctagatccagatgctcacgggtagcgagcttacagagccagggtgcagaggtcgcggtagacccggtgggggcctgatgaggataacgtagagct

SEQ ID NO: 119365 - DNA, 161 bp, Glycine max
  Clone ID: PAT_MRT3847_78796C.1
cgaaagaaaaaagcaaaaagagggcggccgcgatacaggaaccagacgcacagacccgacgcatgcaacggcacggcagccaagacagagacgccaaaaatgacaagatcagaggcacgaagacacacaacccagggacaggaaaaaccggggcgggaccc

SEQ ID NO: 119366 - DNA, 225 bp, Glycine max
  Clone ID: PAT_MRT3847_78797C.1
gaagttcagaccacttcaaaattcaaacttgaaaacagcgatatagaaatagacaactggcattactgtccggaaacatgaagggtttgtatcgacagaacacaaccatcgccaccaaaaaatctcctattctctccccggccatcatcaccctcggcggaaaacccgacctagaacatcagcacaacgagatgcacgtggtgccgccgcatattcgacctgaac

SEQ ID NO: 119367 - DNA, 426 bp, Glycine max
  Clone ID: PAT_MRT3847_78798C.1
ggttgactggttgttttttaaaattgcatgaaacatttatttgttcttatagaaaaagtgacaagtaagtcttcactgcaagtagaagatattggatccagttccagggttgaactccatacgattattttttaatagaaaaattgactgtgacgtagctgtggaggacacgattggtaaattctacgatgatctcagaccgccacagaggaccttcaacttttcttttcttcaacctgtcaaatttcctcgttctcaacgccttttcgtcgtcagagccagcgatttggagttcgaagccaccgttgtcgccggcaaggtgccgcccaaaccggcggctcctgtcggaactccggtggtcccttcacttccacttcaccggcgtcctcgccggaaccggaaagtcgctgcgcttcggtcggcttt

SEQ ID NO: 119368 - DNA, 1787 bp, Glycine max
  Clone ID: PAT_MRT3847_78799C.1
ggttgaacaaaaaacaatggagaacataatttccatatgtgatcacatgcctgtaggattcagattccgtcccacagatgaagagcttgtcgactattacctcaaacacaagcttctggctgatgatttccctgtccacatcatccctgaaatcgacctttgcaaggtggaaccttgggacgtaccaggaagatcagtgatcaaatccgatgacccagaatggtttttcttcagtcctgtggattacaagtacttgaagagtaaaaggtttaacaggacaaccaagcgtggcttctggaaagccactgggaatgaccggaaaaaagatcagcgggcaactccaatgaccatgaatggtttgaagactctcgttttccttccaagccgttgaagaggaaaaggcataaccagctaagcaagcgaggcttctgataatccactgggaaagaacggaaagttaggatacggtttgtgccgaatgatgaagaaacctaagaaaaaatttgaagggagaattgcggtgccgtctttggatgaaagggaaaccaggatacacatggtttctgactagggaactccgacaagagcagaaggcatttcatctgatgacattattcctggagtagatatggatgaaatctttcgggcagtggatcaagctgagaaattctcccccccagtacaacagtctccaactggcattgggctggaagattttttcccaaactctccattgttcaatgcccgttttggaagtgaaaacatcaatatgcaaacttcacttgaagttacggatgacgaagatgagttggtaaattcatttttggtttatgatgaagaatttgttatcaatgaagaaagaagacactgttttgtcaatagttccacccaaccaaagtcattgagaagggtatacaatgaaagcagtggaaattggttcagacttcaggaaagagtttatttttattgttttccctctctttttctagaactaaactgaatttggtttataaaatactgtcattgttgaaattaatggatcgaggattggatgaccagaaagacatgagagagaaacacgttagagagagagagaaagagagacagggagagagacaggcactctgtagaggaagagcgcctgagagagggagagcacgccttttagagagacagagaggttccctgagaaatcgagagcctacaagagactgttcttatgacaacaacagaatatacagacgcagcagggagagggggagagatagagataggcgacacgaggaatatctcccacgttgtcggagcatctctagaaactcgagccgaatcggctcgagtacgcgacagaagggggggaaccaggaacataatagacaggatgctgaacctgatcaggaagtatggaccaaggtgataagaaggagggaagcaaaggcagcaaagaagaactatacccagaacagatcactacataacctctcggcaaaccaccccaactggagagacaaggaggatattacatccttttacttcactaatttcacagacaacgttaatgaagtgaggctctgggggaagtttaagatttggggagatgtgcgtgaagttttcattgccaaacgtcgtaacaaggagggaagaaggttcggcttcgtgaggttcaaggacgtttcggacgtaaagcttttggagacgcacctggacaatatcttcattgatgaccataagctgttcgttaaccttcccaggttcacaaggctagcgtcgaatgttcatacgcatac

SEQ ID NO: 119369 - DNA, 598 bp, Glycine max
  Clone ID: PAT_MRT3847_7879C.1
tacggctgcgagaagacgacagaagggggatcgagcgagcagcgtttgtttgttccttcctcagtcgttgtgacagtgtgtgtgagtgagtgagtgagagcgacgatgggcgcgagcagcgaccccacccaagacggttccgacgagcagcagaagcgttcggagatctacacctacgaggccccctggcacatctacgccatgaactggagcgtccgccgcgacaagaagtatcgcctcgccatcgcctccctcttagagcagtaccctaaccgcgtggagattgtccagctcgacgactccaacggcgagatccgttccgacccctccctctccttcgagcacccttaccctcccaccaaggccatcttcatccccgacaaggactgccaccgccccgatctcctcgccaccttctatgacttccttcgcgtctggcacatctccgaatccgccgtcgaactcaagtccctcctcaacggcaacaagaacagcgagtactgtgggcccctcacctccttcgactggaacgaggccgagcccagacgcataggcaccttcagcatcgataccacctgcactatctgggatatcgaga

SEQ ID NO: 119370 - DNA, 562 bp, Glycine max
  Clone ID: PAT_MRT3847_787C.1
cgttttctcttgatatagttacacaaaggcttagcaaacctgacctgaaacgttatctgcaggccagcttcttgtaaaggatccatacagagggaagtgctgtaatgatttcttgctaccaatggaagtaatggtatccaagttttgtttcatattgtcaacagactattcacttggcagattgtatttgtcaatataatagagcattcatttacacttggcaattgttatacattgagagctatggatttgtttctcacccagcacaactaatatcagtaattgatgatttgtttggaatccctccagctgcctattcaaatcccaattgttgtttattcagagttcatattgagggtggctttgagtcagttttatgctatctggatactatttgagtaaatctttcatcagtggcagctcaattcagattgactcatgtccagccttgcatagcagaaatcttggttatgaacatgttatgtcatttatggttctaactattaataatagtatagcacccttattgggataactccttgatgttggtaaaaatttgtct

SEQ ID NO: 119371 - DNA, 2688 bp, Glycine max
  Clone ID: PAT_MRT3847_78800C.1
aattcggctcgaggaagcctggtcttccttacttggatatcataagtctgctcagggataattctcctttgccaattgcagcataccagggtcttttctttgcccattctagcactaggcaaaacgtttctgataaaagttgatcagatattcaatacattttaaccagtgaattctgctttaagcttgctgcaagtgacagaagtctatacgtagtagacaaatatcacacctctagtttaatatcaggctgaggtacaagtttatggttgctttaacagttattgctcttaggccgatatgctattacatggcattaaattctaatccaattcttttaaaaaatgattgaacggaaatatgtccgtaaccattatatatgctgcatttaagtcttgtaatttgggaatatgaactccctgcactgttaattcaattttcaactgtcaactaatgaaatttccccacgcgtccgtacggctgcgagaagacgacagaaggggatggttgactggttgttttgatatgaaattgcatgaaacatttatttgttcttatagaaaaagttacaagtaagtcttgactgcaagtagaagatattggatccatttgttggcaactctagtagtttattaattaatagaaaaattgattatgcctttaaagctggggataaaaggaaacttcagcatactttatgtgaatgaaaagatatagttccgagtagtttaaaaacaagtttgttttgctttatcattttccccgcgaactccgtgcacgagcgtcactccgtacggctgtgagaagacgacagaagggggctgattggtaaagtattgaatcctgtgcatacatcctcacttatcctcttcctgcgactctcttctcattggttctccgtattctccctcaatcctattaaccttttcttctttcatttcccaccccattctataatcaatcaatggcaatggcttcttcaatccctaatgcgccttctgcgttcaattctcagagctacgttggtctcagagcgccactgaggaccttcaacttttcttctcctcaagctgccaaaattcctcgctcccaacgccttttcgtcgtcagagcctccgattcggagttcgaagccgccgttgtcgccggtaaggttccgccggcgcctcccgtgccgcccagaccggcggctccggttggaacaccggtggttccttcacttccacttcaccggcgtcctcgtcggaaccggaagtcgccggcgcttcggtcggcttttcaggaaacgagcatttcgccggcgaatttcgtgtatccgcttttcattcacgaaggtgaagaggatactccaattggggctatgcctggatgctacaggcttgggtggaggcatggacttgtagaagaggttgcaaaagcacgggatgttggtgttaatagtgttgtgctcttccccaaaattccagatgctttgaagtctcccacaggagatgaagcatacaatgaaaatggtttagtgcctcgaacaatacgtttgctcaaggataagtacccagaccttgttatctatacagatgttgcattagatccttattcatcagatgggcatgatggcatagttagagaagatggagttattatgaatgatgagacagttcatcagctatgtaaacaagctgtagcccaggcccaagctggagcagatgttgtcagtcctagtgatatgatggatggtcgggtaggagcactgcgtgcagctctggatgctgaaggctttcagcatgtttctataatgtcctatacagcaaagtatgcaagttctttttatggtccatttagagaggcactagactcaaacccccggtttggagacaagaaaacttatcagatgaacccagctaattacagagaggctctgactgagatgcgggaggatgaatctgaaggagctgacattctcttggtgaagcctggtcttccttacttggatatcataaggctgctcagggataattctcctttgccaattgcagcataccaggtttctggtgaatatgcaatgataaaggctgccggtgctctcaaaatgatagacgaagaaaaggttatgatggagtcactgatgtgcctccgaagggccggtgctgatatcatcctcacatattctgctctgcaagctgccagatgtttgtgtggagagaagaggtgaagttctctgattatgtagggcgttgttcatgtagaaggttgaagagtttataataccagtatctgctggattttggttattgtaaattgtttaagagggacatggaggtttgtgtatagagagacattcataataaaatattatggcctcgtttgatttaatatatttaaggacataatagaaaaagacttggccgttgtttttggtgttaattgtaactttacgtgtggattgtcaacccattgtatgaatgaaagtgtgcactcacctgcagaatatttcgtactgtaactctgttggtgctgaaatcaaggtgcattctgggaaaaaaaaaaaaaaaaaaaaaaaaaaaaaagaaaaggaaaaaaaaaaaaaaaaaaaaaaaaaaaaaaaaaaaaaaaaaaaaaaaaaaaaaaaaaaaaaaaaaaaaaaaaaaaaaaaaaaaaaaaaaaaaaaaaaaaaaaaaaaaaaaaaaaaaa

SEQ ID NO: 119372 - DNA, 1166 bp, Glycine max
  Clone ID: PAT_MRT3847_78801C.1
ccacgcgtccgcccacgcgtccgtacggctgcgagaagacgacagaaggggatggttgactggttgttttttaaattgcatgaaacatttatttgttcttatagaaaaagttacaagtaagtcttcactgcaagtagaagatattggatccagttccagggttgaactccatacgattattttttaatagaaaaattgactgtgacgtagctgtggaggacacgattggtaaagtattgaatccttcctgcgactcttttctcattggttctctgtgttctccaaccacacctcagaatctcttgtattattattcaaccaatcaatggcttcttcaatccctaatggacctccctctgcgttgaattcccagttctacgatgatctcagaccgccacagaggaccttcaacttttcttttcttcaacctgtcaaatttcctcgttctcaacgccttttcgtcgtcagagccagcgatttggagttcgaagccaccgttgtcgccggcaaggtgccgcccaaaccggcggctcctgtcggaactccggtggttttgtcacttccacttcaccggcgtcctcgccggaaccggaagtcgcctgcgcttcggtcggcttttcaggaaacgagcatttcgccggcgaatttcgtgtatccgcttttcattcacgaaggtgaagaggatactccaatcggggctatgcctggatgctacaggcttgggtggaggcatggacttgtagaagaggacaatacagcactgtattatctattatgtagctatgatccatgtagctgacccacctcgcgggaaaagacttcgttgttgctgtttatggatcagctccattgttttgagttgcaaaagcacgggatgttggtgttaatagtgtcgtgctcttccctaaaattccagatgctttgaagtctcccacaggagatgaagcatacagtgaaaatggtttagtgcctcggacaatacgtttgctcaaggataagtacccagaccttgttatctatacagatgttgcattagatccttattcgtcagatgggcatgatggcatagttagagagatggagttattatgaatgatgagacagttcatcagctatgtaaacaagctgtagccccaggccaagctggagcagatgttgtcagtcct

SEQ ID NO: 119373 - DNA, 743 bp, Glycine max
  Clone ID: PAT_MRT3847_78802C.1
ttatatatgctgcatttaagtcttgtaatttgggaatatgaactcccctgcactgttaattcattttcaactgtcaactaatgaaattcccgataagtacagaggctattttgatatgaagttgaagaagaaatttatttgttgtgctagtttagtagtttattaattataagatatcctaagttattatgcctttaaagctggggataaaaggaaacttcagcatacttttatgtgaatgaaaagatatagttccgagtagtttaaaaacaagtttgttttgctttatcattttccccgtcctttttcataataattcttaattcgtggaacaggtttctggtgaatacgcaatgataaaggccgccggtgctctcaaaatgatagacgaagaaaaggttatgatggagtcactgatgtgcctccgaagggccggtgctgatatcatcctcacatattttgctctgcaagctgccaaatgtttgtgtggagagaaaaggtgaagttctctaattatgtagggggtattgttcgtgaagaaggctgaagagcttataataccagtatctaaggctggatttttgtcattgtaaattgttttagaaggacatggaggtttgtgtagagactagagagacattcataataaaattttgtggcgtctttgatttcgaaaaaaaaaaaaaaaaaaaaaaaacataaagcggccgctctagaggacaagcttactacgctgctgcgac

SEQ ID NO: 119374 - DNA, 1561 bp, Glycine max
  Clone ID: PAT_MRT3847_78803C.1
cccacgcgtccgtacggctgcgagaagacgacagaaggggattctataatcaatcaatggcaatggcttcttcaatccctaatgcgccttctgcgttcaattctcagagctacgttggtctcagagcgccactgaggaccttcaacttttcttctcctcaagctgccaaaattcctcgctcccaacgccttttcgtcgtcagagcctccgattcggagttcgaagccgccgttgtcgccggtaaggttccgccggcgcctcccgtgccgcccagaccggcggctccggttggaacaccggtggttccttcactgccacttcaccggcgtcctcgccggaaccggaagtcgccggcgcttcggtcggcttttcaggaaacgagcatttcgccggcgaatttcgtgtatccgcttttcattcacgaaggtgaagaggatactccaatcggggctatgcctggatgctacaggcttgggtggaggcatggacttgtagaagaggacaatacagcactgtattatctattatgtagctatgatccatgtagctgacccacctcgcgggaaaagacttcgttgttgctgtttatggatcagctccattgttttgagtattattttagctactcattagaagtttgatgttcttttaatttgatcaaggagttttgctgattttattgatcaaggagttttcagtgggcattttgtgcttcaggttgcaaaagcacgggatgttggtgttaatagtgtcgtgctcttccctaaaattccagatgctttgtagtctcccacaggagatgaagcatacagtgaaaatggtttagtgccctcgaacaatacgtttactcaaggataagtacccagaccttgttatctatacagatgttgcattagatccttattcgtcagatgggcatgatggcatagttagagaagatggagttattatgaatgatgagacagttcatcagctatgtaaacaagctgtagcccaggtcatatgactgtcttctataaacattttcaactgtaggcagttaccaattattttttttaagatttggctcgaggtgatcaatatgttcagtatggccttgaaatgttcatttactttcaaataagtttcctttgtttgtggatgtattttgtttcatgtaataatgggttcaacatggtgtctcaactcccagatgaaaaaactgatgctttattgtagttatcagcaagtaaattttttgccatgagttttagggaaattaatggttgagtatactgaggaaatatgcttttatgttcccgatctctaaggtttccttgctacacttctctataacaccactaacattttttttgtctctttaatttacaaaaaggcccaagctggagcagatgttgtcagtcctagtgatatgatggatggtcgggtaggagcactgcgtgcagctctggatgctgaaggctatcagcatgtttctataatgtcctatacagcaaagtatgcaagttctttttatggtccatttagagaggcactagactcaaacccccggtttggagac

SEQ ID NO: 119375 - DNA, 371 bp, Glycine max
  unsure (1)..(371): unsure at all n locations
  Clone ID: PAT_MRT3847_78804C.1
agagaaaccacggaagggggaaagatgatgatgttttcaatagcattttttctaatctttttacccttttctgcgctaattacacagggcttttctgaaatggagtctgagttnaaaattctccatccttaaccctttggaatcataaatcacattttttcctctcactaatttctcacgtctatttccattgtttctaaaacaatgaccaatttactaacctatgcgatcctcgatttcacaatcacgttttaaatgactatattcacaacaagtgaaaccaattttacttactccctcctaattacaacaccatgttacttccattttacttagatgtcttcttatgcctattatttcacatacattat

SEQ ID NO: 119376 - DNA, 241 bp, Glycine max
  Clone ID: PAT_MRT3847_78805C.1
ccaattccccaatgtgtcccaccgcagccgccaccatcgcgccgtccccagtgtcgtcatatccgccgttgaggcgccggaaaaaatcaccaagctcggcgacgaaatcaccggactcacactcgaagaggccaaaaacctacttgacttccagcaagacaagctcggtgtctccgcggcggagtatgcccctgtggcaataaacaatggtgccggatgcactagtgcagacactccagca

SEQ ID NO: 119377 - DNA, 186 bp, Glycine max
  Clone ID: PAT_MRT3847_78806C.1
agaattatcgattatacatatgcagaaaatatacaccctgtgccaaatgttgacaaaccaccagtccagggtgtatttacttccttagtaatggtaaccgcatcaccaacaaagcgctcttcaggtagggcaaaaaaataatacgtatgttcaataaacataattaaagtgttgggttactgattt

SEQ ID NO: 119378 - DNA, 430 bp, Glycine max
  unsure (1)..(430): unsure at all n locations
  Clone ID: PAT_MRT3847_78807C.1
cccanaaaaggaaaaacacaagtttttttcagaggaaacccaaaattgttaacaacgttggcctattggttcctccctcagtggaaggggaaaaaacaaaatgtaattcttgacaacaaactagttatgcccccccttacgaggttaaacgccctacaagtttaccgacccctcaaacaaggggtgggggagagctcgttgaagccaccaaccaactttttttgtttggcaaaacttaaaaaccgaaaaagccaagctcactagctttttccttctaaaatgtttaaaagacctggtgaatgattggtactgaaagcaattttccggttcctgaaccaagggcccccataaattttgccaaccctttcggaacaccaatacagatccctccaaatgctggggccggggaaatgaatcggttaaacttttt

SEQ ID NO: 119379 - DNA, 263 bp, Glycine max
  Clone ID: PAT_MRT3847_78808C.1
ctcgagccgaatcggctcgagtacggctgcgagaagacgacagaaggggttttgtgagtcacaaaaccccttcttggcggcctaaatgtggggcttgtttttaaccttcacattattcctctcctttacctttttggtgccatttttccctatttattacatgacgacagctttgcggattcatcgatataaatgctcaccgccaccacacactttttatttacagaggctcatgacttacttgccgagaacctcatgggtgc

SEQ ID NO: 119380 - DNA, 196 bp, Glycine max
  Clone ID: PAT_MRT3847_78809C.1
cctgcaggataccggatccggaaatatcccgggatcgacccacagcgtccgcggcttcatctcttctctgcgatgcattcatgttctgtcggtgcttctccaccatgttaatagcatagttattatagctacagaaaacatgaacgctggcagaacagcattggatatagtgtcccgttgggtgcagtatattact

SEQ ID NO: 119381 - DNA, 421 bp, Glycine max
  Clone ID: PAT_MRT3847_7880C.1
caaaaaaaaagaacatttttacttaattaatcgaaaatagtgaggcaatagaaagcacctttcttgagagtacacatcaacccatgtacacatataacacaaacacctgacactcagaagtcaatagacccaaacctgactcgtacaaacatctacgctttaaatggtcccggtacactaccgcctgtctggacactatcgtacaacacaatgcctgcttcacatggaccggtcagaatcccagggtaagaccgaacatgggtcttacattacaccgggtgcaggatcacgttctgtacaaactttatccccttcgagatacctcgtaatgcactgttgaactccatgcccggcgtaaagtttaccccaaacaccctacgagaccttgttccttgcgtctgtcaacctgaccctctgttac

SEQ ID NO: 119382 - DNA, 463 bp, Glycine max
  Clone ID: PAT_MRT3847_78810C.1
ctcacgcgtccggtttgagacattttcacatttacaaattaaacgacaatcaactaaactcctcaattagcaaatccttaattaacttcccaaatgactcatcgccaacaaaacgaaggagggggtggagcagtgacgccgaacgcaacaacgacgggccatttgcaggagcaaatggccaacgccatggaacgcgtgggggaggcggcgcacaacgtgggccaacgggtgaccgatttcttccagggggacccttttgggacgctaatcggacgcaaaatcgaattggccaccgatgctacgaaaatggccactgaaaattggggactgaacatggaaatatgcgacttcatcaacggcaccaacgacggaccacgagacgccgttagagcgatcaaaaagcgactgcaaacgcaaatgggaaaaaacaacgcaattgtcatgtacactttgactgtgttgg

SEQ ID NO: 119383 - DNA, 397 bp, Glycine max
  Clone ID: PAT_MRT3847_78811C.1
gcgaggacgcttgggtactgcataaatttatgagggacttgggcccacaagcaagttgccgagttgatgagcaaccagttaacattactgagggaaattatgtcaaagagcttgttacaggttgggcatatgatgcgtgtacctacaacaaatatggtgggtgatgggtgtgcatacaaggatgctatggacgatgaaattgtagggtttactgttgctggaagcaaaggaagactgggatatgcttcattgataccatatgttgaggcatatgtgctcgctcaaggtgctgaaggttactttgacttgttccctgtggaggttgaatgtcaagagggagttgctcacattggtgaattgcaatgtggagtctatgttacactgactacagaaacta

SEQ ID NO: 119384 - DNA, 136 bp, Glycine max
  Clone ID: PAT_MRT3847_78812C.1
gaagaagatgttcaatctcgagtttaattccagctctccgcgctcgttctcaagctccgtttctcggcgctgtcggcggtgacgttctctgacgaggttccgccgttggctgcgtcacggcgtcccggtctgggtc

SEQ ID NO: 119385 - DNA, 250 bp, Glycine max
  Clone ID: PAT_MRT3847_78813C.1
tttccgtttttaccccaaaaaccaaaattacgacttccaaggcataaacccaaattccaattgatagttgtaacatgagatgacagacgatcgcgtgcattcaatcccaaacctagtttatgttttcggccaccgtccactggacctttgacgccatccacggtggaccccttcgttgtgtcgaccttgactacggtaccaacggctgggcctcctcctccggtacctgttacttctccgctctccccaa

SEQ ID NO: 119386 - DNA, 225 bp, Glycine max
  Clone ID: PAT_MRT3847_78814C.1
gatcggagaaaaaaccggtgcaaaagagaagaccttaatgaaaggaggggcccaaagaaagggggtccagctacatccagggatctcaacccatcttgagcccttgaaaggaaccgtgctaaggtagaagtaaccgggttttttcttgcttagcgaaaacataccacaaacaaccttggccttaggacatgaaaaaataaagttctggacagaggagaatgggaa

SEQ ID NO: 119387 - DNA, 166 bp, Glycine max
  Clone ID: PAT_MRT3847_78815C.1
atcgagccgatccattctcttttaaaaacaaaaaaaaaagcaatagatgaagggtagagtacagatgagggtattgattgctggttgggggatgtggaacaatggtggagttcactggttactcagtgggcctgagcctctttttgatttcgttaacaagcctatg

SEQ ID NO: 119388 - DNA, 370 bp, Glycine max
  Clone ID: PAT_MRT3847_78816C.1
atctattacctttgtatcactggtgatgtttatgtaaacgccccctcggctcctaatcctgagagggccggagactaatttttacctaacaaaacttgccccctttgaggtttatgaataggtccggccaaccctttgcatctaactgtttggaagacgagggggccacacccctttagtaatggcgctctccctaggattttacttaacactcttgcttgtcccagttctataagggggaaccaacttctggtgaccacctttttgtgctatagtaattgccggacggacatttggagggtgccgcgcgggcagctttgttataaacaaacgttggtggagcaaaatatagccccaggcctcggcccac

SEQ ID NO: 119389 - DNA, 832 bp, Glycine max
  Clone ID: PAT_MRT3847_78817C.1
cccacgcgtatcccgatccgtaagaaaagatcgttgcaatgtcttcaatgatggtgaaggggaaggtggtgttgattcggaagtatgtgcttcaaaccatatccaatgccaaggagcttgttggcaatggcttcaacctaattggctcatcagtcgaatatgatattactaaatctgtgtttttcaacttgattagccgcaccaagtcatccaaggataattattcaaaagatggaaaggaggcctgtttagagaataatgcttcggtgttacgaagcttgggagggaaagaggaggaattcgacatttattttgaatgggatgctactgagatgggaattccaggagcattttacgtaaaaaaccatatgaaagatgagttcttccttgtgagtatgactcttgaatatccacttccaacatgtgaccgccacaaggacaaaaacagtatcattcactttctttgtaactcatgggttcacaatcatggatgctacaaaacgcatcatcgcattttctttgacaataatccatatctccctggtaatcaaacaccagaggcattaccaaagtatagagaagaagagttggataatttaagaggagatggaacaggagaacgcaaggaatgggataggatctatgattatgatgtctataatgatttgggctatctaaatagtgatgaaaaggatgatcacccaatccttggaggcaccctctatccctaccctcgtaggggtagaactggcagaaaactccttcattgacaaaatattaatggtgtaaatacgagaaacctgcagacaatgttatttatgtgccaagggat

SEQ ID NO: 119390 - DNA, 309 bp, Glycine max
  Clone ID: PAT_MRT3847_78818C.1
gaaaaagcataccaggccaaaaattgaacactacaaatagaaagatgacatttaataaaccaaaggcaacacaacgcagcaaagaccagaaactcgctgcgcttaacaaaattgtaatgcaggggttccgacaaacacaacacattaaaacacagataaataaaagcatttttgccaccgtcgatcaagaacccagttctgggaacaacagttgcgagatgttggcgcaggcgcaacacaaagtcccatgaaagacaatcctaaaagaaatcaccctgggccacctgaaacaatacacctttaagcgtg

SEQ ID NO: 119391 - DNA, 274 bp, Glycine max
  Clone ID: PAT_MRT3847_78819C.1
aagacgacagaagggctccaccctctgctataattacatgactagattatttgacccgctgctattgcctattctttggattctttcgattgctgctctttctctctttacgtggattctttaaaaaaacgttgtacttcagtcacaaagtcttattagcatttttaccaaaagaaaaaaatatcttatttgcatagtttttttttttatatataaatagtatagtattgatatatatttctgggttcgactgacggtataatttgtgacgcgt

SEQ ID NO: 119392 - DNA, 310 bp, Glycine max
  unsure (1)..(310): unsure at all n locations
  Clone ID: PAT_MRT3847_7881C.1
cacgtcgcangcacgcgtacgtaagctcggaattcngctcgaggatgctccagattcngctcgngaaagnagtcgtcattgngtncatanatnacgannatnanaagtacnttaggnttctcggtgctttntacttgcgtatgcactggtcctgacatngacntctaccgctacctcgaacnttatanaatgncnatcgcaaacntagacgaangctcgcngatggacagtttncattgacgcacgtngatggggtnatagatgnnttctcacnanggancangcttgtcagnttgctctgccacgcgtt

SEQ ID NO: 119393 - DNA, 1806 bp, Glycine max
  Clone ID: PAT_MRT3847_78820C.1
gaattcccggctcgacccacgcgccgggcaaagcaccgaacaacttctccaatctctcttcttctcgtgcactgtagaaattcagaagctcatcgtcatcgcgagaaatcttggtcataaaccctaaactagttttagtttctggaacattgataaccaattcaacaattgagaagcgatgcttggcgatggaggcgaaaccccctcaaggtatgaattgttgagcatggtgaagaagcattccaatttaatagggaaaacggtagttgaggagcaagatgcttctgatatcgaaatggatatgaggttttggcacgatgtctttgatttgtattttgtctgtggcaaggaatcaaggggacgccaagatgatgatcttgttttctttgtcagaaaattgggttcccatggttctggttccaacaataaaacagagagcgttgatccttattttgtacgcaggtgggcacctaagttgagcgacttagtggatgaaacttctatagatgtggactggaggcgttcgttttacttgaatttaattgctcatacatcattcagtgtaactgttgcaatttgcagtcaccaggatcttcttaaccatcgagctggagaggatacacctttatcccctatatataaggttgtgaagactgactatgcatcccccgcgcccgtaaattttcaattggactctaaaaaggaagtggaaacgactgctgcttatccagatatatgtttcgcaattgatgattttgactccacttttgatgctgtggttttgactgaaaaagatcattgctattgtgtagttctaaatgcacatgatggggcagcatttccgagtgaaaaggtgtccaatgattgtagtactagtgatagcagctctctgcaagtccacactatttctgcaaagaaaaaggatacatagcttacactttgctcacgatgtgtgagctatcagatggtccgagatgcttatgatgctggtaggtctagtctcggccgcctgtgcgccgtggtccatgcttcgggcaaaacagacaggatttacatgaaaggtcctgggggccgaggggaagttgaagtagctgtttctggtgttgcagatcaaagccacgaagattcaggcccattttctccggttatatcaaagaaagggtttgggcttggtgtaattgtccgcaaagcagcatctgctgcatcagtagctgcaaggcatgcttatgcagctgcctctgcctctagccctacttttgatgagttgatacctttgaaatgcagcttaatgtccatatcattgccctgggaatatattgcgtatgatcttctgtttaagggagctcctccagtgaacatgtgaccatccaatgtatctgtgggcgcaatgaaaatcgaaatggagattttttcgagcaactttttcctagttatgaaattcatttctcttctgacatgtctttggtgcatgttgtgtgcacttgcatgctcagaaatgtgcatatttggtgttgggctgagtaacccggggtaatttgctttttgcatctggttataaatccatattagttggggtatatgttggattattgtaatttcaacatttcaaatcgcccccaggtttttcctgacaaggtattttttttaattgtttatactacctcccagtcaattacgccagagaaaagataaaaaggtgaaagaaactggtttgcggtcaaagctgaactgcccgcaggcagcgagggcccctaaagatgggaaccttttaatagatgaatttatttatgaaaaattatgccttcc

SEQ ID NO: 119394 - DNA, 319 bp, Glycine max
  Clone ID: PAT_MRT3847_78821C.1
gcttacgatttgtggcttgtgagttttattcgtctgggaatgacgaatactgacacaggctagggccagggggaaccctaaacatgcccggctcaaaagaacacccggagcggaaagaaacaaagccgccggccagaagagagaggatcccaaaaaaaaggaaaagagaagggggggaacccccggccaaaaaaaaaaataggaaaaaatggagggggccgcccccccacgcaggggcgacacagcgcgcccgaaaaaaggcggcaaccaaaaaggaggggaaaccctaaggggcaggaatgggggccgacaaaaagag

SEQ ID NO: 119395 - DNA, 399 bp, Glycine max
  Clone ID: PAT_MRT3847_78822C.1
tgggaaatttgcctcccctgaatatatggtgccaagaaatgctatcctttgttttcccttgagccttggcactggcttctttccatcttgggtcccctgaaccgaaaagctgggtaaaatcattcgtattttggcggagatgatatcacattttcgtaaattttttgtcttttaataataattcctcctttttttttgcaaaattatttccctataaatagtaaatacccatcatccctcctcagttcacaaatcctttgtccttaaacacaatagaaggatttcgataatccttttatcttttccattctttattttttgcaatatacgaaactatgctccatgcgatgctctcaacatggatcactcatcactggcattttcatatttactaacact

SEQ ID NO: 119396 - DNA, 169 bp, Glycine max
  Clone ID: PAT_MRT3847_78823C.1
tatgacgtcgccaccacgcaagcttgtgtctctgcctgaatggagagccccctccctttttttttttttttttttttgtaacagaaattggtaatatataataaagacctagcacgcataactaacaacatgagaatgaaaaattccctcaactgtgcctactagggcc

SEQ ID NO: 119397 - DNA, 403 bp, Glycine max
  Clone ID: PAT_MRT3847_78824C.1
gcatatctgcgtcaataccctaaccggtaactcgattactctataggtcgagtcctctgacaccatctatgacgtgagatctaatatccatgacaacgatggcattcctccagacctgcggcgcttgatcttcgccggaaatcagctcgaacacggcagagccctcgccgattactatattcagagagagtcgacgctctatctggtgcttctactccgcggtgggatgcagatctttgtgaagacgctcaccgggtaaactattactctggaggtggagagttctgatccgatcgatcactgtgaggcgatgatcgatgatatggaagggattcctccggatctgcagcgtcttatcttcgctgggaagcagctcgaagactgacgctctctctctcgttac

SEQ ID NO: 119398 - DNA, 426 bp, Glycine max
  Clone ID: PAT_MRT3847_78825C.1
ggtttttgaatttttgcatttgcacatgaaattttatttgcaagaaaagcaggataaaaaaaaatagtaacattgcacgcatattttacaaaatagcacacatggtgtagtgactagtgagatatattagtttatgcatttataaattctacgcaaacttgtgtatctgaatttatttggctccaacttcacttataggtgggggccaattaaattcaaataaacaatcatttatcagcttgccgcagaatctgtcaagaaaatttaggtttaatatgattctaccgggtggttatttatatatcatggcctactaccaccctatagctagttaattatcacacttgggaaccaagaaaggcatccaaagttggttttccccccatttgaacacaaaaggcctccttgacccttatcgattccctc

SEQ ID NO: 119399 - DNA, 360 bp, Glycine max
  Clone ID: PAT_MRT3847_78826C.1
agaaagaatataaagggtaaattggggggaatattaatttattaacacaaaataaagtacatgttacaaatgaaaactagaatagaataattaatgcgcccccaaaacgtatggggggggaaaaatataactttttcaagagcttcactcctcacaaaataatagatcctcttatatggatcgcactatgaatacctaaagcactatttattccactgtaaacaccttttggagataatgtgagacacaattatggttgtcgatccatcaagactcggcagataagatggtgaatcttcatgctattcatgtggcattgacattcaatggagactatgttaccaatctacttgtcttaaa

SEQ ID NO: 119400 - DNA, 513 bp, Glycine max
  Clone ID: PAT_MRT3847_78827C.1
tttttgataaaaattactcatcaataatgatactttacaccactgtgatggtaattcaaaaaataaattaaggaatattttacaattttcttttggtgcaagagagaggctaaggtcccaagagaaaaaatttattaaaaatcaggaggaagggaaaaaaaaaaaaaaataccagctacatcagctaaaacatgagcagaaagaaaactaggagtagaataaaaaactttactttgaccatctaacatcaacgccaaatttagcaagagcatctgctgtcttgtttgcctcacggagaatgtggcaccaagaatatgtctctcctcacactgaatcttttgccgatttcaccaactggaagcagttgttggagaattcacagacaccatccatcatctcaatagcatatttgaaatcagattccacatacaagtttgtaaaacctttatcccaagcaagcttaactcccatagtaatagcccatatctcagcttgagatattgaacacattcc

SEQ ID NO: 119401 - DNA, 516 bp, Glycine max
  unsure (1)..(516): unsure at all n locations
  Clone ID: PAT_MRT3847_78828C.1
tcgcccacgcgtccgcggacgcgtgggatttgattaaggccttaattaatcaattaactagttaggactcgaactcgagaactctagttaattgattaaggtactagctaaaatcatgaatcatgtgcgaattcctatcgacccagatgatgaaagttggaaagagagatgcagcaagaggatgaaggaattggagaatagacaattcccaagtcaaaacgcagcatcacaaccagaactagtgcataaggagcttgttgggaagagaaaagttatgacatctgagttgtatgaagctgttgaaaaaggagacgtggaaaacttcgtggacgcgttgcagagaacatgtgatgaaaggagaacacccttgcatgctattttcgatcaagttacctgcgcaggggattcattgcttcatgtggcagcagatcataaggggagagaaaggatcgcggagttgattgtgatcactttnctgagcttcttattgggagaaacataagaggagatactcca

SEQ ID NO: 119402 - DNA, 697 bp, Glycine max
  unsure (1)..(697): unsure at all n locations
  Clone ID: PAT_MRT3847_78829C.1
cacgcgtccggtttctcacacaatctcaatggccaccatgctcagctactcacccccgcgtttcaaaatcgccgtcgacgctcaccacgatcctctcttaccttttctccggtctatcaagaaagccctagaagcttccgacgactccgcttcgaatctcagtaacttactcaaagattgcatcagaaacttcaagaacaatgaccgctaccgaaacgacgtcagattcctcaagatctggctcctatatatgggagttagtgatgattttgaaagtgttttcaaggaaatgctggacagtaatgtatgtaccaatagttcttcactttatgtgtggtctgcaagtttttttgagttgaagggaagattgcatgatgctctcaccatctatcagcttggcatttgcaggaatgcagagccaattgagtggttgaagaaggcacatgccttatttctcaatagaatttctgaaatacagaatgctgcttcaactcagaaggttgatgataaagaatccaagaaatttgaagataatggcattaatccttggggcacctctaccatggatagcctgttaaagaaaatatatcctttaattatgaaatttgatgggtatcgttcaagcactaaaccatacacagngaaaagtggccttatctacctttgagaantcatcaaggaataaagttatagagat

SEQ ID NO: 119403 - DNA, 536 bp, Glycine max
  Clone ID: PAT_MRT3847_7882C.1
ccacgcgtccgcgccgctccgccgcaggagctgtggtgcgtggcgaagatcaacgcggaggacgcggcgctgcaggctgcgctggactgggcctgcggggctggcggcgccgactgcggcccaatccagcgcggtgggccctgctacgaccccaccagcgtgcagaatacggcgtcgttttccttcaacgactattttctgaaacatggcatgaccgacgatagctgcaacttcaacaacaacgctgccgtcacttccttgaaccctagtcagtcaaacactcaaaccccactttctcaatgtggataaaaaaaatcatgtcttaagatgttaatttgtttcatgaagctaatgcctcattcttttttgttttggggcttctgttttcaggtcatgataattgcaagttcccctccgggtaaattgagcttggattttactctttttttttttttggaatttgtcaattatgaatttttgttgattatgaaggtttgaatgtgaggaaaaagtaagtaatctcagttgttgatgag

SEQ ID NO: 119404 - DNA, 333 bp, Glycine max
  Clone ID: PAT_MRT3847_78830C.1
cgagggtcagagcccccttatgatgagaggaaaaaaaaggccgaaaaaagggaacaatacaagcgaacatcaacgccgacccctatcggaccccgcacgagcgaaccagcgatcaacatctcctccaccctcctagactccctcaaaacactcgcccaaaacaaaggcaacttccaatccaaatcctaagaaaaccaccgcaaaaatgggagagaaacaacgcgccagatcgcgattctccacgtgctcttccaagaactccacgaccgagggtcaatcatccctcactctaaccgcctctgcttctctgaccaccacgtcaccttccagaag

SEQ ID NO: 119405 - DNA, 1047 bp, Glycine max
  Clone ID: PAT_MRT3847_78831C.1
ggctccccgcgtccgtacggctgcgagaagacgacagaagggtacggctgcgagaagacgacagaaggggactcaaaaacacactcttcaaattccaatccaaaccaacaataatgtctctcttccattgccatgcctttcaccaccgcatggccactctctcacccttctcacccttcaattccaaacccctctttgcttttctaccaaacccctctttcttaactcatcatcaacaacaacaacatccttatcctctcaccaaaaccacaaccactgacctcaacaacaataggcctctttcactctccacactgcccagaaagttgctctgcaaaccaccccaggggaaatatgtcagagaggactatctagtgaaaaagttgtcagctcaggaaatccaggagctggtgaagggagaaagaaaagtgcctcttatcattgatttctttgcaacttggtgtggaccatgcatcttaatggcacaagaacttgaaacacttgcagttgagtaccaaaacaaggcactgattgttaaggttgatacagatgaggagtacgaatttgcacgcgacatgcaggttcgtgggttgcctactgtgttctttattagcacctgatccgaacaaagaagcaattcgaaccgaaggacttgtccctatacagatgatgagggatatcattgacaaggatatgtgaaacaacaacaaagtgttctgatcacctgacatagtttgtgttcctggatcctgcaatatactgtctggtgtaatgctagcctatctgggacagaattgaagtgctaaccgattcatatgattttggttattgaaggttgtaaatcgtatgatatttatgtaaactttgaactcgacatgctccaaagtgtatcacatgtgatgtcaaatggaagagaacattgtaaccctatcatgtaatagcaccctaccattcttcaaaatataaaatgttattgagagggacaaaaaaaaaaaaaaaaaaaaaaaaaaaaaaaaaaaaaaaaaaaaaaaaaaaaaaaaaaaaaaa

SEQ ID NO: 119406 - DNA, 1677 bp, Glycine max
  Clone ID: PAT_MRT3847_78832C.1
atggctggacgaaggagaactatccctcagggctgttacttctcttactcaagaatacgtccagttctcgatgctatggaaaatctgaggcgccttaacattacaaaggagggaattcagtttccttccattgttgttgttggcgatcaatcttcaggtaaatccagtgttcttgaatctttggctggtattagtctgccacgtggccaaggcatttgcactagggtgcccttggttatgaggctccaaaatcaccctcttccaaccccagagcttgtgttggagttcaatggcaagaccatttcaacagatgaagcaaacgtttctcaagccataaatgctgccacggaagagcttgctggccatggcaaagggatttccaacaaccctttgacgttgttggtgaagaagaatggcgttcctgatctttctatggttgatcttcctggtataactcgggttccagttcatggtcaacctgagaatatttatgaccagattaaggatatgatcatggagtatataaagccgaaagaaagtattatactgaatgttctctctgctagtgttgattttactacttgtgagtccattaggatgtctcaaagtgttgataaagctgggctcaggacattggctgtggtgacaaaggctgacaagtctcctgaaggcttgttagagaaagttaatgctgatgaggtcaacattggtcttggctatgtttgtgtcagaaaccgcattggtgacgagtcttatgaggatgctagagtgaaagaacagaggctgttcgagttccatccacttctttccaaaattgacaagtctattgttcaggctatgagcatatctaaaactttgccagaaatagtgaaaaagatcaatgagaagctggctaataatttgtctgagttggaaaaattgccaacaaacttggcttccgttgctgatgccatgaccgctttcatgcatattattggattgacaaaagaatctcttagaaaaattattcttagaggagaatctgatgagtacccagaagataaaaacatgtattgtactgcacgtttggttgagatgttagattcctattcaaatgatctttatcgttgtgctgaaagtgatgcaagtaagaattttcttatgcaagagataaaggtactggacgaagcaaagtggattggtcttccaaatttcatgcctcgcactgcttttctttctatattgcaagggaaggaatacaataagttaatatctcagcaagatgcttttctgaatgacgttttgaacaatccggataaaccatcacatgtgagtcttgaaggtgtgggcaaaattgaagtcggtcatttgaggcaatacccatctttgcttactcaagcctttgatttgaaggttaggatgatttcgtactggaagattgtgcagaaaagattgattgacacaattgcgttacatcttatgctgagtattaacaatcttgttaacaaggatttgaaaaacgagattgttcatgatctgttatctcccagtggtggtgggattgaaaggttattggaggagtcaccttcaatttctgggaagcgtgaaaagctgcagaggagtgtcaatgtccataaagagagcaaagaaaccgttgcaaacatcattgaccgtattggcagctgcagtgattattga

SEQ ID NO: 119407 - DNA, 1788 bp, Glycine max
  Clone ID: PAT_MRT3847_78833C.1
atggctggacgaaggagaactatccctcagggctgttacttctcttactcaagaatacgtccagttctcgatgctatggaaaatctgaggcgccttaacattacaaaggagggaattcagtttccttccattgttgttgttggcgatcaatcttcaggtaaatccagtgttcttgaatctttggctggtattagtctgccacgtggccaaggcatttgcactagggtgcccttggttatgaggctccaaaatcaccctcttccaaccccagagcttgtgttggagttcaatggcaagaccatttcaacagatgaagcaaacgtttctcaagccataaatgctgccacggaagagcttgctggccatggcaaagggatttccaacaaccctttgacgttgttggtgaagaagaatggcgttcctgatctttctatggttgatcttcctggtataactcgggttccagttcatggtcaacctgagaatatttatgaccagattaaggatatgatcatggagtatataaagccgaaagaaagtattatactgaatgttctctctgctagtgttgattttactacttgtgagtccattaggatgtctcaaagtgttgataaagctgggctcaggacattggctgtggtgacaaaggctgacaagtctcctgaaggcttgttagagaaagttaatgctgatgaggtcaacattggtcttggctatgtttgtgtcagaaaccgcattggtgacgagtcttatgaggatgctagagtgaaagaacagaggctgttcgagttccatccacttctttccaaaattgacaagtctattgctatgagcatatctaaaactttgccagaaatagtgaaaaagatcaatgagaagctggctaataatttgtctgagttggaaaaattgccaacaaacttggcttccgttgctgatgccatgaccgctttcatgcatattattggattgacaaaagaatctcttagaaaaattattcttagaggagaatctgatgagtacccagaagataaaaacatgtattgtactgcacgtttggttgagatgttagattcctattcaaatgatctttatcgttgtgctgaaagtgatgcaagtaagaattttcttatgcaagagataaaggtactggacgaagcaaagtggattggtcttccaaatttcatgcctcgcactgcttttctttctatattgcaagggaaggtgaatggaattgcaagcaagccaataggtttggttgaaaatgtgtggaactatcttgaggatgccattgaaatggagaagcataccgattacacatgtaaccctgagtttgtgcaggaatacaataagttaatatctcagcaagatgcttttctgaatgacgttttgaacaatccggataaaccatcacatgtgagtcttgaaggtgtgggcaaaattgaagtcggtcatttgaggcaatacccatctttgcttactcaagcctttgatttgaaggttaggatgatttcgtactggaagattgtgcagaaaagattgattgacacaattgcgttacatcttatgctgagtattaacaatcttgttaacaaggatttgaaaaacgagattgttcatgatctgttatctcccagtggtggtgggattgaaaggttattggaggagtcaccttcaatttctgggaagcgtgaaaagctgcagaggagtgtcaatgtccataaagagagcaaagaaaccgttgcaaacatcattgaccgtattggcagctgcagtgattattga

SEQ ID NO: 119408 - DNA, 590 bp, Glycine max
  Clone ID: PAT_MRT3847_78834C.1
tccgggaaagggttcgataagacaatttgagaagcactgttttgttcttcgttcggagtcgttaccttccatttgttcctctcttccgctcgtaactgcgccgacaactcttgatcgtaatggcaccgccaccaggaccttattctggcaccagcaccctagctttggtcgctcgagcttccgctttctccttcggccttgtttatggaagcattaagctcaagtaccttaaggcaaaagccaaatctcatcagaaagctcaggagaaggctcatcattgaaagcaatgagagatccccggtgctattatctgtccatggatggagtagaatactgaaataattcattacaaggaactgtaccatgttttctccctttttttttttctggtttaagctttggataatcttgaagcattgagtttagtgcactgaaaatgttcaatatcttgccttgttttaataatgaataccatgtcttcttttgagttccatgtttatattgcaagttgcctgctatgtcttggtttgccatttgcttcttaattatgaattttgaaatttccatttcattcttaaaaaaaaaaaaaa

SEQ ID NO: 119409 - DNA, 504 bp, Glycine max
  Clone ID: PAT_MRT3847_78835C.1
atcaaaaaaagaattaccttccgctttcgctttcactaatcattcaaaagtttatgaacatggtacatttgaatttgatgactgccttaacgtctacacttgtacagggagaacttgcacattcaaaactttaaccaacccaaaaattttggataaaataaatggggaaacattcaagaggattgcttctaaaatgaattgcactatcaactgcaactacacattcctttatacacaaaaaaataggccattcaagataataacatggcccaagttactaggttagtggatggatccggtttaaactcctggttcccgttggcctgcgtttgctatttgcatttactattccagtgcgtgttccgaaagcagacagtatataaagtattttgcgatgaaaaatattttcatttagtaaccttatttgcactcttaaacacctgcccttgttagtacgagaagccgtcaaagtaagccgcaaatttcatttctgcttcataatat

SEQ ID NO: 119410 - DNA, 689 bp, Glycine max
  Clone ID: PAT_MRT3847_78836C.1
gcacgaggctggctagggttcgataatcgacaattgtgaagcacaccgttttgttcgtccattttttcctcccttcctctcttcctgcgccgacaactactctcgctcgtaatggcaccaccaccgggaccttattctggtaccagcaccctcgctttggtcgctcgagcttccgctttctcctttggccttgtttatggaaccattaagctcaagtacctcaaggcaaaagccaaatctcatcaaaaagctcaggagaaggctcatcattgaaagcaatgagagatccccggtgttattatctgtccattgatggagtagaatactgaaataattcattacaaggaactgtatcatgttttctcccattttttttttcttctctggtttaagctttggataatcttggagcatcgagtttagtgcgctgaaaatgttcaagattttgccttgtttaaataatgaataccatgtcttcttttgagttccatgtttataacaaaaaacaaaaaaaaacaaaaacaaaaaaaaaaaaatggctatgagatcgtgggtgagtcgaggatccgtgactcgtttgatggactcagcaaatcgaggggctttcagtcgcttcttcagcgacaagggtcgggttctcagcgaggaggaacagggccaaagaaaacgtctacctcccacaaatggga

SEQ ID NO: 119411 - DNA, 1163 bp, Glycine max
  Clone ID: PAT_MRT3847_78837C.1
atctccccggctgttgcgctgcaggggctgatttcagggtgatctgtggtctcttgctttgctgttgtggggctggggtttgcttggggtagttctttcgcttcctcctctggtgttgggctcggtctgggccccttacgttttgcctgctctctatggagcgtaggcaacattgtttctctaatagattgcactatctgttcttacccatcgtgttgtcctgttagcgcgcttgcctggggggcttcttggcttgctttcgtaagttactcttctaatattatgttcacaatagtataatgctacccttaatgtgtactttggagttccgcccgagggtaaactcctagattggaggaagcgctgtggcataatagaaggaataggtcgaggattgctttatcttcatagagactctaggctaaaaatcatacacagagatttgaaggcgagcaatgtcttattagatgaagcgctgaatccaaaaatatcagactttggtatggctagaatctttggaggaactgaagatcaggccaatactaacagggttgttggaacatatggctatatgtcccctgaatatgcaatgcaaggactaatttcagagaaatcagatgtctttagctttggtgttttggtactagagattgttagtggaagaagaaactcaagattttatgatgatgagaatggtcttggccttttaggatttgcctggatacaatggaaggaaggcaacatattatctctaatagatagcaatatatgatgttactcatcataaagaaattttaaggtgcatacatatagggcttctatgcatgcaataacttactgtagacagacccacaatggctgcagtaatttgtatgtttaacagggaagttgtctttcttccttctccaagtcaaccagcactcatccagagccacaatatgttgaattcggtgtcagtatcatctaaagaaagtcatagattttgctccatcaatgctattagtattacagatattggaggtagatagcgaaacaaaagctctaagaaagatgaaacctgtataagttagtgtcagagccacgagatgattttgccttatttgaaatttcaattttgaataaattttagacagtcttcaaatttgattcttatgttttgtttt

SEQ ID NO: 119412 - DNA, 263 bp, Glycine max
  Clone ID: PAT_MRT3847_78838C.1
ctcgctaacatggacattgcgaaagaaccctttgaggtttctgtcacacggggcgttaatattgtgtcgtcttgcacaccagtacacctagcctgcgcacgaaatgccgtcctccttagagcgcgctgattcttctttcggcgatggaggttttttttccgggggcggtatttgcggggggggcgaatctttcctggcagccctgatgagatttcttagaacccccttctggaacaccctgaaactttatcaccactcattcc

SEQ ID NO: 119413 - DNA, 388 bp, Glycine max
  Clone ID: PAT_MRT3847_78839C.1
aaaacataatcttcgttacaatgtcaacgacttacttgaaaaggttggcatttctcattgtctatttgctcttcatcctgcatctccacttgtccactgcacaactaaatcttaacgcatctgttcgcactatcaatgacaattacctcgtgtactttgaacttctttataacacatacacttatcaagaatctatcgttaatgtctacctcaacaactacaattacaatcacacatctaattaaacttttatttaatcttatctcacaattacttttaaccactgaacctgacacttaattaccttatgaatcttctttctaatttactaattaccttaatgctgactcttacactgatacttacccttacacttatctaccttatt

SEQ ID NO: 119414 - DNA, 590 bp, Glycine max
  Clone ID: PAT_MRT3847_7883C.1
cccactcgtccgattttataaagattaaaatatttggtggcttttacaggaaagaaaatgaaataaatattaaattataataacaagaaatatatctaagacttcttaaaatttagtgtaatacggtgactaactctctcagtctaattaatagtttcaagttatcaaaatattatttgcacctatttccatattttacttcaaaattatcattggattgagtatgtcacttgaattgtaagaatgatgtcaataattttttttacattattttcaattctcacgtataaaaaaaatgatgacgacaaactaaataactcacttctttcattattttatgatgaaatgctactcgattttcttaaaatattgattaaagaattaaataagtttccttaaatttttgggtaattcttattccttataaattactaacttcttatataagtcattcttgcattgggaggtatttcattttaatccctgatattggacttttttactatttaaaatatatctaaaattctttaaggataaaaaacatataaacatattttttaggattaaaataaaaaatttaagacaaaata

SEQ ID NO: 119415 - DNA, 665 bp, Glycine max
  Clone ID: PAT_MRT3847_78840C.1
gtgagggagcctacctccagccattttcattgttgtttcttctttgggggctgccttaatttaagaccacaacttttgttggaaagccaccttaattgcagttcctcgtttcccgccttagttgcagcttctttgggggttgccttaattgcagcctcaaggttggtgatttagtcccacatctggtagcgataagaccaaagtagtgtatataagtggggaacaaccctcaccttacaagccagatttgtatggttgagttaggcctaaaacccaattttaagcttattgagagacttgtttcatattttggagagttgtgccttactattaacaaggtttatgagagaagaaataagggtcaagggaataaaggcacctgagttagttagagagtaacaaagttagttacaagtagttaaatatgggaattgattgtacaaatagtataaaagggagagttaatggccaaatagggatattggaaaattgaaaataagtgggtgggaggattctggtccctcaaagttcctaagaagattctttctccattgctgaatcaattcctaataagagccaacagaccttctaacgattttggaatgctttattaaggaagcatttaattgttgagggcatgggagaaatatgactgaataattctg

SEQ ID NO: 119416 - DNA, 397 bp, Glycine max
  Clone ID: PAT_MRT3847_78841C.1
aaaagggcactgaacgctatcgcttgcaggttgccacactacggtgatgtttccaccaaacccgtttgcgttgttgtttgcaaatacatggcaacgataaggatcctaggaacgctgaaagagggtgacttgcatgggaaaacggtactcgttaaggtccatcttaacgtgactttggatgacacccttaatatcagcgatgacactaaagtccgtgctgctgttcccaccatcaagtacttcactcggaacggtccaaaagtaatcctttccagccatttgcgacgttcaagatgtttaacacctaaatacagtttgaaccctcttgtgccaacgctgtcacaacctcctggaactgaagttactattgccaacgaacccaattgggaagaaattt

SEQ ID NO: 119417 - DNA, 413 bp, Glycine max
  unsure (1)..(413): unsure at all n locations
  Clone ID: PAT_MRT3847_78842C.1
nccacgcatccatccaaaacattagagagttttataacaacaacaanaatcgggggaattgccagttatacctcacaacttgctctttgctacttccattacccagctcagttactctctccaaggttgtggcgctattcttgctcattcgtatgctcctaagccggatataattcttccaggatactctacttccaattcaacgcctactacgaacactatgcatgaaatattccctaacaacgccactgagcaaccagatttgataatcttgtactttggtggtaatgatactcttattacacattcaatcagtcttggtcaacatgtacctgtccaacaatacattgaaaatatgacaaagattggtacccatttaaacagccttttaaagaagactacgcttatatttc

SEQ ID NO: 119418 - DNA, 331 bp, Glycine max
  Clone ID: PAT_MRT3847_78843C.1
tttttttctttttttctattacctttctttttcttggttttattttttttctatccttttttccttttttttcccttttattttttatttttaactttctaacataacaaacaccccccccgcccaaataagactctctttttttacaacacaaaaaaattttcctcttcagaaacaatgaaaaacagcccttcaaaacatgcacttagttcctcagtctctctaaaaaaaccacctccaccaatatataccatggcttaaaccccataattctttaccctccctccaaaataaaacccttttaatcctccctaaaaaattctcctctcat

SEQ ID NO: 119419 - DNA, 277 bp, Glycine max
  Clone ID: PAT_MRT3847_78844C.1
gtttccctgctggcctgcacaagactccagaatctataaaaaaccagtagggaatcctatcatgctgatgctcatcctttgcctaaagatgaagggaataaatggtcctttgccttttgaatatgtatgctatagagactaatgagctcacagggagcgaggaaagcatacggatatgtaactacaataacttgagagccacctttctactactagtaaataaaatataataaccgagcaacatggcctttgtccactaaataaaaagaccaaatat

SEQ ID NO: 119420 - DNA, 275 bp, Glycine max
  unsure (1)..(275): unsure at all n locations
  Clone ID: PAT_MRT3847_78845C.1
cacgcgtacgtaagctcggaattcggctcgaggcnggaaatgnatnctatngcggngaganttgtgaancntctccaantcnctgcaccganntcatnttcattcggtggtgtgccgngaagncngagcgtcatggnanncganctctcnanctggaggtgactatcagccttcacaagataatgttgcaccanagaatnnagcattggatggtganctgatgattggcttggcganaaggncgagctanagttncnaggtgtggatcccaagaa

SEQ ID NO: 119421 - DNA, 782 bp, Glycine max
  Clone ID: PAT_MRT3847_78846C.1
ttcgtgacatacaagctaggcgtcttccttatgtatctatggccagtcaagctcacggaggaagcttctctaaaggctcatggattggggaaatgaagcaggcttcggataaaactgttataattagtgaaattttggatcctaggaaaaaaaatcttatatctatgtcaaagattagtgattatgttttatcaaatgaacttgtcagcatggctttggccatggttgcagaagatcggcagataaatgatgtattggaggagctctttgcggaggagggaaatgagatgcatataaggaaagcagatctatacctttgtgaaggtgaggaattgaatttttatgaaataatgttacgagctcggcagagaagagagattgtgataggctaccgtttagcgaatgctgaaagggcagtcattaaccccccagtgaaaactgacagacggaagtggtcattgaaggatgtttttgtggtgattactgaaaaggaatgaggcatttgtgggcaaggaaaaggatatccatgcaggtggttttggagttatgaagtctaatctaatccttaaaattgtaagcattggttagtctagtcccgaccttaaaaatctccactttaatttctgactttgtaaaacatcgttcacaatggtccttttcgatgtaaaattatagagttaaatgaagtggaaaaaaaaattacattttgggaaatcaaaaaaaaaaaaaaaaaaaaaaaaaaaaaaaaaaaaaaaaaaaaaaaaaaaaaaaaaaggcctacc

SEQ ID NO: 119422 - DNA, 411 bp, Glycine max
  unsure (1)..(411): unsure at all n locations
  Clone ID: PAT_MRT3847_78847C.1
aaacataccattttactttatttgattctgctgcttaacttgagttttttctttgtaaacttgaatgaccttgttttaagctggaaatatttttgaaaaaaaaattgtttggtaataataaagcgaatgtgaaccttttacccacgtgaatttacatacgattttattgaataaaattgatttaattagattccatgttttatatatgttttttttccaattatatgcatgttgggatagagggtgtgacagagagaaggacaaggaatttctccacaaaatgagactcttcaggaattgggctggtcatgatgaacaatatttagtgacacaaaatctatgggacaatctaatgggtgacatggatggtaagatgaacataaccgtgaatcctanatatgtggcaccaaa

SEQ ID NO: 119423 - DNA, 253 bp, Glycine max
  Clone ID: PAT_MRT3847_78848C.1
ataagaaaggtgaaccatccggagcggaatatattcagaaaatcgaccacgcggaagagatgggcaacatcatcggcatcatacaaggaatattcccgcaacagacccagcctaatcaaggcggcttaaaactacgtttttctatagacacttagggtcaaggtgggggaggaagagggttcaaaaccaacggaatggacatgaccgatgactataagacgtacacaaagaccagaacgcattggtgaaggga

SEQ ID NO: 119424 - DNA, 241 bp, Glycine max
  Clone ID: PAT_MRT3847_78849C.1
acgacaaaaaacttgagcataaggaattcctaaactcaggggagtgctcaagtgaattcccgttgaaatgtacacaatccatatgaggaagggtgtattgtacatgtctccgaacttacagcacgaagtaaatacattatattgttgcccattattagaatcctcggatcagggggtgcaagcccgactattgtttatactacgactctgcatcgagctgaacgttctcatctgatatgcc

SEQ ID NO: 119425 - DNA, 412 bp, Glycine max
  Clone ID: PAT_MRT3847_7884C.1
gactcgatcgttcggtattttattatggctgaggaaaaacaaggacaagggactaatcctcctcaagagcaacccaatgagcccttgccaagggactacaaccagctcttggggacaaacaatcctaccaaaacaagttggccagagctggttggtgtcactgctgaagaagcagagaagaagataaaggaggagatgggtggagctgaaattcaagtggtgcctccaggctattttgtcactgcagatttcaagcccaaaagagttcgattgtatgtggatgaatctaacaaagtcaccagggctccgggaattggctaatccatctacccaaaatactatcatttagtaatttcatatttctttgttttggccgagacaatagcggcatttgaatattgcattcccaaat

SEQ ID NO: 119426 - DNA, 404 bp, Glycine max
  Clone ID: PAT_MRT3847_78850C.1
caagccactttatggtagaaccacctggtttttaaaagaagaaggggaaggccaaccaggggtggaaaaaattctttccggaaaaggtaaaagaatttcctttttttttcttaaaggcgccgaaccacaaactaaggaatttttggtggcttcccttctttgggctgggaactagggcaagattacttaaaatttccttccaagggaccctttttaaccccaccacaatgtgaaattatgtttttacccttttttgcaaattaaaggggggtctttccggctctaaaatttgggggttccaggtcccaaccttcacaaactacagcccaggatgtctttaattgcaagagatgagtggggaatgatggctttcaactattccaaaaagcatcgacaaaaatttt

SEQ ID NO: 119427 - DNA, 383 bp, Glycine max
  Clone ID: PAT_MRT3847_78851C.1
actgagcatcgtctagctatctcgatcgaactgtccaaggtcctgtcactgaaaacgacggtgtggataaggcacagaacctaaggaaacccatgggaaagggctgtgagagcagggtacgctgcagtgtatgtgaagccgcaattagtttggcaaagagccagggcaaccaccccaaaagtagtagcggcgcctaactgccattagggacaccacgcgagactgctccaccaaaacacccacaactaaggcgaaggagcgcataaatttaacgaagagggaggagccctaggtggagtagtggatacaaacgctgcataaaaaaggcatcagtggacaccccgtggtattaataatgtggtaaagagacccttggatatgag

SEQ ID NO: 119428 - DNA, 542 bp, Glycine max
  Clone ID: PAT_MRT3847_78852C.1
attcggctcgagccaacaacagggtttgtcctgttttctcataagtcataatgcctttctttctttggattggtagcaattttttcttaggtaataacacattgcctaatatttgtaacagtgtgactgcatactcgattcaagatgatgcactgaagactggtgaacttgactacgtaaatggagctgcacttgttcggtattccatatcaggaaacttcctaggacttcctgctgtaactgtaccggtatgattatgttttccttttacttagttactcctttaatgttacttacttacacttacaccccaatagttagcttgtgtttggtctacctatcaaatactacattattttttgagtttaacagagtcagtacataagtttgtatgctatcaacgaattagaaatcattatttttataatttttaaggaagttattatcaagtcaacaaacttataatgcattatagtttgtaattaaataacaatttaatttatttttacctattcttttttggggtaaattacaattttagt

SEQ ID NO: 119429 - DNA, 570 bp, Glycine max
  Clone ID: PAT_MRT3847_78853C.1
caaccacgaagcaccggatgataacctaagatttgccagaggtagtgattgttatgagaatcgcctttagaggaatttcccacctcaccgtgtgtaagaaacaccaaaataacaaaattgagagtggtataaataggacgaaaatgcctaagtataatctcttttggtattttacattatacttatatctatttcacacaccattcgtagctccagcaagtggaaccaacaaataagcattttgatggctgttaattttaaacaagtagcacacatattatcagggagcactgatatatcttgggaaattaaattgctaatttcagaggcaaggagccctggaaccttcgctatcacatatttaacaaaacacatcagttattttagttttacttttgtagtttgttaacttaggagcatcatcgggttaacattgtaagagataacgaacaaacctgcttcgtggtgttgtatttgttggcaaactctttgtcaatattatctgactccagatcaatggctaaatcaattttgaattttgaatttttaggtttcaaccttacctccgcc

SEQ ID NO: 119430 - DNA, 423 bp, Glycine max
  Clone ID: PAT_MRT3847_78854C.1
gaagaatatgcctccctttatggttcccaagttggttaagtttgtggaggatttgccaaagacttcaaccggtaagattaagaaatttgaattaagggacaaggtcaagaataccgtgtctcgtctttaataatatgtatctgttcaagatatacttttgtaattgcataatattttatttttcagtttttaagataggatttagtaaataagttgatttcttatattttaggagtaaggcaattttaatggattagcctagtcaataagtgattcctatctttaaggagcaagttagttttaatattttgttttgctaatatcttgttatctaattagtttatcttttgctatttattgtatcgttgttgagaataatttgaattagaataaaataattttatttcctccaaaaaaaaaaaa

SEQ ID NO: 119431 - DNA, 1408 bp, Glycine max
  Clone ID: PAT_MRT3847_78855C.1
ccgagctttagacagcgtcgttgaggccatgaaggaggatgagaagagtgttttatctgttcttggtcggagcaatattgctgctttggttcaattgcttacagctacctctcccaggataagggagaaaacagttactgttataagctcgcttgcagaatccggtagctgcgaaaattggctagtttctgaaggagttctgccacctcttataaggcttgttgaatctggcagcacggtggggaaggaaaaggccacaatatcccttcagaggttgtcgatgtcagccgaaacagcacgagcaatcgtgggacacagtggggttcgtccattggttgaactttgtcaaatcggtgattctgtgtcacaggccgcggctgcgtgtactctgaagaacatatcagctgtgcctgaggttagacaagctttggctgaagaagggattgtgagggtaatgatcaatctgcttaactttggaattctgttaggtttgaactctgatgctgcaatcagcttgcccaacctcactgcaagcaatgagtaaagaagggattatgtcggatatgatcaaggtgttaggagtcttctgtctgttattgatggtagacttcctcaggaatccgcggttggagcattgaggaacttggttggatctaaggaagagtgtcatatggtttccctgggtttgatcccccgtgtggctcatgtgttgaagtctccttaggaatctgctcagcaagcagctgcggctgcgatatgttgcgtttgcagctccacagacatgaagaaaatggttggtgaagctggctgcatccctctccttgtgaagatgcttgaggccaagtcaaacagtgttagagaggttgctgcccaagcaattgcaagcttgatggttgtgtctcagaatcgaagagaggttaagaaggatgacaagagtgtgccaaacttggttcagttgcttgatcaaagtcctcagaacactgcaaaaaaatatgctgttacttgccttggatcactttcttcatgtaagaaatgtaagaagcttatgatctcatatggggcaattgggtatctgaagaaacttactgagatggacattccaggagctaaaaagctgcatgaaaggttggaaagagggaaatttagaagtttatttagcaagaaatagaggaaaaaattgttaatttttaattttttttattttgtattaagaagcaaatgctaagttgcaaactggaatgaacaggtttgctaatctatgtattataaatcagtgttagattatattataaatatttaaatttcaaatgtactctccctctcactagttttcttctgaaattctttttggaattcgaataataagttaaatctacttgttttaaaaaaaaaaaaaaaaaaaggcggc

SEQ ID NO: 119432 - DNA, 341 bp, Glycine max
  Clone ID: PAT_MRT3847_78856C.1
ttcctctgactctggctcttgctttattagaggatgcctgcgcctctcagcctctagttccatcctctggagctatgcatctggatctggatgcccctctgccataaaacgtgggcgtgttgccccaagtaattccttatctctcttactgactcggacatgggcttccatttttttctgcctatcacgcaaccgtgggtgaaaagcactaccccttgtaagactttgggacatcttctgcatcctaataatcttctaagaatccttttaatccctgagcctctttagccatttctcttcttctttcttcgtctctttccggctccttattatattcccta

SEQ ID NO: 119433 - DNA, 797 bp, Glycine max
  unsure (1)..(797): unsure at all n locations
  Clone ID: PAT_MRT3847_78857C.1
ggctcgagaaaaaactctgctctgtcatttcactccaactctctctctctctgcaatatgaaacactcagatggcaactcctccacacagccacttctcacggccagggccgacgaaccccatcaaatccaccctcacccagcagaaacaaccgcagtttttagcgccggcacccctgacatagctccgatcaccggcgccggcgacttctatagggaattcatggtggagtcaaagaagctctggtacctcgccggccccgccatcttctccttcgtctcaaagccacccctcggcgccttcactcaaatctttgccggccacgtcggcaccattgacctcgccgccgtctccgttgaaaactccctcatcgccggcttctcctacggcataatgctagggatgggaagcgcgttggaaacgctgtgcggacaagcggtgggggcagggaagctggacatgctgggagtgtacatgcaacgatcatgggtgttactcctcagcacggcctgtgtactgtgccctttgtacatcttcgcgggacaagttctgaagttgatagggcaagacaccgaaatttcggaggctgcggggaccttcgccatttggatgattccgcagctgttcgcttacgcgctgaattttccggtggcgaagttcctgcaggcgcagagcaaggtgatnggtgatcgcggcgatagccgggatggccatggtgctgcacccggtgctgagctggctgctcatggtgaagctggagtgggggctcgtggcgccgncgtcgtgctcaacggatc

SEQ ID NO: 119434 - DNA, 963 bp, Glycine max
  Clone ID: PAT_MRT3847_78858C.1
tgtcgagccgattcggctcgagaagaccaaagaaaaaaccaaaatcatcgtgtggtttttcaaggaccaaattcaaatcagtcataaaaagggggggtatggaaggaggagagagaggtgttaatcccaataattatgagctccaagtttcattcgcaaacacccctcaagccatccatgaaatgggttttgttcaatttgaagaaaaccaggttcttagcttcttggcaccctctgctcaatcccaatcttctcagctctctcaatctctaaacgcctgcaacggtggcagcaatactgctgttgctgccgctaccacaaccgccaccgccaccacctccggatccggagcaacaattggtttcagccataatgaccttgtatccagaacttgttggtataataatgaacaggtgcgaacactggatcccaaagctgtcaatgatgaaaattgcaccggaaatactagtgatggtggcaacaactcatggtggagaagtgctggctcagagaagaacacgatgaaagtgaggaggaagctgagggagccacggttttgtttcggaattcggctcgaggtagatgtgcttgatgatggttataaatggaggaagtatggtcagaaagttgtcaagaatagccttcacccaagaagctactaccgctgtacccataacaactgtagggtgaagaaaagagttgaacgactctctgaagattgtcgtatggtaataactacctatgaaggcagacacaaccactctccttgtgatgactcaaattcatcggaacatgaatgtttcacctctttttgaacaatgtcgtttcaataattattatgtattattaataattaattagctgtacgtgacattttcatgaaggatattgcattgtacttatattgttactatttgttattgagctcagtcactctttcatggtataaaaaaaaccaaaccc

SEQ ID NO: 119435 - DNA, 819 bp, Glycine max
  unsure (1)..(819): unsure at all n locations
  Clone ID: PAT_MRT3847_78859C.1
attggntcgagattatgtgacctatcaaacaaaacaatcatgtctcaactcctcctccttctgcttggctccgaggtaaccgcccccactttttttctaatgcagaatatttctctctctctctttccctctttatcttcctctttcagattcaccctcgttttccctctttcgcataaataaataaataaatataaacaccatgagcgttcctccgccgtctacggcggcgatgtggacgccgttcacggcagcgcagtggcacgagctggagcaccaggccctcatcttcaagtacctcaaggcgggtctctcggttccccctgacctccttctccccattcgcaagagcctccaattgatatcgtctcacccatcgatggggtattatgggaagaagatagaccctgaaccgggtcggtgcaggagaaccgatgggaaaaagtggaggtgttcgagggatgcacaccctgactccaagtactgcgaccgccatatgatacgacgtcgttaccgttcaagaaagcctgtggaatcatctcaaactcactcttcttcttctgcttctgctgcttcttcaaattcaaaccctgttgctgctgctggtggtggtggttctgttgctaatgtttctgcaactgctgcaaaaaaccttcacacacttcccttgcacatcaatggcgcaagggaaggtttcactttcacccttgggaacaacaccagcaccaacaccaacaccaacaccaacaccctccctcaccttcacatgaaccccctcactctttcagctgacaataccaagaaaacttacaggtttgg

SEQ ID NO: 119436 - DNA, 521 bp, Glycine max
  Clone ID: PAT_MRT3847_7885C.1
ttgttcaaatgctgtgcccatgaatatgaaaagttttgctgcagtagcaaaacttttcaaatgctgtgcccatgaatatgaaactcaccaagaaatggcagctgctgctttggcatataaatgcatggaggtggcatacatgagagtggtttactgtaaaaattctagtactaacagagatcgacatgagttgcaatcaactcttcaactggtttttcaaggcgaatctccttcatcttctgcatccgatgttgataaccttaacaatcagacagcagcggataaggctactttgcccaggggtactaatactcatgttgctatcaaccaagtcatatctgctcgaactcgtccaaatttagtcaggcttcttgattttactcaggacatacattttgcaatggaggcttgtacaaaatgtcagagcacttttgtgcttgctaatgtgatcatgcacgaagcatggaagaaggactgtatagcttctattacaagcgcctttgatttcagcttccaggatg

SEQ ID NO: 119437 - DNA, 318 bp, Glycine max
  unsure (1)..(318): unsure at all n locations
  Clone ID: PAT_MRT3847_78860C.1
tnnggacgcntacgtaagntcggaattngnnggntgngggnngggtgtngnttgtttnggtttgagtngnttggnttgnanatngngtnnnggnnngtcnggtttttgttntaggntcnggtgttttttgaggaanaaaaaanacaaangtaantggcatgtggtgtntgntcannggggtgttggnttnnggtatgagtnnnntgnttgtcgtnatnnggtgtgcgngannngtantgngttagtggatgtnnttangnangctgntttttntttggtgntngtgtaagtgnttnnnntganaggaatngnagggnt

SEQ ID NO: 119438 - DNA, 396 bp, Glycine max
  Clone ID: PAT_MRT3847_78861C.1
cgcagaaggggttgactaattgtgtacttttgtctggacaggtttatcagaatggaggtttgcaaattggaagttctcgtgttgttgaccaaccaaagtgcttacacaattgcattggtgacgttattaggataaaacaacttggaaatgagaggtttggaattattaaacgatttgataaatattcccgaaaacactcgatcatgtttgaggatggttgtgttgaaatttatgacatgtcaaaagaggactgggaacttgtgagatagtgatgcaactgttggttgctgaagatctgatcaacagaatatgaagcggaatagatcaacataactcttactgattgaagataataagttcctttttccactaacagactgtattatcgtttaaaca

SEQ ID NO: 119439 - DNA, 268 bp, Glycine max
  Clone ID: PAT_MRT3847_78862C.1
cccccagcaccgccgcggcataaccggggggacccaccaggccttcttttaccagcgaagagaaggctccacaaaaaagggatccgaagtaattatgcacttgctctcctccactatctaaatggctcgtaacaagctcacttgctaaagaaaaacaacaatgccacgctgacagaaccagaatgagggcgtcagtctcaatttgctctctgctgacagggccaaacacgagcgatcccaaggcccccgcaatggcacacatgtccca

SEQ ID NO: 119440 - DNA, 2059 bp, Glycine max
  Clone ID: PAT_MRT3847_78863C.1
aacaaaaaatacaatcttcattctattagcttaagcatcggcatctacaatcatacatactgctgctagtcaatctcgcattcagtatcagatatcttggtatatatgtagtaccattttcaatacaactgattatgcaaattactcggggacaaattgtatgggaataaaaatggaaaagcctaccaatttggagagatgcctattgcctatttattaagatataatatgacccccttcatagggtacatgtctttagcattgatcaaagggtaattgcatattaaaacaagtttttcctaatcgaaactcccacatttatcaataaccttatactagaaaaataggaagaaagtaaaagaatacacttgaaacaacaactacacatcctagctaatggtacaagatgaattctcattttacagtactttcaggattttaaaaaatacaaggtttatttccagaaccttgaacaacaatgttgtttacacgataatacagtttgttagtagaaaaaggaatttattatcttcaatcagtaagagttgtgttgagctattccgcttcatattctgttgataagagcctcagcaactacaagaattatgcacatgcaatgaaagaataatgagtccaattttcagcttttcaattcctttcacctgcacccaacagttgcatcactatctcacaagttcaaagtcctcttttgacatgtcataaatttcaacacaaccatcctcaaacatgatcgaatgttttcgggaatacttatcaaatcgtttaataattccaaacctctcattttcaagatgttttatcctaataacttcaccaatgcaattgtgcaagcactttggttggtcaacaacacgagaacttccaatttgcaaacctccattctgataaacctgatatgcaactaattttaatgcagcatctgaagaaagtttagacttggtaggtcggacacccaacttacgcctacactcagcagcaccacagtggcaatcttgatctgcaccaaattgaacaaactggtaatcataagtcagatgctcgccctgttagcataggtgacagaagaggaatgaagttaatttccacaagtatgaaaaattatatgggaaaatggcaatgaaggatctttaaaaaacctggaccatgatgtaattaagagggacgaaaaactttttaccactaaatgattaatatattcataactaaatatcatgcattcaaccatgaccaaaataccatgaccaaaattaagttaaaaccccttttacaacttctccaacatattcaatgacaaactccccaagcttgatatcttcatccgccacaattccagaaccacatttctcggtcttgaccaatttcatttttttcacaggacggttctgaattggtttgttgagacaggagctcccacatttacagcctgatgaacagctagacagaagcattccacagtggcaatctctaccacatacactagtagatccaggggaaggagtacaggaacagaatatgccatcatcatcaaaccgggatctcttgaccttcttagtgagatatatattgcgttttatataggtgtactgcattggcttggatttattaaatgaatctggaagttcaaagtctacaggttctccaagctccttccccaacatgttgaatacagaaccaatacaagttagctcaggattctttttcatggcaggcatgaaatctgagagagtactggatactcctatgtgatcagctcgtatctcagtttcttaatagaagctcaaaccataaagcggatattgaaaatcaataccacaaaatccacatacaagacttacttgattccttcaaaggcaaactttgcctgaaatgggattggagaagagagtgagagattggaaaacgaaatggaagcgacggtgtgaacgtatttatataaccaactcgaaaaaaccgtcgagtgccgttcgttggtggaataccacttgatgcattcagtcttcaaacgcaatcggatactgtgcctaagctgaggctgtgg

SEQ ID NO: 119441 - DNA, 556 bp, Glycine max
  Clone ID: PAT_MRT3847_78864C.1
tttcttgtgcgagaagacgacagaagggggagaatgaagcgagtgtgtagattctcttctgacgcaacaacgcgagcagctctgttgttgctcatgcaatcccatcataatttccatggattctcaaaccccaaaaccactttctctccctccttcgccaccgccctatctcatcatcgcaatgttcataccgtcccaaacatatactctgacatcactcccttgttcaccgccaagtcttgctcttcgccgaaacaggatctcatcaacaaggtcacgattctcaaaaacgagctcattagagattcctgcgactctgctagggttcagaccattttggacgatagtttcgacactttgtttcggcgtcaccccaatggatctgcgttactcaagcttatgaatcaattgaattcaaatccttcccttgccctccaggtgtttagttggagaagaaagagatcgaatgctgaaaaccctatggatgcgtatgagtactcaaagggtataaaagctgcaggtagatctgggaatgttgattagctgttagctcttt

SEQ ID NO: 119442 - DNA, 333 bp, Glycine max
  unsure (1)..(333): unsure at all n locations
  Clone ID: PAT_MRT3847_78865C.1
gtgggtgggggtgtttttttggttcccaccaaaacttatcattaagttttgggaaagagttaagaaactatctacatttatccaccatgactccaaactcaatataatttgatctgttatgcaccaaagggtcatcaacaaactttcaatcaatctccacggtatggcgtattcanttccaattcatatactccnctttaaaccattcaaaattaatgcttcagcctcatcctcttnaacagattaaaaaccataattccaccacattttctatttcatataatcaccctcattatttctctagcaaccaccaaaatacctataggacctccc

SEQ ID NO: 119443 - DNA, 514 bp, Glycine max
  Clone ID: PAT_MRT3847_78866C.1
aacattcaacataccctcgtttagtgtgttattttcaaatacaaaattcttaatttgataagatcaaatccttattttctaataacatcaaatcttctatgaaaatgatctattactcgtataacgtcaacaaattattatgtaatcgtgatgtattattactatgttgtttataaataatttattattattttcatatgaaatacataatataaatctatcggttgaatacatgggtcaagtctatagaacacttccattactctctgtaaactttcaagctttacaaccttgattaaattacttattttaatgaattaaattgcttattttaattttatgcgatatgatatctttcaaaccgccacaaaatctgaacctaaccaaccctttcaggcgcgtgagcaccagggcgtgaacctaccttggtgctgccaagacatggcatacgcattgttaattgaattctgaagcctctgccttccactagcagcaatgtaatgctgcaatatgt

SEQ ID NO: 119444 - DNA, 185 bp, Glycine max
  Clone ID: PAT_MRT3847_78867C.1
cagtgagaagcaacacgacggggggtgtataaatatacaatgctaaagccgatgtctatacttgcgacaaaattattcaaaccatgttcaagatgtgttggacctgatggaactaaacgcctcaacactgcttttaactagtccccgagatttaactgaggaccgcaatctttactatacataca

SEQ ID NO: 119445 - DNA, 245 bp, Glycine max
  Clone ID: PAT_MRT3847_78868C.1
ctggatgtgtgatcacgaaccctaaacatggcgctgattgaccatgatcttgacgcagcgctgctccaatctgatacactgcatggtgtgtatcaatcggctgaagatgagtacaagaggattatgagagcgaggaactttcgttgttggcgcgtaacataccaggagtgtgcctaggggatcctgtccggagtggaacacataacggcgttggcagtgcaacctcagtggattattgtgcattg

SEQ ID NO: 119446 - DNA, 362 bp, Glycine max
  Clone ID: PAT_MRT3847_78869C.1
acagcaaaaaggggatgattggctaattattttgttacaaacttaaccggatttgaacaaaaaaactttaaattaaactaaaagctttaaaattttttaccttcccttaactaaacagggggttttaaaattccaattaaagagaactcccttctttaaacttttaacgttttggaaagacaagctttttacggaggggggaccagggaaatattttttggaaagaaaattttttttttagggaattgaccccaccaccttcccgggtgatcaaaatcttcaaaacctacataaaggcttttatcatcagtccattttttaaaagacatcctcctgctcgcaagtgacttcctagaaattat

SEQ ID NO: 119447 - DNA, 311 bp, Glycine max
  unsure (1)..(311): unsure at all n locations
  Clone ID: PAT_MRT3847_7886C.1
tctcnnaaaanaaaannaaaanttaatgnacncgtacntaaatcgggattngctctatanannacataaanngaatnngtaanccnaaacaaaaatnnaaaaatananantactananntncananntnnaatcnantctatncnccanttacaatcgnntnnnnccntgtcaaaccggtttcgtcgagagatcatgacnnncnccgganccgaagnctnnccannccatcnatanntnatttcnncgatnatcctnttttgtnccnncgacaanncttccnnngcgtananaanancntccggcaaccgn

SEQ ID NO: 119448 - DNA, 165 bp, Glycine max
  Clone ID: PAT_MRT3847_78870C.1
taacggtactgctgccgtcaacaccacattacgggtacacggggggacaggggtcactacctttcaatccagccgctctacatgctccaagcttacgtgtccgttcatgcgacctcatcgctcttctataatgtcacctaacttcaattcactgggcgtcgtttt

SEQ ID NO: 119449 - DNA, 1070 bp, Glycine max
  Clone ID: PAT_MRT3847_78871C.1
ccgctcgtacggctgcgagaagacagcagaagggggagtgaacacacacctacgaacaaacccaaccccgaatggcacagaagcagcacctccttctggatctatcccaaatctcaatctccaaaccctagaacattcaactctcccccgttccctttcaaaaaccttccctttccactcttccgccgcgattcgatctccgggctgccttcctttccgcgatttcgatctgaaactcgaggttgcggaattcggaaattgacattgaagtgttcaattggcactgtcaatgccattggtgtggtttgtgaagaatttttctgtggttttttgataccggaaaaacacaatgtcttgggcaggccctgaggatatttacctttctacttcacttgccagctatcttgacaagaaacttcttgtattgctgagagatggtagaaagctcatgggaacacttcgctcttttgatcaatttgctaatgcagttcttgagggtgcttgtgagagggttattgttggtgatctatactgtgacatccctttaggtctttatgtgatccggggggaaaatgttgttctaattggtgagctggacttggagagggaggaacttcccgaacatatgacacgtgtttctaccgcagaaatcaagagggcacagaaagcagaaagggaagcttcagatctgaaagggactatgaggaaaagaatggaattccttgactttgactaatcaaccctcactcatccttcacctccccgtccgcaaatattatagcggctgttcttcagatatttcgttttgtttttctctgcttattgttgcctttcatgggagggttgaatgttcttgaattgtcttttgtaatattagccgcaggaatcaatactatcattcatttgcttttaaaaaaattgccaattaatatagcttgttttcaattcgtaaacgacattctgattaggggatgataggcttcaagttgtgcaaaatagttatgttttaaactcaatgtttttgcaaccttgcattcaacggagctatataatgctatgtttaaccgtgc

SEQ ID NO: 119450 - DNA, 367 bp, Glycine max
  unsure (1)..(367): unsure at all n locations
  Clone ID: PAT_MRT3847_78872C.1
gtcaaattttactggtgtgagtggccaacttcattttaattctgacagaagtattgtaagtggtggttatgatattatcaatgtcaatcagatgggaatttctggtgttggtttttggtctaataattcangattttcagttgtaccccctacagctcttacaaaaagataatataacaggttttcccaagatcataatctcggcaaagtgatttggccaggtggagtgacagatcaacctcgtggctgtgtaattgctgataataccaagccactgaaaattgtaatgccttagagagcaagatatgttgagttcgtaactcaactgccacatggtgatctaattaatgcgtcctgcataaatgtc

SEQ ID NO: 119451 - DNA, 696 bp, Glycine max
  Clone ID: PAT_MRT3847_78873C.1
acaaacccaaaccccggatggcacagaagcagcacctccttctggatctatcccaaatctcaatctccaaaccctagaacgaacattcaagtttccccctttcccctttctcctttccctttcaaaaacactccctttccactcttccgctgcgattggatctcttgggtgtcttcctttccgcgatttcgatctgcaacttgagggttgtggaattcggaatttcacattgaagtcttcaattggcgctgtcaatgccattggtgtggttagtgaagaatttttctgtggtcatttgataccgataaaaaaaaagcacaatgtcttgggcaggccctgaggatatttacctttctacttcacttgccagctatcttgacaagaaacttcttgtattgctgagagatggtagaaagctcatggggacacttcgctcttttgatcaatttgccaatgcagttcttgagggtgcttgtgagagagttattgttggtgatctgtattgtgacatccctttaggtctctatgtgatccgtggggaaaatgttgttctaattggtgagctggacttggagagggaggaacttcccgaacatatgacacgtgtttctaccgcagaaatcaagagggcccagaaagcagaaagggaggctttagatctgaaggggactatgaggaaaaaatggaattccttga

SEQ ID NO: 119452 - DNA, 279 bp, Glycine max
  Clone ID: PAT_MRT3847_78874C.1
ccgcgacagcgatatccgcttttccacgcagcccttctcccagaagaccctggacaactcagtgcacctgtgcaacaactccatccagaagcacctggagaactcatgccatcggcatccactgcttccgccagacaacatgtggtctagccagaggttccaggcccacctgcaggagatgggtgccccaaatgcttggtccaccatcatcgtgcctggcatgaaggatgctgtgatccacgcacttcagacctcccaggacaccgtgcaatgtcggaa

SEQ ID NO: 119453 - DNA, 340 bp, Glycine max
  Clone ID: PAT_MRT3847_78875C.1
attcactgtccaagaaaatatgttgtggatgttgcaatgccgaagcgggaaacttactggtaaaggggcattcaaaatagctgtacatatggttaatcaggggcttgttgatattgatcctggcgtctagatgctatagccacacgattttgattcacttctccacccccattgtgatgatgcatctacttacaaggatgaaatgatcgccttggggttggatcactcacctgtagcctgagagggtccggactaattaactgatcacgatgcagaggattgctctacgcaatgcaacaatgtgaggtagatctggagtgagactactacaaaatccata

SEQ ID NO: 119454 - DNA, 472 bp, Glycine max
  Clone ID: PAT_MRT3847_78876C.1
tacggctgcgaaagacgacagaagggccatgtcaaaaaatttgttagaatttttataaagtaaatgggattaatttaattgtttttggacaaattaggcccaaaaatttaaatagaacagaataaacccttctataatttgatactccaatgttacgtgcggtatcatattattccttcaatagttttagttactatgctagtttatctaaagcaacatcatattagtcttccaaagatttgtcaccaaattagttgttcgaagagtccttttgagacaccagtcctgccttctataaggataaatattgtaaccttttagacttttgagggataaatttggtgacaaaatttacagagaacattaagttgttttaagagacttatttggtaatcaaaatttttttaaagactaatgtgaagactgaagatttttataactttgaaagaccaacattatgatttactgaatg

SEQ ID NO: 119455 - DNA, 251 bp, Glycine max
  Clone ID: PAT_MRT3847_78877C.1
atatttcctgaattgcccgagccttctttgttgatctcacaggtcaaggatctggtgggcaataaaatccctgattttgaatcaaacatatattaagatcatgttggagtcaagtgtgtatggctatgcatgttcttgtttcacgccttctaaacatcacaaaagtatttagtagcattagcatgcgtgagactttattactatcatatgtttggatctctccaaaatctaaaaaggaagactttggctgt

SEQ ID NO: 119456 - DNA, 290 bp, Glycine max
  Clone ID: PAT_MRT3847_78878C.1
aattaactttcataatttttattgattaattttacacttgttgactgggtggggtggttacatgtctatagtacatcatatttcaccatatacactattttagtatgtagaccactctcccatgtaagtactacgtgtgcatcgaacacattcatttattacatggggttgataacgcactaaagtgcccacttactaattttataacgaacccaaggagtaattatacccgcacgtctttttgtgatcaataccatgactacatgactgattatactgagcctgcaccc

SEQ ID NO: 119457 - DNA, 260 bp, Glycine max
  Clone ID: PAT_MRT3847_78879C.1
gaacgcaaagaattaaggttttccaattcacagatcaccacacgtattcaaggctggcacagcctcagccatagtcacagcggcgataccggctagcaccactggaacatgtccaatgcttcggtcgcaataagactgccttggccgtgactttacgtaagcacgagcacagtcatatcacgatcgactgctgctccagcgatctcgtggatcatgacatctacctcttcaacgccagcgattctttcctcctctcgggt

SEQ ID NO: 119458 - DNA, 857 bp, Glycine max
  Clone ID: PAT_MRT3847_7887C.1
cggaattcccggctcgacccacgcgtccgtagaaactcatctccatacttcgtaacattttccctcctggctctctcgtccgcttccactcccaccagttgtcaggaagaaaaagggagtgactgtgactctccaattgaaagcaatgtttgtgatgatttgagtttgacaaaggagagaacttttgatcttaaaccagtgtcacctaattcttctggtcaaggtttgccatatgcacctgaagggtggcctaatcctagtgatgtatggggctggaaagtattgaaaaggacctccaatgctggacatttttgtgatagacacctttatcttccaaagtctcttcagatatcttctcacaagagacagagcttcagaaccaagcgtgatgttgagcgatacattgaatcaaattttcctaacatgggaattgaagcattctttggtttatttagctggaagatccccgctaccaagaaaactccccgaaaagtgaagtcactggagactgaagaagctggcaatgccacagaacagattggcaccaagttaaaacggaaaatacaaatctgcagtcaaccaactcggaaatcttccaaactacttcatcttcgtccacatatagtgcctgatcaggatgcaaatattgtcattgatttatgcgatcaggacgacgaagaggcaagagttgattcaactgagaattcaaaaggcatctcagattctgaagaaggatctgctatgcagacagcggtagagaaagatcccaaagcaatcaatgttctggagaatcttgataccttggagaattcaccggatcatgccactctagataatgaaattatacagtattgcaa

SEQ ID NO: 119459 - DNA, 820 bp, Glycine max
  Clone ID: PAT_MRT3847_78880C.1
gtagttcagtttctgtagatgcaccccagaggaattttgccgagactgttagcatcagtaatcataatattgacgaagttaattcttggcatgatcgtggttctcgcatgactgccagcattggcagtgcaaagtttttgagtgatggtgatgaattggtcaaagaactgcagtgcactgctgattcaagtatagtttatttttcactttggtgctatttctgtaaaaaataacgtcctgttgatgagcttaggtgatgctaaacaatgctacttggttttgggtgtggttatatatttacactgaagtttttgtatgtatctgaaaaaagactatttcactacaactttaatctgtacttttgtctgtagacacccaactcttcatgggattcccagagaaaacagaatgctgcatatgagtcttacagaagcttgtaactatcaaaagaacatgcttgctcttgattcagaaagcaaacctttggatctgcctagctctattgaaaatcttacacaaaatttgggcccgacaatggagggtttgagggatgcagttgatgaagctcctaaggaccaaccttgtgaagcttccacacaggtgcaccttgaagctttaaaggaagcatctctagagaaacccaaagaggtatttactgaatttccccaggaagaccaattgaagctccaaatccaaatgaagtttccaaggaagttgatactgtatccaatagccatgaaagaaagaggcccattaaaatcaaggtcaagcaatcttctgccaccagtagggctgatactgataatcaagtggttgaatg

SEQ ID NO: 119460 - DNA, 722 bp, Glycine max
  Clone ID: PAT_MRT3847_78881C.1
aaatgtgttattgagaggatattgtttttaaacatatctgataaagtaagggtgttaaagcaatggcagagaagatatattggtgctgtgttgttgtgtttgtggaactagtgctagtgttgagcggctgcgagtcaagcacaaacgagttcagtgttccaatgttgatgcagatgaatatcaacaaagcgtgtgatgagatatacgtggttcgtgagggagagactctgcaaacaattagtaacaagtgtggggatccatatatcgttgaagagaatccacatatcgaggaccctgatgattgcttccgaatatcaacaacaacaacaacccctttgacgaatcgataaaaaaaaaaaaagttttgatattgtctctgttaacaaacaagaaaacgagagggggacggttctttgttctactttacgtaaagaaaaataaaactgctgctcataaccgtggcctcgaacgtaagaacaaatatgtcgtctgaagcaccaagggcatcaagggtggtactgcatcatcaaactccttggttggtagggaagggtggtgatttttcgtattccttttttacatcattttacttcatgaggaagattaaaaaagaaaaaagaatgtaatgtggatgtaaaatgtgtggaacgaaaaaatcaaagcttttagttgtaagtataaaataagggttattgtaaagatacatgataggtcatttgatc

SEQ ID NO: 119461 - DNA, 482 bp, Glycine max
  Clone ID: PAT_MRT3847_78882C.1
gcagatcaactgctgaaggattataattatgcattccaagggttcaagcgaaaaccgatataatgcaggtcactcatacttaaaaagaacacgctaaaaacttatcagagattaaaaaaagaactggaccattataaaaaacaactcttcttaccttgggagataagtgatcactccaccaagacaatatgatgactggttacccaaggctagaaccaaagggttacaaactgcaatgcattgcattacaaacaaatcgcgaagatcgacttcatgcccttgactagccctatctatagaaacagggtataagcactttatgtgcacaaacgatggaccagattcgaaagatcctggcgtttgcctccacatatgttggaaagagctaatagatgccccgataaaaccaccgatccagacactgtatgttaatataggtggcgctaccaccttgagcttcatgctgatgcgagccaatgcag

SEQ ID NO: 119462 - DNA, 235 bp, Glycine max
  Clone ID: PAT_MRT3847_78883C.1
tcggagcgcagggcctcgtgctcaccagcgtcctcaagctgcgggggcaggcccaggccccgctacgcgtcatctgcaccgcgaggaacctctatggcgtcacgagcctggagccgcccttccagggagcccatcgactgatgtgggccaagatcgggcctgtcggcgccgtggtcgcctaggcgatcctgattgccatcgtctgctacattacccagacacgcaggaaaaagaa

SEQ ID NO: 119463 - DNA, 1361 bp, Glycine max
  Clone ID: PAT_MRT3847_78884C.1
ggcaagtgtggaaagaggtgtgaagtgtgtgagtctgagagaagagaacttagagaaatggaactacgtgagcttggaagaaccggactgaaactcagcactgtaggattcggagcttctccactgggcaatgtcttcggcgatgtttccgaggaacaagccaacgcttccgttcgcctcgctttccaatccggcatcaatttcttcgacacttctccgtactacggagggacactgtcggaaaaagttctgggaaaggcactgaaggctctgggagctccgaggaactcgtacgttgtggcaacgaagtgcggacggtacaaggagggtttcgatttcagcgcggagagagtgacgagaagcattgaagagagcttggaaaggttgcagcttgactacgtcgacattctccaatgccacgacatcgagttcggctccttagaccaggttgtgaatgagacgattccagcgcttgtgaagctgaaggaagcagggaaggcgcggttcattggaataacagggcttcctctggggattttcagttacgtgcttgatagggttccgcctgggacgctggatgttgtgctttcatattgccattactgtgtgaatgacactagcttgggggaattggtgccctatttgaagaccaaaggggttggcattatcaatgcttctcccttgtctatgggccttctcaccgagtctggcccgcctgaatggcatcccgcatcactggaactcaagtctgcatgtcaagctgctgctacccattgtaaagaaaaaggaaaaaacatttcaaagttagcattgcagtacagcttgttaaataaggaaatcacatcagtgcttgtaggcatgaagtctgttgaacaggtggaggaaaatgttgctgccgcaagagaacttgcaacttctggaattgatgaagagactctgtctgaagtcgaagctattctgaagcctgttaaaaaccagtcgtggccaagtggaatccagcagagctgatgtttattttaccacctggtattacctatggagacatccattcctgttgttgacaatgttcttcactcaaataatccgattcaataagagaaattgctttgaaagtattaggatccactgtctcaataatttttgtttgtaatctagagtgtccaataatacatttctcactagaatgctattcatcttcggcttctggagagtaagagcctgtcttctaggtgaacccgtaaatagttggttgaactggtttgtaaaagcacaatgtaaaaaaaaatggcaataatttgttctcctttacatgttatttttttaaatttaattagaatatagtcagtgtaaagtgataacaa

SEQ ID NO: 119464 - DNA, 572 bp, Glycine max
  Clone ID: PAT_MRT3847_78885C.1
ctgtcgcgtgggtgagcgtacaatgggcagcagcaccagtgtccaaagcacgttcattttgcttatttttgccctcatcgcttttggcaattttgccgccggcggcggaagtgccgaaaggggcgggtcatcagcagaaaacgcggcgaaaacagtcgtaagacaaacgttgcagaaatcgtacggatacggtgaagtaccggcaacgtacggagatgagaagccggactattccgtgtgcagcggattgccaaaaaggaacagaaaggcgtgcaaattggtggtgcaaattgcggttgaagcacgaaaggcagaacgacgagggcttttggaagacgacgaattgccgccgccctcccagggacttggactgccctaccttcgaaaaccgaccaaagcggaggaggacgcacaaccgccgccaaaagttgtggcggaaagatacgcgtgcatgaacatgacatgtctatgcccatatttgggaggcagttcatctgagcccgatcagtgcatttttggcgggagtgctacgaacgaccaaagcggccgagcgcgttgtcagtcgggcaatg

SEQ ID NO: 119465 - DNA, 534 bp, Glycine max
  Clone ID: PAT_MRT3847_78886C.1
gaaaaaaagggccggccaaatttcccctaaaacaacaaaaaccaagccctttaccaggtttccaccccaagccccccggggggtttaaaaaaacccaaaaccccccccccccccccaaaaaaaaaccccaaaaggcccaaaaaagagctagggcccccccaacaagaacccccccgggtttaaaaacccgtttaatccaacccccttttttttggcccgaccaaaaccctaaaccgcggtaaaccaaaaccacccggaaaaaggggaaaaccacccccccttgaaagaaccccctaaaaaaaccctttgggccccgaacccaaaaaaaccagggccccgggggcggtccccccccccgggggcgccccaaaaaacaacctccaaaaagtttttattaaaggcaatccccccctgggcaaaaaaaaacctggatcggttttccccgaaaaagccaggggaacccccatctttttaggggaacccaaaaatccccttaaactggcccttggatcccccctggaaagcattttaaat

SEQ ID NO: 119466 - DNA, 519 bp, Glycine max
  Clone ID: PAT_MRT3847_78887C.1
gtcaccaaactgtgacttaggcggcgggatgggttaggcaggcactcaaactgggcggggggtgctcagtaggggttaggcccgccaacaaacgtgtaattgggacgtcaaacactaaccagtgcacgcacgcactcagtagcgcgccgccgctcaggagtgttcatggtaggttactcccgtttcttcctcccctctactctcgcattcttcatagttgcgccttcaagggcaccaactccggtgtcaacgtctgctgccatcagcagggtcacctacccggtacacaaggtcaccagcatgtccaaagtcaccagcgtcagcagcaccatcagcaacaccaccaccacggcaacaacaacaactttgggcccggtgtgtctgttaataataacctgctggtgaacttgtgtgtgtcgccactaataatgcgcaaagtgcgccaagtaaacccctaactgcacaacgcgcttaacacaaacaacaacaattacgagtctccaagttcttactcgttag

SEQ ID NO: 119467 - DNA, 448 bp, Glycine max
  Clone ID: PAT_MRT3847_78888C.1
gcatcatctagctatctcgatcgaactgtccaaggtcctgtcaccttcctcccctctactctcgcattcttcatagttgcgccttcaagggcaccaacgtccggtgtcaacgtctgctgccaatcagcagggtcaccgtacccggtacacaaggtcaccgagcatggtccaaagtcacccagcgtcagcagcacctatcagcaacaccaccacccacggcaacaacaacaactttgggcccggtgtgcgtgttaataataccgtgctggtgaagttgtgtgtgtcgccagtaataatgcgcaaagtgcgccaagtaaaccctaactgcacaacgcgcgttacacaaacaccaacaattacgagtctccaagttgttaatcgttagccccaacccccgtgctgcacaggtctcatttacgaacccccaagtgcgggcctggccaatggg

SEQ ID NO: 119468 - DNA, 519 bp, Glycine max
  unsure (1)..(519): unsure at all n locations
  Clone ID: PAT_MRT3847_78889C.1
ctcgagccggtcatggtggagctttgagggtgcagtaggagaccctcaaactctattactcaaacaggattgcagcggattcacggcacccaacttgtccaacttcaaccaaaatctaaacgcaagtttggcagacctgagagcagaagtgagcaaccaaaggaagcactttgccacttctcaatcaaccaccggaacgagtcctgtctatgccatgattcaatgcaggaactacctctccaacaccgactgcgctgcctgcctcgccgccgccgacgccaagattcgcaactgctccaccggagctaacggtgcccgtgtcatttacgacggctgcttcctcaggtacgagagcaatgatttctttgcccagatcatgcctcgcagcagcatactntgtggaagtcagagtgcagatgaaagcacagctttcagtgaagctggacaacaagtactaacggatctacaaatagcaacaccaaaaatcactggctactatgcagctaccaagacacaagt

SEQ ID NO: 119469 - DNA, 251 bp, Glycine max
  Clone ID: PAT_MRT3847_7888C.1
gattaaggccacagggtctccgactgtgaaaccaaaccgggcgtccatcgtcgcttcttgaacacattatagcctcaagccaaagcctaaactcaaagccacatttagcttctctgacaatgtgactctgggacaccacatacgcatggttatttacacgacaccattgcccgttttaccgaccgggctatatggatgtatgaatagggagctggattattgaacagggagtgggttaagcttatccgggt

SEQ ID NO: 119470 - DNA, 430 bp, Glycine max
  Clone ID: PAT_MRT3847_78890C.1
gatcctctgtctcaatcttataacttggccatggtcaatgtatcttcataacgattttttggataagaattgtgtgtgtgagagacataattaacagtagacagtaggactcaaagtttatacctacaccaaattggtaaattctatctctctattctaccttaatctaaagatcaagattttatcattaaattaagatgacttgtttctcctctttcctctctgcccattaaacatcaaaaaagcctttctttgtttgtttttttttaatgatttcattgagcataagcattaactagagattctcacaattatcagtctcaacctcttattccgattcaaaaacaaactgaaaaacattatcaagaaaatgcacaataaaattatactacaattgtctgtagtcctcactcctcaagaaaaactgaag

SEQ ID NO: 119471 - DNA, 407 bp, Glycine max
  Clone ID: PAT_MRT3847_78891C.1
gttgagcttgtgtcgttgaataattaataaaccaatcaaattcaccatccaataatatttggaatcaaataaatcaaccttgccaatcaaataacttctattcaccatctaaccaaatttatcaaagatcattagaagataattcgactattcattcgatgacgcctatgaatcctcaacatattcagcaaactaaccagcatcaagcacaatattatgaacagatcaatagcttgccctcttcagaatttatgaatcaacagctaaacactcttcatacatcgaattctcaatcatctaatcaacaatctaatgctcaatatggcacaaactctacaaatattcaatcgaatcaagagtataattatgttaatgatcttataaatataggacaagttgatgagcta

SEQ ID NO: 119472 - DNA, 276 bp, Glycine max
  Clone ID: PAT_MRT3847_78892C.1
gactaggtcattgttattgctacccatatacgggtacatgaatggcatcgaagaacgagttcacaatggattttactgaaatagcgacatactcatgtaccatatttggcaaaaagggcacataagtgaatcaggttctggatgtgtaaacgggagtatcaaaaggttgcattttaactctagaaccactgaacagcaataagggagtcttgcgaaacaccgggagccccgagtatagttaccaagaccgacacataagtaaaactgctaactctg

SEQ ID NO: 119473 - DNA, 248 bp, Glycine max
  Clone ID: PAT_MRT3847_78893C.1
atgacgaagaggatgatgatccgtttttggaagaggatcttcctgatgagtttaaggagactcatttcagcttgtggattcttctcgagtggttgagtttgatttcgatcattgggttgttgataaccaccctttgtgttccctttctgaggaacaagaatctgtggcagcttaggttgtggaaatgggaggttatggttttggttttgatctgtggcaggttggtgtctgattgggttgttaggatt

SEQ ID NO: 119474 - DNA, 288 bp, Glycine max
  Clone ID: PAT_MRT3847_78894C.1
aaaatgaaaacaaaaaaaacacaactaaaccaataaacaccaaaagaaaaaaaaacggtataaaatgaaaacttatatcagcaaaaaacccaaaaatactttacaagaataataccatctccactatcaatcaatatactcatgatgtaaatcacaaacaaatataccccttatcttctatcgctacaacgctagttgacaatatataccttgactaataacctatatacgctaatgacttgactctctcatattccaagcaacccctcctacctgacatcttatatc

SEQ ID NO: 119475 - DNA, 152 bp, Glycine max
  Clone ID: PAT_MRT3847_78895C.1
agcattagaatgcaaacacagtacatacccatggacactgacacactcagatatgactgcacatgtaacaaaaaatcaatatatatactacgatagcaatcaatttatcggggcctgtaaacgtgaaggggctagaaagggcgatcatcata

SEQ ID NO: 119476 - DNA, 218 bp, Glycine max
  Clone ID: PAT_MRT3847_78896C.1
gggggaaaataaagggccggtggtctcgataatagcaggccagaacggacccatgtcaacgcgcaatgccgaatacaaataatgggacaaaagcaaaacattgtacatggtactaagaaaaacagttcgggtccaataccacaacggactatgcaagcactgtcacataaaaactagggagggaaagaacgctatgctgcgcatcttgaaaaaccacg

SEQ ID NO: 119477 - DNA, 346 bp, Glycine max
  Clone ID: PAT_MRT3847_78897C.1
cgtaagccatatttttcggcaatatgaattacggtggctcaatgtccgtttgctgcaagcatgtaaaaataatattgttgtacatctatgaacttgattaacaacggttacacagttcttcagttcttgcctctaactgacgtgaatttcttgatcttcaatcagagcccaactataagggcaacgaagaatttcgaagatggtaacaaaccaaacagtagcattaccattcatgcacttcgaagtggtgtaacctatgttaactgcagaactatttggttgctaaagatgctgagccagctgttgcctctgctattaaagaaataggtagacgtgcctggaggca

SEQ ID NO: 119478 - DNA, 744 bp, Glycine max
  Clone ID: PAT_MRT3847_78898C.1
cccgaaccgaacagattccatggcgaaaacaactaatatagcagtagtttcaatccctgcgtttagccaccaagcctccattgtagggttttgcaagaggctcgttcatctccatgaccactcgtatcaaccacgtcatttgctgctttagtcgctgatcctttcacgaacgaagcggtagagatagcgaagggggagttcaacctcttgtcttacatatacttccctatctctgccatgacgatgtcactattgttgcatttgccaaaactgcaccaacaagttttatgtgaatacaaggatcacaaggaggctattcaaattcctggttgcttgcctcttcagggccatgacctccccagcgattttcaagatcgatcttgtgttgattatgagttaattcttcaacggtgcaagaggttaccactcgctgatggcttcttggtaaacagcttctatgagatggagaaaggtacactggaagccttgcaggaacattgcaaagggagcaacaacaataactcttgtgtgtatctggtgggaccaatcatacaaaccgagcaaagtagtgaatcaaaggggtcagagtgtgtgaggtggttggagaagcagaggccaaattcggttttgtatgtgtcgtttggaagtggatgtactctgtctcaacaacagctcaatgagttagcttttgggttggagttgagtggtcagaattttttgtgggttttgaaagcacctaatgat

SEQ ID NO: 119479 - DNA, 903 bp, Glycine max
  Clone ID: PAT_MRT3847_78899C.1
acggaattcccgtcccgacacacgcgtccgcacaaattaaaaccatagactatacaaagttcaaaaaaaaattaaatgtctactactacacatttctcccttctgtccctttacctcatcctatctctaaattccctacacatgaccatggctgcaaggatcattccacaaagtgctcctagcacagttacaaggcctcaatttctatcagaagctgaaacttatttgaggccacatcttggtaacaaacaaaatgtcttccaagggagacaagtcaagaattgcttgccaaaagggtatagacataactcagctccaagcagattcgtgaactatgacacactaggctctagtggctgttccggaatgcgttcggagaagccatgaggatgatgtcttgctgaatggaaaggaagactttgcaagtgttgaagtttgtacatgtttttttctggatatgagaaagatgagataatcgtgtcattttgctttgcttatctgtgattgatatatctattacaattttgaaggaagtgcttaggcaaggtgaaaatgttagtattcttttcctgttgtgtatagctcaatgcctgactcattgaccaaacatgagaaacagagaagatatttttgtttttaccaagccatatcagcatatttgccatgcattacgctaagcccaagtatgtaataatgccaaaggaatattatataccatatgtaatacccaaatagggcgatgtgatatactatgtaatgttttttttttttttttttttcacatgcccccatgtattccaatattattcagggtgatgggcgcattacccttgtatttgttttccagttgtgcttggtcttcagttaattaaattaagttaaaactaaaaaaaaaaaaaaaaa

SEQ ID NO: 119480 - DNA, 219 bp, Glycine max
  Clone ID: PAT_MRT3847_7889C.1
gaaccacgactgctttggttttttgtaagcgatttagacctgatttaatactatgaagctatttatggggggtcttataaaattgaaaagtcagatgggatgaaatgtccacatcttgtaaaaaagacatcaactttcgttagactctgatacaccttttcttacaattcaaacaacataccctattccacctacggatttctttgatcactgacagct

SEQ ID NO: 119481 - DNA, 399 bp, Glycine max
  Clone ID: PAT_MRT3847_788C.1
ggcttgagataccgtgaaagaaagaggaaattgatgactgatcaaatgaactctctctttggagggtgccatcccatgaatgggaggccccgacctctactgggagctgatgctgcccattactctcatgctagatgaccggagcaatgcacttacagaagccacttgctcatgaaccaatgcttgcgactagggctacaattgaagatggcgttgatcttcttcacgatgtggatgatattgagcgtatcctacaagtgaaccagcttcaagatggtgggccagcgtggagacggaaacggcaacgtcttctggcaggacatgctgccgcgctcaagggagtagagccgctgtgaaagaggagagcggcggttgcactggctgcctaagatgactttg

SEQ ID NO: 119482 - DNA, 726 bp, Glycine max
  unsure (1)..(726): unsure at all n locations
  Clone ID: PAT_MRT3847_78900C.1
cgggacaaattaaaaccatagactatacaaagttcaaaaaaaaataaaaattaaatgtctactactacacatgtctcccttctgtccctttacctcatcctatctctaaattcccttcacatgaccatggctgcaaggatcattccccaaagtgctcctagcacagttacaaggcctcaatttctatcagaagctgaaacttatttgaagccacatcttggtcacgaacaaaatgtcttccaagggagacaagtcaagaattgcttgccaaaagggtataggcataactcagctccaagcagattcgtgaactatgacacgctaggctctagtggctgttccggaatgcgttcggagaagccatgaggatgatcatgttcatgtcttcctgaatggaaaaaaaaaaaaaaaagaattgcaagtgttgaagtttgtacatggtttttttttcctggatatgagaagatgagataatcgtgttgtttttgcttttgcttatttatgattgatatatgttacaattttgaaggatgtgcttaggcaaggtgaaaatgttggtattcttttcctgttgtgtatagctcaatgccaagacattgaccaaacatgagaaacagagaacatattttttgtttttaccaagccatatcagcatatttgccatgcattacgctaagcacaagtatgtantaatgccaaaggaatattatataccatgtaataccc

SEQ ID NO: 119483 - DNA, 575 bp, Glycine max
  Clone ID: PAT_MRT3847_78901C.1
cccacgcgtccgcccacgcgtccggcagctcgagcttgtgctagaacaacttcatttctatctatgaaactgagttttcttttctgcttctgtcgtgggtgagattcatccgattcatttgcagcagctaaattgaaccctggcttggagacgttgaaaactttagtttcattagattgatgaagtgtttcgtgaggaggaatttgagcatgcaggtgtggccaccagttggcaagaagaagtttgagactctttcctacctgccagaccttgatgatgcacaattggcaaaggaagtagaataccttcttaggaagggatggattccttgcttggaattcgagttggagcacggtttcgtgtaccgtgagcacaacaggtcaccaggatactacgatggacgctactggaccatgtggaagctgcctatgtttggttgcactgatgcttctcaggtgttgaaggagcgtgcggaggctaagactgtctaccccaacggattcatccgcatcatcggattcttcttcgttggccgagtgcattgcattagctggctcgcctacaagcccccgggc

SEQ ID NO: 119484 - DNA, 493 bp, Glycine max
  Clone ID: PAT_MRT3847_78902C.1
gcagatcgtcgaagttttaggttgtaattgcgctttatgacggctattgctgctgtattcttttacttaattggaaagccacttcgatgattggtagctgcaagaaaggaaagccataacttggagtgccccgagtcgatttatttttttcaactcaatctgcctgtgcggtgtgttggctcatgtctatgaagcatggatacagatatgaacactggacacccatggacatgtacacgcacagatctcctgtcactcaggcagcaatcaccttggaccttagaaagttggatcttcaatattagcttttgctgggatagaagcagaccgtggattcaaggccacaagtgccttagacatgcaaccttcattatgctcattgtattcttgcaagtagttctgtacattcactgttgacttttttgcattgaggtcaatggaaagaatttcatcagaatcctccttaaaaaagtcctccatgtcactttcttct

SEQ ID NO: 119485 - DNA, 438 bp, Glycine max
  Clone ID: PAT_MRT3847_78903C.1
agttgcttcaagttaaaatcagttttgaacttagaatcaattatttgacatgagatcaatcatttaaacatttacctaaaattgttggctggtagactcaacgtgaaattaaacatgcacatagacagggagtaaaagtttgtgatgagctactagaagtttctgtactataattgaacttctacatgcttatcaagcttggaataagttgaactgtattttttaagtcatggttttgcattttacaatgttgataagcaaaaggtgaagtaatttttgtaaagagatatgctcctgcctacttggtttttgtgcttgtcttcatatataaggttcgtattattattcagtttatctattggttactggttttaccatattgtgttttgtgtaggttaagaaactgcagcgggagaaaagactagagactattgttga

SEQ ID NO: 119486 - DNA, 312 bp, Glycine max
  unsure (1)..(312): unsure at all n locations
  Clone ID: PAT_MRT3847_78904C.1
cgacgattctgaaatttcctcgagacataatagattcatcaaattctactctttttcttatcttcttttcaatcccacaaccactcctntttatagagcactttccaactcttactggttctcctctcatcccaataaccctttatttttctcgtttatttctttttcataaaataaaataacttttaaacatatttctgcaatatctattctacaaacaaaattcccctatttttttcactccttttttgaattttcaatctctaatcttctttctttttattcatacataataatcccttaaactctaac

SEQ ID NO: 119487 - DNA, 394 bp, Glycine max
  Clone ID: PAT_MRT3847_78905C.1
accacgcgcgcgttatctatgctaggtgaaaacaatggtaaagtttgtatttattagacagggcggatggagccacagggagccaagttcaaggaatacaccgtatgagaacaacagtaacgagcaaagacgagaacttggatgggcatcaaccaaaactggtggtgcattggctgccccaagactagaagaaaggcgccttgaaccaaccaacgctatttcactagacaatggcaatacacgtcctatatacatgcgtagacccaattcatatttgatgcacaaaaatgtaaacttaaatgcatgctgaacgggcagcggcagagatgatagggaacatgaggggcttcctaactaaaacaagtttaaggcgtgaggattcaaatgcatacca

SEQ ID NO: 119488 - DNA, 414 bp, Glycine max
  Clone ID: PAT_MRT3847_78906C.1
tttttctttttttttttttctttcttttttttcttcctttttttctgctttgcctttttttctcactcccttttttttttttccctttcctcggaaaaaggccctccctaaaacccccatggcggggcacaacccccccgttccaaaactgcccaccctccccccgactgcccccccccacaagcttttaaaaaaaaaaacccctccgtgccccctttttccccccaaccccagctccactctgacacccccccccccttttcctaagcccctttacaccccaagcccgaccccctcccaaaagcgagccagaacctacaacagccccgccagcacctgacccccccaaaccccgtgtgcccactaaaggcccccgaaaccagcaaaccccccttgcacaccaacggcccccac

SEQ ID NO: 119489 - DNA, 235 bp, Glycine max
  Clone ID: PAT_MRT3847_78907C.1
ctgccgtcctttttttttttttttttttccattttttgtgttctatcaattctgacgcctactggataaatgagaatcttcttatcaaaacacccagttgacaagtgtgtataacttggcgacaaaaggtccaacataaaaacgttcccattttaaaacgaattcttgttgcgacgccgatttgtttgacacactgtcatgggaggagagcaatctatctacacgggggatgggg

SEQ ID NO: 119490 - DNA, 466 bp, Glycine max
  Clone ID: PAT_MRT3847_78908C.1
aaaaaaaaaacgcgccgccgcgtccaaaacaatccaattaatcaaaacacacagcttatatcgtatgaatacaatttttcacttcgcgacaaatataatgtgtttctttattctaatctcttattctatacttgttaatcaacaacttgttcttattaactctttttttctataatttatatataatttaatttacacaataaaagctttttctattcttctattaacttatttatgtataggattccattcaacccattttttttaactagttatttttttcttctataaacatttatcattttctcacaattatcaaattatatctgctcttgaatccacttattcagtcattttatatacatttttaaaatatttcatttttctttattttaatctcctatctccattacttttcatcatttatcatttatataataattcacttaccaaaatattcacttat

SEQ ID NO: 119491 - DNA, 347 bp, Glycine max
  Clone ID: PAT_MRT3847_78909C.1
aacagacagactgatagcgagaagttgaagattatctatcggcagtggcgtcttctgacctgcccggtcacaatcctgggtggcgtatgctacgtcatcgccgccgtcaacgtgatctcttgcaagaatgatgcattcctgaggaccagaggagaggaactatgaaaatcagtctgctaccaagttggagaaatgtgacaacataagttcgcgtgttgatgtcatttaaaccctgatctatgagctcagtatactgttttgtaagatgcgctacagctagtgaaatatattgagttcatgaatgaaatctggactctggagcatgggccattagtttagaactaacc

SEQ ID NO: 119492 - DNA, 523 bp, Glycine max
  Clone ID: PAT_MRT3847_7890C.1
ggaatggggtttttaaagggctttgaaagttccatttcccaaaaaaccatgaacattcacaaaagggggataacaaactaaaaaagtaaactaaaacaaaaagagtttaactgggtacaatgatagcccttatagcatttttaaaactaatactgaaccctcagcaaaataaaaaaaatcatgttgcaatccaacaagctgaagggctagttgtaaaaattccccagtctataaaaatttcattgaggatggaaaggacttgaagaaaaatcatttttttaaagcaattcttcctctgggggttggaaattttaaccttttttttccattttatcatcaggggattgatttccataatcacctttttttttttttccattgcacttaattggtggatcgggccccttattggggggatcttaaagttcaccaacatcaaatccttgagggagaccattcaactcccgccaaaaatttttgtttttgggagaaatattttaatccttggcaaaaccaaaaacct

SEQ ID NO: 119493 - DNA, 279 bp, Glycine max
  Clone ID: PAT_MRT3847_78910C.1
agtccacaaccctttaagcatcgagcgagcctgtgaggcgtaagtgttttgtgctgctgacaagttagttttgtaggtctatttttgggttgaacggtccataatcttttagagactaagcatgtaggacataacataactgcttcgtgctgctaacaactcaatttcgtgggttggcctcttagttggacagtccacaagccaataatttattcactttgtttttggagacaatggtttggtttccaaagacaaggtcatacgacacagctatacaag

SEQ ID NO: 119494 - DNA, 256 bp, Glycine max
  Clone ID: PAT_MRT3847_78911C.1
gtattaaatcagtcatttcatatgcactatatcaagtacaaacaggtagtttacctgtttatagtagtgtactaacaaagtctcccttgcagcttcagactgttatctataggcttatcgttcaaatacagcacttgaatatcccaagtagttcttctacgcatagctcacctttctaaacccagttaagcatggaagagaggtagtaggtaggtgcagtgtgtggaagctgcaaacaagtaggccttttattcat

SEQ ID NO: 119495 - DNA, 542 bp, Glycine max
  Clone ID: PAT_MRT3847_78912C.1
ggctcgagtaatgcatcaggttggcaacttgattcaagaatgatgacactacttaattcttattgttccatttatcttaatacttagttgttacatcctcacagaattattttattagggtttcattagtacataccctatagaaatcgtgttaagaaatcaatagtagaatctactaaagaaaaatataagcatttcttgtttgtgaattgagttataaccattagaggcttaattattctttgatttttgttgttatggacctgtgtgtttagaaggctatgacttttgatcttcatttatgaatgtcattgatttgggggtttttttagcatttatatatgtgtagtataaattgtttaacacatgtcttaaatcttcagcattgtggttttggcccttttgggccactatccataattgatatctatgctatttatctcaaattcgtgatccttgttcgctgtttcctttcctttgattttcaactgtttttttttctgatcatgaatggaactctgagatacctctttttctgcaag

SEQ ID NO: 119496 - DNA, 257 bp, Glycine max
  Clone ID: PAT_MRT3847_78913C.1
aattctaaggccgacccacgcgtcaaataaaatattgtgttacaaataagaaacgaaacccacatcacaatccaattccatgaacccttgtatgggtgcagaaaatatgagccaagtggaagaagagcaaggatatgtcttcaaagaagaaattcaacccacggtgttcaaaacttccctgttcttcgcgggcgaaggcttcaccgtctaagaatgcaaagggtaacttgtgttcaaaattgactcttaagggcccg

SEQ ID NO: 119497 - DNA, 664 bp, Glycine max
  unsure (1)..(664): unsure at all n locations
  Clone ID: PAT_MRT3847_78914C.1
aatcggacgcgtgctgcaattcactacttgagagtttgaaaatggtacttgtgctatggtcaagagggactaagaacatggacttcctaaccctcttcactcttctactcttgttattcattcatacagcactctcttctacccaatatcatgatgggaacatcttactcactcatcgtaagatcttccccaaacaggaagctatcacctcgtacgctgtcatctttgatgctggtagcactggtagccgtgtgcatgtcttccatttcgaccagaacttggatctccttcgtattggcaacgaactcgagttttatgataaggtaacacccggtttgagtgcatacgcagataatcctcaacaagctgcagaatctcttatcccacttttagaggaagctgaaagtgttgtccctgaggacctgtaccctactacacccgttaagcttggggcgactgcaggtttaaggcttttggaaggggatgcttctgaaaggatattgcaagcggttagggatttgctcaagaacagaagtaccctgaacactcaaccagatgcagtagctattattgatggaacccaagaaggttcttatctatgggtgacaattaattatttattggngaagttgggaaaaggtttcaaagacagangagtagtgat

SEQ ID NO: 119498 - DNA, 298 bp, Glycine max
  Clone ID: PAT_MRT3847_78915C.1
ggtttttatagatatcgaaccaagtcttcttccgggtatatacagcagcgatgagtgagacattgagtcatgttttaacatgttgcacagacaattaatctgaactctgagagcgctgaaaacatagacatttacaatttcggaagagataccttcactcatcgaggacgctagatggaattaactagttagaagagtagtgtctctctcacgaagggggagagggacaaaaactctgagaaaacccagctaaaaagagagagaatttgcaagccgcctgaggggggcggcctgtttg

SEQ ID NO: 119499 - DNA, 501 bp, Glycine max
  Clone ID: PAT_MRT3847_78916C.1
tcccgtgatcactgtatgacgtgctccttctttggggggggggggggggggaaccagctagtcctagaagtctgagcggagtagaagcgaactatacccgagtgccacagtcgggacgggacaagaagtatacctgtgaatataacttaagtggggtcggtacaaacgcttaaaacggtacctaaaataaagattaggccaccaaacttgaagggacaacgtgcgaaagtggacatgaaaagatagtgtgcgtaaataaatgatagtcctacaaccaaaatatcaaagaaatccagacagaggatgggtggcagtgtatcgtagctgaatgatgagctggctggggaactggctatattgcctatttggggtgagggtggttcacatgttagtactgagaaacgttggggcaacgcaccactgagggtattactgcccagtgattatagactagctggttctgagcattagcattgggtaacagggattgagagtcagttg

SEQ ID NO: 119500 - DNA, 281 bp, Glycine max
  unsure (1)..(281): unsure at all n locations
  Clone ID: PAT_MRT3847_78917C.1
cccaaaagaattttttaaatcttatgcccccccccccnttccatttcatattactctacatatttcacttcctcacaattttctcccatattattacaactaatattacttcatgaacaatactcctcttctcttacatattaaccctcttcacactaaaattcccattctcatccacattatcaaacccacttcctaaaccctcattacttctcattacatttataaaatttttaatttacataaatccctttcttccttcatacccttacctaataact

SEQ ID NO: 119501 - DNA, 1785 bp, Glycine max
  Clone ID: PAT_MRT3847_78918C.1
actttttatggtgttgacagggatgttttcctcccttggtataatggctatcgtttccttgttcaaaatgcaaagaggcttgaagctgaaggtctagcaccttttgttccctttgatcaggccacacttctgaactcaacgaatgttcttgatcaatggaaaaactcagccacccaaagccttattcattttgtccgacaagaaatggatggttatcgcctttacacagtggttccttaccttctgaagtttcttgataaccttacaaatatttatgtaaggttcaatcgtaagagacttaaaggtcgttctggggaagaagactgcgggatagcactatcaactctttaccatgtgcttttgttatcctgtaaagtgatggctccttttacacctttcttcactgaggtgctctatcaaaatatgcgaatagttaataatggatcaaatgtaagcatacactattgcagatttcctacagaagaagtttgggggggagaacgaattgagcagagtgtttcaaggatgatgacaataattgatctagccagaaacattcgtgagcgtcacaacaagcctcttaagactccactaagggagatggttatagttcatcccgatgcagacttccttgatgacataaatggaaaattgaaggagtatgtgctggaggaactcaatgtacgatcccttgtaccatgtaatgatactttaaaatatgccactttacgcgccgagcctgaatttagtgttttaggcaaaagacttggaaaatcaatgggcattgttgccaaagaaatcaaagcaatgtcacaggaaaacattttggcttttgagaatgctggagaagtcgtcattgcaaatcaatgtttgaagctgactgatattaaggttctccgtgattttaaacgacctgatggtatgactgagaaggaggttgatgctgctggagatggtgatgttctagtgatattggacttgcgtcctgatgagtcattgtttgaggctggtgctgctcgagagattgttaataggattcagaagttacggaagaaagttgctcttgacccaactgacatggtggaggtttactttgaatcattagatgatgacaaatcggtctctcagagagttttgcattcacaggaatcctacatcagagatgctattggtagtcagttgcttccaaattctctaatgcctgcacatgcagttgtccttggcgaagagaggttccatgggatagccagcatgtcatttggtatcactttgacaagacctgcattgatgtttaaccaaaaagccattctttcactgtttacaggtgatgcaaaaagtgcatataagttgcaaacttatctgctatcaagagatcatttgaagttgaagtctgagtttcaagatggaaatggaaagaaaattgtcgattcaattgaacagctacctgctgtggaagtggttcttggtcagcatgtctttttcactgtgggggactattcccttgctggaaaatctgactgatcatattttccaagtgttcctttttgatcttttatccagtttgcatgctatctgtttgcaagattaggaatacagaatatacccaggcatgcctaattgtaacttttgagcaattgactattcttttttctgtatagaggatctcacgtcttattttaaagataaagtgtcttgatttaatccttgataatctaaagtcaattattttgtcacactcaaaaccttctattgatatattttctagaatgcgaattcttccggtgc

SEQ ID NO: 119502 - DNA, 473 bp, Glycine max
  Clone ID: PAT_MRT3847_78919C.1
accaagcgttcggacagtcagagggtaaagctactctcaacatctatgctatgaatcaatgcgtagggtagcagcacgtgtcggtctggtgttccagagacctgctatacactggcttgaagacatggtgaggccgatcagagaatgtgaatgcagcacacgatgcacttcttttccgtaccaagtgcaactcgctcgcacacttcactaagtacaccattcagggtgaatctcaggaagcctacaaggtattggaccacaaaagctactcctactcagatgtttataatgaatcttatccatgtgatgattcgctaacacacccagaaccgattgctgtagactgtctatgaaattcattatgatgattggacttaagacgagttcaaaagacacagactaggcgctgtccaaaattgctctgccactcttaacggttaccacaagcccactgatgctgatcttcttccacg

SEQ ID NO: 119503 - DNA, 274 bp, Glycine max
  unsure (1)..(274): unsure at all n locations
  Clone ID: PAT_MRT3847_7891C.1
tttgtgttttcatggtgtcgttgctaatggggcattggaagggcactcgtgttgaggntgtgaacnggatntcganagtntgtnggcantatgggtnctccgctttgacaantgtnctcgctgatanctactnnganaggttcatcacaagtttgaagtntcanaacgataanccgtggatgacacagctcactgctgntgcttgnntgtcccttgctgtnnnaacggaanagacncatgtgncactcctcttggaccttcaatggaggagtcc

SEQ ID NO: 119504 - DNA, 359 bp, Glycine max
  Clone ID: PAT_MRT3847_78920C.1
cgacccacacgtcaaccgatgcgtcagcacaagcgtccgtgatgttgcgacatgcgagtgaaaggaaaaatggaataatgagtgatcacaagccagactccttcaacaccataagcaaagctgagacaaccaatatagcccctcaccccacttagaagtcacgccgggatccaggtcagcatcatctgatgagaaggctcctgcctgaaacatggcatttaaacggactgcgtcatgcctactgacacgatcttgagtggatccactatcccctcgtaccttcatcagctacaccagtatagccagacttgttgcccgtactgacatcttcaaggtcccaacccacgtcatacaatacg

SEQ ID NO: 119505 - DNA, 602 bp, Glycine max
  Clone ID: PAT_MRT3847_78921C.1
ggggtctatatatatgacattaaggctcaactttttctcctctttggctcttaccacttagtttgcgttatattattgggatttctaagaactgtgagttggtcatttcaaatctctggatggaatcaaataggcaatctctcgagggacatgagggtgctgatggtagaggtcatagaatttcagttatgcagtctacacagaaacatggtgatccaaaacaaccatctcttagtggccttagaaatgtgatgaaaggactgtgcactaatgactgtgagttgcactttgaacgtttcctccgaagagtggtacgagaggaggtagaatgcaaaatccaggatttcctatcatcaaggggatgggttaatcaaattagcacatctagagcaacaccctttgagttacgcttcgttactagaacgcctgatataatttttacgaactctaacgtgatatcagaggataaaacatccattcaaattgctctctttgatgttagagatcagtcagtggttaatgttggtcccctctcctctctaaaggtagagatctgtgccctcaacggtgagttcggttccaacggaagtgaggattggact

SEQ ID NO: 119506 - DNA, 304 bp, Glycine max
  Clone ID: PAT_MRT3847_78922C.1
aaaggttttaatacgagttggagtatataattatggctcttttcaactttttccagaaaaggaggtctggggaaacgaagctatctggctacaaaccagtagtagacgcactgttacatcttcggacgctgcctatccatgctcctgtgctgacacgaccacgctatttcctattagaccctgtactctaactatgcttatacctatataagcatcaaaagttatacctttgtatataatagcacccacccttggcgtaccgatattgcttttgtcatacctgacgacaatgaggcttgtatga

SEQ ID NO: 119507 - DNA, 763 bp, Glycine max
  unsure (1)..(763): unsure at all n locations
  Clone ID: PAT_MRT3847_78924C.1
ggagttcacactcatggtggaggctatgttcagtataatatctatggaaacctctttgaggtctctaggaagtatgtccctcctattcgccctgtgggaagaggagcatatggaattgtttgctacctgacctgagtgtcatagccggggctatgagaatttggtgtacttgttggcacttaaacacaatccttaggattttcagactcattaaactgaaggtaattttgtatcttgtggatggtttattaaatttggtgtgttagacaatgacttgtcttttctcattcatatgaatttagaatctgttatcaacaatatgagggacaatgttttttttttcttcaatttccttcagtgctgctgtaaatgcagagacgcatgaagaagttgccattaagaaggttggcaatgcatttgacaacagaatagatgccaaaaggacctacgagaaattaaacttcttcggcacatggaacatgaaaatgtgatagcccttaaagacattattcgaccaccacaaagtattttctgtatcagttgttacgaggactcaaatatgtacactcagcaaatgttctgcaccgtgatctaaagcctagcaacttgctactgaatgccaactgtgatcttaagattgcagactttggtctcgctagaactacatctgagactgatttcatgactgagtatgtggttactcggtggtaccgagctccagagttacttcttaattgcccangatatactgccgncattgata

SEQ ID NO: 119508 - DNA, 361 bp, Glycine max
  Clone ID: PAT_MRT3847_78925C.1
ttttcacaaaacctcattaaatctcaaatataatttaccaaaaaaatctcagtatatccaatacgttaattacttctgtagagaaccaacaactcctcggtagtgttgtaatccagtcaaaaagtatttttcactatgcacagacgatagtaaatgcaaaatttcaataaataggtggatcaggattgaataacacagattctctccagatgagttccttgatatcttcttcagtgaaagatggttgctcaaaatcaaaactgaaaggtctaacgcaaacaggttcctcattaatatcatgaagaggtgccaagtttgggtgacacaaagcttctttaactggaatgcccctattttggat

SEQ ID NO: 119509 - DNA, 902 bp, Glycine max
  Clone ID: PAT_MRT3847_78926C.1
cccacgcgttcgaccacgcgtgcgcaactctctccgatttccataccataccacactccttcttccaccttaagctgcgcagcttcttcactctctctcattctctacgacgccgtttccaagcgaccattaccaacgcttcctcgagcttccaaagctgctcagagaggttttgtgttttctgaatggcaaccgcaccggctcatgctccggtgaagtcgcagcctctgcacaacttcgccctccccttcttgaaatggggcgccagcggcaagaacaacaccaccaccgcttccgccgcccctctgaccccgactcccgcccccatcgcctcggatccagaaccgcgcgcaaccgattctcgctccctctcaaaccattgccaccaccacaactacacaaagccgaacacgatgacgcagacgacgccgtgcagaagccatggaaccagcgccctcgcaagcccacgcttctccccaaggccacaatcaagatcggcaccggaccttcccgaaaccaccaccacgccaccaacaacggagaattccacgacggcggcggcggtggcggtggcgacaacaacaaccccgcaccgaagtcgctgtggctccgtgggttttctgtcaagagtggaaatttcttctttgttaattgtctttcagtggggagtttcttattttatttggttttagtgcttgtcagttatgttgaggtgtcatgtatcttagcagatacagtatattttatattctgcaaagcaattatgcatctttttctttgttttcactcctttagttttgtagttgaaggattcaagaaaggatttagactacgggaaattgtgggagccctcatcaaatcatgggtttataccctgtacaagcctactcctattactcagt

SEQ ID NO: 119510 - DNA, 986 bp, Glycine max
  unsure (1)..(986): unsure at all n locations
  Clone ID: PAT_MRT3847_78927C.1
tccggtccggattcccgggtcgacccacgcgtccgcccacgcgtccggcgaccattaccaacgcttcctcgagcttccaaagctgctcagagaggttttgtgttttctgaatggcaaccgcaccggctcatgctccggtgaagtcgcagcctctgcacaacttcgccctccccttcttgaaatggggcgccagcggcaagaacaacaccaccaccaccgacggtcaccaccaccgcttccgccgcccctccgatcacgcctctgaacccgactcctccgaccccgactcccgcccccaccgactcggatccagaaccgcgcgcaaccggttctcactccctctcaaaccacctccaccaccaccaccacaactgcacgaagccgaacacgacgacgcagacgacgccgtgcagaagccatggaacctgcgccctcgcaagcccgcgctcctccccaaggccgcactcgagatcggcaccggaccttcccgaaaccaccaccacgccaccaacaacggagaattccacgacggcggcggcggcggcggcgacaacaacaaccccgcaccgaagtcgctgcggctccgcgggttctcggacacgccgtgcagtgtgaagaaagagaagaggaaattctggatcgctctctcccgtgaagagatcgaagaagacatcttcgtcatgacgggctccaggcccgctcgcaggcccaggaaacggcccaagaatgtccagaaacaaatggatagtgcgctgatacacccaccaagaggtgaagagaatttaggaaggtcttgggagattggaggtacagaggcgtggaattttgtaaagaggaaaccgaaaatgttggattggaaatttggaatttagaaacgaaccatgatgatgatgctcatttccttgcttgtgttgttttgcggcacactanggttttaggtgcaaggggcagctttagttgatttttagtagtagtagtagtagttt

SEQ ID NO: 119511 - DNA, 272 bp, Glycine max
  Clone ID: PAT_MRT3847_78928C.1
cgctcgacgctcctctgtcggtcatggccagtcgcagcccatagtggggactctcttgacagccagtcggcacccgaacttcgtggattatcttcccgtcttgacggtgtctcatcgacaaggcattcggaggcagagcacgaagtagattgacaagttgttcgatgtgttggcccctatgactgctgaacgcatgacgcggagcgaagacacgggttatgtcactaggcatgacatgttagatatcttgctggatatttctgaccagagta

SEQ ID NO: 119512 - DNA, 446 bp, Glycine max
  Clone ID: PAT_MRT3847_78929C.1
gtctattaattaatctatatatactgatttgatatatattttcctttccttacagcgatatataaactactactactaaaaatcaactaaagccgccccttgcatctaaaaccctagtgtgccgcaaaaacaacacaaccaaggaaattatcatcatcataaattcataatcatcatcatggttcgtttctaaattccaaatttccaatccaacattttcgttttactctttacaaaatcccacgcctctgtacctccaatctccaagaccttccctaaattctcttcacctcttggcgggtgtatcagcgactctgtaagcatccgcagttatccctactaaccataagccagggaacacactatccatttgtttctggacattcttgggccgcttcctgggccggcgagcgggcctggagcccgtcatgacgaagatgtcttct

SEQ ID NO: 119513 - DNA, 607 bp, Glycine max
  Clone ID: PAT_MRT3847_7892C.1
cttggatatatcatgttcgctctctaaagtgtgttctgattcatacagtgagtcgtttgtacgataaagaacaattttattcttctcatcacaaaaacccatgacctatttgatttttacaaggagaaatatttgggaaaactgtaactttatacataactatcaaactattgcctctgagaggtattgtacgagaaaaaggaattgttaaccctttcttaaacacaaacctcactatcttaatgagcaattgttgactcatcacgggctgaattctgagaattccggaggttattattattcttgtgctgctggactatcattttcttaagctccgttcctagctgctcaattcccaactgcaattccgtgtgaacctctaattgtctatgaagacacctctgagcatttgattgcaggttaagcgcctctctaatctgtatagccgacttgacatcactatgactcacatgctactgggagatagttttgtcatacttgccaccgactgggatctggaatgaatttctctgttctgtatctacgccaatgacttttgacatggattattgccacacctttgagcccatgatctttaatatagatt

SEQ ID NO: 119514 - DNA, 400 bp, Glycine max
  unsure (1)..(400): unsure at all n locations
  Clone ID: PAT_MRT3847_78930C.1
gggcgagccgcgcgtccganttcattcatttttatttcttttcttttctttttatttattattattatttttttgcgcgccgccatggtctttcttgctcttctctgcttcctttccctgacaatctcattttcacttcctttcatctctgagacccaaaagctgcttcttctgcttctcatttccccaaaaccattcactctcttgattcatcaaaaagctgttttatttcccttttctcctggcttctgattcagattcagttcacctcttttttttcttcattttttttcgcttttgttaattttcttggtgtcattgtgtttgcaaagagaattttatgtgtaccattgatttaaacgtttcacctttgaaattgaattcttgtggcgtgtgtgta

SEQ ID NO: 119515 - DNA, 430 bp, Glycine max
  Clone ID: PAT_MRT3847_78931C.1
ttcactgcattgcattcaactctattaattaatctatatatatatatatatttcctttccttatagcaatatataaactactactactactactaaaaatcaactaaagctgccccttgcatctaaaaccctagtgtgccgcaaaacaacacaagcaaggaaatgagcatcatcatcatggttcgtttctaaattccaaatttccaatccaacattttcggtttcctctttacaaaattccacgcctctgtacctccaatctcccaagaccttcctaaattctcttcacctcttggtgggtgtatcagcgactctgtaagcatcagcagttatccccactaaccataagccagggaaaacactatccatttgtttctggacattcttgggccgtttcctgggcctgcgagcgggcctggagcccgtcatg

SEQ ID NO: 119516 - DNA, 448 bp, Glycine max
  Clone ID: PAT_MRT3847_78932C.1
ttggggggtttttttttttttttttttttttttttttggttttttatttctgagctttcttgttttggttcttgtttttcatcttgtttggggaaggagcttggataacctgttgacggggaacttccagattctttttttaaaccccttccagtgcttttagagggggggggaactctttccaaatctcactaaaaaagttttgacaccccggaaagaggatgatggcataaaaaagggctgttctccttcccctgaaaaaaataggggggggggcagacactgccactgtgggagggtaaagcctccccgcccctcaagctgtaaccgcgggagctccagaaaaaacaaaccattttagaaccgttctgtgccttatatgcccgcccccaagaccgacaaatgtggttctggaattgaggcgcctgttgaattcaagcttggggag

SEQ ID NO: 119517 - DNA, 498 bp, Glycine max
  unsure (1)..(498): unsure at all n locations
  Clone ID: PAT_MRT3847_78933C.1
cccggggggacccacgcggccncccacgcgtccnccgcacgcgtccntggggccagaaaacgacacnaaggggggcgacgagaatttattanggggtttgagtgcggggggccaaacactcttctctgcggcgtttgcctacaactcccttcaccatgggtgagcaaaccgagaaagcgtttctgaggcaaccaaaagtgtgtctcaacacaaagaagactgngaaggggaacagacctctgaaagggggaaccggttttnggagtgcatggggcttgggtttaagactcccagggaagccatcgaaggagcctatattgagaagaagtgcgccttcactgggaatgtgtccatcgcggngccggatcttggggtggacatgtgacagtgctaaaaggaacaggactattattggganagggagttatctccattttatcaacaantaccagaggggcgagaagaggcgctcaaatattgctgcgcatatatcacctg

SEQ ID NO: 119518 - DNA, 690 bp, Glycine max
  Clone ID: PAT_MRT3847_78934C.1
ggggcggctcgagcaactctctccgatttccataccataccacactccttcttccaccttaagctgcgcagcttcttcactctctctcattctctacgacgccgtttccaagcgaccattaccaacgcttcctcgagcttccaaagctgctcagagaggttttgtgttttctgaatggcaaccgcaccggctcatgctccggtgaagtcgcagcctctgcacaacttcgccctccccttcttgaaatggggcgccagcggcaagaacaacaccaccaccaccgccgctcaccaccaccgcttccgccgcccctccgatcacgcctctgaacccgactcctccgaccccgactcccgcccccaccgcctcggatccagaaccgcgcgcaaccgattctcactccctctcaaaccaccgccaccaccaccaccacaactgcacgaagccgaacacgacgacgcagacgacgccgtgcagaagccatggaacctgcgccctcgcaagcccgcgctcctccccaaggccgcactcgagatcggcaccggaccttcccgaaaccaccaccacgccaccaacaacggagaattccacgacggcggcggcggcgacaacaacaaccccgcaccgaagtcgctgcggctccgcgggttctcggacacgccgtgccgtgtgaaaaaagagaagagggaa

SEQ ID NO: 119519 - DNA, 341 bp, Glycine max
  Clone ID: PAT_MRT3847_78935C.1
ttctttaaattggcccggtttgagttttttttttttttttttttttttggaaaccggatttcaacaaaatggggggttaccagataagtcccattttccatggcattatgggaataaagtaagggtattggagaaattcctgctggtttggataattcaagccttttttttttaaggaggtggttctgggtaacctatggtctgggcattcaaattattccttaagggtgcggggggtgccaaatccccaatgatcattggaacttgtaaaattaagtggcagggcccccttgacattattttccaaaataaaggtttgttccttaacaatttttaaattt

SEQ ID NO: 119520 - DNA, 289 bp, Glycine max
  Clone ID: PAT_MRT3847_78936C.1
tttttgttttttttttttgtggttctcactcatgccaaaaatgggaaacggggcctgagaaagtctattttcggtctgagaaatctcgggcaacagggaactttattggtgcctctttcaaaccctggaagagtctttctctaacactaacttttcaaacgcagcatgataacactgaaatgaaaagccaaaatcaatcaactcaaaaacccatgttagctggacccaccataattcataaacccttctttgcaaccttcaatgccgggccgcataagttttttctccc

SEQ ID NO: 119521 - DNA, 310 bp, Glycine max
  unsure (1)..(310): unsure at all n locations
  Clone ID: PAT_MRT3847_78937C.1
tcgcngcacgcgtacgtaagctcggaattcggctcgagntnagataccnnnaanaagngncgacnngcagagttgatattccctttgaagacgnagatgncatcccataggcagangctatgnngctggtcanactaanggccganntgnggnnnagacganncagacgannggcaatattggngagaangntcaagctgcaaangngangacccangnaatgncccaagctgctaatgagaagncccaacaaanagtncaagctgccnngacnagacttgngncacttcccnagnggcagaggannnga

SEQ ID NO: 119522 - DNA, 1849 bp, Glycine max
  unsure (1)..(1849): unsure at all n locations
  Clone ID: PAT_MRT3847_78938C.1
ggtcgagttggaactcaaaaaatcacaagccaaagacaattacagcaaaaaaaaataaaaatcatttgtgtacaagcagaaagagactaaaagtctggtgaataatcctaagttatggagtctgtggtgtgtgagctagaaggcacgcttgtgaaggacaaggatgcgttctcatacttcatgttggttgcgtttgaagcttcaggtttggttcgtttcgccttgttgctaacactattgcccgtgattcggttccttgacatggttggcatgaacgatgcatctctcaagctaatgatcttcgtggctgtggctggtgttccaaagtccgagattgaatcagtggctagggcagttttgccgaagttctacatggatgatcttgacatggacacatggagggtgttcagcaactacgacaagagggtcgtggtgaccaagacgccaaagattatggtagagaggttcgtgaaggagcatctacgtgctggtgaggtcattgggaccgaactctccttcaataggtttggctttgcgacgggtttcgtccttggtcactccaacaataccatttctgaaagggttgccaactttttcgacaatgaagcgcccactttggttatggatcattaaaatccaccaaggctattcggcggcaaggtcatcgtaaagggcaaaccaccccttcctccctccggcgaaaactccggcgtcctctttgtctgcacccaccgcaccctaatggaccccgtcgtcctctcctccgtcctccgccgcaaaatccccgctgtcacgtactccgtctcacgcctctcggagatcctctcccccatccccaccgtgaggctcacaagaacacgcgacatagacgctgaaaagatcaaacgtgagttatccaaaggtgacttagtagtgtgtcccgaaggaacaacatgtcgcgaaccctttcttttaagattcagtggtcttttcgccgaactaactgaccggatagtgcccgtggccatgaactatagggtagggttcttccatgcaacaaccgcgaggggttggaagggtttggaccccattttcttcttcatgaaccctaggccggtgtacgaggttactttcctgaaccagttgcccgttgaagccacgtgttcttcggggaagagtccacacgacgtggctaactatgtgcagaggatattggcggctacgctagggtttgagtgcaccaactttacgaggaaggataagtatagggtgcttgcggggaatgatggcactgtgtctcctacttattccttcgttgatcagatggtgaaggtggtgagaacgttcatacagtgaaaataaaattgtggtactagttgaaagattgtaagattgattaattgttttattttgttgatttgtataatggatgcaccggcttgtgcattgaacatcacccctccctccctccggcggcaattctggtgtgctctacgtctgcacccaccgcaccctaatggatcccgtcgtcctctcctccgtcctccgccgcaaaatccccgccgtcacgtactccatctcacgcctttcagagatcctttcccccatccccaccgtgaggctcacaagatcacgcgacatagacgcctatctgtgtgtgtatatgtttcacgggtacgtaattttatgattgattcattattcctaatttaaaattgataatatgtaacatacatgtacttaattatttgaactaaccgaccggatagtgccagtggcaatgaactatagggtagggttcttccatgcaaccaccgcgaggggttggaagggtttggaccccattttcttcttcatgaaccctanaccn

SEQ ID NO: 119523 - DNA, 346 bp, Glycine max
  Clone ID: PAT_MRT3847_78939C.1
ggcggtggcatgaaatttaacatcaacggcaagacccatgacgcggacgtggacatccgtacctcgctgctcgacctgtgtcgcgaacatctggggctgaccggctccaagaagggttgcgaccatggccagtgcggcgcgtgtaccatgctggtcgactgccgacgcatcaacagctgcctgacgctcgccgtcatgcaccaggacagcgagatcgtgacgatcgagggtctgggtcaggtcggcgacctccacgcgatgcaggacgccttcgtccggcatgacggctatcagtgcggctattgcacgccgggccagatctgctcggcggtcgggatgctcggcg

SEQ ID NO: 119524 - DNA, 312 bp, Glycine max
  Clone ID: PAT_MRT3847_7893C.1
agttccgcagcgtaatttttcctttcagcgatatttctacattttcacctctttggacaaatcaaaagaggggaacccatgattccgcctctatcttcctttctcttccagttcctcctcctctttcctctcatactctcgcattccgattccgattccggatcaccccgtgctcccgcgcccgctgatcgtggcgtaaccggagttcgacgcggtgctgcggtgcggcgcgtggcgcgtggcaggggacgtgaacaacctatgcgcgtgggcgataagtcactatgaatgctcggagtacgtgaatgacta

SEQ ID NO: 119525 - DNA, 283 bp, Glycine max
  unsure (1)..(283): unsure at all n locations
  Clone ID: PAT_MRT3847_78940C.1
ggcctccaagcggattctgaagggagcttaaaggacctccagaaaagaccctccaaccttctttgcagcgccggtcctgtaaccggaagatttgtttcctttgggcaagcgacttatatggggcccccctgaatacccctatggcgggggggggttttttcaagaaacaatcccctttccncccggatttccctttccagcccccccaaggggtgcttttagggccaaaagttttccccccccaattcccacccccaagggggaaatttgtcttggtattctc

SEQ ID NO: 119526 - DNA, 346 bp, Glycine max
  Clone ID: PAT_MRT3847_78941C.1
ccaacggtctctagctataacttttttttaaaaaactacctaaggactagtgtggagcatgctgaaatgtatcatgcaggcaccaactgcaataattaagcttgaataactaaagccttgtaagggaatagcaagctatactacgactgagaaaaaacgatgagtcccatgaccatgatcacgatcacgatgattgatcagacatgtcactgtcaaatacctcggtacgccgccttgatagctgcatacatttttgtatctaccgggctaccctgcatatgatattcacatttgcacagacaaacgctgtggctattacaaaaagtgcgtttacatagtcagagat

SEQ ID NO: 119527 - DNA, 263 bp, Glycine max
  Clone ID: PAT_MRT3847_78942C.1
tacggctgcgagaagacgacagaagggatacttatttctaatatttagttgccatcgtattttttatttaaaataaataattaaaactatgcgaatatttcgttgttttaccagcaatattttttcccctaaggaaacaaacttatgtcatgttattaataatcaaggaaggaatacaatgaggcatatagtgacaaagatggagataagataagatggtatttctctaaccaggacatgtacaatgaggcatatagtgacaa

SEQ ID NO: 119528 - DNA, 641 bp, Glycine max
  unsure (1)..(641): unsure at all n locations
  Clone ID: PAT_MRT3847_78943C.1
attcccggngtcgacccacgcgtccgaaaagttttctgatagactcatactgccttttggtttcgagctgttgatgtgtgatactgacatggtttggttgaagaacccacttccgtatcttgctcgttatccagaagcagatgttttaacttcaagtgatcaagttataccaacggttgttgatgatagtttggaaaattggcctgaagttagtggcgcatacaacataggaattttccattggagacctacagagtctgcaaaaaaattggcaaagcaatggaaagaaatgctcctagctgatgaccagatatgggatcagaatgggtttaatgatattgttcacagacagttaggtccttctgttgatgatgaaagtgggcttgtttttgcttttgatggaaaactgaagctggggattttgccggcaagtatcttctgtagtggacatacatattttatccaggctatgtaccagcaactaaggttggagccatatgcagtgcacacaacgtttcaatatggaggcactgaaggaaagcgccatcgactgcgagaagccatgcacttcctcgatccaccagaatactataatccttcgggggggttcttgggcatttaagccacatattccanaaaac

SEQ ID NO: 119529 - DNA, 971 bp, Glycine max
  Clone ID: PAT_MRT3847_78944C.1
gttgtggacgagtgcttttgacccttcgttatctagagaacagctaattgctaaagttccttatggcattccggaagatcagtggttgtcatttattgacaatcatttgaagccagagtatcaggagttatgtcggaagaatgctgtagtcagacaaaagcaaactgttccacacactggtggggctaaactgttgtcgaggaaacaacatgagatggaagtagagcttggacgtcccattagtcgagttgaattgtacattgcaactcgcaaaaaaaaagatggatcctttgtcaatgaggaggcaaggtctattggggagaagatgacacaagaaattagtgagtgtgccaatcctacagaaatttcaactaatgatgcgcttgccaaagtattaggacgagatcactgtggtcgtgtacgttgcttaggcttaggaggtcttcacagtgttgcatttcaatccactgaaaagtttagtggcacaggtagaaatttatcaaattctaattcagttgaaagttctcaactgaaagaggaggttactagtttgaagaccaagttagcagctgctgaggaaaatgtcaagacattacaaaatataatgcttacatacatacaaatgaaggaaggacacatccctaaagagttgggtgctttgtttgatactaatgtagcggttgtcatttgcggactcgctgtggcaacatcagaaagtggatcttcattagatagtaatcgtcattagaaatgacggacttggttatattcttttgtactgaagtttgacactttatttagtttaacttgcagtatgtattttgtaactttcctttgtttggatttttgaagtcgttattggagatctattgtgaacttctaaatcctgttatatttatgatacgtgatttcttacaaaaaaaaaaaaaaaaaaaagagataaaaaagaaaaaaaaaaaaaaaaaaaaaaa

SEQ ID NO: 119530 - DNA, 585 bp, Glycine max
  Clone ID: PAT_MRT3847_78945C.1
cccacgtgtccgaccacgcgttcgtccacgcgtccggctgggtgtgggaactcgttcttcttctatcggagaactgcgtgcgggtgtggtaactgtctcacctgaaaatgtttcgctgccgtggtcactgtggttgcctaagctactgcaagagcctcaaccgctgcggaggctgcaagatgtacccatacttgatctacactgagtcaaccaccaccgagacctaggtcatgggagtggcacctgctaatgctcactatgagggtgctgaaatgcctgagccctctgacaaccatggctgtagatgtggacgaaactgctcatgcaacccctgcactagctagcgatgagttgggagagcaagcttaatacaaagatggcccttaattatgaataatgatgaactataaatgtgtagctcacaacggatgtattatgtcagcgaaggtcctcaggcactatggtgcattgtgtgacacaaacatacttagaataaagtggacatgtcatgcctttcaacaagctcaagtggcttggacttgtgatgggtgaggtaagctcatgggtgcttcttttttttttttt

SEQ ID NO: 119531 - DNA, 346 bp, Glycine max
  Clone ID: PAT_MRT3847_78946C.1
gacggatgctcgacaagttggtgtgtggttcactgacaccactcccgggcgtgggactgctccggcacctgcggctccccctggagcgagcaactatcctcctacatccgctcgagcccgctcgcgcgccgacttgacttcgccgaagcagacccgatgctcgaggggaatgtcgcaacgcgcgtcgcagcaataagaggaggaaagggcgcaaggggggaggtgacgatcgcaaacaagagcgacggggagctgaccgcagcggacctcaaagggaagaaggtcttaggaaggaacgacctaaacgtaccgatcgacgacaaccagaacatgaccgacgacacca

SEQ ID NO: 119532 - DNA, 367 bp, Glycine max
  Clone ID: PAT_MRT3847_78947C.1
cctaaaatcgtcatatttgcatggaggctaattagagacaggctaccaaccaaatcaaacttgtggagagacatatagaggtagacgactcaacgtgcccattttgcagatccgtggaggagactgcagctcatctgttctttcattgcagtaagataactccattgtggtgggagtctttgtcttgggtgaacatcatgggtgcttttcccaaatcacccaaggcaacactttctccaacatatacatggagtgacagccgacatgaggtctcacagatggaaaatggtggtgggctgcattgacatggatcatttggatgcaaagaaataatatgatcttctccaatggtactctcaatgccaac

SEQ ID NO: 119533 - DNA, 378 bp, Glycine max
  Clone ID: PAT_MRT3847_78948C.1
ttccgaacatttcgattacataaaagggaatattggaatggtgaaaagaaattatcaaaactgaatgctacaagaataaaagaaatcgttcagaggccttaagcgcacgtctattcttagtggaattgatctatgtgacatctaaataaactcccttgtatggaccccaaaaaaattgaaaaccctccctgtagaacaatacaacaacaaagatcacttccattaaaggtacatttcgtgattccaaagacctatatacaaatgattatgaacggatccagggaggaaaaaggaataacagaatgaatcacctcgatgtcctgttgtgcattcccacttttaacacaacacttgggtgattcatattcctctcttctg

SEQ ID NO: 119534 - DNA, 632 bp, Glycine max
  Clone ID: PAT_MRT3847_78949C.1
aattatactatcaattcttaatttcttatccatgccgcgcaaaaagctgactctatacaaattacaaaagaaagagggtactcgtaaattcctaatacataacacatgaggaacactatactatgacgaaagaagcacttaattttatctatacttacatgcgaactcgtaattactaaaacagctttcaaggcaagaaaccgtaattactaaatccattcgtaataataacattattaccattcgcattcgccattgtcgccgccgacgggcggctgcggaaaccgccggaaaatggccgcacttatggcagcgcgcggtgacggcaaacggcgcgcgacacgagggacacgaggagtgcgacgcgagccacgtgtcaacacacgccacgtggaacccgtggccgcactgcggcagcacccggatctcgtcgccggcgccgaactccgtcaggcaaatcgcgcactccgaccacttgcaccggtcgccgccgccggcgtaggtgaacttcggcagtgaattcaccactttcttcttgaggcccttgttcgccgtcgccggcgattctcccgcaccagagccggagccggcgacgggtccccggcggagccaggcgcagcgcgcgatggcac

SEQ ID NO: 119535 - DNA, 428 bp, Glycine max
  Clone ID: PAT_MRT3847_7894C.1
aaacaagcaaaaaaacatacacacaaattttttatggcgaacaagctcttcctcctctgccgaactctttccttcttcttggggctcaccaacacctccatctaccgcaccatcgtgcaagtcgactaagatgatgccacaaacccacccggcccatttaggattccaaaatgtacgaaggagtttcagcaagcacaacacctgaaagcttgccaacaatggctccacaagcaggcaatgcattccggtagtggcccaagctggaccctcgacggtgagtttgattttgaagatgacatgtagaacccccagggcccacaacagaggccgccactacttcagcagtgctgcaacgagctccaccaggaagagccacttttcgtttgcccaaccttgaaaggagcatccaaagccgttaaacaacaagt

SEQ ID NO: 119536 - DNA, 997 bp, Glycine max
  Clone ID: PAT_MRT3847_78950C.1
actgcaagccaaacactgccctctcttatttctctctctctctaaaatattgttatcaaaaccctaacttgatagtatcttccatcacacatgacacgagggctgagactcctccaatccgcggcggcgccaccgccggaggccgccgcagccgtcgagtcggacttcgtagtgatcctggcggcgctcctctgcgccctcatatgcgtggtgggcctcgttgccatcgcgcgctgcgcctggctccgccggggacccgtcgccggctccggctctggtgccggagaatcgccggcgacggcgaacaagggcctcaagaagaaagtggtgaattcactgccgaagttcacctacgccggcggcggcgaccggtgcaagtggtcggagtgcgcgatttgcctgacggagttcggcgccggcgacgagatccgggtgctgccgcagtgcggccacgggttccacgtggcgtgtgtcgacacgtggctcgcgtcgcactcctcgtgtccctcgtgtcgcgcgccgtttgccgtcaccgcgcgctgccataagtgcggccattttccggcggtttccgcagccgccgcatcggagtccaaggccgtcggcggcgacaatgctgccgatagcactgcgaatgcgaatcgtaataatgttattattacgaatggatttagtaattacggtttcttgccttgaaagctgttttagtaattacgagttcgcatgtaagtatagataaaattaagtgcttctttcgtcatagtatagtgttcctcatgtgttatgtattaggaatttacgagtaccctctttcttttgtaatttgtatagagtcagctttttgcgcggcatggataagaaattaagaattgatagtataattatgtaaaagtttttttttttttccttttctttactttttcttagagaggaattctcttttctcctactccttataattacaaggggaaaaagataatgtcaccaggtttttatc

SEQ ID NO: 119537 - DNA, 278 bp, Glycine max
  Clone ID: PAT_MRT3847_78951C.1
aaccaccgtttggggatttatagaggtgaaacgaaacggggataaaggatcaaataatacgagtggctgtcactcaacccaccacagacactcttaggatgtgctaagaaagtaacaaagctatgctatcccttcccctattaacagagtgaggaaacaacccttgacaacaaagactgaaaaaccatctgtttcttctaccgctccttgcttagatgcaaacgactcaccccctgattcggacgaccccaaatactcacttactctcatcttcacta

SEQ ID NO: 119538 - DNA, 232 bp, Glycine max
  Clone ID: PAT_MRT3847_78952C.1
acactgaatcatttcatgttttgggtgtgctgtgatgtgctttcatacggggacagctttttagcatgggttattggacttgtctagctacagtgtactttgctcccttggggatatgtttgtagcatgaagcaatgacttaggatttgaggtaatatgagccatggcggtgtcatgcaggagagtatggtgtgggtttcattggattattaaagaacgtacaagcttgttg

SEQ ID NO: 119539 - DNA, 485 bp, Glycine max
  unsure (1)..(485): unsure at all n locations
  Clone ID: PAT_MRT3847_78953C.1
ggctcgagggaaattgtcgtgtatgttgcctcaaagactcagactcagtcaccatattattcaccttttctctgttctcactcatggcccctttacaatccttacctatatcagtgagagtttcctctccttttatgccatgctttactttcaaatgtctgcattgtgacactgtcaagcgtttagtgggggttctgacttctgagtattttgtcaccttaaacagaacacatggctaattttgagaaagatgaggtgccaattttctcagatattcatcctaaactatcaaatgaacttgttgattctaaattcccaaggcgtgtacctaggactcgaagtgtgtcaatttctattcctgcgacactcacagagccatatgaaagagatactaatcttgtgggatacactggtcccctacngagtcagagaaaaactccattcgatcagatgagtggaacattgtatgttaccaataaacctgg

SEQ ID NO: 119540 - DNA, 217 bp, Glycine max
  Clone ID: PAT_MRT3847_78954C.1
cgagagggcagcagatgtgggaaggggtaacattgcaacagatgcgatattttccttgaagacagcccatcaggaacatgcctcatagatggatactcagatgccttatatagacggatgagcagctacacaatgaatcacgtagattgtagattgcgggacacgaaattattcatggacagactatgaaaatattacacactgacatgtacccatt

SEQ ID NO: 119541 - DNA, 302 bp, Glycine max
  Clone ID: PAT_MRT3847_78955C.1
aataaaagagatgctgtttttaatataagaaccagaatttgcactgggatccaacaaacaaaatttccacattgtctgcataaatattaagaccaccttaagccctataacaaaaaaacctaagataaggatatttagttctggtgagcatgagagatataatagttatactagaaaataaagaatgcggacatcattgtaaacacgaaactctttataaaagttaacgaagtctgtgtaagcagaatatgacaccataccgtgagaccatgctgttgccaccatcattgatggcagacgct

SEQ ID NO: 119542 - DNA, 304 bp, Glycine max
  Clone ID: PAT_MRT3847_78956C.1
gaagctcgcaattcggctcgaggcttcatatgatcatgaagaacgttttactacatttttgtcctccttgtccaattggggctcattggccgctccaacctgctgacaactaaaccatagatacttatatagccgcctccttaatcggttactttgtgatgtcaagggttattgctctttgtacctaattggcggtattccagtctaaagcattatctccgcccaatcaaaatctactgaagtctatgatgcactaagatatgtttgatggagagacttcaattacttccgtgactgtttaacc

SEQ ID NO: 119543 - DNA, 406 bp, Glycine max
  Clone ID: PAT_MRT3847_78957C.1
aacgggaaaaaaaggggggaagttttttaaaaaaaaaaaaaaccccggagggggggggggggggtaaaaaaacaatttttggaaattttttgggggggccctacccggaaacaagctttgaaggggggggaaacccccaagggccaggggttttttttggggggggggttttctggcttattaaaaatttggcccagggttttttaaaaggggaaaaccccggggggggcaattgcctaggaagggggcccaaaaaggcggtataaaaagggggaccccatttatttaagcaaatacccccaagagaggggggacaatttgggggggggggattttattatttaggctggggggacaaattacccaaattgggaaaagggggttccttctgagggggggaagggga

SEQ ID NO: 119544 - DNA, 748 bp, Glycine max
  Clone ID: PAT_MRT3847_78958C.1
gtcgacccacgcgtccgaaatgacaatgaataaaagaagttgaagggaagagagaatgcaaactcagttttatactggttcggtcacactcttgtgcctacgtgtaatccccaaacaacccgcttgagagtttcactatcttgtaaaatcccttttacaatgtctgaaccacataaggacaacccttcctttgtgtgcagataaccttacaacaagagtccctcggtcccttaatcagttctcttgaataagaaaaggtagaagaagaattctctcttttaagagaaagataatacaatgaagatcattcaagatttccttccctcacctttctcttaggaggttcctaggccttgaacactagggaaattcactgagttgatctcagctcataacagcacatatatatatataagtggtttgttgccattgaaaatttgtcttttgaaatagatttaaatgaccaaactttgatggcatcagcatgcaaatcagtctaggatgtcgtgtgcaatcctgacaataataactgtagcagttatcaacatttcacattttaattcacttactattatcttgcactcttttcctcaaagtatagtttttactctgttggcaataatacctcattctatctcggtcttcatcatcatgaagtgaagaacttgatagcaccacttgctatcctgtaattcattgagatttgaacattacaatattcattacattaggggacctgttttgaatt

SEQ ID NO: 119545 - DNA, 150 bp, Glycine max
  Clone ID: PAT_MRT3847_78959C.1
gcacgtcccaaatagaattccctcttataaataaagaaatttattttttgaatacctgacggctcataccatttgtaaagtgtagagagtcgcaaggcccataaattagtgacggaacccacaacctgcaaagctgacacaattcctaag

SEQ ID NO: 119546 - DNA, 434 bp, Glycine max
  Clone ID: PAT_MRT3847_7895C.1
attcttaaaatttatggggttcaccccgcacatgattatattttggtccaattacaaaggcaacgttcattaaacacccgtaggggggccttcatttgaccctgctaaaaaaaaccaccaaatatacatattccgcaaaacatatgaggtattaatcattaggatatcaaagattgcatgcttgacttttcggaaagcactacatcacagatggtggcaagggaggactatcgcgtagcctttttcttttttaagatgcccatcccacggcaaaaagaaaacacctggattccctttgtcacgtctatcttgtgtggacatcagggaaagaaaaaattgaacttgacaaaaaatatgtgtatattcaggcatcacctgaaaaaagagaagctggtcataaactgggaaaacactactattgcaaatgaagaatg

SEQ ID NO: 119547 - DNA, 322 bp, Glycine max
  Clone ID: PAT_MRT3847_78960C.1
gctggccttgtatgctccacctatttgtgacctcgctgactacaatgagaaggttatgctaccacttatcaataatgtcggggtgaaggcccatacttttatggccagttgcaatgcgcgtcatgaccagcgcattgtatgtagctgggtgcacgttggggatgttgcccctgaggacgtgattgctatggttgccaccctgacaattaagacgaatgtcatgtttatgtatggatgtgctaatgcatacaaatgtggtatcaactgccatactgcttatgttgttcatgtaggtgaccttgtctcagcgtagagggctgtg

SEQ ID NO: 119548 - DNA, 512 bp, Glycine max
  unsure (1)..(512): unsure at all n locations
  Clone ID: PAT_MRT3847_78961C.1
tttggttacaaaacttacaatttgataccaaggtagtccataagttgatgagctgcaagcctgcagcacaagtgatatcttttgaatgggaatctcttcataaaataaaagttatcaaatttcaaatttgtatgtcctaaaacatacaattttttgtttccccaatatgataacatgatatatgcaaattaagggattttctctctgtctctacacatgaattttatgccgagcattctcctacagtcctacttatatggggaattgaaaagtgaaaatgggacaaagtgtaataaataaaatatagacaaaacttgtgacttgtgttaaaattaggaattagaaattatttttatctttagattttgttgctttcagtataatgtttcttctatctagtttttaaaatctttttcaggttttagacagtatacttgaaggtcaatatgttccttctgagctaacgaggatcatgatgtctgtgaatggactagactngtcaacatatgctc

SEQ ID NO: 119549 - DNA, 438 bp, Glycine max
  Clone ID: PAT_MRT3847_78962C.1
gggaaaaagggccggggaaacccccccccaccccaaagggtaaaacttcaaacaaaataacgggattttgaagagaaaaaaaaaaaggggcaaaccccccaaatactcacaactcactcacaatcctttattaaaagaaagcaaaccccctttcaaaaactgaaaaaaacaaggcccctaaggaaaaacccctttatgttttacccaaaaaaaaggaccccggcgagaataccaccggttttttacgggcaaaaacccccccagaaaatcaaaaacaaaacccaccccaactgggggcccgggacagaaaaatacctaaggaattcctccccccccacccttaacagggggcaggggggccctcccttgagttttgcacccgtaacactggagtcttgaaacataattatgaggggggcaattggagcacatccaatc

SEQ ID NO: 119550 - DNA, 308 bp, Glycine max
  unsure (1)..(308): unsure at all n locations
  Clone ID: PAT_MRT3847_78963C.1
gacgtcgcatgcacgcgtncgtaagctcggaattcggctcgagngcatgtgnnaggngcataccactnaattttcattntntttgntttnatcngtncatgntgntgttgccngnnatggnnatgcttcngaagtcannngtgatgcctaaatcagcnanggcacnnancnttncagcntcnatgntnacgccaagttatntggctcaagagctgagcgaatccggtctnanancaatagctgttganatgnngnnnagagaaaacatagncngttgcancangnaaagcgatanatagtcccntgcc

SEQ ID NO: 119551 - DNA, 329 bp, Glycine max
  unsure (1)..(329): unsure at all n locations
  Clone ID: PAT_MRT3847_78964C.1
acccnccgaaataagacccccgggcgacaagcaacgaaacaccagggaccgagggaagaaagaacccccctgcccccacaacaacacaccaaggaaaggagcccacaaaggggcacaacacagctgaggcccaaaaacccaacggaccggggcaacaaccagacgaacaaaccaggcaagcaaccggaacaaaaaaggagccgcaagaacaggcaaaagacccgaacgacagacagaggaggacaaacacagacaggaggggcaaacaaccacacccaggcgcacccaacagaaaaaacaccacagcccaaaaaaaaaggacagcgggg

SEQ ID NO: 119552 - DNA, 231 bp, Glycine max
  unsure (1)..(231): unsure at all n locations
  Clone ID: PAT_MRT3847_78965C.1
gaatacactaaagatcaatttaagaacaagtttaattagctgagaggaaagaggaaagatttcactaatttgataaaaatggatactggattagggtattgtcagaccctaatttcgtctggggactatcattcactgatgtttngattctcatagctgaattgcggtgttcgacaccagttnccgcacaaagcaanggntcactcagttttttgatcaagaatacaaagg

SEQ ID NO: 119553 - DNA, 242 bp, Glycine max
  Clone ID: PAT_MRT3847_78966C.1
gggctttgcagttaattacgccctctaagataatcaatgcccgtgatcttgtttatcatcaccgcactttttttttccttctctaacatttgttgtaggcgtcctcacggatctgaggtgtcggtggggggatgcaatgtcacatgtcaaaagcgttatcataatcttcatagagagacattgtcacgtatagatttgatttagttcaaaacgaacgagattgcactgacaaccttactatt

SEQ ID NO: 119554 - DNA, 145 bp, Glycine max
  Clone ID: PAT_MRT3847_78967C.1
atccacatccttggctggcaaggacgtaaagctgttcccatcagcctcagaactgggaaggtcgtgcataaggaacaccgacaccaaacaggtctactcaggatgcccatgctacggcccatacctagtcaagatacttgtgccc

SEQ ID NO: 119555 - DNA, 369 bp, Glycine max
  Clone ID: PAT_MRT3847_78968C.1
acggctgcgagaagacgacagaaggggaccacttaatcatatgccacagacagttgtagtgcaccctattggcaactcgatccttttgtaccatagagccctcttaatacatccaatttcaaatattaatactactactcaaaaacaaggaacaacaacaatagattattggccatgaagaagatgggtttttggattattgaccctgactttggattgatgaaatagaagactcccaatgttgaatttaacaacaacaaaatacaagcgacaaaatagagtaggggtcttacctttataacaatgggggcgccttcgacgactgatgaatgaggaacaaagtgagggcatgacattagtgagtgatgg

SEQ ID NO: 119556 - DNA, 362 bp, Glycine max
  Clone ID: PAT_MRT3847_78969C.1
gatgaagaacacatacacttgtgtagagttccatgattaccatcagttgatagccattttaaaagatggtgatacattttgtgtgagtaagagaaatccaccttttgataaagggttggagttaaaacaatgcggggttcatttaatctttgaaggggatgatgattatgatggatgggaagaatcattggacaatgacctacaatctgtcttataaaaattagccaactttttcaagacttatgaagatgagagtgtcaggaatctgaatgaattggagatgatgggacaagtaccaagaacttttcttgttacacttagaagcaattttatttttttttttctgatttgagctattcttt

SEQ ID NO: 119557 - DNA, 443 bp, Glycine max
  Clone ID: PAT_MRT3847_7896C.1
gggtactatcttcgtttctgctccattgttgatgctatttcttccactcttggcaatttaaccaacctcactggtctctatctctctgacaacaacctcattgggaatgttcctgggactttgggacaactcttggcccttttggttcttgatctttccaggaattctcttactggctccgtaccagcctctttcgcctttctttcgaatctttcttcccttgacctgtctgctaactttttgtcgggggcggttcccaccggcatagggactctttccaggcttgagtacttgaatctttccaacaatggccttgcttctttgcctgcccaattggggggtcttgctagcttagttgaccttgatcttagtgagaatcctttcgttggtgttggattgccctcggatttgaccgggttgaggaacttgaggaggatgatact

SEQ ID NO: 119558 - DNA, 304 bp, Glycine max
  Clone ID: PAT_MRT3847_78970C.1
tcggtttcgcgtgctctgactatggagtggctctatcggtccataacagttcaggcttgcgtagcactagaagtgattgtataacccgagacacattatgtaaaaatagccacactttatacttaactaaaacttcctcacatggtatatttatacacctcctttggcaccgatgtgagtgtgacattaataataggtcctatgtagtttgaagatcatgctcggattgaaacaaaggaagcctgaattgtgagatagttgcggcgaatcattaaaaggctgcgtggtgctgctcaaaatttgt

SEQ ID NO: 119559 - DNA, 1411 bp, Glycine max
  Clone ID: PAT_MRT3847_78971C.1
tacggctgcgagaagacgacagaaggggactctttgtcttcacactccccttactcgctcgacctagaactgtgttagggttttacgaaaccaccgaagttgcagaaaaaggaagaaagaagaaaaaatggtggctgacaggagcaagaagccgaaggtctccgagaagggcgaaaacctcgatgaaatcgacggagaactcgtcctctctatcgaaaagttgcaggagatccaagacgagctcgaaaagatcaatgaggaagccagtgacaaagtgctcgaaatagagcagaagtacaatgagatacggaagcccgtctatgataagaggaatgatattatcaaggctattcccgatttctggttaactgcttttttgagccatcctgctcttggtgatcttttgaacgaggaagatcagaagatatttaagtatttgagttctcttgaggttgaagattttaaagatgtcaaatcaggctactcaatcacctttaatttcaatgccaatccctattttgaggatacaaaacttgtaaagacttataccttccttgaagaaggaacaactaaggttaattgctacacccataaaatggaaagagggcaagggcatacccaatggagttaatcatgagaaaaaaagggacaagcgtggctcctactgatgtcagcttctttagttggtttagtgacaccgagcagaaagatgatatagatgacattcatgatgagggttgcagaattgatcaaggatgatttatggccaaatccacttacctatttcaacaatgaagaacctgacgaagaggaaggtgatgaggatgaagctgatgatgagggaaaggaggatgaatctgatgatgatgatgacaatcaagaggaggatgacgatgagggtgaggaggatgattacaagtgaaaaatacattatggtcatattacttttttttttttggggttgtaggagtatttaagcgttctttaggggatgatcatggcctccctttgtggttgtcatcttatgtcagctggtggagctaccaaggccagttattggttctctctctgactatagcctatttattgtcctacgaagttatttctggtttcatcccttgtgcactttttcagatactaatgttacatcgtttcttttttcataaccctttgtcgtggaactaaatagtaaaaattgcagtatttagtgtatagcagagtccagtttggtatttcttagcgtgcaggataccatgggaagcatttatcagatacagatgttcaaatgctatttcaatgttatccaatttatttcctcttaccaatgactgttgggattaatctttcaccaaataaaagtaatgctacttgcccagaaaaaaaaaaaaaaaaaaaaaaaaaaaaaaccaaa

SEQ ID NO: 119560 - DNA, 651 bp, Glycine max
  Clone ID: PAT_MRT3847_78972C.1
gatgatattgatgacattcatgatgaggttgcagaattgatcaaggatgatttatggccaaacccacttacctatttcaacaatgaagaacttgatgaagaggaaggtgatgaggatgaagctgatgatgagggaaaggaggatgagtctgatgatgatgacgacaatcaagaggatgacgatgagggtgaggaggatgccaagtgaaaaatacattatggtcatattacttttttttggggttgtaggagtatgtaagcgttctttaggggatgatcatggccaccctttgtggttgtcgtcttatgtcagcaggtggagctaccaaggccagttattggttctctctctgactatagtctatttattgtcctatgaagttatttctggtttcatcccttgtgtactttttcagatactaatgtttcagcggcttttttccataacccttcgtcgtggaactacatggtaaaattgcagtatttagtgtatagctgtttccagtttggtatttcttagcatgcaggattaccatgggaagcatttctacaaacgagaaatcattccctaggcaaatgttttcaatgttgtccaatttatatcctcataccaatgactgttgggatctttcacaaaaaaaaaaaaaaaaaa

SEQ ID NO: 119561 - DNA, 423 bp, Glycine max
  Clone ID: PAT_MRT3847_78973C.1
cccccatgtcgtactcctgaccgcctctgcggtcccctcccgccgtcgtctcctccgtttattctgccgaagcgctggcactaagccttctttttcccgcctccgtcatctctccgtcctctcgccctcggttttccccccgccgccgttgcccccgtcttcggttcttctcctcaggaacctaaaaatgccgcgcccccgcccctctggacttacacctacttttacacttttttgtgtggatttctccaaagatcgaaggcttgaacaagtagtaagagtattagtttcccctgtattatggtgcaagatttcttgtgttcgtttcagaacttaagtaattttgcaatctcttggcttattatcattttgttaacatttgggttttggtaccttaatgaaattttttttgatatttctaaa

SEQ ID NO: 119562 - DNA, 693 bp, Glycine max
  Clone ID: PAT_MRT3847_78974C.1
atggcaaaagttaaagagaaagttgcagtcgttacaggtgcgagtagcggtataggagaggcgattgccaaaaagttaagtcaacaaggtgcatcaatagttctggttggtcgtaacgaacaacgcttaaacgaaatagcccagcaattaaataccccggctaaagttgtttcagcggatgtcactgtaaaatcgaacatagatgatatgttaaaagctgtaatagaccattttggtcatatcgatattgttgtgaatagcgcaggtcaaagtttatcatctaaaattacagactataatgttgagcagtgggatactatgatagatgtaaatattaaaggtacactccatgttttacaagcaacattgccttatttgttaaaacaatctagtgggcatatcatcaatcttgcatcagtatcaggatttgaaccaacaaagacgaacgccgtttatggtgcgacaaaagcagcaatacatgcaatcacacagtctcttgaaaaagaattagcacgtacaggtgttaaagtgactagtatttcaccaggaatggttgatacccctatgacggaaggtactgattttggggaacgcaaaaaacttgaagctcagaatattgctgatgctgtagtatatgctttaacacaacctagtcacgttaatgttaatgaagtaacgataagacctgtttaa

SEQ ID NO: 119563 - DNA, 342 bp, Glycine max
  Clone ID: PAT_MRT3847_78975C.1
tttttgaatagaactcccatagttccattatagcggcaggtaatatggggttaaaactaaaattcaaacaatggttgtcccaatgttacacaataaaaaaaaatgttgtaacttaaacttgactactgagggtatccatatcataaagaatttcctagtacgaccttctaacgcatatttttggggatactactaatggggacaataaagaactgattctgttggagtttcaaataaatggtggctgaataaaccccattaagtagggcagggtctgtcaacaacataattaattacttgggcttctgagaattgttagtgaacacttttatcataaatgcc

SEQ ID NO: 119564 - DNA, 216 bp, Glycine max
  unsure (1)..(216): unsure at all n locations
  Clone ID: PAT_MRT3847_78976C.1
tgaaaganagcctctctcactcaccatttncttgtttgcgatcaccaatggctgccataatcgntgtcctctncctcnctttcggnactccaactcaacacaatccaagngagtatngagttgtccncagaaatgtgcnactgacagnaaacnatnaatggnttattgngacaagtatntaggtcaggcaccngatggtgtgtgnngnagnatcna

SEQ ID NO: 119565 - DNA, 457 bp, Glycine max
  Clone ID: PAT_MRT3847_78977C.1
ccacacaaggtcaagattttgatttactcatccaggaaaaggcattcaattaacagacacatgattccacttgatttcacatttgctgaaggaaacttgctgaaattagaaaacactaaatcagtctttattgcgggatgagtaataggtttgcataattgtgaaaacaaaaagtgcagcagctgccaacactcctatgaatttccacaccgtgggaatatgatcgcgtatcaaaattctgtaccagtttccccaatagtaaacaatgatctgcaaaacatgtctgcacttgtgccaagtgactacaggcaatccttgaaatgcagttgtgatttttcccctgttgcacatgtccaacctcgcaccaatttcgctatagctcgaatccatgtactctgctcccttcgcaatcgttcgaaacagatccagcagttcatcagtgctcttcccggccttg

SEQ ID NO: 119566 - DNA, 791 bp, Glycine max
  unsure (1)..(791): unsure at all n locations
  Clone ID: PAT_MRT3847_78978C.1
gcgctagtagtagtgtgtaatacacttctcatttcccttcaatttaacccctttttttctaaggcccgtgcttcttcttttagctaaaagctactcattttcagtttcaaaggagatgctttcacagaggaaaagtagaaagcatccatcgaaagaaaataatatcaaaatatatattctcaaaaattaaaacaccgttttcaggagaataaacataatctatgcgacatcactagttacttgctcttcttccttttgcaaaagaaaaagggtgcccagctcctcaacgttgattcttgcagaatctaattttcaagattttatacaaaactgttatttatgtatctaatcttaatcaactacaactaaacaaccaatgttttgcttttcattagggtttgcagacattcaggtcatattttccacaacattgattggaattgtcattctattttttactaaatagcagtagacagtagtaggcggagaagtagatggggtatgttggtcgagggaaactaacctgtttacaattgcaatgataattttaaaatatacacacagtatcatattcatagtatgttttacaaacaattaaaacttttacacgagaaagcatattttgacgagggacccttcaccttgatccaaaaactgattaatgaccccccatcccagacttccatgaagtactaggattttttttccaccttcacaagtattgcgtatcttatccatatcctgtctacttctaactcttaataaagnccgctattngattttttcaattt

SEQ ID NO: 119567 - DNA, 1300 bp, Glycine max
  Clone ID: PAT_MRT3847_78979C.1
ccacgcgtccgtacggctgcgagaagacgacagaagggggaagagagagagaggcaaggaacgaacgacgtattctctctcctccactcacctcaaatccaaatccaaatcccaattctccagtctttgctatggcatcaatttcgtccttatctctcacttctgtttccctccccaaatctcaatctctggaccccaagaaaatctctgattcttcttcctcctctggcagcaggagtcaaagttgttgttgcgcgccatcgttccaacgaagaaagatgcttctatcttccgccgccatcgttgccggaaccttgtgcagcaattcagtcagcggagtcagtttggcagctgaattcgccgatatgccagcgcttagagggaaggattatggcaagacaaaaatgcgatacccagactacactgaaactgaatcaggactccaatataaggacttgcgacctgggaatggccccaaacccaagatgggtgagacagtagtggtagactgggatggctacaccataggttattatggccgcatatttgaagcacggaataaaaccaagggtggttcctttgagggcgatgacaaggactttttcaaattcaaaataggttataatgaggtaataccagcttttgaagaggctgtttcgggcatggctcttgggggcattagaaggataattgttcccccggaacttggatatcctgagaatgatttcaataagagtggcccaagaccaacaacattctcgggccaacgagccttggattttgtgttgaggaatcaggggttgatagacaagactctcttgtttgatattgagctgttgaagattattccaaactgattgatcaaattttgaattgactgtcaaatatcaccgtcggaatgttgaggtctacttatttacagaggatgagaggatacatgcaaacaactgtcctgtagaaattttgttaatattgatattagatgcttgtgtcaaatgacctcgggaatagatgctatgagattttaagtattttgtggtcttcgttgttggtttcttcagtaatagtaacatatgaagcattcaaagcaattaaaaaaaaaaaaaaaaaaacttgaatatactgtatgagagtatacagtacatgggatggagcatcatatgatcaattagaaattagtaatagttagcagaaaaagactgtgactgcaacgtaataacttttctaatagctattgttgtagataaagtgttagtgttaccatcacaacttgtgttcagccttagacattttcccttgt

SEQ ID NO: 119568 - DNA, 1109 bp, Glycine max
  Clone ID: PAT_MRT3847_7897C.1
actgcagaacttcttttcattcaccaaaggtaatacatatacataatacatgtgcaaaacaagaggctagagtctagaactaaaaatttagtctagcaacaacaaacaccaagcataagttacaaaatccaaaaaaaaaaaacatcagacaactcaacaacatcattaacatcaaaagaaactagttctccactacctttgccgagggaatactaatgatatactcaatctcatctcatcattttgagtgtgtgtgatttcgtgttgtctctccttttctccaacatcttcaacactggatcaatgacatccaacaacttttccttggtcaccatccgatgcacgtaaaccgccaagttcacatcatcaacagccctattaaaatctagtgccttctgagctgtcaaaacctcaagtagcaccactccaaaactgtaaacatcactcttatcaatcaattggtagttcctataatactcaagatcaaggtacccaagggtcccctgagcacaagtagagatatgactcatatttgtccgagccaacctagacaaaccaaaatctgaaaccttggcattcagcttgatatctagcagaatgttgctggacttcacatctctatggtagataggaggcacagccatgaagtgaaggtaagcgagaccctcagcggtgtcgtgcaacttgaaggcgatgagtccatgtaagccagtcacggcccttaggcatttgaccttgcaagtgatcaagaagggtcccattttctcattgaggacttggtcagtgcctttggggttgccaagcttggcacacttgacagccacaacagtgccatcttgaagaatccccttgtagacttcaccatagcctccaacaccgagaagccgatcacaggagaagtcgtttgtggctttctttatctctttgccattgaaaagtttagctgctctgtccccattactggcattcagaatcccttcacgctctttggctatccgtgcttgtgcttctttgatgcgcctgtggcgtttgtagagtagaaaggcaatgatggcaaggatgagtgcagctccagccccacatactgaaccagtgttcagaatagccat

SEQ ID NO: 119569 - DNA, 637 bp, Glycine max
  Clone ID: PAT_MRT3847_78980C.1
ctctctctctctctctctctctgtattagtttctatttacccatctggaaatgtgcctgagaaactgattttgcttaatatttgctgctcctatggccttttaaatatagatcttactgagctctgatttctcatgtctgtattcattttgccacaggaacggaagcatacctgtttcctttatccaaaaattattaatgaagaaactaggcctgaaaagtgaggatgaggttgagattaaatgcatgggacatccagtgcttccttcactgcaggtgcaaaacttggttgactcgtggcttgatatggcggcttcaggacatagaattccagcaaccattggatcctcggggaaagattttgtcatgatcctaacctatggtcggaaggtcctacacccttgattgtggttcccagttcttcccctttcacatttttattatagcatgaaaaatcgaaaaccttcccagaataattgcttcctcgtcaactggctttcttatgccactgttgccaataggaatgcagttatgaggaaatctcctctcctgctagactgttgaatgtagagtagcatgccctttggctctatacttgttgcgacttgatggttcttgaatatttgacatttcaattt

SEQ ID NO: 119570 - DNA, 384 bp, Glycine max
  Clone ID: PAT_MRT3847_78981C.1
caattaaaactttttgggattgaatttccttacaaggcacgacactatcattgtaattttatgtttaacagagcataaacaccctatgcctcattgattactcattcttcattaacacctacgatgatttgttgtactccaagagacttacactgatgtttaatcttacgacgaataattatattctttaatggattcaaaaagcttataaatggaggctattgcaaaacctcaacatgcaccctgttggtacacgttcaatggataattctgcaccatgcacactgtcctatggattatgtctatgaatatcctgggcctgttcctaacaagctgggggaataattgtaggaaagggcactgatcatttctgtctacaagaat

SEQ ID NO: 119571 - DNA, 317 bp, Glycine max
  unsure (1)..(317): unsure at all n locations
  Clone ID: PAT_MRT3847_78982C.1
gacccagcgnccgaaagccagagncagggnnncaggaacgaagggcgnggaggcggagaggcggcgacaccagccccgacnccgccagcgccacgcccgaanccaacaagagccnccnccnncngcgcccccgccagcgaagaccgcngcccccgcgcccccgacgcccacgaccacgacgcccgagccgcggaaaacgcaccccacccggcagcgcgggaccaccacagcgannccgcccgcagcgaaagccccagcgggcaagacccgganccggcccggggngagcgacaaccgcaacaacaacaacgacaccc

SEQ ID NO: 119572 - DNA, 2651 bp, Glycine max
  unsure (1)..(2651): unsure at all n locations
  Clone ID: PAT_MRT3847_78983C.1
aaaatgataaataatttaattgtcgttagtatgtccattacatgaaggttgtcctctatgaagggaagagagaacaaaatatctccaaggtttatgccaccgtgcatcttggctacggttacaattggaaacaaaatgactacagctattgaatgataattacagaagatcagggngtcactattgcacataaatttaatttaataagcttatatagataaaattaggtataaactataaagaacaatcaaaacacactaacaagaggatcatcctcatcttgaggattgcggagagccaaaatatgtttctgaaatgaagctgcagcttcttccctttcttctaattgccccagtttgtcatataccatggccatcagatagaaagcttcagctgccagttcatgaaactccaaaagttggagttcttcagatgcttgtctcaatgaatctatcacaatctcataattttcaaagacattgaagtttgaatcacacagatagcattttgcttcaacaataaaggcacgggagcggagttccaaaccaccatgaccaagaatcattgggaaagctccatggataaggtttagagcccttgttgcatgggcttgatctcggaggccggccgggctcggaagtagtaagaatagcccccccttttttaagtcctatcatggcttttagtacttctccgcaaaattattcccggggtacacgagcatactactcggcgcccgcccttttttttttttttttttaacttttttcaagtaatctctcaaagtatttaatagaaaaatactatccataaaagtttctgtgatttcattttcatacaagggaggacactatcattgtaattctatgtattatagagtataaacaccctatgccacattgattcctcattaatcatttcaacaaaggagtatttgtgttcttccaatgtgcttacgcggttcttttagcttccaaagtcttctcatattcttcaatggatttgaaaagctcagaaaaattgcctttcccaaaacccccacatgcacccttctggtacaccttcccttcctcatcctccaccatgcacccgatcctctgaattatctctatgaatatcgttggcctgtccccaacaggcttggtgaaaatctgaagcagagtgccctgatcatctctgtcaacaagaatcccaagctcctcacactgcttaatctggtcaacggtcaacacatcagcggcacggttgtggaggttggcgtaataggtgggaggaggagaaggcatgaactcaaatccaccaaggaaacttcgctttctcatctctctcagtgtggtgaagatgtcgtgagtaacaagcgcaaggtgctgcacaccagcaccttcgttgtgttccaaatacgtctcaatctggctcttcctcttcgttccgtaaaccggctcgttcagcggcagcaacaccgtctccgagttgttccccagaaacaccgagttcaacccgctctcgctcgttcccacgtcctccgcggtgaactccgcgaactcgtggaatccgctgaagcctttcaggtacctcaccgccggcgccagctccggaacgttcccgacggcgtggtccagccgccggatcccgtagtccagctccggaaacgaagacgacgacgccgcggcctcgaatcccggcaggaaccaccgcgacggatctgcgtgtggcgcctgcggcgcggcgtccttgtagctgacgtagcggagcaccacgtcgccgtagaggcgcacctccgcgaagccggtgcgatcgtcgacgagaaccggcggcgacgccggctcggctcctttcgcgacgctggcgctgaaagcggcttccgcgtcggcgacttccaaggcgatggcgcggacgccgaagccgtgtttggcagcgaaggcaaggcaggtggcggcgtcgaaactgggaatggaggcggaggaggcagcggaggagccggcggagagagagggagagtaaggagcggagaagaggaaggagaggtcgccggagcggaggaggtaggaggcgtggatttggtttccggtggagagatcagattttgccacaataggcattccaagtccccaagagaatcggcgagaggcgttggtggcatcggtgcaccagaactcgatgtggtggaagcggttgacttgaaagcggtccgacttaggattggttcggacgaagtttttgaaaccgacgagcttaaacccaggttgggcttgggcttgggcttgggcttgggcttgaatttcgttgcacatgggtattggcattggtgtggacgtgtgatgctgctgcttgagattgagcttggtggttgtgatatataaggggagtgtgacacttggttgaatgtgattggaggagggtgcggagagtgatggagtgtacatgggcattgcgtctgggttgagaataggtggatgaggatgaggacgaggaagtgaagatagatgagaaatggaaatggattacgacgctcttttaacgtccatatattggatgatgttgatgcggcttctctctttttttattacccacacctacagcctcagcgttattacttatattcaacattcattcaacgcggacgcgtgggtcgacgcgggaattccggaccg

SEQ ID NO: 119573 - DNA, 583 bp, Glycine max
  unsure (1)..(583): unsure at all n locations
  Clone ID: PAT_MRT3847_78984C.1
gaanncggcncgagtacaaacacaatcattgaacagtgtcagtgttaaaaggcaccgtttcctctgtttttgggagagaaaaatataaacagagcaaaacaggggaaagcagagctgaaggtgaaagatggtgaatgagcagagaatacaagaggaggcaaaggtggcggcgttggagtgcagcggcacaatgagtggacccctcgtcggagctgccgcctccgccgggactcgccgacgccggagggcggaggctatgcaattggttctgagggcgttatgcatggcttcctctgttgttgcgatctcactcatggtcactgccaaggaatccagctctgtctccatttatggctttctcttacctcttcactccaagtggtctttctctgagtcatacgaatatcttgttggggtttctgctgctgtggcagctcattcgttgcttcaactactcatcggcatatcgagatttcttaggatgtcttctatgatttcttccagaaatcatgcatggcttatttttgctggggatcaggcattttgctatgcattgatgagtgctggatctgctgcatctggg

SEQ ID NO: 119574 - DNA, 493 bp, Glycine max
  Clone ID: PAT_MRT3847_78985C.1
ttcttttttttattttttattttttttttttctcttttttttttttttttttttgggggtttttttttttttttttttctgttttttttttttttaaaaaaaaaaactggagggccacaaatacccctttcaaaaaaaaccggggggaaaaaaaaaattgcccccctccggggagaaaaaggggaataaccttatccccccccttctaaagcaggtttaaaaaaccaaaaaactgtttttaagtccacaaaggcggaagctcccgcccctaagggccaaaggaaggaatatccccaaccccggggcaaaaggggagctttgttttggccccggcaagaaccaaaccctacttcgggaaaaaaggaaaaggggttttatggcaccccggacacacaccggaaggccctttacaacaaaagggcttgggatggggcccccttcctggggggggccctccaaaagaggagttttcactccaaaaaaaaaaaacaac

SEQ ID NO: 119575 - DNA, 455 bp, Glycine max
  Clone ID: PAT_MRT3847_78986C.1
cagaattggagggaagaaaatgaggagcattagatgtaatagcaatgttaaaaaaccttactgtctggctcatctgttgaatagctaaacatcaatctactgatctgagtaggggtgtgcgaaaaaaccaaatgaaccaaaccactccaaaaactacacctgaaataagcggaccatttttaaaatggttttaactagacttgatttgtatattttaatggattctgatgcaccctttattaataagttaggagcactgaaagtccactccatttcatgtctcagcactcagctcaaataaaaacatcttgcctctcaagtcctaaccttaattccatcccagcttttcccagtcaaggcaaacaaaacccctgattcttcttcacaaaccctaattcactcatcccattccaaatctcaatcatcttttcggatcaatcattctctctctccct

SEQ ID NO: 119576 - DNA, 188 bp, Glycine max
  Clone ID: PAT_MRT3847_78987C.1
gtttcttcttctgcaggaccaaattgatatacaagatcattgttttagagagagagagagagatagagagagagagagagtatactgtttgggtcacagactacttctctgagcagatctagatatatctcggctgcttatgcgcataaccccttgagacgcagatcgagagacacatgagcaccagt

SEQ ID NO: 119577 - DNA, 628 bp, Glycine max
  Clone ID: PAT_MRT3847_78988C.1
gttgaaaacttgagataatcgattttttggatacctaaacagcattcgacgggcgtaaccacaaaaagggaacaaaattgattagctgagtatagaaaaacaaccgaatatccattccaactagttaattattctttcattataattagcctccccaaaagcttgtttagcaatctggaacaaccttagcacgtccttataccactcgtggggagttaaaacgccacaacatagactcctgtgattcagaacatagatgccaatgcatcttgtgtgaacccagaacttcccaaaacaaaataaaggaattttttcagttccttggaattctctcataaaaaaggcaagctggcctcactggaaagaacaccttccactgaaacagcatgcacttgagaatctgaaatacaaaaccaacgcattggagtttgattgaggtaatcatcagagacgtcttctgaaaactccactcttacagatctgtgttgatacaaatgcccatcttgagcttttaaaatacaagcaacatctacatcgtgatgatacgaacatgtttctttgaggtactaaattacaagaaacatctacctggtcaatcgattgcatatgtgtatctgagtgaatgctt

SEQ ID NO: 119578 - DNA, 522 bp, Glycine max
  Clone ID: PAT_MRT3847_78989C.1
cgcagattctatgtttgtgcccgtgctgagggccctgcatctaatccggaagcaaactgcggttacttcaaatgggcttcttcaaagtctaggaataaataatgggagagaatgacattttaatcaaagaatgattaatttgccctcctcatccaagtttctttcataatgacaatatggagctgaaataccagttttgaatggttattagcattactaacttccccaaaggagctggcctctcatagtctttacccacccttttgacaaatatccttgtagcttcctgctacaattatgaatttttttgtttggcacattcagttgttgccatcatatatgtaaaagaggagtgctagcaacacacaattttttattggtcaacgtttattaaaaattataaaatggtgagtgaggtttattaaataagtggaaccctcataattttatgattttcaacaaattttgacagtaaaaagtgtgttaaaaggtgtgctaacatttctctatgtaaaatagtag

SEQ ID NO: 119579 - DNA, 466 bp, Glycine max
  Clone ID: PAT_MRT3847_7898C.1
ggctcgaggtctctgaaaactaagaagaatgaacaggtttccttaatgatctcgttcgcaactgtgaccaccgtcaaccgtgccgcagccatgtatggattgctccattcaccgatcataaatccactgctagcttccgcacgaggagatatcaacgtgacagaagctccattgctagcatcggagacaaagtacaacgcgtgcaaggacgaccgccacttgagaagaagaagttcgagactctttactagttgcaagacctcgatgatgcccaattggcataggaagtacaataccttctaaagaaacgatggcttactcgcttggaactatagttggagctcggatcctgaaccgtgagcacaacacgtcacctgcatactatgatggacgctactggaccatgtggaagctgcctaaggttggctgcactgatgcttctcacgtgatgcaggatcttcaagag

SEQ ID NO: 119580 - DNA, 651 bp, Glycine max
  Clone ID: PAT_MRT3847_78990C.1
agttcattaaatctcgagccgaatcggctcgagcggctcgagacggctgcgagaagacgacagaagggggcctcaaggtgtgttcataaaaacgaaccacatagcatttctttttcactcttctctcttctattcagccactacctcacaccaccatgagtgccgagaaggtgaaactgactggcagattacgcctatttttcactaatgcaaaaccatacatcttaatgattggcttgcaatttggcatggctggaaattacatcttcggcaaggatgctcttaaccatggcatgagccgttttgtgttcattgtttaccgaaatgctatggctactattgcccttgctccttttgcattttttattgaaaggaaaagtaggcctaagatgacactcccagtctttctacaaataatagtccttggattccttgagccagtttttaaccaaagcttcaattacttggggatgaagtatacttcggcttcattcacatctactatagtgaatgctgtgccctctattacctttgtgcttgcagtcttcgtccggttggagcatctaagacttagggaggttcggagtcaagccaaagtgattggaacattagtaacctttggagggtgctttgctaatggcaatttacaaa

SEQ ID NO: 119581 - DNA, 380 bp, Glycine max
  Clone ID: PAT_MRT3847_78991C.1
gcaaaaggggagggacaaatggtgagagaatttaaagaggtgaaaattgtagatgcagcaaatcttggtttctttagtaatgcctatgcaattttgtttgtggttttgattaccttttgcattataccagcaatcatcttttcttgcgcggatggtgtatccaaagagaaaacttctgcagcagatcaagagccttatggagctggatgtggcgctggatgtggtgctgggtgtggtgctgggtgtggtgcatgagatccttcttgttactatcaatttcatgcatatacagatctagaagagggatataacacacagttcaagtagaagtggaattttagtgactactgtaatgttagttttttttttttttttttttt

SEQ ID NO: 119582 - DNA, 236 bp, Glycine max
  unsure (1)..(236): unsure at all n locations
  Clone ID: PAT_MRT3847_78992C.1
tcgtcccacgcgtttttggcgcgcttcgntcttaatgggggggggggggggggggtctgatgatcttcttcttttatatgctctctgtgatttcgctacaccctctctccgcttgggcgccctatgggggacatcgaccgcggcggcgatgccttggtgcgcatccaacactcctccgttcaagcccgggggggggggggggaccnttccaacgaacttccgctcagactgattgg

SEQ ID NO: 119583 - DNA, 608 bp, Glycine max
  Clone ID: PAT_MRT3847_78993C.1
tttttttttttttttttttttttttttttttttttttttttttttttttttttttttttttttttttttttttttttttttttttgggttaaaggggccaaagcccctcatggggataaaagaaaaaaaagggtcaaaggggccaaaaggggccccgggggggacccccggggaaacccggaaaattcggaccggggcccgcaggggtcccaatttttcctataaggagaccttttaaaacttggggaaaaaaggggcaaagggggaacctgggggaaaatgttatccccccacaatttcaaaaaacataagacccgggagcaaaaaggggggggcccggggggcccaaagagggaactaactcccatttatgggggtggccccattgcccggtttaaaagggggaaacccggtgggccaaagaaattaaaaaaacccccaaaccgcggggaaagggggtttgcccaatggggccccagggggttttttttttaaccagggaaaaggggaaaacctttatgccctttccccgcggggcctgaaaaaggtggaacaagggggcccccccggtttgcccaaaaaggggaaaaatgtgggttagggggggt

SEQ ID NO: 119584 - DNA, 499 bp, Glycine max
  unsure (1)..(499): unsure at all n locations
  Clone ID: PAT_MRT3847_78994C.1
tcgatctatcgctaggaatgtaccagagtcctgtcactgtaataggataggtagttattctgggcggtaatgtaaagttgtaagtctgtctcagggtggtggtgccaaggtgtaaccagtgtcagaaagcctaattatgcttgcgggtagtaggcggactacaaagcataggttgagagagcaactgcaacggccacgactgctgaaaacccaccaggtgctgtactgctagtaagggagttggtagctgctgtgtcagaggcggtaccattggctagccatgatgactctgagcgatggcaaagtacgacataccgggaagcaatggcgccgcgtacgcgagcggatactgccgtagatttcagggagcggctgatagcatggttcgaagcagcagccgagtaacactggtggttaacaacgctagcactgggatagaaacatgtgntggaagttttgcgatggattggctgtttccagtatcgtagtataggggcag

SEQ ID NO: 119585 - DNA, 260 bp, Glycine max
  Clone ID: PAT_MRT3847_78995C.1
ggtttaacaatatttattacctatgcttcttttcctactaactaaaatatcaatcataaaacccgaaaggagggtgacaaattactttgatgtgcccattccccattgccccttttaccgagccacccccctaaattataaaatcccccccctttttataaaacacattctttattaatattttttcttatccccatcctatgggaggaatctacaattttttgacagacttaaacccctaaaaaaaaaaagataaaatc

SEQ ID NO: 119586 - DNA, 701 bp, Glycine max
  Clone ID: PAT_MRT3847_78996C.1
aaagcttgctttagtaggaaatcgatcgtaaatatgaatcgtggttaagtattttttttaagttgaatttactttgttggatcttcattagacttaatcgaagagaattcagatctggcttagtgttgttccacacagtgttttgaggtttctctttaatggcgtggaggctcactcagacagcacctttcgaagccgaaaacgcgttggaagcgtcgctgagggtagccttcgagtctctgcaaccatccctgagaccccctttctccttatccattcccacccccgaccaatacgccctcctcaacggcgcaattcttcacggcgctttaacggagccccatttctccaaaacacacatcaaacacttgcacgcaatcgtcaccgacggctacgccaccttcgtcaacttactcctcgacgccgtccttcaactctacccccaaacttctcccactccgccaaaacgcagttgctctggctcaccgaggaaatggtccacgttttggccatcggctacgacgccgttttggtctcccttttgcgccaaataggcgccgccgattgcaccgaagcaacttgaacctctgctccgagttggtgaccctttttcttaaaacaatttcgatcgcttattggaagacgcgccgcacgttttgtcgtctgcgttgtacgcgtttcttaggaatttatctgatcaa

SEQ ID NO: 119587 - DNA, 964 bp, Glycine max
  Clone ID: PAT_MRT3847_78997C.1
acctctgtaatcagcagtaccaccaacaccaatggttgatgctggtagtggtagagagtttttcagatcatagacaacaaaacacaaaacaccgtagaagagaatctaaacggtttaaccttgttctttttaaaatatttccctccattcaacacaacaacacatggataccattgccaattcagtttcgaagctactcacattgtttctcacggtcttgtttgtgggttctgagctgacacactgtaatgtcacctacgacagaaagtctcttctcatcaatggccagaggagaatcctcatctctggctccattcactatcccagaagcacccctgagggccgtgtttcgttttcgacattctctatgcgttatgtgggaggatctaatttggaaggccaaacacggaggacttgatgtcatagacacttatgtcttctgggatgtccatgaaccttctcctggcaattacgattttgaaggaaggtatgatctagtacggttcattaagacggtgcagaaggtggggctttatgccaatcttcggattggaccttatgtatgcgctgagtggaactttggaggaattcctgtatggttgaagtatgttcctggcgtaagcttcagaacggataatgagcctttcaaggcggcaatgcaaggtttcacgcagaaaattgtccagatgatgaagagtgagaagttgtttcaatctcagggtggtccaatcattctctctcagattgagaatgagtacgggccagagagtaggggagctgctggccgtgcatatgtaaactgggctgcaagtatggctgttggattgggtacaggagtgccatgggtgatgtgcaaggaaaatgatgccccagatcctgtgataaattcatgtaatggtttttactgtgatgatttctctccaaataaaccatacaagcctagcatgtggaccgagacttggag

SEQ ID NO: 119588 - DNA, 695 bp, Glycine max
  Clone ID: PAT_MRT3847_78998C.1
ggggttctgagctcatacactgcaatgctacctacgatagaaagtctcttctcatcaatggttagaggagaatcctcatctcgggctccattcactatcccagaagcacccctaaggtttgtgtttcattttcttcactctttatgtgtttcaatcttaaaatgtgtttcaagctttgtgttgttttgtttgcttcaaatgtgggaggatctaattcggaaggccaaacacggaggacttgatgtcatagacacttatgtcttctgggatgtccatgaaccttctcctggcaattacaattttgaaggaaggtatgatctagcacggttcattaagacggtgcagaaggtggggctttatgctaatcttcggattggaccttatgtatgcgcttagtggaactttggaggaattcctgtatggttgaagtatgttcctggcataagtttcagaacggataatgagcctttcaaggcggcaatgcaaggtttcacgcagaaaattgtccagatgatgaagagtgagaagttgtttcagtctcagggtggtccaatcattctctctctgattgagaatgagtacggaccagagagtaggggagctggtggccgtgcatacgtaaactgggctgcaagaatggctggtgaattgggtacaggagtgccctgggtgatgggcaaggaaaatgatgcccc

SEQ ID NO: 119589 - DNA, 734 bp, Glycine max
  unsure (1)..(734): unsure at all n locations
  Clone ID: PAT_MRT3847_78999C.1
aaggcgaagagaagagaagagaagaggccgggtaggagacttgaaggtcaaccatcgaccaccctttttttttaattcttcccacaaacatgtcacgcgccgccgcgtcgttcggaatcctcctttgtctgctgctcctcgtcgccgccgtcaactgctccgatcagggaaactgcagcaccacatgcattgtggagcaatgcgacacgatcggaatcaaatacggcaagtattgcggggtagggtattggggttgtgctggcgagaaaccatgtgatgatcttgatgcttgctgcatggcccatgacaactgcgttgacaaattcggaatgactcatgtgaaatgccataagagattaaagaattgcctaaccagggaactgaaatctggtaaggttggattttccaaggagtgtccctacagcagagctgcacctacgatgataagaggcatggacttggccatcttgctcagccaattgggtgacttctccgttcctcactaacaaactgaaactaaccctcttatgtaatccttacttactccttccccatttacaaacttctcttcattcatttgggaaacctgatcttatatatgatcctgttggacatggttaaactgttgttattgattttctatgttcttaacttatcatttaatttatgatatcacaaaagaactcaatagtttcaattggacttaaaaaaaaaccccccttnttttntttaag

SEQ ID NO: 119590 - DNA, 930 bp, Glycine max
  Clone ID: PAT_MRT3847_7899C.1
atggctattctgaacactggttcagtatgtggggctggagctgcactcatccttgccatcattgcctttctactctacaaacgccacaggcgcatcaaagaagcacaagcacggatagccaaagagcgtgaagggattctgaatgccagtaatggggacagagcagctaaacttttcaatggcaaagagataaagaaagccacaaacgacttctcctgtgatcggcttctcggtgttggaggctatggtgaagtctacaaggggattcttcaagatggcactgttgtggctgtcaagtgtgccaagcttggcaaccccaaaggcactgaccaagtcctcaatgaggttggcatattatgccaagttaaccaccgcaaccttgttggtctacttggttgctgcgtggaactagaacagcctattatggtcaaatgcctaagggccgtgactggcttacatggactcatcgccttcaagttgcacgacaccgctgagggtctcgcttaccttcacttcatggctgtgcctcctatctaccatagagatgtgaagtccagcaacattctgctagatatcaagctgaatgccaaggtttcagattttggtttgtctaggttggctcggacaaatatgagtcatatctctacttgtgctcaggggacccttgggtaccttgatcttgagtattataggaactaccaattgattgataagagtgatgtttacagttttggagtggtgctacttgaggttttgacagctcagaaggcactagattttaatagggctgttgatgatgtgaacttggcggtttacgtgcatcggatggtgaccaaggaaaagttgttggatgtcattgatccagtgttgaagatgttggagaaaaggagagacaacacgaaatcacacacactcaaaatgatgagatga

SEQ ID NO: 119591 - DNA, 1407 bp, Glycine max
  Clone ID: PAT_MRT3847_789C.1
ggctcgagcttcaaccaaagccaaagtctcaatttgtttaagcactactgctaccaaaccaaaagggtttcgttccttagggcggttttccgatttctcggaaaccgctctatataccctgcactgcaaccacattcgttatagtgttcctaatttgaaagaaagagagaaagaaaaaattaatgtccttggatttgtagaaattaataaataattttggacgccctctcccctcactcgcgactatgggtgcaaaacggcaacaacccagtgaatgggtgaaaggtaaacttgtagggtgtggatcttttggcaatgtccatttggcaatgaacaaaaccaccggtgggctttttgttgtgaaatcaccacattccagggctgaacgccatgctttggataaagaggtgaaaatcctaaacactttaaattcatcaccatacattgtccaatgtttggggaccgaggaggaggaggaagaccaaggcaagctcaatgtttttatggagtacatggccgggggtaatttggcagacatggtgcacaagtttggtggctcattagatgaagaggtggttcgggtgtataccagggaaattcttcatgggttagagcatcttcatcaacatggaattgtgcactgcgacctcaagtgcagaacgtgcttttgggatcatctggcaacatcaagttggcggattttggatgtgcaaaaagggtaaaggaggactcagcaaattgtggtgggactcctctgtggatggctcctgaagtattgaggaacgagtctgtggattttgctgcggatatatggtccttgggatgtacagttattgagatggctactggcacacccccttgggctcatcagctttcaaatccaataactgctgtgctcatgattgcccacggcgatgggatacctcactttccaccccatttctccaaggagggtttcgatttcttgagcaggtgcttccagagacaacccaataagaggtctacggttcaggacttacttacccatccttttgtttcaacgccatcttctcaacaacaatatgcaccttcctcctctccgtccacagtcaaagaaacttcaaaggagaatcgttcttcaatcacaaacacatttgcatctcatcatgatgaccccaaaggaataccggtatgtaaaccccaagacattgcattgggctcatcagggaattggattactgttagatcaggctgaacacataccaagtgttactgtagatagacaattcaaatgtacagctttgagtaggagacgaataggttgtcaatggcttttcctttccttctttcacataacttgtatccaaaggagtagtattatttgtcgtttaatggaattaatgaacataggcctgctttcagttttct

SEQ ID NO: 119592 - DNA, 379 bp, Glycine max
  Clone ID: PAT_MRT3847_78C.1
agacttatattttctttatagttttgacgtacaaatgatcgtcagattctacgtataaatggaacgtgagcggtcaattcatattgatgtttctataaacattccgaacaagaatgttcaaagtgttggagtcttggtcccccccaacaatgaatcacgcataagatagcatgcaacagctccatctgtaaatcgtctccatagacacgagttggaccgaaactatggagaaaacactgacactcgagcctgacgtgtggcagtcaaaagccttattctaaccaaatccagaccctaattgtccattggcacaactctctgatccccagttcaaagctcttacaaattaaacatgtcgatgagcaaatgggtttaattc

SEQ ID NO: 119593 - DNA, 470 bp, Glycine max
  Clone ID: PAT_MRT3847_79000C.1
agaccaataaaaatggttaagttagttatttttaattaatgatatcataactttaaattttatttcaaaaatacgcatggaattaattggtttaagtgatagttgtatttaatgacactactcatttttcatggggtagctttttccaccaatgagtatgacttatctcattaatagtctttataataaataaggtatagaaggaaattaacaattaatgcacttaaaagtgatcatatgtttcttatatttaggaacaaaaaaatattctcatttgtttctcatatataagaacggaggtagtattatgagatgttttgatattctaatagacagattagcttttcatagtttgcttgcactggatatattgctatctatcttcagaagtcctaattgtgataatatcctctctctatattttcaatttaccaacatgaactgcattttgcttgacaagtaaaacgatg

SEQ ID NO: 119594 - DNA, 390 bp, Glycine max
  Clone ID: PAT_MRT3847_79001C.1
aatatcattaaataaatgtataactgaaacaaattcaaaaggaacaaaattatatttcacacttccatacactattttttttatttaatgactggtgaggtcatttttccttatggggcgtttacttgcttaatttaatacactgaacaaatgagttgtactactcatctaaacacgaggccttgtcctttgatggctcacaccagttccataatcctgagacggcgaccactggcaactcccttggtatttaaaaccaaacataacaaagacaaaccctggtatctttatgaagggagccaaccacattgaatgatacatcaccactttctggagctggggtctttaaaaaaaacttaaaagaagatgcaaatggaagggaagagggga

SEQ ID NO: 119595 - DNA, 336 bp, Glycine max
  Clone ID: PAT_MRT3847_79002C.1
gtaagacatcgcggttcgagagagagctctgactactttcacatacctcgtttgcacatccggcagcacatattaggcctgactgttgtgcgaaagctctagctggcgtcacgactgaaattttcgaatgggataacatgattgccagaatgctaacacattagtataagacacggcctaaaagtgagggggtccacttctggtgacatacagaatggctttaaatgggaacaggacgctacaattctatgcatctcaggactacagtaaactattgcctcactttaggagggatccttagaaacgtttggatctgccacactaaattccatcgaa

SEQ ID NO: 119596 - DNA, 394 bp, Glycine max
  Clone ID: PAT_MRT3847_79003C.1
actcaaactcccctgctattcttcttctccctcaattctctctcaccaaaaccctttgcacccaataccctcaaactcaacttcaattgctaatttttataaagctagccggagatgatggttcaaaaggaagatttgggtttgagtttaagtctcaatttccctcatcacagtaccccaaatcctcaacatctgagtctcatgtcatcctctactcattcctcttccccttctggtttcaaccctcaaaaaccctcttggaacgaggctttcgcttcttcggatccagatcgaaactccgacacatgcagaggcgaaacacggtcgttcctgcggggaatcgacgtgaaccggttaccttccgccgtggacgccgaggaggaagcgggagttt

SEQ ID NO: 119597 - DNA, 2113 bp, Glycine max
  Clone ID: PAT_MRT3847_79004C.1
gctcgagattaccctaaaacatcctccatctacaacacacactcttactcttactaatccaacctcctttgcccctcatgcactaccattaacattaccctctcttttttttctccctcacgaaccttcatttcttctcccgccatggatccttgccctttcgtgaggctcacagtcggcaacctcgccctcaaaattcccgttgcttctaaacccgcgctctccgttgttcatccttcttcttctccttgtttctgcaaaatcaagctcaagaattttcctcttcaatccgccgtcgttcctttcattcctccggaaagccacttccccgactcgcaggtgcatcctattgccgccacgttccacctcagcaagtccgatatcgacaagctcgccggcaaatccatcttctccgggaagctctgcctcaaaatctctatctacaccggccgtcgcggctccacctgcggcgtcagctccgggagactcctcggcagagtttccgtgcccttggatctcaccggaacggtagccaaaaccacagtgttccacaatggatggattaggataggaaaagacgccaaaggctcttccgctcagttccatttgaatgtaaaagccgaacccgatcctcgattcgtcttccagttcgacggcgaacctgaatgcagtcctcaggttttccagatccaaggcaacatttcacaacctgtcttcacctgcaagttcagtttcagaaacaacggcgaccgaaatcaccgttccaggtcgttacagtcggaaccgggaggttctagaagttggttgagttcgttcggaagcgagcgcgagcgaccggggaaggaacgcaagggatggtccataacggttcacgatctttccggttcaccggtggccgcagcttctatggtcacgcctttcgtcgcttcgcccggttcggaccgggtgagctgctccaaccctggttcgtggctaattcttcgcccgagcgacggcacgtggaagccatgggggaggctcgaggcgtggcgcgagcgcggcggctccgacggcctcggctaccgcttcgagctcataccggacaccaacggcggcatgagcgccgccggtatagtgcttgcggaatccacgctgagctccaacaaaggaggaaagttcgtcatcgatttgagttgtcgtaacggtaacgttagcggaaacggtggatctaatggccgtgcgacgccggggagcgcgacgtcgccggcgtgcagcccgaggagtagtggagattatggatacggcctctggccttattgtatgtatagaggttttgtaatgtcggcgagcgtggagggtgaggggaggtgcagcaagcctacagtggaggtgagcgtgccgcacgtgaattgcacggaggatgcggcggcgtttgtggctttagcggctgccgttgatctgagcgtggatgcgtgcaggcttttctcgcaacggctgaggaaggaactgtgccagcagctggatttgattggctgattccgccgtttttctttgtcgttttttctaatatttttgtttaatggggttgttcattttgagtgagaagcattttactactaacaaacaatttacaggctgtacaggggaaggagagagtattgcagtgcgcgctgtctattcacgtgtggcttttcattgattttctctcttcttttttcatcagttgtggggaatcaagaaaaagcttttttgttttgaattttttttttagcagaactctgctgctgcacattcgtgtttatattattttctgtatctttcattgttttgggttatttaagctgtaaacgctagtctcccaacatattgcatttttttgtacagtgcacatattactttctgtattaaaaactgacaaccaattagtattaatgaagtagtacaaattaagtcgatttttaattctttataaatgaccaacctatatctgagaccacctaccggattgctttgtctatcaaggacgaagtggaaaaccttgggggggggggcatcactgttatccaaattgatgaagctgctttgagagagggagttccgctgtggaaatgagaacaggctcactacttggact

SEQ ID NO: 119598 - DNA, 126 bp, Glycine max
  Clone ID: PAT_MRT3847_79005C.1
ccgttttcggagagtattatcggtttgatgcgacttcatttgtcatggtaatgaggagagaggcaaaagtacgtatttatgtgaagccagatcaaaatgccgaaaacaaaggtgtattttgttaca

SEQ ID NO: 119599 - DNA, 843 bp, Glycine max
  Clone ID: PAT_MRT3847_79006C.1
catgagcgccgccggtatagtgcttgcggaatccacgctgagctccaacaaaggagggaagttcgtcatcgatttgagttgccgcaacgccgttaacggtagcggaaatggtggatctaatggccgtgcgacgccggggagcgcgacttcaccggcgtgcagcccgaggagtagtggagattatggatacggtctctggccttattgtatgtatagaggttttgtgatgtcggcgagcgtggagggtgaggggaggtgcagcaagcctactgtggaggtgagcgtgccgcacgtgaattgcacggaggatgcggcggcgtttgtggctttagcggctgccgttgatctgagcgtggatgcgtgcaggcttttctctcaacggctgaggaaggagctgtgccagcagctggatttgcttggctgattccgctggttttctttgtcgtttcgtgttttgccccctgtcgtttggtttaaattttttttttttagtggggttgttcattttgagtgagaggcattttactaactaacaaacaatttacaggctgtacagaggaaggagagtattagagtgggcgctgtgtattcacgtgtggctttttcaatgatttttctctctcttttttttcaccagttatgggaaatcaaaaaaaagctttttttgctttaaatattttttatagcaggactcccctgctgcacaatcggggttaaggttttttttttttttttttttctggatctttcattgttttgggttatttaaacttgtaaatggtagtctctgaacatattgctttttttatttttaaattcagtgaacatattgctttgtgtatt

SEQ ID NO: 119600 - DNA, 426 bp, Glycine max
  Clone ID: PAT_MRT3847_79007C.1
aattcggcaccagactgtatccaactgtgaagcatcctcgggttagtcagttacggacttgtccggtggcagttgagccgggcggtttcagacagatttagatacagtgcctacaacattgatctgaacctgcatcgggttagttgttagaggtcttgagtagttggagaaaacggtgccatgttttacagtagcagaggtagcgagctatattgaagctgacatagaagggaacgaagaatgcagctgtgatggaggggtcatcggtgaggcagtcatacggcttcacgcggttgctgacgaggacgttgacggtgaactggttggtgttgtagcaggttggtgtcggagaagacagtgttgacaaggaagactgagactggtgttggtggacaggggtgaacttaacatgttggttcagaggta

SEQ ID NO: 119601 - DNA, 1113 bp, Glycine max
  unsure (1)..(1113): unsure at all n locations
  Clone ID: PAT_MRT3847_79008C.1
ctcgagccgaatcggctcgagtagctctgtaattagaattaggatactaaaattgatcaaaattgagaagcaacaactgaaagagttaaagtaattatattacaagatcttgatgtcatttagaaaagaatagcagtgattatggagatatatatactttatgttaaaaaggaggagaagtgaacatggtgcaaaccgtcaaaaatccctttcgtcctttagcttggcattattcggagggagacatcttatctctgtgaatcgtggctgctctctcttgttacaaaagctaccacacgttctccttcgatctgcaacacaaaaaataactaaaatatcacaaccgccatgctcaactggctcgatatgaccaataatcacaatcactgtgttccagatttcgatattcaaatggaccacgaccacgaataccctattctcacgccttcagccttacctcgccaaaagaaaccctccattgcagacgacgatatcatggagctgctatggcacaacggccaggtcgtggtgcagagtcagaaccaacgttctctgagaaaacttccgccggtgaccaactcccacgacgcctctcccgccggtccttcaatgacgagagagattcgaccgctggtggagaatttcaatcagcatctcttcatgcacgaaggcgaaatggcttcgtggcttcactatcctatcgacgacgacgagcctgcgttggatcaaagcttcggcgccgattttctctattctccgccgacgacggctaacaacagcagcttcatgcaaaccctcggccacacgtctcagctcacggagctccggccgatgtcggcgaatccacggcctccgattccgcccccgagaaggccggaacagaggacgccgaacttcgcgtacttctcgaggcacaacacgagagccgcggagccgagcgtgaaggccgncgcgagggaatccacggtgggtggattcgtgcgatacggaggcggcggcttcgagagtttcggagacagtaaggagcgcggcggaagggaggtgccggcgttgcggcgccttccacgagtgccggcggtggaaggagcacgatgatgtacgatttgacgatga

SEQ ID NO: 119602 - DNA, 169 bp, Glycine max
  unsure (1)..(169): unsure at all n locations
  Clone ID: PAT_MRT3847_79009C.1
gatgnaatanaaaaacaaaganaacctaaaaagctatagaaccaggatgtagatcctgcaacagcgtcagcatgactggatcatttaaagtagaagggaaaatgggcctccaaaagtgagaccttgattgggccggcgaatgatggagtngcagatgttgagaagngta

SEQ ID NO: 119603 - DNA, 1384 bp, Glycine max
  Clone ID: PAT_MRT3847_7900C.1
gcaaaaccttgaacgtttgatgtttcagcttagcaaaacgaggatttgaaacagcttttgcaaatttttttttactgcagaacttcttttcattcaccaaaggtaatacatatacataatacatgtgcaaaacaagaggctagagtctagaactaaaaatttagtctagcaacaacaaacacaaagcataagttacaaaatccaaaaaaaaaaaacatcagacaagtctattagttgacgtgttaagaaatttgtacttagacaatataaatggtctaatgtgtaattcagttttttttcaataatattcatctcatcattttgagtgtgtgtgatttcgtgttgtctctccttttctccaacatcttcaacactggatcaatgacatccaacaacttttccttggtcaccatccgatgcacgtaaaccgccaagttcacatcatcaacagccctattaaaatctagtgccttctgagctgtcaaaacctcaagtagcaccactccaaaactgtaaacatcactcttatcagtcaattggtagttcctataatactcaagatcaaggtacccaagggtcccctgagcacaagtagagatatgactcatatctgtccgagccaacctagacaatccaaaatctgaaactttggcattcatcttgatatctagcagaatgttgctggacttgacatctctatggtagataggaggcacagccatgaagtgaaggtaagcgagaccctcagcggtgtgacgtgcaatttgaaggcgatgagtccatgtaagcaagccacggctcttaggcatttgaccttgcaagtgatcaagaagtgtcccattttctatgaactcataaaccataataggctgctccagttccacgcagcaaccaagtaaaccaacaaggttgcggtggttaacttggcataatatgcgaacctcattgaggacttggtcagtgcctttggggttgccaagcttggcacacttgacagccacaacagtgccatcttgaagaatgcccttgtagacttcaccatagcctccaacacctagaagccggtcactggagaagtcgtttgtggctttctttaactctttgccactgaaaagtttagcggctctgccaccattactggcattcagaatcccttcacgctctttggctaggcgtgcttgtgcttctttgatgcgcctgtggcgtttgtagagtagaaaggcaatgatggcaaggatgagtgcagctccaaccccacatactgaacctgcactttgttgcacgtcgcttgaacaggaacaaaatgagaattttgtgaaatagaccgtcaaaaagttcaaaataaacatcctatattgttgatgcgtgcttaaacaaaggcaaa

SEQ ID NO: 119604 - DNA, 415 bp, Glycine max
  Clone ID: PAT_MRT3847_79010C.1
caggaaaccactttagaatcaacatcaagttgggttatttcatgcttctgattcccagacaacaacaaaaaggaagcagtgattgattagctatggaagataagtatagtctaggcaggcagcatagtgggatatggaagtccttgagagatggagaatttgatgaagaagaagtttgggatgttttcaagaacagaagtgattatggttcttcttcttctggggttcgcaagtccaaagacaagggtaaatcctcttctgttcctgctaggcctagttcagccagaatgatcccaagatctagcaatagcagtaacaatagcagtgctagttcctccaatgaagccaaagttcttcagcaatcagcacctgtcaacattcctgactggtcaaagatatataggactaaaacccc

SEQ ID NO: 119605 - DNA, 301 bp, Glycine max
  Clone ID: PAT_MRT3847_79011C.1
gcgctcaagcgttcgcttttacccattcattctctttcaactttatcttcaattccatcatgggggaccaagcccagtcatctgatgctaagggaaccaatagagactttaacacggcgatcctggaacgcaagaaggcgccaaacctgcttgtcgtcgacgaggctgataatgatgacacattacgcccggtgcataatccccacactatagagaaactacagctcttacagcgtgacactattctgctcaagggaaagaaaaagaaggatacaatttgtatcgcgcttgcggatgatac

SEQ ID NO: 119606 - DNA, 483 bp, Glycine max
  Clone ID: PAT_MRT3847_79012C.1
gaaaatatgagaggtaaacatggaaaaacaatgatcgttgtaatacatagaagcataaaatttatgttgctcgccgttgtcagaagtttgatacatttcaagagaaatgaagtcatatgatatgattccggatctgacaaaagcagtctggaatgtattggaacttagacttctggttttaatcagtttcttcttgcaagtattcctaatagtttttggcaaccgaagaaaatgcatagccgatgcaaggctacaagtcagtgtctggttgacctatctctcagctgattggattgccactgttgcactgggaatgctttccaaagacagcaaaaatcctgaaaatgaccccgacttcataattatggccatttgggcacccttccttcttgtacatcttggtggccctgacacaatcactgcctactccctagaggataatgagctatatctacgacacttccttgggttattgtaccagct

SEQ ID NO: 119607 - DNA, 528 bp, Glycine max
  Clone ID: PAT_MRT3847_79013C.1
taagacgacagaaggggcttccttcccagaactaaataaacctccttcgactctgcagggcacatttctccatatcagaccacacctctcttttctcttcggttgtagccacggattcatgacagagattatcaactcatgcttagttcgaagactattttaactgttttagttttgagttcagaataaagcacgcagcagagaaatctcgaagtgcaaccaagaaattgcttgaagatttcacaaagaaacgaagactagaatcgccaaaagaacaagtccaaagtccaatgaaattaaaatttattattatattgtgtgcctcaattagcacgtttgtatgtatgggagaatgggagccaacttggagcacaagagctgcagaagaagctgaggctgtggcagcaataccatgttcaggacatggaagagcctacttagatggtcttattcttaaagatatgaataagtctcgttgtgaatgcaattcatgctatgctggatctgactgctcccagtttttatctg

SEQ ID NO: 119608 - DNA, 258 bp, Glycine max
  Clone ID: PAT_MRT3847_79014C.1
aattcggctcgagggcgaacaagaacaaaaatccatcaaattttatttaaccccagaatccaacacgggggaggtgtcctacaataacacatggccatctcaacatacttgcttcttgctcttcttacagttaccaccttccttcatggatcacatgcacaaaccagacacttgctacgttattccacgcgctggatcattcatcccaacatgagccttctcctacaccacctgtgctttcaacaaaacattcacctt

SEQ ID NO: 119609 - DNA, 207 bp, Glycine max
  unsure (1)..(207): unsure at all n locations
  Clone ID: PAT_MRT3847_79015C.1
gaaaaatatgcatgtttgagaagcccttctttagagattgcaaagggtggtaggtttacataaatcatataaaatttggccctaaaaaaaagccgnnnnaatcgtgtggttacggggagaaaaaaataacaatttggtttctgttgtaccaaaaaaaaaagggttttcttaaccggccaaaataatttaaaatatgggttcctattt

SEQ ID NO: 119610 - DNA, 212 bp, Glycine max
  Clone ID: PAT_MRT3847_79016C.1
tggttaccaatccttgtgaattgtctctatcctgtaagtcaattaccttcagaacctggagatggaaatgttacatgtggcagaggacctggaggtgtacccaccactagcgttgaatgagaactaccaatatcatatagctcgtcagatatcaacataaagattcccacagatctatgggaaaaggatataaaagtgttaataatactaaa

SEQ ID NO: 119611 - DNA, 113 bp, Glycine max
  Clone ID: PAT_MRT3847_79017C.1
ctagaaaataaagacttttatattcacaaaaggcttgggcgttttatacgcggttgggaaaattgatttaccccgaaaggagttccagaaggggtgagagaaaacactctttt

SEQ ID NO: 119612 - DNA, 546 bp, Glycine max
  Clone ID: PAT_MRT3847_79018C.1
ggctcgagcctgaatatcttctctttttaatctgattcacgctttcctttgtctcttagctttgttgtcggtggatcccatccccctctagctaaactcgtttgtcttctatgccaccttcaggctgatcaaaacaaaacaaaacaaaacttgttttttcgctatcttcttctccctttgaggtaaacagcataaataaataaaataaaaaaaagcgacagaaagtgatcgatagaaaaagagacttgtggagtagctctcagtgtaaagatgggtactggttggagaagagccttctgcacccgcgaccctgcttctaccatatcggataaacagcccagaagcccgagccaaagcccgagcccgagcccaagaagctgcgccagattgggttttctctccggaggtagcaacccttccaccccacgcttgcgttgtacaacaacagcggaaactgtttctcaaacagttacagtaagtgagagtcccagagttcatagcaagaaatccacccccagagcagcgaaatcaccaaaaacgctatcg

SEQ ID NO: 119613 - DNA, 334 bp, Glycine max
  Clone ID: PAT_MRT3847_79019C.1
gatatagttgataattttatatatatacaccgttaacaactaacttgtagcttaggtttagatttattaactgctagcagctactcttcctctattttgacttattcatacaccactattgaatagaagaaagcttcttttgcttacttttcactcttctagatgacaataacacgtaaatttcttcgaatacggggcagcaggagaagaaaatttgcgataaaagttagtactataattgttttctgttgttaatggaacatgaaagctatgtgccaccgttttctaactcaaaagtctggggtatgtgaagcatacgaatgtctatacatat

SEQ ID NO: 119614 - DNA, 220 bp, Glycine max
  Clone ID: PAT_MRT3847_7901C.1
ggctcgagaagtgacttagccctcctttgatgtgctgccggaccaagaagcattgggcgaggaagctttttgacttccaatggccttccctatgcatgagccacacaagaacctccacagtgcggggcttgacgggtatgccgacccactagaaatccagaaaatggtcaacgagtgctggcacacaaacagccggccccaactagaggaagacgttgga

SEQ ID NO: 119615 - DNA, 1592 bp, Glycine max
  Clone ID: PAT_MRT3847_79020C.1
gcggctgcgtgtagtcgaccgaagggcacaggtctgcggccgcgaaaccacaacgcaccggtgacgcgagcaagcggcgaagattcctgagaagagtgggattagcttgagtcattctcttcccttctagctacgtaacgactaacgacgcactctactctttcttagggtttcctctccctacggctgcgagaagacgacagaagggggctttaagtcattctttctctactggctacgtaacgactaacgacgcactctactctctcttagggtttcttctcccgccaatttcccctctcccccattcaattccaaaccctaacctcactccacccttgccggaaccgcaccttcgattcgacctagggtttcacagtttcactccgagcacgcacgcacgaacttcacgatgccgtcgctactctccccgggcaaaatccactgcctcgaggtggagaatttcaagtcctacaagggcttccaagtgatcggtcccttctacgacttcaccgccatccttggccccaacggcgccggcaagtccaacctcatggacgccatcagcttcgtcctcggcgtccgcaccggccagctccgtggcgcgcagctcaaggacctcatctacgccttcgacgaccgcgagaaggagcagaaaggccgcagagctttcgtccgcctcgtctaccacctcgccaactccaccgagatcaagttcactcgcaccatcaccagcgccggcgccagcgagtaccgcatcgacgaatcccttgtcaattgggacacctacaacaacagacttaagtccctcggcattctcgtcaaagctcgcaatttcttggtctttcagggtgatgtggagtctattgcgtcgaagaatcccaaagagctcactgcactggtggaacagatatccggctctgacgagtgcaagagggactatgagcagtttgaggaggaaaaaggtgctgctgaggaaaaatcagcacttgtttatcagaaaaagaagactgtggttatggagagaaagcagaagaaagaacagaaggaagaagcagagaagcatctctgtctgcaacaagaactgaaatctatgaagggagaacatttcttgtggaagttgtttaatatacacaacgattatgctgaaacaattaaggatcttgaagatgaggaaaaaagtcgtgaaggtgttgttaaagagctagaatactttgaaagtgaagctagtaaaaagaaaaaagagcaggctaaatatctgaaagagattgcactacgtgaaaagagaattgctgagaaaggcaacaagcttgacaagagtcaacctgagcttctgaagttaaaggaggaaatgactcgtataacttcaaaaattaaaaaagggaagaaagagcttgataaaaaaaaggttgaacggaagaagcatgatgctgatatagcattactacagaatgacatccaggatcttacagcacaaatggcagaccttcaggaaaagggacgagatgttgatgacgagcttgatttgcaatgcaatgacttggaagaatagtttcgcatcaatgaggaacctggaatgaaaactgcaaagc

SEQ ID NO: 119616 - DNA, 1296 bp, Glycine max
  Clone ID: PAT_MRT3847_79021C.1
cgaagctcgggtacgatcgctcgagccgatcacattggtctttcctgtgtatcagaggaaagccatggggatctcaattaggaatagcttagtgtatgtcctgctgttgtttgcattctgtgaaatgcaaatcattgcaggaaaagacactctaacctgcccttttcggagaagtccatgctttgggaagaaagtacaatgcccttctcagtgccctcttcaatcaccatccgacccaaaagccaaagtctgcaatcttgactgtgattctcccacatgtgaaactaaatgcaaaactcgcaaaccaaattgcaatggccgtggctctgcatgcctggacccccgtttcgtcggagcagacggaattgtcttctacttccacggaagaagaaacgagaatttcgcattagtatcagacgcaaacctccaaatcaacgcgcgtttcatcggcctcaggccagcaacaagaacaagagactatacttggattcaagcactgggaatcctctatggttctcaccagttcaccattgaggccaccccatcaccaacatgggatgatgaaattgaccacttgaagttctcacacaatggaaatgaacttgtcatccctgatagtttcctctctacatggcagtgcccagaaaacaaacttagaatagagagaacatcaagcaagaacagtgttagcataactctccaagaagttgctgatatatctatcaatgttgtgcctgtgactaaggaagatagtagaatccataattaccaaattcctgatgatgattgctttgctcacttggaggtgcagttcaaattccatggtttgtctaacaaagttgaaggggttcttggaaagacttatcagccagattttcagaaccctgcaaagttgggagtggcaatgcctgtggttggaggggaagacaggtacagaaccacatcacttgtttctgctgattgtggggtgtgtttgtttgatgcaagagaaggttcagagaagaagatgaactctgagagtgaatatggtgtgctggattgcactggtgctgccaacagtggaaatggtattgtttgcagaagatgatttctttttttatgtcactaatgtgctcctattaagattgattcggagtttctaattctgatttagtttgatgattgttttctgtttaattgtgtcctaaaccaaagtgtcctgttgaataaaaagtgaaatattttaatttgttcgattcataaacgaacaaatgggtgagattatataccaggttctctcaacggagttaatagagg

SEQ ID NO: 119617 - DNA, 246 bp, Glycine max
  Clone ID: PAT_MRT3847_79022C.1
taaaattcttccaccaagttatgggtctccctctgttgcttctcttctccctcttaggtctgtcttctagttccagcgtatcaactcatcgttccatattggaccttgacctaaccaagtttgccagacagaaacaggagtctgcaatggtccaactatggcagagtgagcatggacgtgtctaccataacctcgaagtagaggctatgagacttgagattttcaagaataacttgaactatatca

SEQ ID NO: 119618 - DNA, 455 bp, Glycine max
  Clone ID: PAT_MRT3847_79023C.1
tttgagaaaaaaaattttttccacctctcattaacttgtgtttctatacaaataaaactattaatgtaaaattccctaggcaaaatggggatttacttgctacacattcttgcaacaattttctaaatataacggggtatttgctccaactaatttctgaatagaaaaatgtcatgaaccaaaaactataagcaacctaataataaataacttgcctgaaaattcggccctgagaaagaaactataaatgaaagtttccccagccaaactaaaagtgttgccattaggataagctataaattttaaatcctcccataactgcaaaccttttattctcggcttccaactttctgcttcttttgtttggatgttgggggacttctaagaaaaagtttttttttcgcacccagacttgtacttagctcatcaatatttgcctcaacctccttgcttcc

SEQ ID NO: 119619 - DNA, 2122 bp, Glycine max
  unsure (1)..(2122): unsure at all n locations
  Clone ID: PAT_MRT3847_79024C.1
gactgccctggtcagatagaactatattctcttgtcccagagcgctagaattttgnggatcgatgngaaactgttgaggtntagtgaacgagctgaggactcactccattcacagttcatgacagacgtgaccaagggtataagtggatgcatggcacgaggaactcgtctctacttctccgttccacttaattaattctattcaatccgatggccgaggaagccaaagccaaaggcaacgcggcattctccgccggcgacttcgccgccgcggtccgccacttctcggacgccatcgccctttccccctccaaccacgttctctactccaaccgatccgccgccacgctccctccagaactacgcggaggccctagccgacgccagaagaccgtcgacctcaagcccgactggcccaaggcctacagccgcctcggcgcagcccacctcggcctccgccgccaccgcgacgcttctccgcctacaaaaccggcctccaactcgaaccccgacaatgccgccctcaaatccggccttgccgatgcccaggccgccgcctcccgccctccccccaccagccccttcgccaccgccttctccggccccgacatgtgggcccgctcaccgccgaccccaccgcacgtccaacctccaggaccccgagttcgtcaagatcatgcaggacatccagaaggaccccaacaagttcaacctgcatttgagtatcagagagtcatgcatgccattggggttttgctcaatgtcaaaattcaaacccctaaccacgacgaaaacgaccacgatgccgatgatgacgtgtccgaggatgaggttgtttcccagcccgaacctgaacacgagcctgaagcggcggtggaagtggcggaggaggaggaggaggaggagaaggagacgagggataggaaagggcaggctcagaaggagaaggaagctggcaatgctgcttacaagaagaaggattttgaaaccgcgattggacattacagcaaggctttggagttggatgatgaggatatttcctaccttactaatcgtgctgcagtttacttggagatgggaaagtttgaggactgcataaaggattgtgaaaaggctgttgagaggggaaaagaactaagatcagattacaagatgatagcaagagctttgacaaggaaaggtactgcattggctaaaatggctaaatgctctaaggattttgaacctgccattgagattttccaaaaagcacttacagagaaccgcaacccagacaccttgaagaaactgaacgaagctgaaaaggctaagaaagaactagagcaacaagaatattttgatccaaaattagctgatgaggcgagagaaaaaggaaatgaattattcaagcagcagaagtatcctgaggctacgaagcattatacagaagctataaaaaggaacccaaaagatgctaaggcttatagtaacagagctgcatgctatacaaaactgggggcaatgcccgaaggcttaaaagatgcagagaaatgcattgagcttgatccaaccttttcaaagggttatactaggaaaggtgcagtgcagttttccatgaaagaatatgacaaagctttggaaacatacagggagggtttgaaacatgatcctaacaatcaggaattgcttgatggcataagaagatgtgtagaacaaattaataaggctagccgtggagattttacacctgaggagttaaaggagagacaggccaaggcaatgcaagacccagagatacaaagcattctgcaagaccctgttatgacacaagtattgactgatttccaggaaaatcccagagctgcagaggaacatgtgaagaatccaatggtgatgaacaagattcaaaagctgatcagtgccgggattgtccagatgagatgaatttgatggaaggtggcaatcaagcagagaaacaattgacaattgtatttttcagtgtaactatataatttaaatagattggattagaaaaaagagaaggagaatttgctatttggagattttgtgtggctctctgcattcgtttgtcttggtgaattcatattatttgagcatgtcaaatgcagtccatttatactca

SEQ ID NO: 119620 - DNA, 981 bp, Glycine max
  Clone ID: PAT_MRT3847_79025C.1
ttgtaatgcttgccctgatgaagcacttaccaagtttctggcacggttgtattactttcatgcaattcggctcctattctaagattctcttttatgttttgatcctgcagtaatccatgaaatgaaattgctagcttaatagtgatctgtatagaagactagggaacttgtttgctatggcaactctgagcaattcaactaatatcttttggcaagattgtcaaataggaaggcctgaaaggcagaagctacttaaccaaaagggatgtgttgtatggattactggactcagcggatcaggaaaaagcacattggcatgctccctaagcagagaactgcactcaaggggaaagttatcttatgtccttgatggagataaccttcggcatggactaaacaaggatcttggttttaaagctgaagatcgcactgaaaatattcgcagaactggagaagtggcaaaactcttcgctgatgctggtttaatatgtgttgctagtctgatatctccttacagaagagatcgagacacttgccgtgccatgttacctgatgcaaattttattgaggttttcatgaacatgcctctagaattgtgcgaggcacgagatccaaaaggcctctataagcttgctcgtgcagggaaaatcaaaggttttaccggcattgatgatccttatgaaccgcccataaattgtgagattgaaataaagcaggaaaatgggaattgtccaacacctactatgatggctggacaagtagttacttacttggagaataaaggatttcttgaatcttagagtttttaagtttaattattctctaataatggtgtttcttctaaatgaagttaaaaaggaatcctaggaagtgcaggtaggagagtggtgagaggataaatggacttgtaaagttcatcaagtataaataataattaataattgttgcaattcattctataggttgatcaagaatttcagt

SEQ ID NO: 119621 - DNA, 1132 bp, Glycine max
  Clone ID: PAT_MRT3847_79026C.1
gcccgtggcctcctcccgaagaacaaactcatagacaacctcaaacttcaaacccagaaaaagaaaataaaatcaactttcattccgtttctttctttctttccctttgccaaattttacattaattacatgacatggcataatacacatcacaccaccctctctctctatatataccgtacctctcagattcagacaggaactcaattgcttcttctttttgtttcctgtaatccaggaaatgaaattgctagcttaatattgatctgtagagaagacaagggaacttgcttgctatggcaactctgagcaattcaactaatatcttttggcaagattgtcaagtaggaaggcttgaaaggcagaagctacttaaccaaaagggatgtgttgtatggattactggactcagcggatcaggaaaaagcacattggcatgttccctaagcagagaactgcactcaaagggaaagttatcttatgtccttgatggagataaccttcggcatggactaaacaaggatcttggtttcaaagccgaagatcgcgctgaaaatattcgcagaactggagaagtgacataactgtttgctgatgctggcttaatatgtgttgctagtctgatatctccttacagaagagaccgagacacttgccgtgccatgttacctgatgcaagttttattgaggttttcatgaacattcctctatgaaaatgtgagtcaggatttcatgaagatgcctctaagcttgcgcgaggcacgagaaccaaaggtcctatagaagcttactagcctaatgaacaacccataaactgtgagattgaaataaagcaggaaaatggggattgtccaacacccactttgatggctggacaagtagttacttacttggagaataaaggatttcttgaatcctagggtttttaagtttaatcacatttgtaatgggattattctctcataatgatgtttcttctaaatgaagttaaaaaaggaatcctaggaagtgcaggtagcagagtggtgagaggataaatggactgataaagttcatcaatcataaataataattaataattgttgcaattcattctataggttggtcaagaatttcagcgtatttttcagct

SEQ ID NO: 119622 - DNA, 363 bp, Glycine max
  Clone ID: PAT_MRT3847_79027C.1
tttggatcctctcacatctctctttctttctccggtgtcatggaatccggtagtgcccgatgtttatattccctccggttctgaaatcatcaaatgcaactaccaaacctcgagaagcttccttcacacacttccttctgtgagtttccttctcttcttccttctcggtcgccggacaacttctccggcgtaaccacggttaccggagtatcttctaattattttttccctctctttgcttctattccgcgcagtttccttgttcttcgaacaagctctttctcattccatcaccacaacttccgatattgcatcttcaactgttttggttacattttacgcgtaataactgattgtttcttt

SEQ ID NO: 119623 - DNA, 327 bp, Glycine max
  unsure (1)..(327): unsure at all n locations
  Clone ID: PAT_MRT3847_79028C.1
tacctaattgtcattncttccctcttatctctatattttaagacccttcacatccannttttcctagtcgcctttcaaatcggcgccagaccctcacaacnccctttctctctacactttatctaccctaccttattttacatttgttactcctattttcatctccagaggatctttttctactacaactatgccagtatactttccattcattctcctcgcgtttctcttttacctccatcctctcaccatttacatttttcgatttcttttccttaccttcttttcttcaatcccttcatcttttttttttttcaatccctttct

SEQ ID NO: 119624 - DNA, 1089 bp, Glycine max
  Clone ID: PAT_MRT3847_79029C.1
gaacgagaatatgcaagtgtgagtgggacgatggggtgagaaacaggagtagcgtccatccaatccaacgatccaaacaaaactgcaaaacaatatacaattgaatagcagtggcgtttcgacgcgcacgaagcttcttctacttcttccactgcgccacattcattcattcaattttattgtttttaccctaattactatcgccaaccccctttttttttttcttcttcttccttttttcaatttcgattgcatggaccatttcccattctaacacctacaatttttctttaatattttctcgtccctgaggcagagaaaaaaagaaaaaactaccgaagaagttgatgaattaatttaatcttaattcttaaatattttttctctttctctttccaacctcaaccccacccttaagcctctctctctctctctctctctctcgctctctctctctctattctattgcttccttttttccgctattttctggaacaaatggctggagtgacaaaggaggaagagaggggtagtcctagttggggtgcttcattttttacgcagacaacagaggatgtggctagagctgttgccactgctatgaattctcagaggccatctgtggtatattcattgaaaaatgatcatggtggcagccaacttcaaaggctgcagtatcaagttacgaaaatgataaaaggattttctagccctccagaagttaaatatacaaattacaatccggaaatcttgacaactcagaagcgtcaatgggctgcaaactttcagttgcagtacacggaccataagtcttggaaggagccaacaaagctgtttgaaagcatggtggttgctggacttcatcctaattgtgatattcaggcactgcaaaggcaatgttttttaagaaagtctgaaggccctggtaaattgagaagtgcacttggttatcagaatcagtcccgtgtggaagtggaacccaatctagaacctcaggttttatttgtttaccctccagaaaaacagctgcctcttaaaggcaaggatcttctctctttctgcttccctggaggcttggaggttaatgct

SEQ ID NO: 119625 - DNA, 302 bp, Glycine max
  Clone ID: PAT_MRT3847_7902C.1
gattaatgacaattaaatatttattcagacatttttttttcatgttttatgcttacacaagggatctaagatcaggttccgtcaatttcacaaatatagaaagacaggaacactactcaggaaaccttacgggcatagatagagaggcgggcacgtgctcccatgaacgtatgcccccactaaatatagtgtttatgtttaaactttggcactaaaacttgttaataacgggaccccaatgtaacacccatgaaataaccttattgcgcctttccttgttttcaaaccgggtatctatacgg

SEQ ID NO: 119626 - DNA, 103 bp, Glycine max
  Clone ID: PAT_MRT3847_79030C.1
taatactacagaaggatacattttctataagactacataagggttctgcttctgcaagactatcataatgtacggctcctataataccacataatgttactgt

SEQ ID NO: 119627 - DNA, 529 bp, Glycine max
  Clone ID: PAT_MRT3847_79031C.1
acgagaagatcatcagcttgttaaagaatgtaattaaaaaagaaaaaaagacagcaacctgcattgcctgcgcatcttcctatgcgcagcactgctggttccaaaccttaatttatgttataatctcttaatttatacttacctcttcttcttcttcgtcttcttcttctttcttggactttgttctcactaactgtctccggtgaattgactccgaccacagagattcggaagaagcggagaaaaggaattctcacagttttccgaaaacagcaacaatgtattcattcgttcagaaaaagtgattctgcgagttcacagtgactgagagggagagaaagaaagagagcgagagagcaacagagctggagagagcaagagatgcggccgcttgtatgttctcagctatccaaaaaaagaaaagcaacggattccatcagctactattcagtcttctgcaagccgcagccgttgcacgcacttctctagcgcggtcttctttcgctgcctgctacttcaagagagtgct

SEQ ID NO: 119628 - DNA, 305 bp, Glycine max
  Clone ID: PAT_MRT3847_79032C.1
ccagtcactaaaaagggctacagacagattgcaacgccagattatgaccatgcaggtcagataactggcgtgagcgagggaggctgccctactacagcggattgaggaacaccttcgcatgatggttcagctgcctacggaaccgaaatgaacaatgctggtgaagctaagagagatgataaccaagaacctgacgagaaggacaactaatatgagggaaatgacatgggatcgggactgcaacaacagaaataagtccaagcgcaaacccacaggcagggctgtgtattataaaggatatggca

SEQ ID NO: 119629 - DNA, 373 bp, Glycine max
  Clone ID: PAT_MRT3847_79033C.1
ggaataagaactccaacaattttattaatgaaaatgctttacaatttcggtacatttaccctggcatgaatttaactttgcacgctttaaataactttaggcacaaacaatggattaggggtcaacaaagctacaatcccgcattggtaaccgtttgagttgcgattaattgacccaagaaaggaaattaacggccatgggaacacctgtgtgtcccgtatatggggatcattttataatgatactgcagcatctgaattaaattgtttattgcctgggagcttttttgaggaaagccttgagggaaacgtgtgatattagcggccttattgtaaatcctgtaatgcttatgcccccaacggatgcttgcctg

SEQ ID NO: 119630 - DNA, 487 bp, Glycine max
  unsure (1)..(487): unsure at all n locations
  Clone ID: PAT_MRT3847_79034C.1
gacccacgcgtccgcggacgctggggtcgacccgcgcgtgcgggcacgcggccggtagatcgccctcggctcgctttagacgtgcctcgcatccaccttccttccgcggttcggtgtccttgtagttgagcccatccctgacttccttttcagcccacgcgttgctccgattagcgccgagagaacgaataatggcttggggggaacgaaaaccctttttttattgggcgaggcgctccgcgaggncgattggtcggcgccggcgcgcccgccccccccccttcttgtggcgaggcagtgttccctgatcttgctctcggtggtgctgccgcctggagtgccgcctctactagtagccggccccctccttcattgtgagtgcctctggtctcatattgcgttttcttccaggaccgctagctgtggtcgctgcgcttcttacggcnctcagctttgcttttctgaggggccgctttgcgggtgcctt

SEQ ID NO: 119631 - DNA, 402 bp, Glycine max
  unsure (1)..(402): unsure at all n locations
  Clone ID: PAT_MRT3847_79035C.1
gaatataagtggtgtaaatattattaatgagtgaatcacaatcttacagtanagtagcggtgcatttaatcatttataaatgcaatggaaaaacacatgcagcagcattaaaagaattgcaaggcagctttnctcttattatacgtaaccagctanctggaaactttggactatatnaatccaggcacgtatggaactccagtgtgaggcagccaacgatcgccatccaagaagggaggcacaggaaagttanccagatcaggnnnnttgataacatgataaccaggccacgtcactcggtttgcggggtgggaagcggggcgcgggttgttaggcgctgcatagtacaaggtgcttacggcaaaagccggactggattcatgccaaccggaangatttatg

SEQ ID NO: 119632 - DNA, 1134 bp, Glycine max
  Clone ID: PAT_MRT3847_79036C.1
taacggctagttggctcaccatataaaataataattaaattttcaaaatttgaatcacagaagacgacagaaggggagattcgtcctttctttttctctttctttctttcgtagaacggagagcacactattttcactgcagcagcaacaatggcggagaccgagatcgagaagataacgacaatagacccagagacggagtttctggcgtcgaagaggaggaacgggaacgagtgggagaccttcaaggagaacgtgaggccgctcaagagaggccgcaacgtcaacctcttgaaccacgccctcaactcccacaccgataacgaactcaagaaatccctcatggaacaacgaaggaagctgattgaagccatcgaagaataccaaggtgatgaccctcttcttccctggatacagtgtatcaagtgggttcaggaggcgtttcctcctggcggagacagctcggggctggtggtgatttatgagcagtgtgtgcgtgccttttggcactcagagcgctataaggatgatcttcgctacctcaaagtgtggctggaatacgcagataattgctttgatgcagacgtcatctatgcttttctggatgcaaatggtattggaaaaactcattccattttctacatttcatatgctttgcatttggaatctaagaacaagtttaaagctgccaatcagatgatggagcttggcatatctaggaatgctcaaccggttgataaattgaaggctgcttatagacaattttttgcacgctcaatggcaaggcctatagctatagatgatgcagtagaaaaactggcacccacgcgtagctttggaactgttcttgccaagggagaaaatcgtgcaccgctgtccattttgaactcgaaccgtgatccttgtgctaagaatgataggacccgagcagctccactttccatttataaagattcagctgacactggtgatactgatcctcataagccagacctgtcgcactcttggcacacacttggagctcgagctgacagaaataaggaaaacaatgctattcctggcaagtggaagtgctatatgaattcacagcgacctgggacttataactggaggggctactgcaagtgcctttta

SEQ ID NO: 119633 - DNA, 816 bp, Glycine max
  unsure (1)..(816): unsure at all n locations
  Clone ID: PAT_MRT3847_79037C.1
caccaatcaaaacaaaacaaaaacaccgccatctctctctctctctctctctctgtgatcgcttcgcgttcatcactgggcagtaaaaaatgtctgacacagaagaccatgcagcatcagagtattccaatggtgacgaatcccctccaaagcccagacagaggttcagggacagatctaaggagatgctgtccaaacaagctgtgcagaccaagcaaatgctttccaaacaggccgttaagattgccaaacaagctgaagaacacgaaaggttcatcaacactaggtgacgcatctcgtgggggtcctcggttttggtgggttttgcttccttttagctgcgagaagacgacagaaggggccacaagccgttcccttggtatattgcttgttctatgtcgtgtttgttcctctccgttggatatattacaggttcaagaaatggcattactatctcctggtgaatgatgatatctcaatttctgtattttaagtttattgggcaactattaaactagagaaatgctagcaagtaacaatgcgtttctgtaatttaaatacactattgattggaatttattagaaatcgtgaactttgtgtggctcttgttactcttactcgtgaattgtattttctaatcaattttaactaatgataaagagtgtgttggagagtgtattgctagcacttctcatgaaactattgtatgttttgtgaatttaagcagtgtttcaattctttgactgattaaaatcattggaacaatgtctcaatgttctcattatcatanggatataagtattatgatacatccc

SEQ ID NO: 119634 - DNA, 280 bp, Glycine max
  Clone ID: PAT_MRT3847_79038C.1
acggctgcgagaagacgacagaagggtctccaagcatagaccagaaaagccagtactgtacattgatgtgaaatcaaattattacatgatcgcataaaagaggaaacaagtcagtaaggaaacaaaacagtgggacaaaaaatgttatgaatggtaacctagagcataaaacttttgactaccacatctaaggttagctccatagttgtagacaacatcagcaaggtagtgtatgggagatcacgatttagtatagattagatgttagagaaacagccgt

SEQ ID NO: 119635 - DNA, 286 bp, Glycine max
  unsure (1)..(286): unsure at all n locations
  Clone ID: PAT_MRT3847_79039C.1
gctgcgagacaacaaccgacggaagaataatggtggaaatgacaaataccccagctcaacatgaccaagtcattctagtacctcaaaatcaaaaggaagaatgacgattgatattatacactatcttgcaacataatcaagtcatcctgtcacctcaaaatcacaaagaagaatgatgatgaatattgaacattatctccccccacccgccgttgaaaaaaaaaactgctccaagtcatctcattatctcanaacctaatctacaaggacatgatgaaaaatcaaa

SEQ ID NO: 119636 - DNA, 561 bp, Glycine max
  unsure (1)..(561): unsure at all n locations
  Clone ID: PAT_MRT3847_7903C.1
gatgttgatgaggttgaggaactaagggataatgctgcagaggctcttgtcaattattatgtcgatccattgtatcatgatagcgtgtctgatgcgattaatgttccttcgttcagaaatatgcagaatagattaactcatattcgtgcatcgaatgagcacatggctagatccttgagaagaatgagtgttgagcagctcacttggaacccagatcttgcataatcatttgaagggtatgttttgatctcaaagcctttggaaagttgttttcagtctcttaacttttatcagttttacaccctagcatagatatatgttgtgatgagaattggtagaaggagatatatgttgatctttgctgtatatttgtagaagttcccaaacacaaataaaaatgagtgagtagatagccttgtaattgtgggaaaatacttgaattcgtataacatagttgccaaatgtcacccttactgtcattagttgtgttattccttatgaatcagaaacgctcattccttttattgagctccaaggaaacttgtgttttggaatgcctnc

SEQ ID NO: 119637 - DNA, 372 bp, Glycine max
  unsure (1)..(372): unsure at all n locations
  Clone ID: PAT_MRT3847_79040C.1
ggctcgagcttgtttcatctgtaaagaatgaatgttataaatagatcagacccaattttatcaattccttctgtatgtatgtataatgtattgtatcacttgtttcatctgtaaagaaattgtaaataaatgagaaatggaaaggtcaaaacctgagtctggtgtaaaggttcacaggttgtaaaaatatatccaaattctgacaactttcgtaaagaacacatattctgtttaagtgccaaaagagaaataatttggattgtgccgggtcatgttaaggatgtggggagagttcatgacatgtagcctgttgtgacttgtgtgtctaaagtgctatcttgaaattggaaaggtgaccatgtntactctnaa

SEQ ID NO: 119638 - DNA, 398 bp, Glycine max
  unsure (1)..(398): unsure at all n locations
  Clone ID: PAT_MRT3847_79041C.1
accggccggaattcccgggtcaccacgcgtccgcgaaaacngtgttccaaatccanacacactctctctccccatggcgttgaacaatggcgtccccgccaccggcaccggcctcatcgtcagcttcggtgagatgctcatcgacttcgtccccaccgtctctggcgtgtccctggccgaggcccctggcttcctcaaggcccccggcggcgcccccgctaacgtcaccatcgccgtgacgcgcctcggcgggaaagccgccttcgtggacaagctcggcgacgacaagttcggacacatgctcgccggaatcctgaaggactttaaccaggacacacgcaccgccctggccttagtgaccctacacgccagcggggagcgaaagtaggtggagtgca

SEQ ID NO: 119639 - DNA, 320 bp, Glycine max
  Clone ID: PAT_MRT3847_79042C.1
tttttatctataatttgtctcctcactgcactaatatacaagattgaagaaataaaaaccaatcaacaaatcacacacacaagcaggtttgttggtccattttctatcactaaggtcattgaatttcactcattcatatgcacaaattggaagcaatccagtgaataaagaaaaacagattgccttttatctttaaacacacacactgtaaccacttgaaactgaatttgactctgctaaagttaacacgatgtagactttgataaaatatgcatgctttttgtctgagtcttaattcttttctttaagcactggttttt

SEQ ID NO: 119640 - DNA, 309 bp, Glycine max
  unsure (1)..(309): unsure at all n locations
  Clone ID: PAT_MRT3847_79043C.1
gcggagtgcggctgcgtgaaagaagggggaggaacgagacgttcacttgttaaatatgatgaacaatggcctgcactccattactctccgtcgttgcatctagaaaacttgntggagagcatgcgtcaccacgaggaagagttgaactattggagaacagctgaagagactgggagaagcaatgtcaaataagaacgttcgagggaaaagcgttaactcatgaggcaagtcaggttagatatagagaggcgcgtaacacagggagtgaagaaactgtttgatgatgcttgaacgctcaacattgcaaaa

SEQ ID NO: 119641 - DNA, 1299 bp, Glycine max
  Clone ID: PAT_MRT3847_79044C.1
cagttccggcaggctgccacgagataccagagggagacgtgggtgaaggtgttgtattatttgagggacgaggggttgcatgccagtggggggttttcatccggggtgtccaagagtggctctcagggataaggtttaagactttcaattccatgtttgaggaggttcacaggacgcaggcggtttggttgataccggattcacagctcagggaggagctgaggatatctatatcggagaagctcattcccgcgtataggtcgtttcttgggaggttcaggagctacattgagagtgggaggcatccggagaattacatcaagtactctgtggaggacctggagtatgctgttttggacttcttcgaagggattcctgtttcccagcacttgagaaggagatctgaatgatggattcaatgggactagtggagtcaagtcaaatggagttttgcaactttagaagctaggacatattcttttaattttttcactggagcgttcgggtaattgagattgctcaagctctagggtgggtgctccaacaatgatccaggattctcaggagaagaaagattaagatttcccttatctggtgttgaagattggtgtggcttatgaaaagccaaagtagctacctcaccctgaatgctgctctgcctgtaagcactttatttgatttctcaacacattctagatttttgtttcatttgtttatattggaatttgttgtgtgtgtgtgttttttttaatttattttctcttacggtcgaaaaagggctgtttcttttgtagcttcaaatgactcttatacaatgtgatagttttggcactaaatagatgcattgtcaaattgagacctcagtcttagatagctttcgcctctgggcacacgtagcttctgtttttttttttttctttcttatatccaagagattcataaggaaaactagaagaatatcaaatgaatgcgcacgcactcacctcaacatgggaattgctgatatgttgtgactttggtgaaagaccaagtggcaagtattatgtacacattataagtgcgaacgtgcgatctgattcgaactactttcgattctgggacacactttattttttgtaattggataatcattgctggctaatggtgaattttccttctagctttcatggtccaattagttactactaacttactgattacaagtgttacagttttattgaaaggttgtgtgaggcactgaggcttctcattctgaaagaaggccaagtttctatacttgaatgctaaccttgtaagcat

SEQ ID NO: 119642 - DNA, 673 bp, Glycine max
  unsure (1)..(673): unsure at all n locations
  Clone ID: PAT_MRT3847_79045C.1
cccacgcgtccggtgnncgcnncgacgacgttttagctcttgtttccggacttgaatttgcgttgtggacttgtggtttgtatgagtagtttcagcgtgagttcgagagaaagggaaggtgtagcgcttgctgagtttggaggcttgtagaatctaaacgtactatgctgacgtggcatcggaaactgcacggggcttctttcagagttgtgtgttgaaggatgttctcagttaacatgatcgcattgattttttgaatgaatgtagatttggtgttcttcatggtcctcttgtgaacttcaattaattgcttggacttgggacggggatattgcagcttgtgctcttacagtgtcaagattttgaattgaggtgtagggtgtttccggaaggctttttaaaataatatgatatgagcaagaagaattcagcaaatgaataattttggatcaaaccaggagctaagttgggggtgctatagatgtgatggtgcatgtctataatatgaattgtcgtatgaaaacagagtgctgattgtacccgatagataaaaaagttacagagtggtcgaattttgtttgtttcctgtatatgtcatgtaacaagtaaagctacatgattagattcatatgttatcaaatgattttactattctagtatatagagttgcgta

SEQ ID NO: 119643 - DNA, 543 bp, Glycine max
  Clone ID: PAT_MRT3847_79046C.1
atccggagaatttcatcaagtactctgttgaggacctggaggaagctgttttggacttcttcgaagggattcctgtttcccagcacttgagaaggagagctgaatgatggattgaatggactagtggagtgaagtgaaattgagttttgcaactttagaagctaggacatattcttttaattttttccctggagcgttcaggtaattgagtgctggccaatctgagattgctcaagctctcgggtgggtgctccaacaagatttactgctaccacgatccaggattctcaggaaaagaaagattaagatttccctaatctggtgttgaagattggtgtggctatctcaccctgaatgctgctgcctgtaagcacgttatttgatttctcaccacgttctagatttttgtttcatttgtttatattggactttgttgtacgtgtgtgtgtgcgtgttttttttccttcttaaggtcgaaaaagggctgtttcttttgtagcttcaaatgactcttatacaatgtgatagttttggcactaaaaa

SEQ ID NO: 119644 - DNA, 356 bp, Glycine max
  Clone ID: PAT_MRT3847_79047C.1
ggaaaaccataaaagttttttatttataggaatcgggaggacaaaagcaccattttctctcttataatttggagttaccttcacaaaaaaataagtatgaggctcagggggggtgggccacatcattaatgctacaaaggattgaagggcatgcaaaagtcaaaaatatgcattggtacaaagttggaaatcacagtgctagaaaacaaaagcagttcctcttatttattaaggagataataaacctcattgcttgctttaggcagggggggggccctctacggggggggactttccataaggggggttcttggagggggggttcttatagggggggttggaaaccggggggttcg

SEQ ID NO: 119645 - DNA, 188 bp, Glycine max
  Clone ID: PAT_MRT3847_79048C.1
gggaattatgccatatctcacctaagaaattggcataatattttttcctactattgtttttatgacatgatatatacccctatatatattacgatttttatatttgatgagtagaagcaaacgtatatttcaccccctgaatttcatcaaggagtgtaagcaaaaatcattgaaaaaatccaaactac

SEQ ID NO: 119646 - DNA, 517 bp, Glycine max
  Clone ID: PAT_MRT3847_79049C.1
gtggagctcttccattggcgaatggaggctctcttgcatgtccccagccaagacgtctctcagtaaggccacattaggcgcttgtatctgcagaaccattgacactccttcttgtccttctggttggtcttctggttccttccctgctgtcattcaaaacgaaccgatcttgactacccctagcgacatggtcaccccgactgttaggagaaatatggcgagaaaataggagcaaactattaaataactccagaaattattgagggaaaagattggacgtcaaaccacatctactaagaaagtggaacacataacaacttctctataaacatcatcgtctaataacatcccatcatcacaatcctcatacagaatcaaagctaatttcattcacttcaataaatataaatattacaataatccagctttgtatggtgaacttaccaaataccacaggcgcaagtttataatattcacttactcagactcacaagtgtggccatctcatgtgcgtgat

SEQ ID NO: 119647 - DNA, 426 bp, Glycine max
  unsure (1)..(426): unsure at all n locations
  Clone ID: PAT_MRT3847_7904C.1
gggcaagtatgaaggttggtaatgcctgcaatatattctctcttgcaaaagaaagcaccaaaaaaggtgggggagaatttaattccttcccacccttcaacaaaaactggcatgagggggagcaacctttataagagacaacattttctttttcacttctatttaattattactactttaaattcatctcttatatagctcaacctatatctcagtcttccccggtccatcttggtcggtgttctgttccatttcttttttatagcaccataagaggacactagagaagaagatatcctgaaatggaatgagggtgaaattaaagagggttacaaggaaatgactcagtgcagttaccctgaatacaaccatagcatcattgtggagaggcacaaagatagcttgatcaagacatgtnctacatgt

SEQ ID NO: 119648 - DNA, 203 bp, Glycine max
  Clone ID: PAT_MRT3847_79050C.1
ggggaagggggaatacaacccctcccaaggttcggggaggggataaaagattttgaatattgaatcgaaccgcaggaaataagcctcaccggaacctgggggaatcaaagctattaaggtcccaacaccacaatttaaaaagcaagggccttcctcctttggggggagggcaacaaaatgtaacccaattccaaagaaaaaca

SEQ ID NO: 119649 - DNA, 366 bp, Glycine max
  unsure (1)..(366): unsure at all n locations
  Clone ID: PAT_MRT3847_79051C.1
cagcgactgtcaaggtccagaatccatatccgaatgaataacccactggccacagggtgattttattttggacttggaccccctcttctcccaccactcaatcaccatgccttctccttctgcagatcaatcacaatcccaaccaaaaccttaccccaacctcctttccctcttcctcaagcccatcatcatgctccttctcacctccctcttcttcctcttactcaanttttccgcctttctccttctcaacctttttctcctcggtggggcctttcaccggctttgcttccgccccttcgttaacttcgcccccgccttcttcattgggctgcccccttgtgatattaacaacctcccccgctt

SEQ ID NO: 119650 - DNA, 356 bp, Glycine max
  Clone ID: PAT_MRT3847_79052C.1
gaggaggggcatttttaaataattcattcaaccaatttttagcctacaaaaagtttcttttgggaactattttttcaaactgaagatcctagatggaaagtaacaacctgttcctgaacattattacacccaaaatggcaacccccagtgttccaggacgtgtaaaactcaaacgcaaatggctttagtaccattctacttaagtatttacaaacaacatttagttaaagcttttcacagaaaaccaacggttccgtggtatgcgaactatataccatcttttgctactatcaggttcttctcaacatctttaaattttgcaggggcccatggtgccgtgcctacacttttttttg

SEQ ID NO: 119651 - DNA, 397 bp, Glycine max
  Clone ID: PAT_MRT3847_79053C.1
caaacattggtgataagtcctgtcaagttatctttggacactccattgctcacatggacaacttaatataacgattactctggttaaataatgattgctttttaacatttcattattcacatgaaaattaatctgataataattcctgtcaaataatgattgtctttggacatttcattattcacatgaataatcacactatttatcatcaccacatgtttatcatcacaaacatgtaattatgctgccaaattgtgtctttctttgggccgagcacaattcatatgaataatttcatgcaacatctatgtaaattcaatcaaatcaacttatgcaacagaggttacttgggcaacatgttgtttcaatcaatttaacaaaaaatacaagataattt

SEQ ID NO: 119652 - DNA, 6109 bp, Glycine max
  Clone ID: PAT_MRT3847_79054C.1
aattcccgggtgcgacccacgccgtccgatgggaatcataacaagaaaaagaaaacactccccagagttcaaagagcaagcactatttcctctgttgtgtcttttttcaatttgttttccctctctgtagcagcagcagcagtgatggaacgtgctcgcaggctagcaaaccgcgccattctgaggcgtctggtttcagaggcaaagcagcatcagaagaatgaatccgtgctgcactcttccaccacccccatgctgctctattcttcctccaggtgcatgtcctctgttctgcgaagcaggggatccaaaacagagacccttctgggaaggaacatcaacatgtcacgcggcgttgttgttgctgctgctggtggttttctcggcgttggctcggcccggtccatctcggtcgaagcgcttcgaccgagcgacaccttcccccggcggcacaactctgccaccccggaggagcagagcaagatggcagagtcgtgtggcttcggtagcctcgactccctcgtggacgccaccgtgcctaagtcgatacgccttaaggatatgaagttcgggaaattcgatgcagggcttacagagaaccagatgatagagcacatgaaggacttggcctcaaagaacaaggttttcaagtcctacattggaatggggtactacaacactcatgttccaccagtgatcctgaggaacattatggagaaccctgcttggtacactcagtacacaccttaccaggctgagatatctcaggggaggcttgagtcactgctgaattaccaaaccatgatcactgacctcaccggcttgcctatgtccaatgcttcattgcttgatgagggaactgctgctgctgaagcaatgtccatgtgcaacaacattcagaaagggaagaagaagaccttcatcattgcaagtaactgccaccctcaaaccattgatatttgcaagacaagggctgatggttttgatctgaaggttgttactgcagatcttaaggacattgattacaagtctggggatgtttgtggtgtgcttgtgcagtaccctggcactgagggagaggttttggactatggggagtttgtgaagaaggctcatgctcatgaggtgaaggttgttatggcaagtgatttgttggcactgactgtgttgaagcctcctggtgagttcggggcagatattgttgttggatcagctcagaggtttggggtgccaatggggtatggagggcctcatgcagctttcttggccacttcacaagagtacaagaggatgatgcctgggagaatcattggggtcagtgtcgattcttccggaaagactgctttgaggatggcgatgcaaactagggagcagcatatcaggagggacaaggccaccagcaacatttgcactgctcaggcactgcttgcaaacatggctgccatgtatgctgtgtatcatggacctgaaggcctcaagaacattgcacaccgtgttcatggtcttgctggggcatttgctcttggaataaagaaacttggaactgtggaaattcaggaccttcccttctttgacactgtgaaggttaagacttccaatgcacacgcaattgctgatgctgctctcaaaagtggaataaatttgcgagttgttgatggaaacactatcactgttgcttttgatgaaacaaccacattagaggatgttgataatcttttcaaagtttttgctggtggaaagcccgtctccttcacagctgcatctcttgcaccagaagttcagagtgcgattccttctggattagttaggaagagcccttatctgacgcaccctatctttaacacgtaccaaactgagcatgagttgcttaggtacttgtataggctacaatcaaaagatctctcactatgccacagtatgatcccacttggatcttgtacaatgaagctgaatgcaacaactgaaatgatgcctgtgacatggcccagctttagtgatattcacccttttgcaccagttgaccaggctcaaggttatcaggaaatgttcaacaatttgggtgaactgttgtgcaccatcactgggttcgactccttctctttgcaaccaaatgctggtgctgctggagaatatgctggacttatggttattcgtgcatatcatttggcaaggggagaccaccaccgcaatgtttgcattatacctgtctcagcacacggaacaaatcctgctagtgcagctatgtgtggaatgaaaattgtctctgttggaactgatgccaagggaaacattaatatagaagagctgaggaaggctgctgaaacacacaaggataacttatctgcacttatggtaacatatccttcaacccacggtgtttatgaggaaggtattgacgaaatttgcaatattattcatgataatggaggccaagtatatatggatggtgccaacatgaatgctcaggtgggactcacaagcccgggttggataggagcagatgtttgccatctcaatctccacaagacattttgcatccctcatggaggaggtggccctggcatgggacctattggtgtaaagaaacacttggcaccatttttaccttcacaccctgtgatagaaactggtggaattcctgcccctgacaaacctcaaccacttggtaccatcgctgctgcaccatggggctcagcactcatattgccaatctcttacacttacatagccatgatgggttctaaaggactcaccgatgcatcaaagatagccattttgaatgcaaactacatggcaaaacgattggagaattattacccggttcttttccgtggagtcaatggaacagttgctcatgaattcatcattgacttgagaggctttaagaatactgctggaattgagcctgaagatgttgcaaagcgcctcatggactacggttttcatgcaccaacaatgtcatggcctgtgcctggcacactcatgattgagcctactgagagtgaaagcaaggccgagttagacaggttctgtgatgctcttatttccattagacaagaaattgctgagattgagaaaggaaataagagcatcacagaacctgtctaactcggccttgctttcactctcagtaggctcaatcatgagtgtgccaggcacaggccatgacattgttggtgcatgaaaaccatactccatgaggcgctttgcaacatcttcaggctcaattccagcagtattcttaaagcctctcaagtcaatgatgaattcatgagcaactgttccattgactccacggaaaagaaccgggtaataattctccaatcgttttgccatgtagtttgcattcaaaatggctatctttgatgcatcggtgagtcctttagaacccatcatggctatgtaagtgtaagagattggcaatatgagtgctgagccccatggtgcagcagcgatggtaccaagtggttgaggtttgtcaggggcaggaattccaccagtttctatcacagggtgtgaaggtaaaaatggtgccaagtgtttctttacaccaataggtcccatgccagggccacctcctccatgagggatgcaaaatgtcttgtggagattgagatggcaaacatctgctcctatccaacccgggcttgtgagtcccacctgagcattcatgttggcaccatccatatatacttggcctccattatcatgaataatattgcaaatttcgtcaataccttcctcataaacaccgtgggttgaaggatatgttaccataagtgcagataagttatccttgtgtgtttcagcagccttcctcagctcttctatattaatgtttcccttggcatcagttccaacagagacaattttcattccacacatagctgcactagcaggatttgttccgtgtgctgagacaggtataatgcaaacattgcggtggtggtctccccttgccaaatgatatgcacgaataaccataagtccagcatattctccagcagcaccagcatttggttgcaaagagaaggagtcgaacccagtgatggtgcacaacagttcacccaaattgttgaacatttcctgataaccttgagcctggtcaactggtgcaaaagggtgaatatcactaaagctgggccatgtcacaggcatcatttcagttgttgcattcagcttcattgtacaagatccaagtgggatcatactgtggcatagtgagagatcttttgattgtagcctatacaagtacctaagcaactcatgctcagtttggtacgtgttaaagatagggtgcgtcagataagggctcttcctaactaatccagaaggaatcgcactctgaacttctggtgcaagagatgcagctgtgaaggagacgggctttccaccagcaaaaactttgaaaagattatcaacatcctctaatgtggttgtttcatcaaaagcaacagtgatagtgtttccatcaacaactcgcaaatttattccacttttgagagcagcatcagcaattgcgtgtgcattggaagtcttaaccttcacagtgtcaaagaagggaaggtcctgaatttccacagttccaagtttctttattccaagagcaaatgccccagcaagaccatgaacacggtgtgcaatgttcttgaggccttcaggtccatgatacacagcatacatggcagccatgtttgcaagcagtgcctgagcagtgcaaatgttgctggtggccttgtccctcctgatatgctgctccctagtttgcatcgccatcctcaaagcagtctttccggaagaatcgacactgaccccaatgattctcccaggcatcatcctcttgtactcttgtgaagtggccaagaaagctgcatgaggccctccataccccattggcaccccaaacctctgagctgatccaacaacaatatctgccccgaactcaccaggaggcttcaacacagtcagtgccaacaaatcacttgccataacaaccttcacctcatgagcatgagccttcttcacaaactccccatagtccaaaacctctccctcagtgccagggtactgcacaagcacaccacaaacatccccagacttgtaatcaatgtccttaagatctgcagtaacaaccttcagatcaaaaccatcagcccttgtcttgcaaatatcaatggtttgagggtggcagttacttgcaatgatgaaggtcttcttcttccctttctgaatgttgttgcacatggacattgcttcagcagcagcagttccctcatcaagcaatgaagcattggacataggcaagccggtgaggtcagtgatcatggtttggtaattcagcagtgactcaagcctcccctgagatatctcagcctggtaaggtgtgtactgagtgtaccaagcagggttctccataatgttcctcaggatcactggtggaacatgagtgttgtagtaccccattccaatgtaggacttgaaaaccttgttctttgaggccaagtccttcatgtgctctatcatctggttctctgtaagccctgcatcgaatttcccgaacttcatatccttaaggcgtatcgacttaggcacggtggcgtccacgagggagtcgaggctaccgaagccacacgactctgccatcttgctctgctcctccggggtggcagagttgtgccgccgggggaaggtgtcgctcggtcgaagcgcttcgaccgagatggaccgggccgagccaacgccgagaaaaccaccagcagcagcaacaacaacgccgcgtgacatgttgatgttccttcccagaagggtctctgttttggatcccctgcttcgcagaacagaggacatgcacctggaggaagaatagagcagcatgggggtggtggaagagtgcagcacggattcattcttctgatgctgctttgcctctgaaaccagacgcctcagaatggcgcggtttgctagcctgcgagcacgttccatcactgctgctgctgctacagagagggaaaacaaattgaaaaaagacacaacagaggaaatagtgcttgctctttgaactctggggagtgtttatctttttcttgttatgattccattggtgtgtgtg

SEQ ID NO: 119653 - DNA, 302 bp, Glycine max
  unsure (1)..(302): unsure at all n locations
  Clone ID: PAT_MRT3847_79055C.1
gtgatcgacgctgctctgagccatggctatgaggatgtgaataccgnctcctgacacatcactagcctcgagtgctannagnggnnnanaatngaggcctggggcatccttgaatactcagagactcagcggaggcacacacacacgagcctgctaatggtcccttnagggggggccagtcccacccctacgcacagtcnaccctagacccccgctcgcacgggaagcccggggccgctcgtcgccccgccggccccccacccccacccacccccgcccccgcctacattacgccccccccc

SEQ ID NO: 119654 - DNA, 662 bp, Glycine max
  unsure (1)..(662): unsure at all n locations
  Clone ID: PAT_MRT3847_79056C.1
acgagggcagcctttctcaattcttctatattaatgttacccttggcgtcagttccaacagagacaattttcattccacacatagcagcactagcaggatttgtaccatgtgctgagacaggtataatgcaaacattgcggtggtggtctccccttgcctacagtttccaatggccaaaagaagtaagaagcatcacaggaatttaatcagagatagtaatgtaggaaaatcatcgcatctcttttagatatgtagcaatagaaaatggcacaactaaggctattgtacaataggctgaaatgaaaatacaaagtcacattcaataatcacacaaaaacttttatatcctaagagtaaatcagaagaaccataaatttcctaataaattatcaatttatcataaagatccaagtatgatccataccaaatgatatgcacgaataaccataagtccggcatattctccagcagcaccagcatttggttgcaaggagaaggagtcaaacccagtgatggtgcaacacagttcacccaaattattggacatttnctgataaccttgagcctggtcaactggtgcaaaagggtgaatatcagtaaagctggggcatgtcacaagcaatcaattcagtggtgcattcaggctcattggtccagatcc

SEQ ID NO: 119655 - DNA, 202 bp, Glycine max
  Clone ID: PAT_MRT3847_79057C.1
ccatggggctcgctaccataggatacctctccttatcaaaaccggctttgctgggcagcctgaacaggttaaaaggctcagagttactgttgcctccctatctcacctcattacagcctctgaaaccatatacaaaaatggcggcttgccagcaggagagtatattgataatgaaccagctatagcaaactgtgtgacattt

SEQ ID NO: 119656 - DNA, 420 bp, Glycine max
  Clone ID: PAT_MRT3847_79058C.1
attcggctcgagcactcacacacaccttttgaatcataacaagaaaaagataaacactccccagagttcaaagagcaagcactatttcctctgttgtgtcttttttcaatttgttttccctctctgtagcagcagcagcagcagtgatggaacgtgctcgcaggctagcaaaccgcgccattctgaggcgtctggtttcagaggcaaagcagcatcagaagaatgaatccgtgctgcactcttccaccacccccatgctgctctactcttcctccaggtgcatgtcctctgttctgcgaagcaggggatccaaaacagagacccttctgggaaggaacatcaacatgaacatgaacatgtcacgcggcgttgttgttgctgctgctgctggttttctcggcgttggctcggcccggtcca

SEQ ID NO: 119657 - DNA, 239 bp, Glycine max
  unsure (1)..(239): unsure at all n locations
  Clone ID: PAT_MRT3847_79059C.1
catgtgtcacaattgcatgacacagcttctccattcatgctcaattgaaactagcctttgcttagaatatcttggtttcatatatttcattagcatgatgctgcctaaagttcataaccgtaactagtttatacaggaatgccttgcagcaaactaagcagttcatcaggtttgtgtgatatatgattagattctatcgcagcacagtgttggaagttaatcatgtagttacaagcnac

SEQ ID NO: 119658 - DNA, 389 bp, Glycine max
  Clone ID: PAT_MRT3847_7905C.1
tcgcctatgcgcccgattttctcctatctatctctatattcaattcaatgatggcgctaaagaaaaccctagcccagcggatcataaacatcaccaacagcttcaattaccgcattgcctgctccgaagaccggtctccgaacccgacagatgccgacattggtgccgaccccggggacaaccgcaggatgctccacaagaggaccgccgagttcccgccggagctacgggcggcaccaccggtcgggaggctcctgcagaggctccgggaaatggacatgatgcagagcaggagccggcttgacgggctgactgcgccggagacagatcaactacaggcgccggaacacatgaggaaggtgatcagagcggcgcaaatagaaacggtg

SEQ ID NO: 119659 - DNA, 417 bp, Glycine max
  Clone ID: PAT_MRT3847_79060C.1
aacaggaaaaaaacccgttttgtttttctaattaaaaagccccccaagtttacattttaaggaaaattttttcccgtttcaattttgaaagaggcattaaaaggggaatcaaaaaaaaagataaaggctttggtgatgtttatgggcccccccaggggggattcttaaaccaaaaaagctttactttaaaaactccagctggcagcagggaaaagctaagcaagcaatctggagaggggaagggcttttacatgttggaaacccccaaggccatcattttacattggtcattcaagggaaaaaggggggccttttttttggcaagcaaagcactcaaccccacatttttttccaaaagtttttgaacttaagcctttttttggattttctcaccccccaaggggggagtttttccaa

SEQ ID NO: 119660 - DNA, 109 bp, Glycine max
  Clone ID: PAT_MRT3847_79061C.1
tcattttgttaagctggttgagtgccggttgcaaaatgttgtacagaacccaagcagtcgctggggtaacgccaaacagcaaaagctggcccctggtgtcactggcagc

SEQ ID NO: 119661 - DNA, 484 bp, Glycine max
  Clone ID: PAT_MRT3847_79062C.1
cgaaattaaagtactacatttacttccaaaagaagtgaacctctttcttctctgtgtgtgtgtgttctctaggccttttgctttgtaacatggcaagacaatcgttatcgatgggaattccaaagtccgggttaatgcaacggtgttcaaggcacttccgggagcagaaaactagattttacatcatatggaggtgcacggtgtttcttatgcggtgtgaggataatagaatttgatcggtgtcttgaaattaggggtaaaaacatagttttgagaacatagtgagtttttttttattacgctttgagtacacgcagagtggctgcaaggctccaattacacagtctctgccacaatatctgctccacaaagtggttctggagtgttacttactttgcctgtaactgtaaaagccatgtgtcagctcagcagcggaggtaccaaagtgcttcagttgttgataaacatgtgtagttagttactg

SEQ ID NO: 119662 - DNA, 389 bp, Glycine max
  Clone ID: PAT_MRT3847_79063C.1
ggctcgaggaacaatgccatgtacctcatattgttgccaatatttttacgggttttctatttggtccatctgttctgggacgttggaatgcttttatcaaaaacgcatttcctttcagtaacatgataccatttgaaaccgtgggagggatggtccttgtttactacgtgttctttgtaggtctagagatagacttgaaaccaataacgggatttcacaagaaggccatggttattgtcatttcctgcacaatcttcaccttaccaatagggtttggcttgtactacatgcttgtcaccgacatgtggcgcaaacctttgccccttgtcaatgctaggccaaagggtgcaatattatgggtgaattacccttttttgcagcagtgagtt

SEQ ID NO: 119663 - DNA, 451 bp, Glycine max
  unsure (1)..(451): unsure at all n locations
  Clone ID: PAT_MRT3847_79064C.1
ccacgcgtccgtaagagataaaggaacagaaaaaacgcctaacattatagcttttaatagtaagacatggctgcaacaccagttccatcggggtatctgatatgataaccactagcagggtctggttcgagcaacaacagcaccagggtcagtgggacggcagaggagcagacgaatgagtttcttaagcagtgaataggtttgcggaacgccggcctccgacctgggcgtgttgcgctcccaaacccatggtgagaccctgcttttttttgttgtatgttgacaccttattacgccacacacgacaccatgtcctatttcctcgctccaggttccaccaccaccggcctttgttaaactcttgaccctgctctgatactgctncgctcccaacattgcactgtcggacatactagaacttctacctctctcactgtgtgatgcgttgtgc

SEQ ID NO: 119664 - DNA, 433 bp, Glycine max
  Clone ID: PAT_MRT3847_79065C.1
acctggcgtaccgaccgggagacaccacgagcatagagcaggcatattcaccaccagcacttccggcctacaagccgatgacaacatggcataactctgagctatcaccatcctacccacagtgcacaacgcgccatgccaggagtggctgtcgaacccggagggcccgcatacgctgcatatataaatataggaagctaccaccttatcgggctcccactcggaattataacgggatgggccttcaaaagcggtgtaactggcactcgggggggcatgatttttggtggcacagcaagataaacgctgatactgacaatagtaacgatacgatgtgattgggaaaaggaggaggagaaagcctgctatcgtgtaagtaagtggacaaaatctaactccaatggcaatcgggaagcctgcaaaaaacatctga

SEQ ID NO: 119665 - DNA, 193 bp, Glycine max
  Clone ID: PAT_MRT3847_79066C.1
accagcaaagtagataccgcaaacgtaccgcgaaactgctgctctaatcaccaaagggaagatgcgctggctcttcatcaacgatcttgatgcatgagctggtcttcttgctggaaccactccatccgctgtaaacacccacatggctaatgccgccctcatgaacattgctgataaccacacaaatgtgcaa

SEQ ID NO: 119666 - DNA, 1191 bp, Glycine max
  Clone ID: PAT_MRT3847_79067C.1
tgtttttttttttttttttttttttttttttttttactttttttttttttttttttttttttttttgaataaataccaagtgagatgcaaatttcaccaatcagtgctaaagttcaaacacatacagggtcagctacaaaattatcaacaggttatatgcactttcacgcatcttcaagaacatagaacatatgactgatcaatttgcgaatattttagaaaataaaacttctaattcctacataattaaaagcttcaatgctcaagatggaagacatattctgtcaatcgctgcaatttactcggatcaagtttctgctctgtcacaacaggttgcttcttcacaataagcatctgagaggcagggtccacagtccagccttgctgcaaaacataatttgtagcatcatcctcattcattcccagaaataaagcagtgtctttaatgcttatcgtagaataagcagagagaagcagctgaaacatctcctttgtgtaaagttctgaaaatgcagcaactagggtttggagttcctgagtccaatcaaagccacggattgcctcgtgcactccggcatagtcacgtaaccagagcttctgaccaattttccaaaccgcggtgacttcaggctggctctctttgattgaggaaggtattgacttccaaagaaagcgcgcactattgatgtcgtgaacataaatgtgagagaggaggtgaattgtgtagggccaatcgtcctgataagcaatgccctcagctgcaacctgaagcatcaagttgtcgcacacatccgcaaccttgtcgtacgacttcgaatccaacgcagccctcaccgaagagaaatccatcactcccaattcctatagcagcaaaaaaaccaaagaagctaacctcgattaaaaaaaaccagttaacgcgagttgttttacgcaaccaaacacggcactaccgtagccatacggtacctcaattcgacgcgagtgaaaaccccccttctgtcgtcttctcgcagccgtaacgcagctctcaccgaagagaaatccatcactctcctcttcgatcaaatccctcgcccctcaattcgatgcgaagagtaaaaaaccagcttctgctcctccagccaagaagcaagatatagtatatgtcaacgacgtcgttcttacttgtgtctatgacagtgagaaaatact

SEQ ID NO: 119667 - DNA, 255 bp, Glycine max
  Clone ID: PAT_MRT3847_79068C.1
aagaaaatataccccagagagaagaggagggggcttttattccgttaatttgcccctttggtgacgcgttgtatttcttagccgcttcttcaaccagctctgtgcttccttcttctaccgtctccatttccatttccgcctgcaacattcattcagagctaggttcagtttccgccattgatcaatgctccctactctctgtttccaggttccaacctcgatcttgtatctcccccttgcctttcgtacgatcct

SEQ ID NO: 119668 - DNA, 746 bp, Glycine max
  Clone ID: PAT_MRT3847_79069C.1
tcgtaatcttttttaatattttttatgttttagaatattttaatttttaatttaataattccttttatgaacatccacatccacaacaaattaaataatcaagtaattaagtatatttttcccctaaaattgtgctcacttcgtataacccgtctctgttgttgttgttgttgtttttttttttggtgaatacccatctctgttgttgcactcaccggctatggaatttgagtctctccaacgacgtcgttcaagcagtgtcagtgccaaccagaacaacgcttctatcagagagaagaggccgaaacgcagtgaggtaatcgccaagaataaaaccattgaagaactcatcaaaacagcacgtgccgaaaaagaccacctcgctcctttccccgactttcgacgtttccacgtaaacggtctctctgtgtgtttgaagtcaggacatggcaataaactttcctcacctgttaagcattatattcagagtctccttaagctaaacatggaaggaccatatggatctgagtggccagaggaagaaaaggtgaagcgcaaagaaatggttttgcccgaagcacattatgtatttgtgcatgaggttgccaattcaaatgctgatgagatgacgacagtgttgactgcagcagagacttcaacttgtttggaagatagtggccccttggttggattcgtacagtatcgctttgttttggaagaagagataccagtgctttatgtttatg

SEQ ID NO: 119669 - DNA, 168 bp, Glycine max
  Clone ID: PAT_MRT3847_7906C.1
cacaaacctttgccggtattatatatgcatatgaagtgggcctcttcaacatgattcaagggaagagaatgaactcaatttcaagggcatttcctaccaaaacagatgtccttaaggacatttacaaaaaagataacattgatttatgatacacaagaactacactct

SEQ ID NO: 119670 - DNA, 349 bp, Glycine max
  Clone ID: PAT_MRT3847_79070C.1
ctaaaattattttttttgttatttttgttgttttttttttaatgtatattgagatgaccaaaacaatggtaatgaagttaaataaaacccccccacagggtccagaaaagacaatagatgaaccaataataggatgcagcaaaaacagtgaagcctcaacctcctctctagaaaaacaaaatatggggagcccaccgccaggctcatcaaacaaagaccatcttgaagcaccccaaggggcgagatccactctagaactcacatacagatggaccatgacacatggaaccctgggttgaaacctgagctcctaccggaagagagggagggccaagcaaagaccgtgacg

SEQ ID NO: 119671 - DNA, 290 bp, Glycine max
  Clone ID: PAT_MRT3847_79071C.1
gatctattctttcttacaagtatgaatatgaagatgcataatgacaacttacttatggcaaatactgaatgagttatcggagtgcaacaaatctccactacgcttagattttcactagtgggacaactcttattcttgtttgtggaggaagatcaaagtgcaaagtacagtagtactacatcagtagcttgtgcccaggacgtgaatgactaacttagtcacagagttactagcgtggctctattgcactatacgcatctcaaagtgaatgaccgaggatgtgttttata

SEQ ID NO: 119672 - DNA, 544 bp, Glycine max
  Clone ID: PAT_MRT3847_79072C.1
gtgaaagctttttgtttgggggcccatctttaatgaccatcacaatcacattcccaagatcggacatggaccaaaataatccgaaaagtagacagatacaatggtgaaaaggcctattgtttacacaaactaaaagtaaaattatataatctttagaagaggaattagctatgatctactggtcgcaataccttcactaaacataaagtaaataggaataagttgagaatgctcacataaaaatggcccatctatttttttagtgtttatttttctatttgctagagatatacattggatatgcagagcaaacaggactttctttgttatgttattcccatccaagtgtacttaacttacagattttaaagttgtacatgattcaaaaatccacgatttaagtgcccaacaataacaatgaaataaaaaaaatgccaatttagagaacgcctaggttattataaataattggcgatcgacaaattcgcctggcaacagagcagaggaattgtttccaattttaaccgtgttttcaatgcttttt

SEQ ID NO: 119673 - DNA, 364 bp, Glycine max
  Clone ID: PAT_MRT3847_79073C.1
acaagaaagggttaataaaaattcagttatacaacaagattgttctacagaaaactcatttttctgaacaatttcagaaagctaattggtctacagaaaactcatttttcttttgcataatacaatttaattctatctggcctaacataataccttatccgtgagagttctgagacattaacaaaatctctttctgaaccagttcaaatatttccttcaatcggaggttaaacttggctgttatgttcctgttgatcctctgctgaaacttagagctcttgagccacataataccaatgtaagcatcacacttgcatgcacagtcaccaagagaggatttctcaatttcatacctaaaatgaat

SEQ ID NO: 119674 - DNA, 333 bp, Glycine max
  Clone ID: PAT_MRT3847_79074C.1
gggcgattaaaaattaaaagtttaagttataactagaatagcatttttagcagttcttttaaacgctaatttggaaatacattgaaacggcgtgaaaatgtagaaaatagcctataacaaataaaaggaaaaggggaaacaaacctctgactaatagctctagcgaaaaaaaggggaaattaattaccttcaaaaagaaaaagtcaaaacttcaaaaaaaaaaaaaaaaaacgaactttgccttgtttgcgggtggcatcatatatctatgtatttgaataagtactattcccaggaacctattatattttccaattttagcctcccaaaaca

SEQ ID NO: 119675 - DNA, 429 bp, Glycine max
  Clone ID: PAT_MRT3847_79075C.1
ctttcgtgtgcacggccgcggggggagcggacacactgatacaatacactccaataagttacttgttgggagttgctgctagagagaaaggctgcttaagggttaagattgtgatgtgtgtcaatgcgacaaggcaagggagtgatcgcaactcattgctgcatggggtgataacaagcagctgcaggacacagattttggatacatgtaagttgacaaactagaaacgactttgctgggaattgaggttgctaatcgagggaggtggaacgatcactgtcttatagaagggctgttataagctggcgtgtctaccatcatggagcttgagttgtctcattggcaataccagacgatgtacgcttctggacaatctgttgataatttcctacgattgtgcaatggctggtaatactctcatggcacctg

SEQ ID NO: 119676 - DNA, 531 bp, Glycine max
  Clone ID: PAT_MRT3847_79076C.1
gggagttcggctcgagctagtcaacaaaacatatatacaacatagttctcttcctagtcttttccttaaattacaacaacttttcaatactcaatctacttaatcatatagcaataataacagctatggataatactccaagattgattcaaacggtttcaagcttggttctgattctaagcatttcatcattggcctcggcatctctgaaagtgggtttctacagctcaacgtgtccctctgccgaggcaatagttaaaagcacggtagaaaaagcaatatctgccaacccaggcatagctgctggtctcatcagaatgcatttccatgattgctttgtcaggggttgcgatggttctgtgctactggcatctacaccgggtaatccaatatctgaaagagacaatttcgtgaacaacccaagcttgcgcggcttcgaggtgattgaggatgccaagaaccaaatagaggctgcatgccctgaaacggtatcatgtgcagacatattggcattcgcagcacgagacagtg

SEQ ID NO: 119677 - DNA, 271 bp, Glycine max
  Clone ID: PAT_MRT3847_79077C.1
ggtgcactgtgtctgtgtgtacgtatgactttttttttgggtgaatgtgtgtatgagtgtatgactatgttttacgtaaaatacgttaattccttaaccttcatcatgtcactctggttctgcaacttgctgaatttgggaacctttttcttcttggataagaagacttcttggttttcggaattgctattaagggcataacaaataaagtttccatatacggccaagaataattttacaaaacagctgctaccactccttcgaggctttt

SEQ ID NO: 119678 - DNA, 1130 bp, Glycine max
  Clone ID: PAT_MRT3847_79078C.1
tacggctgcgagaagacgacagaagggatatgtaaaatgtaacatgaaaaaattaaaataaatacatcaagcaatttaaagagacctaaaattcaatgggggcactgaaaggaagaaattcccaagtgtacccaatatgttatatctttactatggcagccatataggagttcacttgcatcccagatcaaaactaatacctattcatgctctcaagagaccgaacctattaaactcataactgggttaaatagcatgcctatttcctgttgtttgacttctattcagtttgcaatttcccattaagtgctggttgctacaatcttatatctttgcaaggctccttgtgactttggttttcagcgtccggcgagcgggtgcgtgggcattgcttccgcgatcagcttcttcgtcggttgtgttagggtttccgaagtttcactttcccttcgtttcttctcactcaccacatttcttcatcgcaatgcgtttccgagaccgataattgacactattcaacgcaaagtcgcagttccatcatagttttgtttcgcccaactcgcgaaatcgaaagctttatctacacggcacgacgcgttgttcctttgtgagaagctggagatggcgagaaaaactagtaactgtgccatatgcgagaattctaatcaagcttccatttgttccatctgtgtcaactacaggttgaatgagtataatacttcattaaagttactgaaagaccgtcgagattcgttgtactcaaaattgagcgaagttcttgtccgcaagggaaagggagatgatcaagcaaattggagagtgcttcaacatgaaaagcttgcaaggttgaaggagaagcttcgtcagggtaaagaacaagttactcaaggaagagctaagatagagactaagtctgccgatctgaaacttaaatatgggttgcttgaatctgccctttctacgctggaaaagaatcgagtggaacaattgggagaaattctatcctaatcttatttgcacccagagcttagggcatgtggctattacctctgagcgtcttataaacaagtccgtggtcataaaacagatatgcaaagttgttcccacacgcccgggtggtcatagaggga

SEQ ID NO: 119679 - DNA, 263 bp, Glycine max
  Clone ID: PAT_MRT3847_79079C.1
tcgagctcgagccgctcgagccgcaaagcgagagcgtgtgaaaactataactcgaaccaaacagagcgcaacatacccgacgtcgtatgatcctactccacagcccccggggtcgatgactgcagagcagctctgtcaatctgtcacaggaggggaacgagtgcggtgcacagtatagcgtcaggggcttacagaattgcaggacttatgaacgagatcatgatcacatttggcgtggtctatacagtataccccctagcagc

SEQ ID NO: 119680 - DNA, 1153 bp, Glycine max
  Clone ID: PAT_MRT3847_7907C.1
atagatagttagaagaagggaaattaacactataattaattaaagattagaggatccatgaaagatggtggtagaaagcagggtgcaccctcaccctgtgctgcatgcaagctccttaggagaaggtgtgctcaggactgtgtttttgctccttattttcctgctgatgagcctcagaagtttgcaaatgtgcacaaagtctttggtgccagcaatgtcaacaagatgcttcagggtatgttcggtataaagaaaaaagaaagagagagagagatcaacattggagactagtgcgacgctttccttcaccataaagtgaatctttcacacattaaggacttagcagagcatcagcgaggagatgcagtgagcagcatggtgtatgaagcaaatgcaagagtgagggaccctgtgtatggctgcgtaggggccatctcatctcttcagcaacagattgatgtgttgcagacccaattggccgtggcacaggctgaagctgtgcacctcagggtgcgccaaactgcatcactctacagccccactagcccaaccaacagtggctctccatcacaagccaagcctatttttgacatggacatggtggtggaccagaacagctatggtgattcaatgtggtgatgctactagttaatttattagtaatataaaactatactagtatacctacctagatcatgaaaagatacaaaaactaaaaattaaggtggcattattttctcaagttgtgccttctatatacttttactttatagtagggtgagaaatgcacaatcaacccattctttaatacattctttttaatatattctttgttattcgttaaaatttattagaacttacaaagacttacaggattttggtaatttctaattaattttaaccaataatataaagggtgtttaaaagaatatgtttgaaagtgtgttggtggcatttctctttataggatagatgtagaactctagaaacagtggtggctacgggctgcggcggtgagactgaagagagctgtggcggaggccgttcgcccgcttaatcaatttggttttgagcattgatttctcattgacgacatgttgtgtatatattattatatatctatgtcacttgacattaagtgaagggtttggtt

SEQ ID NO: 119681 - DNA, 397 bp, Glycine max
  Clone ID: PAT_MRT3847_79080C.1
acgcgtccgaacagatatagtgcaaacttccttttgtcatatgttctgaacaacttttactagcttaccaacatcagggagaccatccttccttataacaaatgttcgtttcctctcatgatctagcaccgcaattatgtttggagagctaagatacactcgatccacctgccaggaaggaaggatgaattttgaaaaactctttattcatacccttcattattacaaaacctaaagactttagtgaatttgatatgattgacaaaactgcataggctagtattatggtgctatagttaccacaacttgaagcaaaagcttataattgcatcacggaactatcaatatctacatgttgtaaacattaatataacctggagagatttacctcagattc

SEQ ID NO: 119682 - DNA, 261 bp, Glycine max
  Clone ID: PAT_MRT3847_79081C.1
cccacgcgtccgctaggtgctctttgagtgcagtggttacaggataaggaccattcatgtcgagaagcaggttataacaacttgaaacgcctggctgaagaatttggcactgggtggtgctatgcagcacatatttgcttaggagccggagatgaacaacagcccacactatttgcatcgaatgactattcgatgagctatctctctagctgcttttgtgatgggcccttaatttacgtgtttaaacttgttaccagttgt

SEQ ID NO: 119683 - DNA, 288 bp, Glycine max
  Clone ID: PAT_MRT3847_79082C.1
ccgggaaatcgtcaatcgatgtggctctgaataaatgcacatagagaaatttcagtacgatattcaatttcagcatcaccgctgagagtatattccttcagagagtattagttgggccttttctgtttgttcttctttgatgcattcctgttttgagaaaattttgtgaggccttctctgaatgctccaagatataccccatttgtaaccaaaatgcttgatgaggcctgtgattgccactacaaatcatgttacatatataataaattgataattcttcttccgacc

SEQ ID NO: 119684 - DNA, 417 bp, Glycine max
  Clone ID: PAT_MRT3847_79083C.1
cagaaaaaaaatggaggctcctttggttggtttaaaatccagaaggttttttttttaaaaaacggttctgttggaaggaatatttttaatttaaattgggggggttcacccagttacccttcaaaaatcgggtttttttgaaaaaatttttgaccaataaagggttatttatttgggcaagagttttttttttttttttttgaagacgggaaaaaacaaaccttgtaaaacccaaataaattcgggaaacttgggtccttcgttgtttttggggcaacaaccttgattaaaacggggatttagggggggggggaagaaaaaaatttttacggttaaccccaaagggccttccttgggaggggaaaaacttttgaatttttgaaacgtttccaattttttggaaacttaaaccttttt

SEQ ID NO: 119685 - DNA, 277 bp, Glycine max
  unsure (1)..(277): unsure at all n locations
  Clone ID: PAT_MRT3847_79084C.1
aagacattatttctgaatcaaagtttttcctggtataaattctcaaccaagggtataagcagaaaaatgtttcatacccttaatccttagtatgcagaattcttcaattagctttgctgatgcatcattaatgaagttctatagaatgttttatttcagcttgagacatcaacttcttttcattaaaacaaaagaatcgcatganattttttcttagtttctgtactctaattcatctccgttagttttttatggtgggtaaataagagtaagatct

SEQ ID NO: 119686 - DNA, 237 bp, Glycine max
  Clone ID: PAT_MRT3847_79085C.1
tgaaattctttctaaggttgcacaagatatggttgaggaatggtttgattgcgctgatgaggaggatccctttgtggggggacactgatagaactctgtcaaatattttttctgcacaatctctctcttgtacattgtatactgtaactgcgctctattatcctcagtgggctccaatttatattctggctctatttacaaccaatttacatttactagaggagaatttttcacata

SEQ ID NO: 119687 - DNA, 255 bp, Glycine max
  unsure (1)..(255): unsure at all n locations
  Clone ID: PAT_MRT3847_79086C.1
tttttttttttttttttcggtaaacacattgttggtcacattattaaaccccgttgggtcatgtacagggaaacgtctctattgcaaattgcaatgtgtaataaaaaaaaataccaaaattgcaaaaccaaaccattaataaacaagtaaaaaatcaaancacaagtagaaanttgagaacaaaaaatagtagtattcatattttatattacataacccaacanctaaaacctaacacagactctaaacaacata

SEQ ID NO: 119688 - DNA, 294 bp, Glycine max
  Clone ID: PAT_MRT3847_79087C.1
aaatcatccgaaagcgaaataaatgaattaaccaactagcctacaaaacaaggctcgattaagctgattgcatcgcacctccttaacttgtcctttttctgcttcttggtatgtacataaaacgaactatcgactgaaaaacgaggcggggtgcatggcccgtgcctctcatgttccattaagaaaaccaaaccactaaagataaacaaaaaaggtaccagaacacaaccgttgcttctctacttaacagacagaaaccgatagaaaaaatttctgctacgagcatgtggtggt

SEQ ID NO: 119689 - DNA, 450 bp, Glycine max
  Clone ID: PAT_MRT3847_79088C.1
aaaaaccttggcccgcatgatcggttgatccatgtttatcatttcttgaaagacacaactcaaaatcaggtgttttcctctaaatctgtctaatatattaatatttttttctttctaaaattactaccttaaaattttttctaacatttgtactttcttttcttttgtgttggtgttttttgaaaacagcagcaagttcagaactttggacatccttttttattggttatccatgagggtgagacattaactgaagtcaaattgcgaatacagaaaaagttgcaagttccagatgaggagttttcaaagtggaagtttgcatttttgtcatttggtcgtactgagtaccttcaagattcaaatattgtttcagctccggttcagaggagggatatctacggtgcatgggagcaatatctcggactggaacacactgacaatgctttaaaa

SEQ ID NO: 119690 - DNA, 493 bp, Glycine max
  Clone ID: PAT_MRT3847_79089C.1
ggcagaagttcgcagcagatactgggaaagccaaggacattccaatccccaatcttcctcccttggattttccatctccagaacttcctcttatggagctctctgaggatattctgaaaggatttatgaataattaaaatggaaggccacagaaaaggggaaaagaggaaataataacagtaatcgttaatccagcaaaaagaaatgaaaagggaaaaccacatagaagggtaatcccgggaatgcttcatctggtggactgtgggagcagaggcattgccaggacttgggaaacagtcactgtgaaatgcgctgcgtatctcattcactcacttcagctaatgattccgacttggcagacgctaaactcatggaggttcggtttctcctgatacaaaccaaatggctacctggaagaatttctttcaagcaacagttatttttcttatcttcagggttaaaatgtataaaagttatgtgtaattaatctata

SEQ ID NO: 119691 - DNA, 525 bp, Glycine max
  Clone ID: PAT_MRT3847_7908C.1
gagaaaagggttttgtgcctagtactagtacttttgtgatcattgtttgtagtctcgcaatggagcgaaggttggaggatgcgatcgagcttttgtttgatatgttggggcagtctaggtcccctgatcatctcacttacaagactgtcttggaagggctgtgtcgcgagggaagggtcgatgaagcgtttgagctgcttgatgaatgcaagaagagggatgtttccatgggtgagaagacgtacaagagtttgttgaatgacttgtatgttatatgccgcgagtagatgctgttgagctaaactgctaatgcatttgcttgaagatgcaccatacgtttcttttgtatgagtggaactctgttattctcctgctttgcagagcctgatattagaaggcatattcttctgaatgacagctaaatgcagattagtgagcattttgcatggagaattgctctcgaacttcttttgatagataaatatgggggattcctgagtctattatacatatgatatactatat

SEQ ID NO: 119692 - DNA, 171 bp, Glycine max
  Clone ID: PAT_MRT3847_79090C.1
gagggacagggaggacaggatgtgaagctgcgacattttgtacgcgaaacagacccgctaccaagttgtactgcagacatggacgatacgggtctaacggtatcgccaagaatctttgtatgggctacaacagtcgtatcagttggtgtgtagcactagatatcatatata

SEQ ID NO: 119693 - DNA, 701 bp, Glycine max
  Clone ID: PAT_MRT3847_79091C.1
ggagcgttatggtaaattacagagccacgttgatgcaaacataagaaatagaagagaaatcaaaccagcactttgtaacatccactccctccctatcctctctctctccttcacattttctctctcatccatttcaatggcttctgcttccatttctgatgcttctctctccaccaagaagaaaaggggtttgaatttgtattggcatagttgcgggttcagattcacatagaaggcattggtcatcagttggaaaagcaactaataacaaggtcaacacctagcaacaaaggagcgacaagaatgagaagatcacaatctatcattactacttaaaagaaagaaagaaatgcaccttgggtggcaggccagataatgttttgaagagttctacaccggagacaaacaatatgcatctcggtcgattaaagaagatgaaagttggaatgattcatatttcaatgtattcttttgttattagtttttggtttttaattttacatttttttatgggaaattaaatcagaatggatgttgtatacagaattaggcacctatatgtagtgtcataaacctattaattactccatctcatctcatcatctttcacttaaaaaaaaaaaaaaaaaaaaaaaaaaaaaaaaaaaaaaaaaaaaaaaaaaaaaaaaaaaaaaaaaaaaaaaaaaaaaaaaaaaaaaaaa

SEQ ID NO: 119694 - DNA, 286 bp, Glycine max
  Clone ID: PAT_MRT3847_79092C.1
cccttttctacagctgcctcaggatcttggagacaagtctcaaagcgccttgctggcagctatacatgccaagcacttaatggatgcatttgttatatgggcatatcaaactatgcatgttacaacggctgtatttgtgattgactttgccatcgactaacgctctgagatctgtcgcactggtgcaatgtatatcgagaccttgtaaatgcctactatattattgagcacatgatgaagtgagttgccagaactactggcaggtacctgcgcttgggaacatcag

SEQ ID NO: 119695 - DNA, 374 bp, Glycine max
  Clone ID: PAT_MRT3847_79093C.1
gtattatatttgtatcacatataactatttagtttcaaggtttatgaatgataaaatatcaatattttttagtccaaattaatattttaatttgaaaacttaaagtagaattaaaaaatataaaatatgagttgcataattttttgtttatcatttgaacaaatttatgcattgtttaggagaaaaattatagatgagttgtttaagtatgatgtgatattggggggactactaaaattattttaatataacataagataaaatacctaaatgggaatataaaagctcttataattctaacaagaatatatttaataaaattatatgttatatattctaggaaaatcaccaacacacgttcattattctgacat

SEQ ID NO: 119696 - DNA, 376 bp, Glycine max
  Clone ID: PAT_MRT3847_79094C.1
gacattcttgatctctgtctatgtatgtacgatagacagcgggatagtccataaaggtaacagttgcatacattggagcttctgacaatgctggtattgggaaaatcaaggctactgttcaggagaacgcatatagaactacttcccgtgatccactgtctagcagacttgttgacttagaagaaagaggctcagatgatccatgcgaatgtggacaagcgcgtagcgccttagataagaacagaggtggaaaaggctgtcatggcaatgcacatgaaacaacccatggagatcaatcagacgtgcgttatggccaagaatgtatccggacaggccaaggtccatgtcaccgtcggagtggccggatcataaccta

SEQ ID NO: 119697 - DNA, 815 bp, Glycine max
  Clone ID: PAT_MRT3847_79095C.1
cttgctagaatgtgctaccaaggcaatcaaagttgctacagactcggagacagatactgcaaataagtgccatgtcagtgataactttggaaggtctggggttattgtttttatgtgtgactaggctcaaaatatttgttactaccaatgatatttattgatctcatttcaggcttattctcaccactaacttatttcttctcaagaaatggatctcacatgttggattaccagcttgctcttcagcgatgcgttagaaacgatactgatgaacgctttcgggaagaaagaaatagggcattcatttcaaagtggctaagaagaccgttgagagtatatgaaaactttgatttgtcattggagggactaaaatctttctttgagaatgccaaggaacattatggcataaatacagtacgtgccacacagagtttgggtttaaatggggatgtcgtataaaacaaggatcagaatgcatggttcacaagaaagaaaaaacagaagctagaaaagtctgattttcagcactgtgtcaaggagttaaggattttgtcattctttatgcctttttcaactattaatttgtgaatgcatttttcattttgtaatttggctgtttcagttcaacaattttatagtatttaagattagggttgagggttgagggttgagggttgagggttgagggtttcagggttcagggttcagggttcagtgttcagggtttgagggttcagggttcagggttcaaggttcaaggttcaaggttcaggattcagggtttagggtttaccgtttcgcgcttccactctaca

SEQ ID NO: 119698 - DNA, 200 bp, Glycine max
  Clone ID: PAT_MRT3847_79096C.1
tctgtcatgagaccatatcacttgggacgcctttccacatgcatactctcgcatcatacattttacttccacaaattcctaccaattacaacctaacccttgactacgccaaaattcaaaacttggttacacttcttccttatcatcttctgttgcccgatcttctgcctccaatattatattatatgacattgatcacc

SEQ ID NO: 119699 - DNA, 396 bp, Glycine max
  unsure (1)..(396): unsure at all n locations
  Clone ID: PAT_MRT3847_79097C.1
tgcaccgtactcggtccgtgaatnntcccgggtcgagcccacgtcgtctcgtcggcttggtcgagaagaaacgtacagaaggggggccccgcagaagttgaagttcgaacggaaaaaagagagcctcttggagaaagtcctaannaaatcccaacccggcagaagggtaagggaaggaccttgcnttaaatctgatnaccagaaagaagagaaccaaagaagggcttaatannaacctgaaagaaatctgttttctccaatgtgaataagtgactcaatgcannaagaacataaaannnacctaactttaacatcnnagataataccaaggggatgtnnctgatcatnnntgtttgaaagaagcccagcaannagtagaaattctagnnntagtag

SEQ ID NO: 119700 - DNA, 276 bp, Glycine max
  Clone ID: PAT_MRT3847_79098C.1
cctacatgtgatatgttatgaccattttaatttctcgagagcttccggtgtttaatttcgagcgtcttgatattttatgtgccttaatctcacctccttaaaaaagatatgaccatttcaatttctcgagagcttccgttgttcaatatcgagcgtctcattatattatgcacctgaatctgaccttcgtgtgaaaagttatgaccatattaacttctccagagcttacgtttgtcaatttcaaaaatcattgatctaagagttccgttcataaca

SEQ ID NO: 119701 - DNA, 1193 bp, Glycine max
  Clone ID: PAT_MRT3847_79099C.1
gtcccaacctaccctttaaccttacctcaacgaaactgtatggctggaaccgtactcgtatgattcaacagtagtagagtaaccgtagcgtagcatcgttgctttcgcagtacttcaaatggccgagaagcaatctcagagacagaatcacagaaccggagagaaagagaaagaaagagagagagaatttcattgaccgccattgaagctttgcttcttctatctctcactcataacaaaattccccacacacattcttcattttctcattctctccaatttcaacactgtcacggttcataattcttccaataaagacaaaatttgaggtgtgtacggttcaattggaccttctacgctgcgttttgttcgctcaatggaccaagctccgggaggattgcgcggatccgtgcaccacggcgccacgctcgagtcaattcaattcaacgaagaaattcagggactcatggcgccggcgccgcgaaaacgaaaacgcgagctcgcgtccgcgacttcataaatagatagcgattggaattgttttctgtctttgaatgggatattctgaatttctgataatgaaaatcatatggggatcttggaaggatacttattgctcatagataataaattacgcattccagtcgcttaattgaaattacaaatagctagaaaggagttaattcaaatacaacatacaaaggactgagatcttttaaagtttttttttttttctggacaagaaaatttgaaatgtattcaagttcaatttaaattgtgttgcagcttctctgcactcaaatcaattgaagatggagctctgaaagcgtacagaagtcgtaccagtagctattagcctagtagtgtatatatcaaatatagtatttgcagttagctgtgatttgagtggtctcaactctccagatttagcagggtttccatgtcttctatttgtcagaggcggttggaaacctggattttctttggcccggaagtaagatgaataattggcatgctattcttatataaattactatgtatactaactatagggtttattcaatccatgaggtgattgattcaagattgtaaaatcatagaacggactgttactgaactattatcatgggagtgagtgctttgttcattaaatgctactcttagatgattggctctttacgaggattttcctg

SEQ ID NO: 119702 - DNA, 251 bp, Glycine max
  Clone ID: PAT_MRT3847_7909C.1
cgtacactctcctcgtgatgctgtcgttgtctggatcgaaggcgtctttgtggtgtacgccgtcgtgcgcatcttaagtctcgtgttcgtgctcgtcaaggtgtccgagacgaatggtatgcctatcgaggttatcagcgagttcttctctgttgtgggaaggcaagctaatgaattggaggatgagggcaggtaaagttgatcacctcggaggccggactcagttagcgacagcggttatggggattttt

SEQ ID NO: 119703 - DNA, 282 bp, Glycine max
  Clone ID: PAT_MRT3847_790C.1
gctcggattcggtcgggggaataagataggataaggtgtcgcgcatagatcatgaatgtatagtagacaggaactgccactgtatgccatttcgatgattgttttgttgtcaattgctacttagaattccttggtggccagtaacaaattaaaacaaagagagaaaagattgaaggagggaggggataataacaatgattctctacagataattacatgtggatggccaggcttggtctctatccatttagaggactgtggagaagtaacggctaatggggc

SEQ ID NO: 119704 - DNA, 281 bp, Glycine max
  Clone ID: PAT_MRT3847_79100C.1
tggacacgggtgtgactgtggtgcgatatcagtcaattcgcagctagctatcacggacatgagcttgcctatcttctgagacctgaatgcgagtatgagggacatagtgtttcttccattcaccgattcctcacttgtcactcccttccatgccaggacccattgcacttcatcctctttctcgattgaggaataatggagatgtcaatagcttacatgaacagatgtcatagggtcacaaaaatgtggacatgtcacagtccatgtgtgatgaagcccag

SEQ ID NO: 119705 - DNA, 272 bp, Glycine max
  Clone ID: PAT_MRT3847_79101C.1
aaattataatttttttttttttctttatttttttcagtttcttgctgtctttttttttttttggaaatgaaacggggatagcaatgccacaatcatgttcatagctgtttccggccctttttaaatttttaacacaaaaactttttttaaacataaaattaaaaaagggtaccaaaggggtttccaatatttatgcgttttgtttaataaatgaaactgacccctctcagaatttatgggttacttacgctgaaaaaaaaaaaaaagggggg

SEQ ID NO: 119706 - DNA, 270 bp, Glycine max
  Clone ID: PAT_MRT3847_79102C.1
ctcacgcattacctctcaccttaatcctcagctaatactttcaccataccaagctataccacggacgcttctaactatgtctgatcctcgatcttcacctacggattaacttcaacctatctatctcacaaactataacaatcatccatcaaatcaatccgatgcattataacattcgctagcacaactagagattgatctactagagtgtgcactaaattcaattgactgatcaccattagtacttgatagcgctcgcataaactcaag

SEQ ID NO: 119707 - DNA, 985 bp, Glycine max
  Clone ID: PAT_MRT3847_79103C.1
atcgtacggctgcggagaagacgacagaaggggaccctagattgttaagagagctggttcgtcatttttcgtgcctcaaatctttacaatcgataaccacacccatcgcctttattcagaatgtcggaatcaccattcagaccacgagaaaagcttgctgagaagcaaaaatattttcagagtatccacaggcatacctacttgaagggacccatggataagattacatccgtggccataccactggctttggctgcaacgtcaatttacatgattggacgagggatctataatatgtcgcatggaattggaaagaaagaataacctgggaatttctgattgaggagggtttcccacacaaacctaccttagcttcgttaatatgggccagtggttttctttgcatttatgtctgttctcttaataaattgcttagttgcagattttgactgccattgggggtttataacttgaatgaaagttgttctttgtatgtttgatataatcaaattgagtgaattggctcaaactgctgttttctgtttctggtttagtacttgttccgtgttaactgttccatctaggttatgcttctccttgctagacaagctcactggtttttcttatgctttgataaacatttcaatttgccttatatagcatgcatggtggatagtccagtggaattgccttgtgagacgttgttgcttgttttggtccttccatgtttggggtttgaaggttgagggccttaaactataggtggtgataggaacacgtgaaatggacaaagaaggtggatccaagtggtttggatctcatagcatttgtatttatttttcttgtttggtcttcaattggagaggccgccaccacaaacaatggctcgggcaaatgcttcttgtaggttttgcactttcccaatcgttaatacgaatctgcaacatataaatattttttagtaaaaaaaaaaatcggcacgagg

SEQ ID NO: 119708 - DNA, 625 bp, Glycine max
  Clone ID: PAT_MRT3847_79104C.1
ttcgggcctagattgttaagagagctggttctgcatttttcgtgcgtcaaatctcacaatcgataactaaactcatcgcctttattcagaatgtcggaagcaccattcagaccacgagaaaagcttgctgagaagcaaaaatatttccagagtatccacaggcatacctacttgaagggacccatggataagattacatctgtggccataccactggctttggctgcaacatcaatttacatgattggacgagggatctataatatgtcgcatggaattggaaagaaagaatgacctggaaatttctgattggggaggtttttccacacatagcctccttaacatggactagtggttttctttgcatttatgtttgttctcttaataaaattgcttagttgcagattttgactgccattgggggtttataacttgaatgaaagttgttctttgtatgtttgatataatcaaattgagtgaattgcctcaaactgctggtttcagtttctggtttagtacttgtttcatgttagctgttccttttagatgatacttctccttgccttccgtgcgctagataagctcaactgtttttcttatgctttgttaagcatttcaatttgcc

SEQ ID NO: 119709 - DNA, 346 bp, Glycine max
  Clone ID: PAT_MRT3847_79105C.1
ggtggggggctttattgtgttttttttttttttttttcaaaaaaaaaaaaaattcggggcccctcagttttttcaaccccaaaaaattttttttttttttttttaaaacacgccttttttttttaaggggcccgcccccccaaaaaaattcccggtagaaaagggctttaaactaaaaaacagggaaaattggttaggccccttggggatctataaaaaccgggatttgaaaaaaatttttcttctaaacccaaacaagggggtttttttaagctgggcgcccccggggttaactctcctcttttgggggccccccttggcgttctattaattgggggttcttttt

SEQ ID NO: 119710 - DNA, 234 bp, Glycine max
  Clone ID: PAT_MRT3847_79106C.1
ttttttttttttttttttttttattttttttttatttctcttttgctcttgttttgtagaatgtgtcgtcacaatagctgaactcttaacgcacatgatccttatcactgtcaggtacaggattaccaaacaattgagtttggggacgcacctaattgagatccctatgacctcccacactgaaggtgtcgttaatgtctgaacgctagccagtcctgagatcttcagcctcgc

SEQ ID NO: 119711 - DNA, 522 bp, Glycine max
  Clone ID: PAT_MRT3847_79107C.1
cattgaatgccacagaatgaatggagggaatcaccatatacaagttgaaacgaaaaaaattataaaaataaaagtaaggtaaataattaacactgaatacaaattggttcttggggatgaggttaacttatagagaaacacagactccaacttcagtaatgacaatccaccaaagaagactgcttagagaagacaataacgtttttttctctttgctgaaacgaaaacttggattctctatgatcatcctctggtagtgctggaagattcaagtccaacttcaagggtttcttggcttcttgaaattcattgttaccaccaacaccaacaacatttccaccactcatagaagttgctaaagaagcattcacaagagttctgtggcgcctcatgtggccccccaaagcttgccctgatgagaattcagcaccacagatagaacactcgtgaaccttagcctttgttgttgttgttgttgtgctacacatattatttttaaccccatttggtattttcaaggag

SEQ ID NO: 119712 - DNA, 532 bp, Glycine max
  Clone ID: PAT_MRT3847_79108C.1
ccaatcataggacatccttgttcattgtaatttgaacaatatataagaacaaagtcatgtaaaagcttacataataacaagtaaaataaaattaagaggccgcctaagacaatggtcttaattgccttgcactatccacgaccttgtctaggacttccactaacataataaacttattctaacaaaccataatcataattaacttgggaaggattaataacttcaaaagaacaacaacaagataacaaaacacattaattatttatttaattttcccactactcattaataatgagctaactccttattaattggcacactaagaggttggaacccatgttgaagagttgaacgccaaactttgtctatgttatgcattgggtagttgcactcatgttcactccatccttctaaacagtgcactatcccagctatgcgccatgcactcattaccttccttggcagccaattctcacaagaatggacattttgaatagaactgggaactaacattgctgggggtgaagtggta

SEQ ID NO: 119713 - DNA, 481 bp, Glycine max
  Clone ID: PAT_MRT3847_79109C.1
gatcaatatgctgcttgacctcatattccataattcatacatgagccgcacacaatgtgcaaaaaaataatggtgctagctacttgaattctgagcctaggctacagaaaacagcaacatctaaatttaacagtcttggcgtcaaagtcaaggcactttgttatctattcagcatacactatattgtggttcagaaagagatgacatcatggtttggaggatgctgcttatttgactagagtaccccaccggatgctcacccatcttaattacacatacttattgcctgcagatcttacatcctgtgactacttgatatctgcctcaatatcgggtcttgatccaggtgactgccgactcaaaggagagcctttactatgaaccggagaatagactggatgttttacagcaggtatcctctctgaatggggctgaattggttttaatgaccgctgaagaacctcttgagcaccggtgagga

SEQ ID NO: 119714 - DNA, 346 bp, Glycine max
  Clone ID: PAT_MRT3847_7910C.1
cttcatgcggcgtcgcagtctgtcaagacttgaggaaaatgagaatcttggggtaaccccgtttgagaaaaatgttgatatctggagacaggtttggcgggttggttttcgccaagatttgcttgttaagggtgtttgattccgagaaccaattttctatcgctggccttaacttgaagcatatgcacgagatggttattagcataaactctcattggtcttgggtaattagggagatcttttaccagcttgtgtgacagagaaatgggtagaggcttttcatgctcataatatcctatatatctcctggtcagcttaagctggttcagcatttgtcgaaggtaaa

SEQ ID NO: 119715 - DNA, 234 bp, Glycine max
  Clone ID: PAT_MRT3847_79110C.1
tcggtacaagcattcgggttctcatcactgaacatttgttctgtcatgtgagtgagagggtgtcattcaactggggtgatggatgatgataatgatggtggtcttagagaactagatactagagtctagagtgtttctttctattcttttttttttcttcttaattttggtttttaggattccacgggaacttttgagatgtttttgtgtttagtgaagaaaaggggggggggg

SEQ ID NO: 119716 - DNA, 171 bp, Glycine max
  Clone ID: PAT_MRT3847_79111C.1
atctttcaattatttaatatttttttcttaataggaaacaagggcccataatttaataaagccccctgggagaaaaacacattgggattttttttattttatttatttaccaatctctttaataacataaattgaagcctgggcccttatttagaccccttctatttctta

SEQ ID NO: 119717 - DNA, 506 bp, Glycine max
  unsure (1)..(506): unsure at all n locations
  Clone ID: PAT_MRT3847_79112C.1
ggagattgnnctgtgtctgaatcgncganngtgcctggttcatgagcaagttgataccatgccaaaaactcgctcctgtactcctatcagactnccagaacacagctttgcgctcctaacagggnatcatcaccgtatccccgattccgtttgattcttacttttcattcttgtccgcgcaggaanncactagcttgaatttttacacctactcataatgtctagacaagctacttttttttcagtacttccttccctggatgtcttgccaccactcacccgcctgtctttgactcctgtactgtatgcccccttgctgccataccaatagacgcgctttactnngtgtgttattcaatcgccttccactctttgcatcatactgacttgatcggctatcgcccacaaccacgtcgcgccaccacttgatcttctgagaaaccannaattcccttcaacttgccctctgattgcnnnttgctagactcttatcttngtcgtaggac

SEQ ID NO: 119718 - DNA, 1394 bp, Glycine max
  unsure (1)..(1394): unsure at all n locations
  Clone ID: PAT_MRT3847_79113C.1
ggccataccacaccacaacacaacgcgggcgctccacgcgtcctctttctcccattatccatttagagaccccaaatggcctctgccaccactctcttcacccctaaccccatgttttcaactgaacaccactctctctctcccatctccaaccattcccaaatccttcactggcctctgcaagcccttccattcaagggtccccacttccatcccctccttccattgcagaagacccaaattctttgtcagggccactgttataaagtggagatgtccaaagcaaactatccctcccaatgataccggttttcaaaagaaactcctgtatctggaatccatcggtattgactctttcttgcttattgaaaaccatccaacagtgatcacaacctctcttgctgacataagatccaccgtggagtacattacctccttggatttcactgcaattgagtttcggcgtatggttggcatgtgccccgagattctgaccacccaagtctcagacctcatacctgtcttcaccttccttcatcgtgaggttcatgtgcctggctcggatattaagcgtgtaataaatcgtcgtcccaggttgcttgtcagcagtgttagtaagcgacttcgtcctaccctgtacttcctccaaagtattggcatagaagaggtaaacaagcacactgacttgctatcatgtagtgttgaggaaaagttcatgcccaggattgattactttgagaatattgggttttctcgccgtgatgcaacttcaatgttccgaagatttcctcagctattttgttatagtattaaaaataacttggagcctaaatacagttactttgtggtggagatggggagagatctgaaggagctgaaagaattcccacagtatttctcatttagcctagagaataggattaagcctaggcataaacagtgtgtagaaatgggggtgtgttttcctctccctgccttgttaaaaacaagtgaagtgaaatttcaaagtagattagacgtatgtgtaaattcttcaacccccttgaaaacatcccctctgtggtctgctggctgtgatgtttatgacgtatagaataacatttgcattgtatatttaattgcttttgtgaatttctaaaccagccattaggtgcttttggcctttcactatggaaaagttaatcagtcatgagccatcccttccaagcccttgtttgtattatgtgtgaaacgaagctttgcatgatttccaaagcaaacaaatttagctagctttggccataactcgtttctaatgagatagtagtacaaacggactctaacaagttggaatattggtgaaacaatgtccactgngtctgctttgctttggtactgtgacatgccaagtttaa

SEQ ID NO: 119719 - DNA, 476 bp, Glycine max
  Clone ID: PAT_MRT3847_79114C.1
acactcaaaacataagctgaataaaacaccataaattttttaaaccccaatgtctattcatttctcaagatcagtatataagatgactcaaatccacctcttcagtccaaacagattaaatcctccttagaattaaaaatctacaactactcaggaaaaccactaaaaatacctaaattatattttttggactgttctttataataaggacagagattttgaagaatcacatcagccaagcttctattagcttcatactctttcattgagcaagtaaatagcactaacacacctctaaaaggaaatatcaaaactaagcgagcatcagaaaaaaaaaaggatccaaactaccgaaccacaatattccgattgattaatccccaaaaataccgaaacacgaaagatcgatgaacctaccagccatcagtaactgaacatcataacaatcaaaactaaccaaccaatcactcattcag

SEQ ID NO: 119720 - DNA, 389 bp, Glycine max
  Clone ID: PAT_MRT3847_79115C.1
aactctctctcactttatcttccactcttcaatcgcaatggctccacactctcatacacagctacatcactttctattactcttttctaattcttatatgcttataatgtaatgtgaaccttaagttttcaaccatttcttatcaaagggtattgcgagcgagactctgcggttgctgatactttcatgatttgatcacaacgctatcctgcgtttttagtttggttactggaatttacagactactaagaacatggacttagaaggaagtgaaaagggttcagtggttactcagattagcattggtggatttggcagtgaggtcaaagcaagtgatctcctgaattacttggaggataaaattggacttgtgtacaggtgtaggttga

SEQ ID NO: 119721 - DNA, 283 bp, Glycine max
  Clone ID: PAT_MRT3847_79116C.1
attgcgacatatggcattattaatgccagacccgcatagggcctcaggtgactcgtttcacatggactcataccatcgactgccgcagttctacactgatctaaactatttaactacggcgtatcaattatagatacatagggacagatgaccatactatctatgacgcaagaagacacctgtgatggttccattgccactcggatattatatgccaaatatctcctctgagactcttgcataggaaccagaatactgaacggcctgaagcacatcacctgac

SEQ ID NO: 119722 - DNA, 359 bp, Glycine max
  Clone ID: PAT_MRT3847_79117C.1
tcgcccacgcgtccgaacacatgtacgcctccgcatacagcactcgaaaacaaaaaaaaagggcggcgggtgtacactatacaggatccaagatgccttcctgctacatgctacgtcatatatattgtaacctgaaaccaatttacatgacagtggtctacaatgtacaacactgggaaatggcaaaaccctgcccaacttaaacttcttcagcttatagcgcattccccttttggcatatggcgtaataggaatgagatcaatcgcgtttgccttactgaacacatttctcaatttgaaatgggaagggccctctccctgaacatgaagcatcaaccccggcgggggtgcgggttacg

SEQ ID NO: 119723 - DNA, 195 bp, Glycine max
  Clone ID: PAT_MRT3847_79118C.1
ggaccacgcgtgcgagaagcgtcagaaagggagaccttaagtcaagcggggctaccgggtgaagttaaacatatcaatcacccaaaatataaaaacagataaaaaaaacttaaggcggtcgctgtaaaggatacaaacttacgcacgcgtgcatgcaacgccataaatattgtataggggcccctaaattcaatt

SEQ ID NO: 119724 - DNA, 942 bp, Glycine max
  Clone ID: PAT_MRT3847_79119C.1
ccacgcgtccgctccaagccatgtttgagaagattcagtttatccattttgcggacatcatcgcatgacatccttggatatgcctaccatggcctcctctctgcttctcccacttggttctacttgtggtagaagtccctcttttactcctcaaagcattttggtggataaacttcgaagattagttgttaaagtcaagtcctcagagacaagggaatgcaccactgctatgtttaatgccaattcacgtagagactttcttgggttggctttaggagtctcgggtggtctctttatgggttcattggatgcaaatggagctggtttgcccccagaggaaaagcctaaactgtgtgatgacacttgtgagaaagagcttgaaaatgtgcctacggtaactactggatcaggtttgcaatacaaggatattaaagttgggcaaggtcctagtccaccaatcggatttcaggtggctgctaattacgttgcaatggttccctctggacaaatatttgatagttcactggagaaaggtcagccttacatttttcgtgttggttctggtcaggtgatacaaggacttgatgaaggtattctgagcatgaaagtaggggggaagcgtcgactgtacatacccggatcactggcattcccaaaaggccttacttctgctcctggaagaccaagggtggctccaagcagtccagtcatatttgacgttagtttggaatatataccggggcttgaagtggatgaggagtaaaataaggctgtcctttgtacgtgatcaatcttgatttttatgtccctatcaccatcacctttctatacaatcgataattctttttgagaaatttgcataaaatctcatagcaatgttgagtaacattattctgacttctgagttcaaatattacaaaaattttccatatgtttctactt

SEQ ID NO: 119725 - DNA, 440 bp, Glycine max
  Clone ID: PAT_MRT3847_7911C.1
ggaaccctacaaaaagaaaggggacatttaaaaaaccaaagcaacccaacgcaaaaaaggcctgaaactcgctgggcttaaaaaaaatggaatcggggggtccgacaaacccaacccattaaaaccccgataaaaaaaagcaattttgcccccggcgatcaaaaacccagttttgggaacaacagttgcaaaaagaggggggagacttaaaactttggccgaaaaacaaggtacctaaaaaagaagaccccagagtcccgaaaagaaacccacatttattggaaccaacatccccgggggaacccgcccggacgagaaacttttttttgggggcaaccttggggaccttgggtccggggggatcctttttttaaacggtcttgaggacccccacaggaaccgtttgacccctgtgcctaacaggaaacctaccaaggggg

SEQ ID NO: 119726 - DNA, 446 bp, Glycine max
  Clone ID: PAT_MRT3847_79120C.1
gggcccaggttgattggtccacgggcctctttgattgcttctccaacttcaaaaactgttgcataacgtgctggtgtccatgtataacgtttggtcgagttgcagagattgttgaccagggatcaacctgtaataagctagctagctagttgaattataacattaagatatacatagggatcttgataacaagtgttcttaccatattatttaaagaattatttttttttattatggaacataaaaaaaatattaataatataattttacaaattctaatatatatatatatatatatatatatatatatatatatatatatatataatttcttaatttatattcaagagtactgattaacatgactacgaagaaagagatcactaattaaccaattaatgattgcagcatgtggtgctagtggggccctgtatacgatgatttgt

SEQ ID NO: 119727 - DNA, 123 bp, Glycine max
  unsure (1)..(123): unsure at all n locations
  Clone ID: PAT_MRT3847_79121C.1
aaagtaatgaaancnatttaaggaaactggggagtttttcaagaaagacatcgaatatgcgggggcgattgaaggactacatgaaggccttggggacataggccgaaaatttggaaggttaaa

SEQ ID NO: 119728 - DNA, 482 bp, Glycine max
  Clone ID: PAT_MRT3847_79122C.1
ggggcccattggcaacttgggggcaaatttagttcctttcctaggaacaaagggggaaatacattcataaaacaaggacgggtaatcttaggccctcaaaaaaaacacctagttcaaacttttttgttacatttttataaagggtacctaccttttgggaaacactttcgatggcaagggaactccaatcatggggagcagcaaacttcacaccatcgaggagttccggatgaaaaaaaaactggtctggaagaatggaggcccgaaccatacctccatggatatatcctacgggcctaccgggctacttacaaagattgggcaaagttcttcaaggaaaaaaaaaggcctaaacacgggggagcttaaacacaacaacgaaaaccccagggggttaccattttattggcaactatttaactaaaggggagggcatggcattccaaaaaacccatttttgcgttactaaggggattattcat

SEQ ID NO: 119729 - DNA, 406 bp, Glycine max
  unsure (1)..(406): unsure at all n locations
  Clone ID: PAT_MRT3847_79123C.1
cntcctttttttttttttttttttttaattttagcctattcagagggatggttccacttggtccgtggcatggaataaaacaatccttcatgcctttcatttaaaatgaaaaaacatgcttacaagattgctagaacttacaactcattatctttcacatctgaggccccaaaaaaaaactttacctggacaaaaacagggtcgaataaaaagaaaaaaccccaactaaaatttgggaaagagtttctcacgctgaaggaacaggagtatccttgtctgacttaccccaggcgtacttttttgcaccatccttgtccaaaattttaataacaaagtggggggggacaacaacaaccctggaatcatgttctttatggcccttatacaacgaaggctattgtttttt

SEQ ID NO: 119730 - DNA, 633 bp, Glycine max
  unsure (1)..(633): unsure at all n locations
  Clone ID: PAT_MRT3847_79124C.1
cccgggctcgacccacgccgtccgggnaacaaacaaaacaactagtactagtttgttagttacagcttgtgactgagagagaaagagagaaagagagggatcttcagatttaacttttctgggttcacttggctcgaggtgacaagttccattctgagtttcctagattcctgacagggttttaaggttgtgggtacttgatgttgggaaaaaaggtgtggcctttactctcattggagaatgtctgaatctgcttggcactgtcgttgaagttgaaccatgaaaaaattagcttttataagaggcagtaatgtgcctttgggaatgtgagcatgatttgcaaatggggttgctctgaatagtttcacaagagctctcagcctctcaggaaggaaaaaaaaggccttgtttttttttttttggagaaagtgagagtgaaaaaaggtcaaggaaatttcttttcaccatctttttttatacgggaaatagtttttttttttccttttcttctggaagagtctttgatagttatggaagattttgatatgctgggaagagtttgccaaagttctctttgttagcaagtgatattggtttgtgccttatgctcaaacctgnaagtcaatggtggag

SEQ ID NO: 119731 - DNA, 291 bp, Glycine max
  Clone ID: PAT_MRT3847_79125C.1
acgcgcacgcgtccgtgccaagcttggtctctatctcatttagaggactgtggagaagtaacggcgacaggggctatcactcttatatgctagcaagctatctaagatatcccgctgcgtcataatagccctaggcttcccatatactccatttgacctacttctatacagattccattgcttcttatattggcattggatctataccattcaagggtacgggattctgacattccgaattatgcacacaaatacttcttgaagtcccttaagataactagatgcaaatat

SEQ ID NO: 119732 - DNA, 295 bp, Glycine max
  Clone ID: PAT_MRT3847_79126C.1
ggctcgaggctgcgatgacttagctcggttggtgttttctcactaattaaggaagaggcctgcaatgcaagagacgacttgataataaccaacgtggctgttggtatgcgtcctgcatttggtcaaataagttgtagaaattctaagtagtttactgagccagcctttcttcttctgctttgttctttacatgtttgtcgctatacattttaatgatataatatagatgctctctgttttcaaaaaaaacaaacttaaagataaacgtgaaaaaagaataagggtcggtctcggt

SEQ ID NO: 119733 - DNA, 401 bp, Glycine max
  Clone ID: PAT_MRT3847_79127C.1
gagcacatgtttcatgagccacaccgtgaaggctctcatatgcagctttggtgccagcccttcggttattgagcttgacaaaatgcaaagtggtcaccaagtagagagagcacttattcaactaggttgcaaaccaagtgtgcctgcagtgttcataggacaacaattcataggtggtgctgatgaagtcatcaaactcaacgttcaaaacaagcttgcccaattgcttcttggtgctaaagctatatttatctggagtaggtagctatgccaagttccaaactcatcatcctcatgtgatcaaataagaggttcttattttctcaaagctgtgtgaggcggtttagtatagagcttcttctagttctagtcatgttccttgttgtattctccatttttct

SEQ ID NO: 119734 - DNA, 274 bp, Glycine max
  Clone ID: PAT_MRT3847_79128C.1
tccggattcggctcgaggccagatctctccctaacaactcaatttaatgtgttacaatattagaggtttaaattatcagttggatttataggaacatgtagactttggtttgatagttatttgttggaatttggtttttttgtattattgtgtctagtagtgggttgcattgctagatggatgttatgattatccccccagatgatcgacgctgaacatactgagcgattttttctctttcgagataccaagccaataaatctgatccatttaa

SEQ ID NO: 119735 - DNA, 409 bp, Glycine max
  Clone ID: PAT_MRT3847_79129C.1
ttttgacaatgtcggcggtgatgtgctcaacgaggcgtcgacggtggtgaagcgctatggctgcttctcgatctgaggtgctatcttgggctaccacggggcacccatgacgctcaccaactggcggtaaaccgtttacaacaggctcacgctcaaggggttcatcctctttgaccacctgaaggacctcccgaccgcagggaaggagttggcgggctgggtcaaggaaggcaagctcaacgtctaacaagagacggcggtcgagaccaagtttgatgacatccccaagacgtggatgcgccttttctcgggcgagaacacgggcaagctggtcaccgtattggtataattggctggctagacggcaaacgggaaagagtgcaagagaaaatatggatgtgtagcatat

SEQ ID NO: 119736 - DNA, 393 bp, Glycine max
  Clone ID: PAT_MRT3847_7912C.1
ctcccaattatcacagctacgactggtataatgctagagcctgtgaataagttgcttgtgattccaataacaaagctgctattacgcgttagtccttgactgaaccatgtacttcaacctattgatggtgcatttaaacctaccgctgtcgatattcctgtggaagatcttatgatggatctgaatttggggctagtcacacaagaagtgttcgtactatttgctgttatcacggactattacaacaagcagcttgcacttgtaatgaatgctctgctgataatgcatatccataaggcagctggtgttgtatgaaatcatcctatgttcttactggaaggcattgtcgaatcagtcactggttctacttatgctggattaagaccgatgacg

SEQ ID NO: 119737 - DNA, 608 bp, Glycine max
  Clone ID: PAT_MRT3847_79130C.1
tctgctgatcccagtgatagttggaatagctgcaaggttaatatgagcaactgctcgcctgatcaactaagtaaattgcaaggcttcaagagtgaattcgaaagggcattgagtgaggtaggagattctccatctaaaggaatgtttattgactcttgctatgcccactgccaaacagaaccacaggagacatggtttaagactgactctccaaagcttgccaatacaactattgccaaggcagtggcagactggttttatggtcgaagttctttccgccatgtggattgcaattatccttgcaacccttcttgccagaaccgtgtttttgatctaaaagacctccctggaatatagatttgtttgatcaaatatatatcattcctataaaccagacttatcagttaactggttattgtatgagaaaataagttttacaggtaacaaagctagcaaaataagagaaggttatcattacactgagcttgtgcgctgtgagccctcaatcaatttggtgcttttactagttgtgtttactttactggtgataaaacaaactaatttaaaaatttaaactgtttagccaaagtacattaatgatttaaaaa

SEQ ID NO: 119738 - DNA, 271 bp, Glycine max
  unsure (1)..(271): unsure at all n locations
  Clone ID: PAT_MRT3847_79131C.1
aaagttatttttatattgcaagtctgcaattggtgctttttcagtaaaccatatgcacttgatcaccccaaatttttctgaaatggataccagagaaagaagttgcactgtacattccgtcgttgttgtaataaagtgcatgcgttaaatggtagatggacatgctatgagngtatataaaacttaaataagttaatttttaaagcatataaatccaagtatggattgatggtggtatactctatttgaagcatggtgcaatgcactcttt

SEQ ID NO: 119739 - DNA, 546 bp, Glycine max
  unsure (1)..(546): unsure at all n locations
  Clone ID: PAT_MRT3847_79132C.1
ggagagttgtcacttgtgtagagatgtattgggggaatgtctattgttcatgccattgcttgcattttctacaattctatttatgaagtagcaaatttttctattgagcttcccagttataactttgacatcaatgtccatttggccaggcattagttcaataaatccatcttgcttatgtnaaaaaaaaaaaaacaaaaaaaaaaaaaaaaaaaaaaaaaaaaaaaaaaaaaaaaaaaaaaaaaaaaaaaaaaaaaaaaaaaaaaaaaaaaaaaaaaaaaaaaaaaaaaaaaaaaggggggggcccccacctatggatctttcccccccggaaataaattccggcccggaccctgaggggttccaacttttccttatggggaggcttttaaaagttgggggaaaaaagggaaaaagctgttccctggggaaaattgttttcccttaaaaatccccaaaaaaaaacaacccggaagaaaaaagggaaaaacctgggggccctaaagaggggccaacccccctttatttggggtgggcctaattgcc

SEQ ID NO: 119740 - DNA, 115 bp, Glycine max
  Clone ID: PAT_MRT3847_79133C.1
gattgttcccttacttcatgttgggtgcttttggagctggtggggtactaccaactctcatcttgtttctttcataccccctggtgtggttggtgggtgaaaaccaactttgttt

SEQ ID NO: 119741 - DNA, 382 bp, Glycine max
  Clone ID: PAT_MRT3847_79134C.1
ggaaatggactatatcgattgatgaaataagactaacgaattggaagtcaagcgccaacgaaagttaacatacttttattttaaattttaaattgatattttttaaagataaaagttatttattttccaggaaaaattaattagggtgttcataatcttctgaatgagtaattttgttatttatatacaatctctattactacttgttaaattatctgatgaatattaaacattagcttgattaagggtttattatgctcatatttttttggtttttattttattttagtctcatcactaaatacgagttagattttataaatggggattttccagaagaaatctcgtaatattattgttgcagaaatttcctgtaaatttt

SEQ ID NO: 119742 - DNA, 296 bp, Glycine max
  Clone ID: PAT_MRT3847_79135C.1
acgaggtttataggtatcctagaaaatgcaactatattttggttagaaagatagaatgcgctcatgtacatagaaatcctggaaactcattttttgttatcttccagggctcttatatactgtagtttaaatgtaaatgtgcagatgaaatgtgcagattatattacaagtgtatattttggtgagaaatgtattcatgtacatatgtcaagtatttaatatgattattaccatgctgtcttattaactaaaaaaaaaaaaaaaaaaaaaaaaaaaaaaaaaaaaaaaaagggggg

SEQ ID NO: 119743 - DNA, 562 bp, Glycine max
  Clone ID: PAT_MRT3847_79136C.1
ctcgagccgcaagaagtaaagaaaactattggaatattcactgagaaagcatgggctggagctacctttaatctttttctctttaccctagcaagtcatatggttggagccgtctggtacatgctttctatagagtcagaggtgtttttgtctatgattttatcagggtcaatgaaagaacaagttttattgagaagttgaaagacaccttcaattttggaatattctttgatgctttagattcaggtgtggtagaatctacaacagatcttcatcagaagttcttctactgcttttggtggggtttgcgcaatttaaggtggcccaataatctattgtttttatatatatgaaaatccaacattcttattttatgacctatagaacttctatatctttatctaatttcgtttcctatacttctatgtatttatttgagtttgtaacatcttatcaaggaaatgttagtgcaaccaaaattaaaaattgccatcttttgcagttcctttgggcagatcctcgacacaagtattaatgtcatagagatagcctttgcaatcaa

SEQ ID NO: 119744 - DNA, 1855 bp, Glycine max
  Clone ID: PAT_MRT3847_79137C.1
caacctacatggagcttgtaatatctgtacctaattttgagcatctgcgtcatggttgctggtcggcgggtcatgggcatggccatggatgctttccagcaccaaactctcatttctgtcattcttgccttgttagtaggggtgttgatttatgacttaaagaaaacacatggtcctaatggaaagatctgcactgcaccacaagcaggaggagcatggcctattattggtcatttacacctctttggggttcatcaacatactcacaaaacacttgggataatggcagagaaacatggaccaattttcacaataaagcttggttcatacaaagttctggtgttgagtagctgggagatggccaaagagtgtttcactgtccatgacaaagcattctctacgagaccctgtgttgcagcctcaaagctaatgacctacaactctgcaatgtttggcttcgctccttatggaccttattggcgtgagataaggaaattaaactactattcagcttctatctaaccacaggcttgaactgctgaagaacacaagaacatctgagtcagaagttgcaataagtgagcattatgagctctgccctattggttgtggaaggagagtatgccccggttcctcactggctctgcgtgtcgggcacatgatcttggctagactcttacactctttcaatgttgcttctccttcagatcaagctgtggacatgacagagagcattggactcacaaatttaaaagctactccacttgaagttctcctaactccacgtttagatacaaagctttatgagaactaaaattatatattatgctagtttttttcctcaaaattaggggaagcctcaaatcggggccttccatcatgtaataaatgttcaacggggttgcgctgctgttacactcatagttatcacatttaaatcagtcatcgacttgatcaaagtattgagtcattgggtttgttctgaaagatgcagagatttctggttatgattcagataccatcatcaaggctacttgtctgaatctgattttagcaggaagcgacacaaccatgatttcactaacatgggtgctatctctgctacttaaccatcaaatggaactaaaaaaagtccaagatgaattggacacttatattgggaaggacaggaaggtggaagaatctgacataaccaagttggtgtacctccaagccattgtgaaggaaacaatgcggctgtatccaccaagtcctcttatcacccttcgtgcagccatggaagactgcaccttctcaggtggctatcacattcctgctgggacacgtttaatggtgaatgcttggaagatccaccgggatggtcgtgtttggagtgatcctcatgatttcaagcctggaaggttcttgacaagccacaaagatgttgatgtgaagggtcagaactatgagctcgtcccttttggttctggaaggagagcatgccctggagcctcgctggctctgcgtgtggtgcacttgaccatggctagactgttacattctttcaatgttgcttctccttcaaatcaagttgtggacatgacagagagcattggactcacaaatttaaaagcaaccccgcttgaaattctcctaactccacgtctagacaccaaactttatgagaactagattatattaagctagttttctcaaaaataagggaaggggtcctctaggtcctgaaatcggttaataacaataacatgtttaatgcagctgcaatgtagtataatgattatgtactcatgggtcactttttaatggagcttcagtgtattataataactccaaacttgtgggtcacaatcccccc

SEQ ID NO: 119745 - DNA, 603 bp, Glycine max
  unsure (1)..(603): unsure at all n locations
  Clone ID: PAT_MRT3847_79138C.1
ctcaagttagaaaatcgtttcccatctatgccccacgaaaccgttctttacgttattaagcggttggataaaaacccagaaaaagcttcgtgctttttcattgggtctgtaagaaagtttggtttaggccaagttgttcggtgtatagcttaattgttaggatcttagcggccaaggatactatgaagcagttttgggttactctgaggatgatgaaggaaaatgggttttttctcgacgaagaaacatatttgaccctatctgttggctttaagagggaaaaaatggacagtgactctgttgctttgacccacttctattatcggatgctagaggaaaatgcaatgcaaagtggtgtctccaacgtgggtggtatcatttcaaggtctgaatggggtgatgagggttgtgggtgaacttncaaagcttganattcagctgtcggataattttgtnataagggttttgaaagagctttcaaaaactcccgtggaggcttacaagntctttctttgggttgggaagcagtctggntttgggcccgatgcagtgacatacaatgcagntgcgaggaggtttcccgcgggctgagtcaattgaggg

SEQ ID NO: 119746 - DNA, 635 bp, Glycine max
  Clone ID: PAT_MRT3847_79139C.1
tgggattgaacaataacagccaaagaaaagaaaagccacatgccaaattgttgaagactgaaaaccatgaaagcaaagaagatgccaatgacatgaaagtgaataatacaaaacatcaggtgacaaatagtggaagtaacatatactcacagaagatactggatgaaattaggcagtcagaagagaatgaacagagtcaagtccaagaaaactggaacaaggggcatatcaacaaagttgacaggaatgctgcgcaaacaaaatccaaggtgttacttgaagggcttgaagaattaaaggaggttttggatgtacagaagcaagagaaggattccattgacagtggccaagatgatgaggacaatgattacgatttcttcaaggaattgcactctgaatttgaagatgagaaggatgaatacaagggagagatagatgagtcagagtttcagactggtttgtaattaaactgtatttactatgtccatctatactagaaatagtggatgtaggcttggaatgcttagaaatatttcaaattcctgacataaaaaggatgtatcagcttaggaggaaaatgtcagcaaaacaagactccctttttcctgataatatatcggttattcaagtttacc

SEQ ID NO: 119747 - DNA, 150 bp, Glycine max
  Clone ID: PAT_MRT3847_7913C.1
taaagaaaggcagcacgaatgattggaattgcttaataagaaaaaaaccctgccttcaatcaggctaacataattcagcacggattcaaagacaaagaaacatctaacttttgaagtgaatcaccatggcttttagaccctaacacttcc

SEQ ID NO: 119748 - DNA, 353 bp, Glycine max
  Clone ID: PAT_MRT3847_79140C.1
attgatctcatacttatctttttggcacaaccccccacaaagggggctattatctttcaggggggggcaaagggaaaaaaaaactaccagggaaaaaaacccccaaggggggttaaggggggaaaaaaaaaaccaacaaaaactcttcccttgtaggagacccccgaatctgttctaccggagcgagcaaggaaaagcttgggaggaaagctggctgaagaaatgtggaaaccctctacctgaaaggtcataagggcgtgaccccacacaatctttgccccagatattgggatacgagaagaccaccccctcccctcccaatggggagagctttcgaagcgcaaacacctgaa

SEQ ID NO: 119749 - DNA, 445 bp, Glycine max
  Clone ID: PAT_MRT3847_79141C.1
gcgagcaggactggcatgaagttactgaggagtgggagcagcggcggaactgggtgtttcttgatttggttgaggagcagaagaggaaatcgtttgttgcagtttcggctaagcagatttggtatgatgtacgcataaaaaatggatttgagaagattcaagagtggacatgtaatatgaagtacttgcggagaaatctggtaatggaggtaattaatgactatttatctcttacgataaatgaagttatctcagtgttgaaccttcaactatttcctccaactatttcatcttctctggttgaagatgaagttgaagatgtacctatgttttgtcctgaggctgttgagcagtattatcgctcatatatatccaacatgagtcgggctgataaaaaacaatggatactgaaggcaaaaaaccatctgttagcagaaggatggat

SEQ ID NO: 119750 - DNA, 370 bp, Glycine max
  Clone ID: PAT_MRT3847_79142C.1
actatcgtaagcgctatgatgcacgctgccctcagacggcagcctgtatagcggacagcgctcgccctttttttttttttttcagagatatgattttaccattaacactaaaaataaattacgcgtagaggtccaatgtggctcaaatcaaggtcggctaacactttactataactgaagtgcggaagaaaccgaaccctaccaaaaacaactaccctttataaaactcgaccctttcaaggaataaattttcacttgaagcacttgggcaaacttataatcaataactttttacgtcaaaaacattttcttcagtggcctctgcactgactttctgataaactttcatacgggcacctataatccattc

SEQ ID NO: 119751 - DNA, 458 bp, Glycine max
  unsure (1)..(458): unsure at all n locations
  Clone ID: PAT_MRT3847_79143C.1
gcgccgcctccctcgcattcggtccggttcgccctcgaccggtccatctccccgaaccggagccacgtcatcgcgaggaagcaccagcatcaccgccacgttacggctcagaagaaaacgtgcatgtgttctccgacgacgcatcccggttcgttccggtgcagcctccacaagaacaataaccagaacgcgcaaaccggttcgtttccgtcgaaccggctcaacatgcggcggtccgcgatgaagaactcgctcgtgagaatcggtggcgtcgaaggcgagtgggtgaaacgcgccctcactgcgctgattcgtccttcgtcgcatcaacagcggagaagatccgcgttcgaaccgcgaccgagtcgtctttcaatcatgtcaaaagctgaagaagaagaatgagatctatngaatgggtatatttggttctctctctctctcttacaagttttgaa

SEQ ID NO: 119752 - DNA, 352 bp, Glycine max
  unsure (1)..(352): unsure at all n locations
  Clone ID: PAT_MRT3847_79144C.1
caagaatatactaatcaattatatatatatacatcatcctcccgtacaagaaatcaataaaagggaggaaatctatatttcatctttcctattgttctatcattataaaaaaaaaaaaaatctcaaaaaggaaaaaaaaaagaaaaaagaaaaatggtaaacggaaaaatacttgtatctggagtttccctaatccttgtggtgggtgttgccatcggtgtggtggttgttgttaatagaaaggacacatctgatcctgaagtagcagctcagcaaaaatctgtgaaggcaatgtgtgaanggaccgatgaccctaaactttgtcatgatactcttagtaccgttaaaagct

SEQ ID NO: 119753 - DNA, 372 bp, Glycine max
  Clone ID: PAT_MRT3847_79145C.1
caatttccgtctctccctttcactactgacgtgtgccttgggaacccacctcattataataatacttttccctaaccaacatttaataatattataacattatgcaataaaaaaatcatttccctattaaaaaacattaaatttatcattaaaaaaactaaaggtgaggctctcaaggcaaaggaagaaccaggtgacacacactgccacacacatgagacccccctcatctgctactaccccccctttttttacaatctaaccccttataaatactacccctcaccccctcatgcttttctcagtgattcagtctctcagtaaattcattcaccacccgcagttactctctttaccttcttaattagttct

SEQ ID NO: 119754 - DNA, 661 bp, Glycine max
  unsure (1)..(661): unsure at all n locations
  Clone ID: PAT_MRT3847_79146C.1
acatcctttatagctgtcaaactaactaactgaattacaacatacatcaacaaaaacgaggacaaaaggaagaagggtaaatatagtttgagttcaaaccattcagcatccaatgaatatagctgaagcaataagagtaacataaaccatgtatacagaaagtggctgttaaacttggaccccagtctttcctaaaaaatgttggcctgtatatctccagaatccacatactaatgttcaatcatttacccatctcaataagtgaatatccgggagagaagcagtctagtggtttctgttgaacaagggaacaactatccatcttggtggggttagtggtttggaattgagttaacttctgcataatgtcatcaagtttctcagcatgggaagtgggtgctgtataacttgccatgggagaagaaactctcaatggaagcaccaaattttgtgaaccctttcgagcaaggggaagcacctcagaaaattaagaagaccagaaatagaaactaagnttcaattcattcttctcctttctatcggtcattacagtagtatatnnnncagcaacaaaaatagaatccataacagaatgctatcaattgccaaatgctcttctagannntactgaattatttccttgggcccaggccaaaatatt

SEQ ID NO: 119755 - DNA, 866 bp, Glycine max
  Clone ID: PAT_MRT3847_79147C.1
ctcatcttggttcttcttgtgttaaccctaaaagatagtgtcacttgtcaggcgcggcagccttgctctccaccacgattccacgacctccacgccaccacggtcccagtcggcgccggtgcagtgcggagtcgcgacctcgctcccgtcgtcactcacagtcgctggcgatttgggttgggttgggttgtgagaacgggtaaaatggaggcagaggtggtggaggcagagcttgtgttgccaagctacctcagtttcaagagagttcaaatgtatgataaatacccaaaaggccaagccagaggcaggcattggaaacatcttaagcagattatccaagctgagaattaccagaattaccctcctgatgaaccaaattatgctaatattgagtcacccccatctatgcacccctgcaagagaatttgtgatattacaggctttgaggcaccttaccatgatcctaggactaatcttaggtatgcaaatgctgaagttttcaaaatcatcagatcgcttcctaatgagtatgttcaaagatacctatctctaaggaatgcagcaatcgttctgaagtagtcgtgtcactttcctcacctctgaactcaattcctattccttcgagtttcttttatcaatttgtgaataaaatcttttagaatgtgaattagatgtactctttaagacattcttaactcatctagtgtcggtctgtcaccaactgtcttgtatgataattagttgattgcaagatttgtattgataaataacgataacggttgccaatcaataatgttgcatgtacacaaactagtatttatatccgtgcacgataaacatttatttataaaaataattatattaaa

SEQ ID NO: 119756 - DNA, 667 bp, Glycine max
  unsure (1)..(667): unsure at all n locations
  Clone ID: PAT_MRT3847_79148C.1
cactggggtgggtatgaccggctcatcatatataccatnnncccataccgacccttaaggccttggttcataaaggcttattcttacccctcaataagggtaaccatcctcacagggaattcccaaggctaaaactttnnnnnctggtaatccaaccaaaaccagagaccttccaatttaacaaccattggtcggcctttcttggctatacctaatcgaaagttacataaaccaggctttcctgaaactccccttaggcgcatcaccagaattccaaacaccagaagccgacctttatatttacctatatgaaccttaataaggctggtggcaagccctggggaaaatatatatatatagctacctaacttggatcaacccttggcagcggaacaaaaattggccaaacacggaacttgggggtatagaacatctcaagatatcggccaggttcacgcctctcttaattggaaacggattttccgaaactattaactcccgcccagggcataaaccctttaaannnaaactttccaggggacccggtcatttttgacttaacaatcnnnggggaaccagaaaagccaccaaggttttaccagaatacccacccttcataaaatctttgannnnnnnnnttaaatnatttctttccaagggccggggc

SEQ ID NO: 119757 - DNA, 546 bp, Glycine max
  Clone ID: PAT_MRT3847_79149C.1
gggcccccaaaaatttttaaagggaaaatttgggtccttaaaaatacccaaatccacaaaaacataattgggccccccttaattttttcgggaacgggggacccaaggggggaaaatgtttaccccccaaaatcggtggggggggcaaagaaaagggggggataaaatctaatacccctagaaaaagacataaggaacagtcaaacccccggtttcctgggccccgccccccccgggggccttttaaaaaaaaccccttgggtttttttttttgccaaaaacggccccaaagcctttgaaaatttttcccttcccaaaacttcctccttgcccaggctggcccaaaatttgttttttttaccccccacggggaccccaattttaaacacataaactagcaactttttattgaaaaattgctctgaaaacattggccatgggaccattggcaacccacccccccccctttcaaaaatggaatcccacccccgggggggcccaaggccccctatcgaagggggggccaaaatcaacaacgggggggcc

SEQ ID NO: 119758 - DNA, 394 bp, Glycine max
  Clone ID: PAT_MRT3847_7914C.1
atttattttatagcttctgctgtgcagggtccttcaatctcacttgggggaacatccgtcatggagccttaattacatttttcatgctctcaatattgaatgaagatattgcttagtatcaaaacctgaacatacatactatatctaccaaccgggaatcctcttcctggacgttttgtgtttttattctagacactcagaaaaatgaattgttttccgtgtttttcaaagactaagagaaccaacagcaagagtgagcaacaaggcgttataccacaagaaaacgttgtcacaaggacaccaccagatgtaaagaaacaaaaagcggatgatccaaaccaagttgacacctcaaatattcaagcacaaaatttcacaatccgtgagcttgcaa

SEQ ID NO: 119759 - DNA, 463 bp, Glycine max
  Clone ID: PAT_MRT3847_79150C.1
atgcactgtccctacctagctttgagttcggtcggctcaagccgctcgagcagctttgcggttcggtgtatgactttcgcttagacaggtcactccacttaagacggcgaaaatgggacactctaggacgtaacaccacgactctgctcgaaaggtacttaatgtggcacagcggcggcgaggatgaaagtgacaggacacaggcttcgacgcttgcaacgcctacctcctcttttccggctacctcatgtctaatatgcacaccgacttgggcgtgcgctgacactgatgcatccgcgccaggagcaccatgaacatgatgctcaccaacgtgctgaacactgacgtcgccggacggttttactacctctaggctatgcttggatttcagcttcctgtgcaacagcttcatcggcaaacatttgtatggtctcaaggacaggcgttcatcctgctacgacta

SEQ ID NO: 119760 - DNA, 358 bp, Glycine max
  Clone ID: PAT_MRT3847_79151C.1
gtcactcttctgtggccggtgtgaatgcccgcaagcgtgacaagcccctgccccctatcgttatcgatgaccctagcgacatcgtcgccatgaagcgtgctcgtaacactcttgcagcacgaaagtctcgtgagcgaaaggctgctaagttggaagaacttgaggataagattgctaagctggaagctgagcgcgatcactggaagaggatcgctcttgcgcaaaccggcatgcaataatggattaaaagtggaatttctttcctttgccaacacgggatttcgttggtttgttactgtgttttaatcaggtttcattgattcttatagtcaatcagtcaattaaattgcttctcttg

SEQ ID NO: 119761 - DNA, 265 bp, Glycine max
  Clone ID: PAT_MRT3847_79152C.1
cttgaacagagctttattgcatgaacattacgttcactctcaccataacatgaatctaacatccttaccagatccgtactagaatttacctactcacaggtcttatacgactctgcagaatcttgaatgattgtacgctactcccggttaacaagttgactcctgattacgctgcgccaaactgggcacataaaaagtacatcgtctcattgcgcaactgtactgagaaccacgatatgtggaccacttcgctgaagaagataga

SEQ ID NO: 119762 - DNA, 232 bp, Glycine max
  Clone ID: PAT_MRT3847_79153C.1
ctctcatcaccaaacaagttaattaactcaagaaagattgtttcagcataatctcatatgttttggattgaaattttaagtacaatttgttaaatatttgaaaggcgacaaagagtttttagaaaaaatttaaaatagtaaaataaaaattggtcttggtctaatcctgagtgtgcaccaggctgcaccagcatatataccccttctctttcactctcttccagacaacata

SEQ ID NO: 119763 - DNA, 364 bp, Glycine max
  Clone ID: PAT_MRT3847_79154C.1
gaagacacttggttgtcacaagttggagtgtggtatgctggagttctggcagcatatgtattgaagccagcaatgctgctgaacatcctgcagcgcacaggacagcgccccacagcaaagcatctgacctgaagtgtcagtggtgctgacgttcacaataagctcctgtgcaatgaggacatttaaaagaaatcaaaatgttgataacgttattgctgggtctttgatatgttgccttagggtggaagaagtatgtgtaattaaaggaactaagctttctgcccaccttgaagctcaagattgtttcgtatggcatccaaaatgagggagactgtctttttctgaattaaaaattatcatttat

SEQ ID NO: 119764 - DNA, 381 bp, Glycine max
  unsure (1)..(381): unsure at all n locations
  Clone ID: PAT_MRT3847_79155C.1
gccggaccgttccggattttccttttgactccacgcgccttagatcgcanacggggcaagcanacaccnggggggggttttttttcaggggagaatcctttatttccaatacccctaatggaacaggaggaaattctgtcttttagcgcaagtgatttcagaacttgctatggtgagctaaaatagcaagccttaagctactgcagtgcatgtgggagctatagaaattatcattgatagtttctcaagtcctgactgcaacatagttggtgcaatgcttttggttgatacttataataccaatcctgaaaatgcagttcggagtatttttcgctgcgcctttcaaaggccgaaggtccactcgggtggttacttttccga

SEQ ID NO: 119765 - DNA, 1183 bp, Glycine max
  Clone ID: PAT_MRT3847_79156C.1
acaaatttaaaaagtcaattatatcacgtggaccataaaaaaaaaggttgccgagcttaatttcctgtatctagctagctagctagctagaggaatggtctatttaaagaagaaaattaagcctacaccaggaagcgcgaacggttagaagtagtgaagaaaatgaaagtcattgttttcttcgttgctataataattttaggtgcagaatggcaatgcaatgggtcagagcatgagcatgagcatggccacagctaccaaattttccctttgcgaatgaaaaccggccccggtggccactacattccggaggtatcgtgcaaaagttggaggcttggtgtggaagcacacaacgtcattgactggagaaccattcctcaagattgcgagggatatataggaaactacatgcttggccaccaatatagatcagactccaaaacagtttgccgtgaagcttatttttatgctaaaaccatcaacatcactgccaaaaccacatgggtgtttgatgtagatgagactacactctctaatctcccttactttgctgatcatggatttggggtggagctatataatgcaacagcgtttaatgaatgggttgaccttggcgaggcaccggcactgccagagagtctcaaactgtacaataaactgttgtctcttggcatcaaaattgtattcataacaggaagaccactgtatcaacaggctgtaactgctaccaacttaaagcttgctggatactacaaatgggaaaagttaattaccaaggatacagataaatacaatggtaagacagcagttacatacaaatcaactgagaggcagaagctggaggaaaatggatacaacatcattggaaacattggagaccaatggagcgatatattaggaaccaacacaggccttaggacctttaagttgcctgatcccatgtactacattagttgaggtctctaggctcttatgaatgaaatgagatatgtagtaattaataatggagagacttaacctaggggcactcgttattgctatgtttcatatgtatgtgactttgtgtgagacagtagttacgtgagactgcacaagcacaacttaacgttgttttatctttcgtggttttagtatgatttttattttcagaaaaaattttgagtctataatcaattttagtttt

SEQ ID NO: 119766 - DNA, 235 bp, Glycine max
  Clone ID: PAT_MRT3847_79157C.1
aaaaattataaaaaaaaaaaaaaaaaaaaaaaaacaaaaaaaaaaaaaaaaaaaaaaaaaaaaaataaaaaagaaaaaaaacaaactaaagaagttcaagcagaagacaaacctattttaaagggaatagctaattttatttctttgccgaggggtgggatcactgggggggctgggtaattcctggcgcttgcgagggtttttggctttgcccagcttatctcctttttgtaag

SEQ ID NO: 119767 - DNA, 250 bp, Glycine max
  Clone ID: PAT_MRT3847_79158C.1
acaacagagacaattactctagataagttttacgatcaacatggtggagctaagggtgtgtttgttgattcttttccttgtggaggtaagagctgcacttctgaaactaaggtatcgtcacaactgataattcatcattttatgacaaagatgattattcaacaccatgctgtgatctctacaagtacacacgctcaatccctcatatctgcatctataaatatattaagcatagttcatgcaactcaga

SEQ ID NO: 119768 - DNA, 706 bp, Glycine max
  Clone ID: PAT_MRT3847_79159C.1
atcctcttcaggggtaaaaaaggtccctaagaagcgtattgctgctattctggaaccagctggtgaagaagtggaaaaaggtgaaggtgacaccttagacgagagcgaagaagagaacagctctgataatgaagagttggagggcaccaagggtgagaagctgcaatcagaacttcaaagctataattcaaaggccacgcaaattcagttggaactgaagggaacgggaaattcaagttccaagaagacatcgggtggtagaggtaaaggtgcttctgcatctgggaagaaggttgctcaagctccaaagactactgcaaaaagaaaatggtgaagaaatattaaacaatgtgcctttctccggaaccactatttggaggaattgtatagaaccccgctctttacgtaattgtgccttcacaaattttagggttgactttagtaaattttccaaggaggacatggatgattacttatggtggccctctgttttttgaatttagatgatgtgtctacgttaggaattagaactttgcatgctatgttttgaagaattcctggattgagttgttactcctttattccctgatattctgcaaggatatgatgctgcctggatgagtaatgttgcatactcaaaaggggggaaattgaatgaattgattgtaaataagtgaaagattttacaattttttcttttttgagg

SEQ ID NO: 119769 - DNA, 511 bp, Glycine max
  Clone ID: PAT_MRT3847_7915C.1
ttgccgctctacatgtgtagtagtgccaccttcttggggggggggggggggggggggggggggggggggggcaaaccaaagataaagaggagggaaattaaaaagacacaaggacggtgaggtggccaagaagatagataaagtaagggataatcctaagctgcacaacaggaggcacctaaagcaatgctagagaggtgaagataagctataacacgatcagaccagggtgatacaaattttcggcagcggggacaataaatcgactgagaggccaaagacaagcccagaatcggtgaacgataagaaggggagaccatatccttaaagtagtggagccacggcaaaggcgaccaaggcgaggcccaaggccaaaagcgacaacattcgctgggagtacagggcccgcaacgggaccaagaccggggtgcaacaaacgtgtgcctggaaaaaagcatgggcctggaacccagaccgggaataaggccaaagccgggaacgagcgccggaa

SEQ ID NO: 119770 - DNA, 745 bp, Glycine max
  Clone ID: PAT_MRT3847_79160C.1
acaatcaattcattcaatttcccccttttgactatgtaacatcactcatccaggcaacatcatatcgccattcatgtccttgcagaatatcagggaatagaagagtaacaactcaatccgggaattcttcataatatagcatgcaaaagttctaactcctaacgcagacacatcgtctacattcaaaaaacagggccaccataagtaatccatgtccttggaaaatttactaaagtcaaccctacaatttgtgaaggctgaaaaatcaattacataaagagcagggttctatacaattcctccaagtagtgactccagagaaaggcacattgtttgatatttcttcacctttttctttttgcagtagtctttggagcttgagcaaccttcttcccagatacagaaacacctttacctctaccacccgatgtcttcttagaacttgaatttcccgttcccttcagttccaactgtacttgcgtggcctttgaattcaagctttgaagttctgattgcagcttctcgcccttggtggtgccctccaactcttctgtatcagagctgttctcctcttcgctctcgtccaaggcatcaccttcacctttttccacttcttcgccagctggttccagaatagcagcaatacgcttcttagggaccttctttactccaggaagagtgattagatctgcaactcgaacaacccgagatgtgctttgctcttttgtatgctttggcaaagctg

SEQ ID NO: 119771 - DNA, 185 bp, Glycine max
  unsure (1)..(185): unsure at all n locations
  Clone ID: PAT_MRT3847_79161C.1
gaaacagaaacacacaggagacananngagacgcgggncgcgangganggaggaggagccaacgcgcgcangccncgggncaaaaaccgcgagccgaaggacgacnacgccaagnncgagccccgcgacaccgacgcgagcancgccaacgcgccgcggcgcgngaagaacgcggaggngccgac

SEQ ID NO: 119772 - DNA, 289 bp, Glycine max
  Clone ID: PAT_MRT3847_79162C.1
cgccggcagctcgccccgcatggcccacccccccttcccaaacaccgcctggacccgcatgcagctggtgttctgcggtgcgctggagacctccaagctgaagcctgtcccatcctcttcctccctcttctccgacacgagcaacggtctgagcgtcgcccggagtgttgtgtacgaagggactctatctgctgggggttccttcgaatgtctgccccggcgggggtcccaccccttgtcccctggcgatgagaaggcgttgtactttcggtgtcgatcgttgggcggg

SEQ ID NO: 119773 - DNA, 281 bp, Glycine max
  Clone ID: PAT_MRT3847_79163C.1
gttcgaactcgggggtatttttatgcaggagttgtggctcggtagctacaaatccaaaatcaaaaaaaaaaaaaaagggaagattggattttgaaaaagttgggcggttgaaaattaccaggatacggggatctactttagacatgattcgttatctattttaacacttgtcccccatttccagttgaggacccacaaaaacacgggtttttcgtaaacatttccgggcataataatttattcccccccatatggggttttgaaaaggggaaacgggggga

SEQ ID NO: 119774 - DNA, 436 bp, Glycine max
  Clone ID: PAT_MRT3847_79164C.1
gggcccggatcccgcgggtccggcccacgacccacgcgcttctatttatcaaaacgactgaataaactgggcgcggaacaggaaggacacgagaagaggacacacacacaacacaggacgcgtccgtggtaagtcaggggagcacaacaacaacagagggggaccaactcaaggcggacgctgggttcagcacagaagagacggcaaaccgtgtggagcttccagagagaatgagcctgctattcgcccagagggtagaggcgcgtaagggcatggaagggcagcagcaaatgcagaggcaggcgcggaaggagcccgcaacaagagtggcagagcacaagaaaaccgacgaacagccgaaaggacccaacgagaaaataaacaccctcggcgcagggatcaagccaaaagaaagaccagtaaagatatgatacgc

SEQ ID NO: 119775 - DNA, 339 bp, Glycine max
  Clone ID: PAT_MRT3847_79165C.1
ggaactgcgggtgtgtatagcggaagcgtgactccaccaagaaccgggcggagcccagatgtctctataactcttccaacagacgaaatacaataccctaccgacaccacactcaatcgaaactcttcatgctattgtcatagatggggcaggagcatatgatctacgcgttcgtgtcggggagtacagtgattcttgcggaggacaccgaattcagcggaatcttgaacttcatcggctaccagtgccgtgacaagctccctgcctccgacaacatggtcagctacgattgcgacgcacgacgcctcaattacctagtcgacgatggctacacatatt

SEQ ID NO: 119776 - DNA, 329 bp, Glycine max
  Clone ID: PAT_MRT3847_79166C.1
ggcaaaaaaaaactttttcctaaattattattccagatgccaatgtacaattgtaaatccacaaaaaaaaaaaaaaaacctatggggagggggaggataaccggtttacctttaagctatgctgtaaaaaagggagccaaaaaaaaggtttggggggggggggaagggtttcccactacctaaattacctcatttacaaacacctaactttccgactcttgcctaaaagctgggaggctactaaactgaggggtttgctttgggaactttgttttcaacagaaaaactggtttaataacttcattaaattcttccaactgaaaatccaa

SEQ ID NO: 119777 - DNA, 781 bp, Glycine max
  unsure (1)..(781): unsure at all n locations
  Clone ID: PAT_MRT3847_79167C.1
gcgtccggggcagcactcagtctttacttcttccagcctaaagtccccccttcttccaattcaccaacaaacacagagctcctcccccttcaccctgaaatcccttttgtatgtgatcataggacccttcttgtccctcgtaatatgtctctttgtcaacctcgatgcttgccgtgattgcttgggtctattcttggtgggtcaccgccgccgtgcctcttccggtgacctccatgtgtcccaagttcaacagagcggtggttctgacggtggtgtacgccacccccattggagggatcagcacttcacaatttgctctgatacaatttttagaatgtaagtttaggcctaattcaacccaaaagctagctctaagtattctaacttggctttacttttagcggatgtgacttgggtttttctcaacatggttcttcttcggttttcctgttgccattctcttcctcttctcttttggtgcaccgtctgtttcctctatgttccaaaggactcctctcgggccttgtcttctttatcatttgacattcccggatggggagcttgcttccatggtcttgttggtgatggaagtgttagtgtgagtattgcatcccctttgaggttttatggttattactgtctccaatcagagcaagaattaatccttttatatgatgtaggttattgtggnctgtgttattgttcataatcccaaacaagaaacaagaggnggagaagctaatggattggaatgaacgcaagaagttaccttggaacctta

SEQ ID NO: 119778 - DNA, 541 bp, Glycine max
  Clone ID: PAT_MRT3847_79168C.1
ccatctcactaggacatgcggccggccccttcattccattttctcaccatcacttttttcttggagcgacattccactggcttaataagaacatcatctcaaggaacaacaagcctccatccttggaagcaggtttttgtcagaagcattgccagggctctgcattcctgctgcaatccatgagggggtgagggccacggatttggtatacgaccggccaccatatgctggggctaattctaataagtggccacaaacttgaactgcacaatactgacctggtccgtatttgatccggcccgggcattgacgaccacactttaatatgggggaagattattatgggcacgtgttgataatctacacaacatatgatgggcggatggaaccattatatgggtccctttccccccttcttattgcagccatttacattgaggctggatatgtatggtaaagaaaacaggtgtctaagaatgaagcctgctagtgaccggaaacttggctcatttaatccctggcgttaacccgcccggcccaa

SEQ ID NO: 119779 - DNA, 323 bp, Glycine max
  Clone ID: PAT_MRT3847_79169C.1
ggctcgagatctaaagtcactttggggagccattgatgagtgtgccttcccactcacatggaccaaaccgggacaaaggcagaaaaactgggcatagggcacggaggtctgcggcaccaaactgtacgagcgatcgaaatccgcgaagggactctctattactgaagttcagagtcaaccgaatgagatatgaatgaatcagaaccatgcagcattgataggaacaatgttcaacacactactgtggcttacgctgataaccaaaccgggtctgcggctggagatcccgacagtagacatgatcctttaagagagctccgaca

SEQ ID NO: 119780 - DNA, 272 bp, Glycine max
  unsure (1)..(272): unsure at all n locations
  Clone ID: PAT_MRT3847_7916C.1
ctctggttgggtatctgaatattacacaggtcatagacttttaanaataatttacgttgacaattgtcaagaacaaacttcattttttgggtaaatgtctgcatatttcattattttttcattgaaacgaagtacaatttctatctttagaagactagactagatgacaattctcccaatccgtatctattctacatctttaacgggaaactaaaatattttacactagaagcctggcaaaaacttgtataacactataggcagcagattgc

SEQ ID NO: 119781 - DNA, 1152 bp, Glycine max
  Clone ID: PAT_MRT3847_79170C.1
gtattgatgtctccatttgctattttgggatttgttatgaagcctttgcagttaaaaggttttgcccctactgattcagaaaaggcactgacactggggacagttgcatcagaagtttcagatgtgggggcttcaaatggaaaagatgaagcattgtccttgaaggcagagttcagagacaaaagctcacatgaaccttccaggtcaaaatgcacaatattagatcagttctcaagatttctgaaagacatgaaagaacttttgcttgataaagtttttgttgtcaatgttctaggttacatagcatacaactttgtaataggtgcttactcatattggggccctaaagctggttatagtatatataacatgactaatgcagatatgatgtttggaggaattactgttgtatgtggaatattgggcaccgtagcaggaggctttgttcttgatttcatgactaacacaatatcaaatgcatttaagcttctctcaatagcaacatttattggtggtgcatgctgttttggtgctttcttatttaaaagccagtatggcttccttgccctttttgctgttggtgaactacttgtttttgccactcagggtcctgtgaattatgtatgtctccattgtgttaaaccaagtttgaggccgctgtctatggctatgtctactggtcctgttcattgctctggacttgtaccgtcctcccctcctgttgggcttatgcaggataaaattaataactggagaacgaccgcattgattctaacaactatattctttccagcagcagcaatatggttcataggaatatttttgcccagtgtggatagatttaattaagatagtgagcatgaagtatcaagcgtggaaaggacaagcacggcaccattgcttgaagagaacactgctgaaacatcagcatctggtcaatcccgagaatgctgatttctttgtatattttgatgtctgtccaactagaatttttttcacaaagttattatggccaaattgaatttaaaaagcatataatttatgtaggagcattatgaatggcaatttgcattttttttatgtgtaaatatttttgcccagtggggatagatttaatgaagataagtagcatgaagtatcaagcgtggaaag

SEQ ID NO: 119782 - DNA, 223 bp, Glycine max
  Clone ID: PAT_MRT3847_79171C.1
ctgaagaagtgaaagaagaagcagaggagcctaaagaaactactgaaacagaatcagcagcagcagcaccaccagcagcttgctcacttcaatacacaactcccagaatttctcatgtcaccacgtggcaagcacgctgatgtggagccaagtgttgtgcttacacgtaggtgtacccttcataatacaaccaaagacttaagcatcatataataatattaat

SEQ ID NO: 119783 - DNA, 375 bp, Glycine max
  Clone ID: PAT_MRT3847_79172C.1
gaaatactgaataacccctattatagtgatactagactcttaaaataagccaacaaattataaaatgaaaaccactcgtaagatatcttctaagtcattgacacttgacaggatcattttttcccttctgtgcatggctgaatttctcttaacttttccttcatatttgacatggtggcaggaaacaaggaggaattatagttgcaggcccgggtaaaaacaacatctcataccttcacagagtatgtgcaagtgcaacaccctctattatgctccatcctttatataatatattttccttggtatttattagcttgacagcaattagttgtcaatcagcataatattcatgtcatataaacgtttttctgatat

SEQ ID NO: 119784 - DNA, 330 bp, Glycine max
  Clone ID: PAT_MRT3847_79173C.1
cacggaaaaataaaaaattttttttttttggggtaatatccaatcaaactttccccagggggggggggtccaaaccaaccaaaccccagcttttttgccctcgatttagcacccagttccccccccaatttctcacttttggtgttctccctcataaatggatcacaagatggggaaaaggggaaaaataacagggtgggtgatagaataaaagaaatccataaaaaccaacccctaattggggggggggaaaaatggggcaaccgggggggggagccatttcaaccgggggcccaattttttagccaattccttgtttctggcggaaaa

SEQ ID NO: 119785 - DNA, 394 bp, Glycine max
  Clone ID: PAT_MRT3847_79174C.1
tttttttttttttacttttttttttgttttttttttttggttttgtttttaaatgttaacataatgtttatagatggggggatacaaaattgattcgtttcctatgttacttgggaacaaaaaaaaaaaattgggtgacttacctaataaccccatcctttgtgttttttgggattttaaaaacaaaccgctggttaaaaaaaccccagcccgaaaaaaaaaaaaacttttttaaaaaaaaggggggggtcaaaaaaaagggcaccccatgggaaaaaccttttttccaacacatgacccctaaatgtcttttggggtggccacaaaaaattgggggccggttgtattttctgtgtgcccccccataaaatcttgggggaaaaacccttggggg

SEQ ID NO: 119786 - DNA, 1334 bp, Glycine max
  Clone ID: PAT_MRT3847_79175C.1
gcagtaatgcagagtctgccaacggagatgagagaatctcttagcgcagaagcacagcagcgaaattgcctgatagatagcttgcagcacctccttgcctgagttcctgcgtggctgcagaagcggaattgtatcatcctcgctgagctgtattacagcccctggcctttccagtttcatagtccagccggaatgaaaatagaccctttgtggatactgaatctcatctgaaaacctccccggcttaattggcttcacaagcatctagtagtgaaagttgtctaacaatttgtgctcctctggaatcatcatgtgctcaccctgctactccaagcaaaaccactgagtacgccgaaaacaaagatgggtctctcaagagcattgatgccatgtcaactccagctaaacttgtttctactccaattaggttgatgagtgccacacctgccttgcggtcacccaaaaggcattatatgagcccagatgaccactctatcagttctttgaacaagttagctcggcgtccacctcgctcaaggtcattgaaatttgacactccagtgaagaacaaggatgatatttttgacaccctccaagaaagtacttatccaatcgattagagaaaaggaaaggctggcaatggaggaaagagacccagctatcacagaagcaaagaaacgaaagaaaaatatagctagcctccctaagctctttgacatgatacgtgggttacttagacagcggaattgtatcactaaagcagagcttgtaagcaagataatctcaagccgatgtgatattgctgacagaagtgaagttgaagagcagctaaatttgttgcaagaactagcaccagaatggatttctgagaagcaggtctctagtggggatttgctattattcataaataaaatgttgagccctgaaaccgttcgagcatcccttgaagaagcaacatagggagcaaggagacagataaattaattgaaagtaccattggaggtttattaaggctggtgtgttttgtacagtgttttaggctactcgtagatgaactatttattttcttgagttgcttgtagctgtccaatcgtgtctctctctctctctctctctctctctctctctctatatatatatatatatatatatatatatatattctttttggtggattggctgtgcttttttgtaaaatgtgagtaccacaatacagccagatcaaaggaaacactcctttttaattatttacctagggtgtggattggcagtgtttttttgtacaggatataattcatcctaatttaagctgatcaatacgatctatttgaact

SEQ ID NO: 119787 - DNA, 298 bp, Glycine max
  unsure (1)..(298): unsure at all n locations
  Clone ID: PAT_MRT3847_79176C.1
cgacgaggagagtngatcgtcggcaaatctcaacaagctgacanaggatcaccanacctatactcactcctcagtgctcctcctcctcttctctctagccnnagggttcanaancccaaatgtgatgtgnctatcaanatgaccatgatgggtncaancctncaaagtgttccatgtggttcagcccttggttncccccanttcagannccttnaaaaccaatgtccatggggaagagangtgttcctaacaggnaanaaagncaanggaccaagcccaggttggcagtaacctttnt

SEQ ID NO: 119788 - DNA, 303 bp, Glycine max
  Clone ID: PAT_MRT3847_79177C.1
gcggatcgagctatacgtcaagtgcaccagcttcgcatgaaagtgcaggtgatgatgatggagctattagtgtgaacattgagagagatgctagtttgagtggacaaagtgacgagatgtcttctgggggaggcttgactgcagatgcggcagaggagactgagcacgatactaatactgacagtgatgacgatgacgtgctcaaacctgcaatgcctatcctgatgaagaagcgcagactacagagtacggcttcagagactgaaagatgtacgaccttagcagacggagacgatgaggatg

SEQ ID NO: 119789 - DNA, 525 bp, Glycine max
  Clone ID: PAT_MRT3847_79178C.1
gtcatagttatttcataatctattaattttatacatgtgttatatggaatccatcgctaattctcctcaaatgttccatcaaaaacacacccaagtgaccaaattctttgtttccgcgcactcagccgacaacaatccaaaaacagcaggactctttttgatagaaatgcaaacgctaatcgcttgccgagtgaggagagggcatctcttttggatggtcctttgaagcatttggccgatttggactccaccattcccacttcggcacattcgacgtccacaatgacaaacagtgacccgagtttggccacttccgcttttctgactacgaatttcgactcaacaatggacccgctgttttctcctcccccggcaccgattgtgccagatttaacggcagaggagggcaccacattaatgagtgcgggcgactcacatgacccaccggaactgcgccattgggccaacatcggagaaacaaatgccttccatttcttgcatcagctggagaatgagttgaggagg

SEQ ID NO: 119790 - DNA, 198 bp, Glycine max
  unsure (1)..(198): unsure at all n locations
  Clone ID: PAT_MRT3847_79179C.1
agcgaccagngcggctcgagcaacttttaagttccttttctcaatactttttcaccccccaaaaccccctagaaagaaattctctacaacaatagagccccccaacactctacccaacactatcttcatctcttctcaacttcaaactctttccctctcaaacaatattattttattccaaccaccccccctattttt

SEQ ID NO: 119791 - DNA, 181 bp, Glycine max
  Clone ID: PAT_MRT3847_7917C.1
cccacgcgtacgaacagggatgcctgattgaaatatagtatatatggtgaatactgtgacgagtccgttcagacggaaaccgagttatatgatttacatcgttacgtatcagaacaggcaaaaatttgcacctcgtagtacataagcagtgactatgatattggaagcaaacatgtgtttt

SEQ ID NO: 119792 - DNA, 751 bp, Glycine max
  Clone ID: PAT_MRT3847_79180C.1
ctatattcttatatatcatcaccaaacaaccaaaccatataccaccaaattaaattgcctttctcccacatcaaattaacatcattccctatgacagatcctcagtccaatttgttccatgaatggttcaacttcatgctcctccaccctcactactcctcttctcaatccaattacccttttgctaataattactcaaacaacaacaggtttggaattcaattacaacaaggagcagcctcatcttcatcttcatctttctatgcagctcctccttcttcccctcctctcagagaggcccttcctctaatcaacaagataagcctcaaaagtagtgagcagcaccaacaaaatgaaccctcctcaaatgttgtagaggagaaagaagaggacaagaacaaagtggacaacaacaaacatcatgagagtggtgaagatggtgatgaagaaactgtgactgttgccctacacatagggcttcctagaatggatacttcttcttctgatctggggccatcaagggtggtctcaacaacttgtatggaaattagtgaaaaagaggaagtgaacatgatttctaaacaccctttggataatagattgaacaagggtcagtattggattcccaccccttctcagattctcattggtcctacacagttcccatgtcctgtgtgctctaaaactttcaacagatacaataatcttccatgcatatgtggggaatggatctaatacagaaggggcctga

SEQ ID NO: 119793 - DNA, 457 bp, Glycine max
  Clone ID: PAT_MRT3847_79181C.1
gtagatgtgtccgtgtaaaataattcctttttaaaatgattgttttctttgattacatactggttgtttttaattaatggttagtgacatcaaatgatttgttcatagtttaacaaccagaaatattactataacaacgaacaaagacaagtgctagtgctccttttccgggaagacttcttcttactgtagcctctccaatgaaactataggggggtttgcttttcccttagttgaggagtccatgtcttcaagcgtgctagtctttccttcagagctgctttcactggaagatgtatcgctcaatgtgtgggacattgtcatattcttttgctttgcatactgaaatgagtagtttgtttttcccctttgcaccggaagcacaggttttggtcttgagtgagccgggtcccttccctctcttttcttggttgggcggccgagaccttcttttgtc

SEQ ID NO: 119794 - DNA, 251 bp, Glycine max
  Clone ID: PAT_MRT3847_79182C.1
taccggtgccgggaatatcccgggtgcgacccacgcgtgtcgcgcggcctcacaccttggagttattctctttctttttttttagctctccctctcttgaaagatctagatctaggtcttccttggtctacatacatcttttagtgatcggatctgtctgagatctgaacgcagatttacacagccgatggcggttttggcctggcctttcatagatctgcagcagggtagctcagatttactgcccacag

SEQ ID NO: 119795 - DNA, 2058 bp, Glycine max
  Clone ID: PAT_MRT3847_79183C.1
atggcggagacggtgagacttcgcgtggtgttcgaggatcgtggcatgttgagcaagtcaaagaagaagcaagggctcaagcgttgctggtttctgcttaaaccccaacacaccaccatttccgatgttgcctctcatctactcaacactttccgcctccaccgcacctgtccccatggcatcgtcctatcgatggatggttttgttttgccatcttttgagttcacttgcattttgaaggataaggacattgtgtgtgtgaaaagaaaaggaagtgtatcaactgatgataaatctgcaatgctgcggcccgcgacatgtgagaatcaggctattgagcttcagaaacttctcacaattgagggccttcaagaggaggagtctggggcagaagaaaccatgtcccaaaaggatgatgatgaccagcttgaagatgcagtttatgtggaatctaaatcggatgggaatgttgtcttcaagaaaagaaaagcttcaaagaagctcaagagccctagtcagaagaagattaagttgtctactgccgaaaacttgtcagtcactcctaaggtccatgagaaggaaaacggaagctctgaaggccatgaggaggaaaacggaagctttgacggctatattcatcaccaattgagtcttgtcaagaaggacaagaagaagtcttccaatttatctagtcagccaaataagtcaagcaaccttaataaacaaaagaatgacaaaagtgatcctacaagtgatgaaacaagaagtgctcggcgaaagaaagctaaaagaagatggctgagggaactaaaattagagaaggagaaggagaaggtaatctgtggtgctacggtgctattgtgttgtggaattccatggttcgcaatcatgactttgtttgctattgcggcatctcaatcaatagatggatgtggaactgcatgtgacctttttcccaatcaatcccagtgtcccactcctcccacgcatctccatcagactcctgtgcttgaaaaaggtggacaagaattacctatcaacgataataattgtgttgtttctgatgtacatcaacaacctgatgaagaaagtgaagaagaggatgacattgctcctgtggaaattaggccagggcacattcggattaattgctttcatgatctgatatatgtccatggtctatttgatgcagatcaggatcaggcagtgccacagaatcagtttccagtggaaacatttcagtggaatggaataaccaacaagaagaagggccagaaatggggtaaagagagaatgcctttccgtaagcaggatggatatgaagattccggtcaagattgtcctacagttcagaatgctgaaaaggaacagacatccaatgtgatagattttgataagcttaaacattatacaagcttgcctaaggaaggtgatgtaattgcttatcgattgattgagttaacagcatcttggactccggaactttcctcctttagggttgggaaaatatctcggtatgatgctaaatcaaataggatttggctggaaccagttttagaatacccatttgattttaagaaaaaaatagatgaggatgcatcttctgtacagtatgatccatccccttatcaggaggatggttctttagagatagagtatacattgctggccgatgttcgaatggttaagcatggcattcctgatttgaaaagtgatgctttggttaatccaacaaaagcaactaatgatattaccaatgaaaaacttgcggcaaaagcaattaatggtagcactggtgagaaactcgcgggtgatcaaactactgtgggaagttgccatccagaaagaggtcatatcactgctaaagaaaatggggaagtaaacgtgtgggacaaaattaacgaggcattaaaagcaaagaaggccaagctgtcgcaggaggattgttggagtagaggaggagagagctcaagcacgaggtcatggtcccatagagccatgagatgcagtgcgttgggtcccacaatggcattgttaaggtctaacaatggactttaa

SEQ ID NO: 119796 - DNA, 762 bp, Glycine max
  unsure (1)..(762): unsure at all n locations
  Clone ID: PAT_MRT3847_79184C.1
ccacgcgtccggctcggcgaaagaaagctaaaagaagatggctgagggaactaaaattagagaaggagaaggagaagctccatcagactcctgtgcttgaaaaaggtggacaagaattacctatcaacgataataattgtgttgtttctgatgtacatcaacaacctgatgaagaaagtgaagaagaggatgacattgctcctgtggaaattaggccagggcacattcggtttgagccccttaagaaggatcaggatcaggcagtgccacagaatcagtttccagtggaaacatttcagtggaatggaataaccaacaagaagaagggccagaaatggggtaaagagagaatgcctttccgtaagcaggatggatatgaagattccggtcaagattgtcctacagttcagaatgctgaaaaggaacagacatccaatgtgatagattttgataagcttaaacattatacaagcttgcctaaggaaggtgatgtaattgcttatcgattgattgagttaacagcatcttggactccggaactttcctcctttagggttgggaaaatatctcggtatgatgctaaatcaaataggatttggctggaaccagttntagaatacccatttgattttaagaaaaaaatagatgaggatgcatcttctgtacagtatgatccatccccttatcaggaggatggttctttagagatagagtatacattgctggccgatgttccaatggttaagcatggcattcctgatt

SEQ ID NO: 119797 - DNA, 8425 bp, Glycine max
  Clone ID: PAT_MRT3847_79185C.1
caaaaccccgtaatgatgctgatgtttctccttggctcctactagtagtgtagttagcgtggtctgcttgtgccgccttcgcttcttatttttcccgcgaatgtacggccaccctttccagttccgcggcggctatcgacacccgccgccgccgcagcagtctgcaaaccctaacaacaacttcttccaacaaccggcgctcccaaatgtcccgaaccccaacagcgtcttcttccaaccaccgctgccgccgtctttctcattcccaaacacctcttgccctttccctcctcagaacccatcccctcctccgcctccgcctccaaaccctaatctcgcaatcgaacacgccgaccgcgccatcgccaacgcctgccgcgctcttctcgccgccggcgactccgtctcggcgtggacggtttcccagaacgctctcctcacgctccaggtggattcatggaacacgttgggcatcaaaatgcagcaagttccctcacttcatcggcttatgatgaccgaaggcaaggtgaatgcttttgtccattgctttgtcggggtccagaggatcacttcattgtatgatttggaagtggcaatatgcaagaatgagggtgtcgatgactttgaagagctagggttgggacctttcttgcggcaccccttggttattcattatttctcgcttcgctctgatgttacccaggtgtataagattaccactgaggaaataattcagttgctaattgagtttttggatgcttctagaagtaatgaattcatcaaggttgaacagtttttggattttattgccaacaagcgattggttgaatgcaaggaatggcttgggattcggattcagaacttgggaatgcatatatatgccatacgggaagctagaaattcagagcaatctgccatgcgggaagttagaaagttagggcaatctgctcgacgggaagctagaaagttagggcaatctgctcgacgggaagctagaaagttagggcaatctgctcgacgggaagctagaaattcagagcaatctgccatacaggaagctagaaattcagagcaatctgctgtacaggaagctagcaattcagagcaatcagcatacgagaaatgcttggagtcatttttgaaaaatgggaagttccggtaccgtactattccttcctctcagaaaaaacagttagatgaacgttttaatgccattactcagcgtgttgagtctttttctcctgtaaaaaagtctttttgtggaaagcataaaagatttatgtcatcagcctcagaagatgaagatagtgattcttctacagatgaacaaagtaataacatcattaagggtagccagtcaaacccatcatcacaattcactagaagttcagaacgagtgagtagttgcccttacccatctgcaactgaagagaaggctcgacttggggtgaggagtgatatggcggggcactcccttgttaatagcaaccttaaaaaaggatttagtgagcaacctagaaaaaaaagaaaatttgaaaatgcaacttctacaagatctgctccttataagttgcgtaagagaaacaaacttggagttgtaaccccaatcaatactggtaacaaaaccaagatgtttgtcacaacctggaagatggcatgttcggagcacaaggttgccgaggttttggagatgatgcttcaattctctaaagtaaaccgtttccagaagaggaaaatcaaaaatttgttctcatcatatcctttcattgggttactgaatgctgctgtttcatctatcaaatctggaatgaggaacaacatctatgataccttccaagctatcatcgataatggattgggcaactcaccgaccaagggttctgaatacgatactatagacgttggaccaggccaggaaaatgtaccggtcataactaaggataacacagagaatacaaagtgtatttcttctgatgatgtcatcagaaaaattggaacttattttgaccatggcaatgatataaatagaaatagtaacgactcactagtgcaatatagaattatgttgtggaggaagttttgcagctgtgaaaattgggtggctgagcagtttggtatgaaaaaattcgattctcttggttatggagatttcttatcattccttgagaagcaccctaacctgttacctcatgaactactgaagttgttggttggtgacacgtgcgaaaattcctctttcagggcctgtatgtcctcaaatcaattgattgctctagtatctcaggctctaagtggtttgtgggagaatgaaacaataaccaagcaaatgatatccatgctgcttatgaggcagttcccttcaattaattttgaacttgtggaaaatggctctcttgtggatctgctggatactgttaaggggcatacatctagcgtgacttcaaaatgtgttgtattttctgctactattatagaaaagaactataatggagactcatcaagtgatagagataacaattggtcagaaattcccactgataggtctgaaacgagccataaaaaaagcactgaaactgttatagcaaaaaatgcaattgaagtcttgctgaaggcgccaatgttgtctgacttgagcaagtggtctcattgggatcttaggtttgcacccttcctaggtccatttatatcgtggctgttgaatgatgtaaataccaaggaactgttttgcttagttaccagagatggaaaggtgatacggatagatcattctgctaccttggactctttcctggaggctgcagttcaaggatcctctttccaaactgcagtgcatttgctgtctctgatctcacttgttgggggagaaaaatatgttccattgtcacttctaaaatgccattcctgccatgcatttgaagttatgttcagaaactctgtagaagatgttgaagttagtaatgatgggaatgctctccaccagtctgtggaagcattaagtaaaacaaaatttttaactgaaatttcaactgctaaaatgagaagtgtgtttagcaaacacatgcataaagtgagtaaggtagcatccattctgtcaaggtttgtccttgattgtcttggtaacttaccggctgaatttcacagttttgcttctgatgtgttgctttctgggatgcaatctgttttcaaggatgccgcttcaactattttatgtgaatgcagcaatatggagcaacgtctcatgcttcatgaaatagggttatctctgggtatttctgagtggattaatgattaccatgcacttatttcaaacaactcttctgacattcattgtgctcgtgtttcatgcttaaaagatgccacaactgatataaacacaagtctgaagcttgaccaagttaccttggataagtctcctatacctgaagcaaatatggttacatctcttgtaccccatcgacttattgaagggtgtacagaaatcattgaaacagttgatccagaaaaatctaatgatgaatctaacacttgctgtctgggaaattcatttcaacatgtcgaagatatggatgcttctcggcttattgaatctattaggcgagatgaatttggcctagattcaagtctttctgatattgatagttgcatgttgaagaagcaacatgctcggttaggtagagcactgcattgcctttcacaagagctatattctcaagattctcattttattcttgaattggttcaaaatgcagatgacaataattatccagagaatgtggaaccaactcttacatttattcttcgagattctggtattgttgtattgaataatgagcgaggtttctcagctcaaaatatgagagcactttgtgatgttggaaattcaacaaagaaaggatctactgctggatacatagggaagaaaggcattggtttcaagtctgtgttccgagtcacagatgctccagaaattcattccaatggttttcatgttaaatttgacattagtgaaggccagattggttttgttttgcccacagtagtacctccttgtgacattggggtgctcaggaggatggcatctactgatactgaattgtgtgacgataatccctggaacacatgcattctgcttccattcagatctcatctatcagaaggaatggccatgaatagtgttttgtctatgttttcagatcttcatccttcactgttactatttcttcaccgcctcaagtgtatcaagttaagaaacttgcttaatgatacacttactgttatgaaaaaagaaatttcaggagatggtatcattaaggtttctcatgggaaagagaaaatagtgtggtttgtagtatctcagaagttgcaaacaaattccattcgctttgatgtgcagacaactgaaatttctatggcgtttactctgcaggaatcagataatggttacattccatgttcagatcagcagccagtttttgcatttcttcctttaagaacatatggcctgaagtttattcttcaaggtgattttgttcttccttcatctagagaggaagttgatggagatagtccatggaaccagtggttattgtcagagtatcctaatttgtttgtcagagcacagagagagttttgtgaacttccctgttttaggagtgagcctggaaagggactgtctgctttcatgagttttgttcctttagttggggaagtgcatggttttttctccagtcttcctcgcttgattatttctaaattacgtatgatgaattgcttacttgtggacggtgacaataatgaatgggccccaccatgcaaggtattgagaggttggacagagcaggtgcgtaatcttattcctgacaacatgcttcttgaacaccttgggcttatatacctggatagaaatatagtattgtctgatgaactagcaagggcactaggcattgaggagtttgggcctaacattcttgttcgagtactgtcatctttatgccatacgaagagtggtctgatatcgatggatatgagttggttagcttcttgtctaaatattctttctgtaacaatgttcaattcgtctggctctgtgccaatcaattttgaaatgaaagatgttcagaaaaatcttcaaaaaatgccatttattccactttcagatggtacatacagctcagtggatgaaggcactatatggttgcatttcaatcatttaaacacaggatttgatggtgagcataaaattgaagctttccctaatatatgtgctaaactaaggactgtaagtcctttccttttttctgcatcttctggtactccgagcttgaatgtgacatttttggacaatgttacccggttacttcagagtattggtgttcaacagttgtctgtacatgatgttgtgaagctgcatattttacctgcattgtctgatgaaacaatggcaaacaaaaacagagtgctgatgattgaatatgtatgttttgtaatgctacacctgaactcgagctgttctgattgttttattgaaagggagcatataatatccgagtttagatgtaaatctttgttattgacaaattatggtttcaagtgtcctgctgagataccaattcatttctgtactggatttgggaatcctgtcactccaaaaatgttggctgatagtgtgagtatgaggtggcatgaggttgacataagctatttaagccacccagtaaatgaatcagtttcatctgcactgattaagtggagggatttttttgagaaatttggcatcacagattttgctcaagtagttcaggtggataagagtgttgtcgatatatgtgatgtcacatttaagcagatgatgtgggataggggtctaatatctgctgagtcaatagtcaaagattgggaatcctctgaaattgtgcaattagtatccttattgtctaaaagtggcaatctagaaaattgtaaatatctcttggaggttcttgatacattatgggatgtttgttatagtaataaaactacgggttatttctatcttaaatctgttggagatggccatccctttaagtctacttttatatgcagcctcataacacaaatgaccaaattgtatgcattcatttggaatgaaatggcatcttcaaagaagaaaactatggaaggtttgatgtctggaccttttatatttatcccatactcatctgtctatgatcatgatgatgctgcatgtgggacgtttgtgtctcccaatgaagtctattggcatgattcaactggttctattcagaaaatgaaggagttccatcctcaatgtggctcatcttcttcccctataaacaagtcattatgcaatatttaccctagtcttcgtggtttctttgttgatgaatgtcaagtacaagaggcacctcctctatgcagctatattcaaattatgttgcagttatcaactgttactttgccttcacaagcagcagataaaattttgcaagttttcctcaagtgggcagatggactaaaatctggtttgctgagtgttgaggatgtcacatatctcaaagaatgtctttcaaaattggaatttccagtgcttcccactgtgcaagataagtgggtttcgttgcatccttcctttggtcttgtctgctggtgcgatgataagaagttgaaaaaggaatttaaacattcagacaacctcgactttctctatttcggtgaactggttgaggatgataaggaaatggggcaagaaaaaatttccatcctcatgaaaaacttaggtattccagctatctcagaggtggtaactcgggaaccaatatattatggtcttgctgattgtagtttgaaaaagtcattggtaaactggactctgccatatgcccagcgctacattcataaatttcatattgataaatatgataaactcaagcagtctggttttgatattttcaaccatctgaatgtcattgttgttgagaagctgttctacaggaatgttataaagacctgtggcagtgtatcaaaaaaacgagtcgaatgtagttgtcttttgcagggaaacattttgtacaccattaaagaatcagattatcattccttgtttatggagctttctagtttgttactaaatgggacttctgaattgcacttggcaaatttccttcatatgataacaaccatgacagaatctggttcctctgaggagcaaatagaatttttcattttgaatagccaaaaagtaccaaaactttcagatgaagaaactgatgacaattcagcaagcataatttctccaccagtttgtgctgaacaaggatcagttactgttgactggaccttcaaagaagatccaccagcaagttcagtggcactagtgttgcatgaaaatgataactttgaagatcaatcttgtcatgattttgatcccactgcttttagtatccatgctgattctgatcctgttagtttggatgaatctctggatgaagctcatttcagttcaccagcttttggcaagagagatcaattacaaactggtacatttgatgctgcacaagcaaaggaaactggcagattaggtgaatttcttgcatgcaaatactttgtcgataaagttggcaatactgcagtaaggtgggttaataaagataatgaaactggacttccatatgatttagtcattggggaggataacagccaagaattcatagaagttaaagcaaccagatctccaagaaaagactggttcaacatatcagcgagagagtggcagtttgcaaatgaaagaggccaatcttttagcattgcatttgtcgctataatgggaaataatgttgcaagggtcacgatattcaaagatccagtgaagttatgccagcgaggtgagctgcaattggctgttatgatgcgaagacaacagaagcagttctctgttgtctcatagcttctgttcttgttttactatgttgggtggatagacttagtgaagcccatattatgatttgcaaaaagctatcttttggcatcatggcatgccatagaaatccaattggatatcacttaatgcaagatatgttgatcacgtgagttgttgtacacaacattttgctgctacatggatttgtttctacttttgcatggaagatacctgatgcaaatagtgtgagaatacaataagcagattttttctgccttctcttattcatggagattcagtttcattcaggtcttcttgaaagtagttcctgtcagtttcagctttttgtatgtgtatatctctagtgtttatggctgcaacatttgcgtgtaacatatttttcgtttaattgggcgaagcttaaggtccacatctgagcatgtaaatacaaacttgtctacgcggttatgttccactatctattaagacttattacgcggttatccattt

SEQ ID NO: 119798 - DNA, 2871 bp, Glycine max
  Clone ID: PAT_MRT3847_79186C.1
accgtttatataagcttagcaagggtttaagaagtcgaacgagcgagcactgagcagcggttgcaggaaaagccgtgtcagcgagcgtcgcattcacggcgatggcggagacggtgagacttcgcgtggtgttcgaggatcgtggcatgttgagcaagtcaaagaagaagcaagggctcaagcgttgctggtttctgcttaaaccccaacacaccaccatttccgatgttgcctctcatctactcaacactttccgcctccaccgcacctgtccccatggcatcgtcctatcgatggatggttttgttttgccatcttttgagttcacttgcattttgaaggataaggacattgtgtgtgtgaaaagaaaaggaagtgtatcaactgatgataaatctgcaatgctgcggcccgcgacatgtgagaatcaggctattgagctgcagcaacttctcacagttgagtggcttcaagaagaggagtctggggcagaagaaaccatgtcccataatgttgatgatgaccagcttgaacatgcagtttatgtggtatctaaatcggatgggaatgatgtcttcaagaaaagtaaagcgtcaaagaagctcatgagccctagtcataagaagattaagttgcgctactgccgtaaacttgtcagtcactcctaaggtccatgagaaggaaaacggaaactctgaaggccatgaggaggaaaacggaagctttgacggctatattcatcaccaattgagtcttgtcaagaaggacaagaagaagtcttccaatttatctagtcagccaaataagtcaagcaaccttaataaacaaaagaatgacaaaagtgatcctacaagtgatgaaacaaggtttgtccagcctcaagatgaaagtgaaactaaaaaggaatttccatttttatggatatctttctggacacttcatctcacttggtcattttattctgtttcaatagtcaatacgtccatctcttcacaaaagaacaggggatgccaattgcctagcagaagtggtcggcgaaagaaagctaaatgaagatggctgagggaactaaaattaaagaagtagaaggagaaggtaatctgccactatagtggtgctacggtgccattgtgttgtggaattccatggttcgcaatcatgactttgtttgctattgcggcatctcaatcaatagatggatgtggaactgcatgtgacctttttcccaatcaatcccagtgtcccactcctcccacgcatctccatcagactcctgtgcttgaaaaaggtggacaagaattacctatcaacgataataattgtgttgtttctgatgtacatcaacaacctgatgaagaaagtgaagaagaggatgacattgctcctgtggaaattaggccagggcacattcggtttgagccccttaagaagggtttgcatgcagatctcagctataaatttttgaaagtagcagttgtgtttttgggcttcaggattaattgctttcatgatctgatatatgtccatggtctatttgatgcagatcaggatcaggcagtgccacagaatcagtttccagtggaaacatttcagtggaatggaataaccaacaagaagaagggccagaaatggggtaaagagagaatgcctttccgtaagcaggatggatatgaagattccggtcaagattgtcctacagttcagaatgctgaaaaggaacagacatccaatgtgatagattttgataagcttaaacattatacaagcttgcctaaggaaggtgatgtaattgcttatcgattgattgagttaacagcatcttggactccggaactttcctcctttagggttgggaaaatatctcggtatgatgctaaatcaaataggatttggctggaaccagttttagaatacccatttgattttaagaaaaaaatagatgaggatgcatcttctgtacagtatgatccatccccttatcaggaggatggttctttagagatagagtatacattgctggccgatgttcgaatggttaagcatggcattcctgatttgaaaagtgatgctttggttaatccaacaaaagcaactaatgatattaccaatgaaaaacttgcggcaaaagcaattaatggtagcactggtgagaaactcgcgggtgatcaaactactgtgggaagttgccatccagaaagaggtcatatcactgctaaagaaaatggggaagtaaacgtgtgggacaaaattaacgaggcattaaaagcaaagaaggccaagctgtcgcaggaggattgttggagtagaggaggagagagctcaagcacgaggtcatggtcccatagagccatgagatgcagtgcgttgggtcccacaatggcattgttaaggtctaacaatggactttaagaaacaagcctacatctgttgtgtcacctatccgcagtattttggtatatatgaacaaattaccgaaactatcatctttttggtacatatgaacaaattaccgaaccatcatcagcaattcaggctgcatgtcctgatttcagtatattataggcaaaaatatttgaaggcttattcttattatccctctttcggatgttattagttgcagtcctcctgaaaaccaagcagaaaattgaatcaactgctacacaacatgagagaccattgttcaccatcccaagtaccaaacaaaagaaattatgattatagataaaaacgcttcttttcatacaatttactgttaaaattatattgttgttagttggcagaccgtattgtatgcaaaccctgcaggctaaaagaaatcagtgtttcacactcaaaagttaaattctaaataaacatgggtttttgaagctt

SEQ ID NO: 119799 - DNA, 830 bp, Glycine max
  Clone ID: PAT_MRT3847_79187C.1
ggctcgagctcgagtccggatcggctcgagcttttcactcacacaattcttcaaacaccttgcaccaaaaaacaacgacaacttcttccagtgcatggaactccggcgacatcggtggcgccgctagtaattaataatggcttccacagtcgcttccgcgatggcttccacctccgccgccgagcccgaccccgatgcggcggcgaggaagcgctacgagggccttctcacagttcgcacgcgtgccatcaaaggcaaaggcgcgtggtactgggcccacctcgagcccatgctgctgaacaacgccgtcaagctcaaatgctccctctgcgactctctcttctccgcttccaacccttcccgaaccgcttccgagcatctcaagcgtggcgcgtgccccaatttcaaccactcttcgttgccttcaccttctcctatttccactgtcctctctcattcccattccaacaacggcagaaagagaacctccacctcaacctcaaactctccgaaccaggaccactctgttcagcatttggtgttgtctggtggaaaagatgatttgtgtgctctcgctgttttcgaggacagtgtcaagaagctcaagagtcctaggaacttgtcgcatgttgctcctcctgagttgaccaaggaccaggttaactctgctgttgaattgctggcagattggttctacgagtcttgtggctctgtgcctctctctgctcttgaacacccaaagtttcaatcttttctcacccagctgggtttgccggtgactctgttaagacgagagatatatgggtctaggctcgatgataggttcggat

SEQ ID NO: 119800 - DNA, 1113 bp, Glycine max
  Clone ID: PAT_MRT3847_79188C.1
ggtccggattcccgggtcgacccacgcgtccgcttcttctaaccatttccttttaacatcttcttcttcttcttcttctatctctcttcaccacttctccaaatcctctctgggtgccgtgtcgtctgagactaacgacaaacaagagataagatgcagagcaatatccaaaccacgaacacaagaatgttcagacatatttcagggtagtctagcaacgttaaagtttcgtgagattaatgtggaagatgacatagaagaggagcaagacattggggctttggtggcaaatgagatcaagaagagagtggacactatcaaatcaatattgggttccatggaagatggagagataacagtatctgcttatgacactgcttgggttgctctgatagaagatgttcatggaactggtgtccctcaatttccatcgagtctagaatggatagcgaaaaatcaacaccccgatggttcatggggtgataaggaattattctcagcccatgatcggattattaacacgttggcatgtgttatcgcattaaaaacatggaatatgcaccctgaaaagtgtgagaaaggaatggcattttttagagagaatcttggcaagcttcagaacgagaatgtagagcatatgccaattggttttgaagtagcctttccatcacttcttgacatggctcgtggcttggacattgaagtgccgaacaattccccaatccttaataaaatcttcgcaatgagaaacgtaaaactcacaagaataccaagagctatgaggcataaagtgcccacaagtctccttcatagcttggaagggatgtcaggccttgactggaaagaacttctaaaactgcagtctcaagacgggtctttcttgttttctccgtcatccacagcctttgctctcatgcaaactaaggaccaaaattgccacaattacttgaataaagtggtcaagaggttcaatgggggagttccaaacgtgtatccagtggatttgttcgaacatatttgggtggttgataggcttgaacgtctaggaatatctcagtattttcagcaagagatcaaggactgtttgagttatgtttacagatattggactga

SEQ ID NO: 119801 - DNA, 449 bp, Glycine max
  Clone ID: PAT_MRT3847_79189C.1
gcctgcacgcctactctagagtgatcctctccgctgaattcgcagtcacacattgtcagtacgtaaggaggcaatcttgtacatatctgaataggaatgatttgttatcgttattaggcctatcctgatgccaaaggaagtgagatcgagattcctcgtgaaattccaataccacatttctaagaaataaggaggcacaattgtgcatatgtgaataggaattatttgtttgcttattaggcctatcctgaagccaacggaaatgagatcggaattcctcggggatttccaatttcacattttctagaaatatggaggcaaaaatgtgaatatgtgaatcggaattatttgttttcttattaagcctatcctgaatccaaaggatatgacatcgtaattcctggggggtaccgagctgaaattccctatattgaggcaaattaaactct

SEQ ID NO: 119802 - DNA, 245 bp, Glycine max
  Clone ID: PAT_MRT3847_7918C.1
aaaatggaaactcacttatatattgattaaatataaagaagtaacagtaccattatccttaaatttgtggggctaccatatgaattatgacccatttgagtggtttaagttacaagatatgtcttgttgtataagatacatgccctgataaatccttgcatgaatagataaggctactatttttttagacacttatatgggtgatctttgtactaattaaagcctcctgttattttccatattta

SEQ ID NO: 119803 - DNA, 261 bp, Glycine max
  unsure (1)..(261): unsure at all n locations
  Clone ID: PAT_MRT3847_79190C.1
caatttttgataaggagggtaacaggtacacagcagctgatttgttagagtatgctgatcccaagagaatttctgtttatctccatgccacggtgcagaagatactatttaagtataacacagaaaaaagaaggcaacaagcttatggagtaattttcaaagatgcattgggagtgatgcntgggggggtgttaagcacgacgggaaggagtgagatgttcttatctgctggtgctcttggttgccctccgttgctggtgc

SEQ ID NO: 119804 - DNA, 623 bp, Glycine max
  Clone ID: PAT_MRT3847_79191C.1
gcgcccttttttttttttttttttttttttttttttttttttttttttttttttttttttttttttttttttttttttttttttttaacccaaaaagcctattaattttaacctggaagaaaaaaaaaaagggggtttatgggtcccatgggaaaattttactatattacagggtaactaaaaaaccaaaaaagggttgggggggtaacggaaaaacccaaattaactacaacccccaaaagggggccaactgggggcctaaaaaaacccaccggggaactacttggaacctggattctaaaaatggggttggccattgggtttttttcaccaaaagccctctggggggcccccaaccagccaaaaaaaaccaccttttgggggagggtactcaagcaagccttaacactaccactggtaaaaaggggggaaaaaaaaaaaaaaaatcttttaggctctaaaccaggtttgggaaaaattccttttttttaaaacccaactttccgggattttgggggggggggacaatgggggcccttagcttatttactaccccagaagggcaaaccaacccaagtccaaacccggggtggaacaagctaaaagaacaaagggggcccctt

SEQ ID NO: 119805 - DNA, 221 bp, Glycine max
  Clone ID: PAT_MRT3847_79192C.1
acggtgaaagcgaactcaaggcttagcatatccttgcgaagcttatcacaacctatgtcggttagagacatagcaaggacttgagatgtttgtgctctcactgttatttcagagcatgcacagcagaacgaccgtgacagtttcacactctaactatgggactcgccagacttgctagaccacatgatgatcctcgccggatcatgcaaacacacatctta

SEQ ID NO: 119806 - DNA, 262 bp, Glycine max
  Clone ID: PAT_MRT3847_79193C.1
ggggaaaaaaaaagggaatttttttttgggggttaaaaaaagggcccccgctccaaaaggggttgggttttttcacccccaatgacttaagaccctttggggggggcttcattagggaattacccccgggggccccccttaaaatttcttggggaaggcggggccccccaaccccacatgggcaattttccttttcccatttttttattggggggcaagaaccctttggggttaaactccccgccggccccttgggagaggg

SEQ ID NO: 119807 - DNA, 175 bp, Glycine max
  Clone ID: PAT_MRT3847_79194C.1
cttctcaacaagcatgtccgcgatagacgcgggtacccgacccactctgttcgacggaactccttccacccttgaagttaacagcgcgccgtgctcccggagcaactccgccggagaggccaactccataatgcggaccaccactccggaccgtgccggagttcacgtgggccgg

SEQ ID NO: 119808 - DNA, 675 bp, Glycine max
  Clone ID: PAT_MRT3847_79195C.1
atgattaaccttaaccaaagattatcaattgtatgctcatttattaaaagaggaacattggctgatattggctcagaccacgcatatctacctatatatgcaattcaaaacgacttatgcacaaaagcaatagcgggagaagtgattcaaggaccttataaggctgctaaaagaaatattgcaaattatgaattaaatcaacaggttgatgtacgtctaggcgatggtctaagcgttataaactcaaaagaccaaattgataatataactgtttgtggtatgggagggccattaattgcaaaaatattaaacgatggaaaagataaattagttaaccatccaagactcatactacaaagcaacatacaaactcaagcattaagacaaactcttaataaactttcatatgaaatcgttgatgaaagaatcattgaggaaaagggtcacatatatgaaatcgtggtagctgagtttaataataacttagttaaattaaatatattacaagaaaaattcggaccatttttacttagagaatgtaataacatttttcaaaaaaaatggcaaagagagttagaagcactgcgtgatataaaatcccaattgaattcaacatcacatcatgagagactaaaagaaatagaagatgaatttaacttaatacaagaggtgtta

SEQ ID NO: 119809 - DNA, 489 bp, Glycine max
  Clone ID: PAT_MRT3847_79196C.1
ttgcacgcgtacgcccctctgaattcggctcgaggttataaaatgatggggtttgaagctcgaacctcattgagaccaaggctagtgttcaccttccttgggatcactttaggctgggtcaatatcctactgaacagggctttaacaacggttctggcccagcctaagcacaagctactttcccataataaatgggctgtccggaagatcttgcaggcaggaactactgacccagtgggcactattatatacgagcaatatgacacattcatatcaggcaccattaacaaggcccctgggagggtgccgaaaacgatgcttcaatatcaggtacaccggcaatgaagggaacatagaatgggtcatacttgacatgctgctgctgtggattcatggtcatatactgcacgtacctaagaataccatcaggcctgcattagatgaaaaatgagacccatactactgaaacttaacagatgaatggctaca

SEQ ID NO: 119810 - DNA, 429 bp, Glycine max
  Clone ID: PAT_MRT3847_79197C.1
atccctaacacaacagatgattgttcagcatgtacggaaagaataatcaaatcacaatagttgaattttcaaaaatcaaggaagtttgaagagagagaaattctggtggcatagtaaagaagcactaacttacattgctcatgcatatcttgattaagtccctgtgcaagaccttgtctggaatatcttgttcactggcctacattggctcatgttgagtgtcatttgtttttattattatacatctttgtggtcccctctcttctatatatcctttcccacgctccgttgaagcaacaatattatatatccactaccgtgaatattattgaaatacaaaatataccatattctaatgtgaatatgtatacttctctctctttctctctctaaatatcacataggcactcatacagaaacagacacatt

SEQ ID NO: 119811 - DNA, 416 bp, Glycine max
  Clone ID: PAT_MRT3847_79198C.1
cttcgctccctctaaagaattaaaggggagctttgattatatcttgcgcgagtttaaaacaaagaacaagaccttgcagatggaccataccacttccgctttttagggaactaaaaaacgaattccttgatgatgatgataccaaagttttgcaaagtcaataccctaccctatcgttaactggatatgctgagtcttttcccgaatacaagaccctaatcttctgcgatcctattttgtttaatccaaggcaagttccttttgtgggacgtggggttaaagaactaccaacagaccttggagagaacatgctctgacatttacttgaaatacttctggtagaattcgtacttacgcacataagtctggaccacacatggacactattattgacatatacttagagaagcatttgg

SEQ ID NO: 119812 - DNA, 354 bp, Glycine max
  Clone ID: PAT_MRT3847_79199C.1
aaaaaaaaagaaatcctctgtatgttctgaaaaaccgttccattcctgtgatgttccgcaaagaccaaagaacataacttttttgctttcatgaaacacactttttgagttcaaagccccattcattacctgataatcaatctctcccaaaatatttctctctctcgatcaaaataagaacaagctccccaatttgtcattgcccccagaagaacatttatcaacagtatttaggggatggaacatttgaaatgagatgttgaggggacaaacctgtgcatagaattgaagtttgtgatggagcatttgggccaaatagaagagcgtattagatgcctagaagcagtaattttc

SEQ ID NO: 119813 - DNA, 652 bp, Glycine max
  unsure (1)..(652): unsure at all n locations
  Clone ID: PAT_MRT3847_7919C.1
tcgaccctacgccgtccnngggctttgtaatnnttgccttnnnctcccgcccgaagtgnnaagccnncttattttntnnctcttcannaataacctgccacanannaacttcnnncaggtangcntntnnttctttnntgaagaaaagaaaagnaaatagtgaccaccaacccagtagaagagaacgaagnntttattgggctcnntgccgnnctgctcannatcaccacnncaccatgnncatggcccannggaaccagcntannttccgcgagcngcgttctgatnnttcaagaacatgggggatgggcannaaaacctnnatttctgnntcttagganntctacggnngttcaattgggaaccctcagaaccactgagtatangnntggctgagntnntcccagaaaggaaatttaaagggttgtgaagnnccttgnnctgctgnngctctaatannntactcttcttggctgacnncagattaaaacatntnntaagcctgannagttgttggtcttttagaaatggagtgctttaattgatgagactcannaagaggctttgggctgatgttggatcacanaacccggaaatcattcccctgggagagcaagggagtcgattgaggcccggtcgtggccccttggtg

SEQ ID NO: 119814 - DNA, 344 bp, Glycine max
  Clone ID: PAT_MRT3847_791C.1
ctccttcttagaaaaaaaagcacgcttaaacaccaggagggcggatttaatcatgttaccttaaaaacatacatggactacttttctacaaaggaaactatgaattttctcccactaaaaaacattccctgaataaattctaacctccaagggggggttgggaccctaggggggccccctaaaacaagtgaagggggtgaattgaatggaataaagaaggccctttaactgggtttccccttcagattcctacctttggttgaaagaattctaataatgggccatttacctgggtggccccggaaggccccaaatcccaacaatggttatttttttggcatttt

SEQ ID NO: 119815 - DNA, 525 bp, Glycine max
  Clone ID: PAT_MRT3847_79200C.1
ccactcgttcgtccactcacaccagaaacccatccggattatccactaatatcgacttcaccatgtccgtccgatctgcttaccaaaaaataacaacagctggaggcttggggctagcccgcatcagcatgaatactgcgccatgcaagggcatacagatgctgacttctccttcgcaaaaaatattaatgcagagatgtttgctggtcccaggcaccacaacaagacgaggcctcaagattcacatcttgtgaaggagcatgagcacgtgctgactgggcgatagctgccccagttgatcccggactctgccaaataggaacacatgcatggaacggatgttaccggccaaagggatgagctgaacaacacccgcgtggtctagcttctggacctatcacttgaccactcggggacgctcagcacctccccttggacgatgacatccttcgacgaccacgagctcctaactggtcctgtccaggttcaaccgtgccacctattccccttgctggatgtgcaaat

SEQ ID NO: 119816 - DNA, 250 bp, Glycine max
  Clone ID: PAT_MRT3847_79201C.1
ggggggggggggggggcgggcgggggaggccgaaaaatttcgcccgggggcgcgggaaacaccctcttgttttaaaggggagatgattaaaacctggggaaaaacttcccctactggaaaacgcttaaataaaggggcaagctctgcatatcaatgaggtatatcttgttaattgcccagataaaaaaattgggggagcgaaaaagagcgttaaaacaattttaaaagggagacgcctaccaccccgatt

SEQ ID NO: 119817 - DNA, 388 bp, Glycine max
  unsure (1)..(388): unsure at all n locations
  Clone ID: PAT_MRT3847_79202C.1
tttaggctcgagctaccttctctctacttcaacatagcaaactttgagaaagaatggctgccatcacatttgacatttctgcctataaaaaacttccaatatatataatattgctaacccaccaccacatcacacccaacagactctttatagctaaactgtcaaccaatggctgntgtgattgtatttttcacaacagccgcctgccatgccaagccagcccagaccttcttaccttgaaggttgagcatctggtgacttaccatataagcctctgccatgggctgaacccccacagcatctatcgaggatcacagagttagttctaatgcactaccaaagggccctgcaagctgaaccagggatcttggcaacagaggcatcgggc

SEQ ID NO: 119818 - DNA, 404 bp, Glycine max
  Clone ID: PAT_MRT3847_79203C.1
cgtgcttggggggggggggggggggggtgaggggtaggtcaaggtaggatagggagaagtaagaggagggctggagcaatagagtaccaggggaagacaggtgccggggaacaagttcacacgcaacggagaacccgaggaaatcagcaagtaagggggggtgattgctgttgcgccgaaaaacacggttagtgctgtggcaagactggatggtaaaaccatggtgctggttttacgcaagcgtggccgacaacagagcagggtggtcaaggcaccggtaggtcacggtaacgagctgtcgaatgtactagcaaaggtttggattgctttaatagctaagcaagcaacagtattaggtccgttaagttaaagacaaagaaatgcggtgggtatccgggcaccat

SEQ ID NO: 119819 - DNA, 257 bp, Glycine max
  Clone ID: PAT_MRT3847_79204C.1
gactagcaaccccactctacaatggccaagcccgctgccatccacacaccaatactgacagaagcagattacgagaggtatttcgctgatttgagtcatccaatgcatggagagaaaacaaagaataaagagaaaaagaaataaaaatcctcctcctcctgatgtttcttgtttatccgtttaccttgctcattggcatttatgtatatacctttttgtacaattctttaaacattacatgattttgagaaaggatg

SEQ ID NO: 119820 - DNA, 128 bp, Glycine max
  unsure (1)..(128): unsure at all n locations
  Clone ID: PAT_MRT3847_79205C.1
agaccacgggagnaattatatcttccacacgttttctcgacattacttgagtcactgttattgcgggcncaggggannganncnactctnncctcancanngnntgtngantcaatcacctgagaacg

SEQ ID NO: 119821 - DNA, 373 bp, Glycine max
  Clone ID: PAT_MRT3847_79206C.1
attctaatgctcattcatttgtttcaccatgctattcactgttgctttatcaagagagagccatgtccatgcatcgataccttaggaaaagtattggaaagctgcttgtccaaacacacccattcccactgcactgccagagtttataaagccgcaccctacaggtgttgaaatctatgaacttactaagcaaaatgatgatgatcaggacccaaaaaaatccttctatatatgaattaacttaatgcgtacttatactactgaatgtaatcaattcaccacgcaatcccatatgcacataccatatattgtatatacatggtaaacgtatcttatagacacctctataaaacgatatagtctcgatcacatt

SEQ ID NO: 119822 - DNA, 203 bp, Glycine max
  Clone ID: PAT_MRT3847_79207C.1
ctccatctataaccaattatgcccttttctttctgctcttaataggtggaattttcaaaccgggggtttttaccctattccccccccccccatttcaatctgcctcctccactctctgcctactcaaaaagcctctcactacctccttttttggcactgcacaagtggaaattctaaaacttcgagttatgatgattgctaat

SEQ ID NO: 119823 - DNA, 365 bp, Glycine max
  Clone ID: PAT_MRT3847_79208C.1
ggctctttctaccacagggggagctagctcttatgacgctaaagtcatggatatggccaatgcttgcatgataatggggagataaaaaaggaccgatctcacactatgaaggaagtatgctggctcctacctacaggaacagtacaaacgatatcttcatagcattggaagggctgattgatgataccatgaatattgaggctactacatacaagctgcagccaaccggagagactaaggaaaaggctgaattgaaatggttacaggaggtattaatcacagcttggtcaactgaagtgcgttctgcaacaactatgttggctgatgggtcgtgcatattagaatgcaatggtgcatgtaagatc

SEQ ID NO: 119824 - DNA, 245 bp, Glycine max
  Clone ID: PAT_MRT3847_79209C.1
ggacgcgtgcgcggacgcgtgggagacttacgtaccggaacatggaactataaaggccgttggtgcccgacctgggatgaacagcgcctgtcaccctgatcggtaggtcttgggcgcgttaagcaccagaaaggtaccttgaaacatggctgttttggtgcttgagggtgatgggtcacgctctagaagatgtgccacatgttatgtgttgacagacatgacgaggttggggggcctgggaggcg

SEQ ID NO: 119825 - DNA, 391 bp, Glycine max
  Clone ID: PAT_MRT3847_7920C.1
gtgtcattgatgggtaagtgattaggtgtgatgacgtgatactctgtcggtcacacctacatcacgtactagaatgagacgaaggagacgattcatcttccccaagcggcttagctggttgttgaaggagacagttcatctttcttgagtggacccgcttagctgattggggaaaatttgaagttaatgtgttgcacacaggcatcctgaaagaggaatcattttccatctggggtcccaaatgatatttgttccccatcaattagaaccctaaaatatgtcaatttccatcgtggtctggtttaggtttcccattttataatttgacagtgttgaataattataaggaatggtggtagtattctgaatcttgtttagaattgggggtttt

SEQ ID NO: 119826 - DNA, 245 bp, Glycine max
  Clone ID: PAT_MRT3847_79210C.1
aatgctctggaaataaaatgcttattcactttaatgatcagggtttacatcagtaaaacttgttattcaaacacctgttactagcataccattaccataagcaccaactcctagcatttaatgtccactcacaaaatgaattatgagaattgacgcaaggcttatgcaatttttgttgcaaatattatcatgaatgctacagtgtaactgatagaacgtgctatcaagaaattttggcctattaa

SEQ ID NO: 119827 - DNA, 431 bp, Glycine max
  unsure (1)..(431): unsure at all n locations
  Clone ID: PAT_MRT3847_79211C.1
ctagttctatttgacactgctctctaatcttaaatattaagatggttgcataactgaatgagttcacgagaaaaatagttgatgaaatacaaagttacagattttttttttaaatataagtgatttctttttttcaaaaacaattccaaccaaacatgtatttagtatatacttacagtagaaaaggcttttacattccttttttttttttgacaaaaaaggctttaaattccccttcactaatattttaacagttatttttttcacttatattaatcaatgagagaataagatggtaatagatagtataatattgtaatgtgctaatataatatttttgataatgaaaatgcatgatagtattttcttattttggctatgaatatttataatagntttgcccaactttaacaacaaaaatatgagaatgg

SEQ ID NO: 119828 - DNA, 276 bp, Glycine max
  Clone ID: PAT_MRT3847_79212C.1
tgagctctcaattggactccactctcatcacattcttaatactactctcatagatcaacaccgtgtggagttctcatcactgaaggcgacctttatctctccaacttcttcttggtttcctcatgttccttgaatatactcaaataaacaggttgaggcattgataaatttattttactcccttcattccaacagtcactttatcttttataacttttgcatttttgctctgcataaaattcaatttttaaccttttgttggtttccccttttttt

SEQ ID NO: 119829 - DNA, 547 bp, Glycine max
  Clone ID: PAT_MRT3847_79213C.1
cagataggaatattctagacgataaaagtcttattagctacatattttcaaatgtgaagtgttggcaacatattttcatacaaccatttaaacaagggtaggcaaaataaaattgtttctgctttatccttattcattaaaatatgaagtgaagctaattgtttaatagtatttggtgaggtttcctagtttgactttggtggagaatgaaagaaacgcatctaaccaagtcataagcgcgtttttctttcgtttatttgtctctgttcgtcgtgttcgattcttcaatgtggaggaatgacttctctctaattcattgatattcacccaactgaagtgtggaacaagcatagattgcttttcatcccttcgtgaccattttgataagcatgactcagcaactacagagagaagatctttcaactcaattgcggtacccataaatgtcatttgaccatctggatgaaccgtgatctttgaagaaagggccgaatcttgaacaaaatacagaaaatgctttgggatgttgaattttccagttgggtag

SEQ ID NO: 119830 - DNA, 964 bp, Glycine max
  Clone ID: PAT_MRT3847_79214C.1
acgaataaattggtccttgtctcttgaattgacgcgtccgtgcgaaattttgaagattcaagtattcaacgttccagaagagttctttgtttacatttatatatagcacctgaaattggctttggagttcttatactgtttgtttgtttggttttgaaattctggattttggattgtgttctgctcagttttgttaaggagaaagtggggtttgagagttttggcattatttattattagcgtgtttggttccacattccagataccccagacgtggtttttcgcgtcagctaagaagctggtagttgtaactttcacatccctgacgtgatttcttacttctcaacagagaattgagttgatggggggtaacaattctaaggaggataataacaattggaggcagaattcatctgtgcgttcaagttcctctgcgtcttcttgggagtcatatcctgacccccaatcaggttatggtcacattggttacgcgtatgagccacaacagccttattgtgggggacgttttgtttcattggcccaattgttttgttggctatgctttatgatgtattttgggccatacttgatgtacattgtatattggttaaatgttggacatgctgaatgaaatgttgtttctcaaaggctaaagagtaaaaaaaaaaaaaaaaaaaaaaaaaaaattcgaaaaaaaagaaaaagaaaagcaataaagttgagtgaataagatcttaaatggcacaagaatgatgaaactcttggttctactcttcatgtttaatttttatctttacttctttttatttttttaatatgcacttattcccctttgctcctctattcctttgggatttagccacttattccatatttctccataccttgtccttggccccattacaaccttaaaagaccttttgatcctcatgtgcttgtgtttatgggttgattgtcaatttta

SEQ ID NO: 119831 - DNA, 1665 bp, Glycine max
  Clone ID: PAT_MRT3847_79215C.1
cttgggtgcatagcgtgtgccaattctgctgactgaaaaaaagtgagaaacacgaacctcaaacctcagacagaaccaaaaacacacttcttctcttcttccattctctaacgctatcagcatcaacacagtgtcacatccattaacgtgctatggtgtttagttaggaaacaccggtggtaaaattgtacgaagcagaaagaacatggctccgtctagcaaggctgagaaaaaggctgccgtggatgcagctgcatggatgttcaatgttgttacatctgttggaatcatcattgtaaacaaagctttgatggcctcttatggcttcagttttgccacaacattaacaggcatgcactttgctaccacaactttgatgacagttgtactaaggatgctgggatatgtccagccttctcatttacccttgccagatcttctaaaatttgttctctttgctaacttctctattgttggaatgaatgttagtctaatgtggaactcagttggattctatcaaccattgacagattgcgaagttaagtatgatccctgtatcatgcctattggaagttgttctcgacaagattcggtattcaagagacacaaaactgagcataggtgttgttcacatcagtatcagtgtttgcactgttactgatgtgagcgttaacggaagaggattcattgctgcctttatagctgtttggagcacttctatgcaacaatattatgttcatttccttcaacggaagtattctctaagttctttcaatcttttgggacatacagcacctgcacaggctgcatcactactgttattaggaccttttctagattattggttgacaaacaaaagagttgacagatatgactacaacactgcctcgttgattttcatattcctgtcatgcactattgcaattggcaccaacctaagccaatttatctgcattggcagattcactgctgtttcttttcaagtactgggacatatgaagacaatacttgttttaatcatgggattctttttctttggaaaagagggtctcaatctccaagtggtttttggaatgatcatagcagtggccggaatgatttggtatggcaatgcctcatccaagcctggtggaaaagagcgccggagtcacactcttcctacaaacaaaacagaaacaagatagtttaacagaattcacaaattttgttgttttcaagtgtaacggtattatttgccaaagttgagcatacgaagaatcgaagatggctgattctaggaaagtgttttaaattatttgaaattaaacctcattggttcctaattattttcaacctcattttgtacttaatacagtttgatctctttggattcttagggacattggatatttccttataggtctaggttcccagcaaaaaatttcatctttggaatgattagatgaatatatttatattctttcttgactcattatttgtaaatgtgcagttgagattgtttcagtgattcatgtgtgaagcccattaaggcatgtgatggcatggcttaggattctcatctttgataaatcttgaaaagggtatatgtgttgtttaaccctctttttatctcctatttctattttatatcttttttttataatttttttttaaatttttattttt

SEQ ID NO: 119832 - DNA, 1923 bp, Glycine max
  Clone ID: PAT_MRT3847_79216C.1
tacggctgcgagaagacgacagaagggggaagctgttgttgacaaaatctctagccatcagaaggaggatgaggtgagaagtggaggcactgttgatatggaggatgaacttgtgggtaaggatcgctatataggatccattgagagcctcataaggaacaatattcaacaatataagatagatatggctgatgaggttattaatgctggacgttttgatcaaaggacaacacatgaagagagacgtttgaccttggagacattgttacatgatgaagaaaggtatcaagaaaatgtccatgatgttccctctctgcaggaagtaaatcgcatgattgccaggagtaaagaggaaattgaactgtttgatcaaatggatgatgaacttgattggattgaggagatgacacgttatgatgatgtgcctaagtggcttcgagccaatacaagagaagtaaatgctgctattggtgctctatcaaaaaggccatcaaagaacactttattgggtggcagtattggcatggaatcaagtgaatttggttctgaaagaaaaaggggacgacccaagggaaaaaagcatcctaattataaagagttggatgatgaaattttggaatactctgaagtaagttctgatgaaagaaatgaatatgcacatgaaggagaaataggagaatttgatgatgatgggtatagcgtggctgatggagctcagaccattgataaagatcaattggaagatggtctgctttgtgatgctggatatgaatttcctcaatctttagaaagtgccagaaacaatcagatggttgaagaagctggcacctcaggatcgtcctcagacagtcaaagagtgagacagatagtatctccatcagtctcctctcagaaatttggatccctctctgcattagatgctcggccaagttccatttcaaaaaggatgacagatgagttagaggaaggggaaattgcgcatctggtgattctcacatggaccatcaacagtctggaagttggattcatgatcgtgatgaaggtgaggatgaacaagttttgcagaaaccgaagattaaacgtaaacgcagtcttcgtgttcgaccccgtcatgccactgaaagacctgaagaaaaaccacgtgtccgaatggcatctcatttggcagtccaagcagaccacaaatatcaagcgcaactgaggactgacccagaatccaaattatttggtgactccaatgccagcaggcatgaacaaaactcaccatcgttaaaaaataagcgaaccttaccttcaaggagagtagctaatacatccaaattacatggatctccaaagtcaagccgtttgaattgcatgtctgtgccttcacaagatggtggtgaacactccagagaaagctgggaaggaaaacctatcaattctagcggatcttcagcacatggcactaagatgactgaaattatccagagaaggtgcaaaaatgtaattagcaagctccaaaggagaatagacaaggaaggccatgagattgttcctttgttaacggaattgtggaagaaggattggaacactttattgggtggtagtattggcatggaatccagtgaggtgggttctgaaaggagaaggggacggcccaagggaaaaaagcatcctaattataaagagttggaagatgaaaatggagagtattctgaatcaaattctgaagacagaaatgaagattctgcacaagaatgggaaaatggagagttttaagatgatgggtataacggagctgatggaaatcgattgtaagaggatgatctaacttttattctgggtattaaattgccccttttcgaaaaaatgctcagcataatgatttggttgaacaaactcgttcctcaatatcatcctccaacattcatatattgtcat

SEQ ID NO: 119833 - DNA, 2735 bp, Glycine max
  Clone ID: PAT_MRT3847_79217C.1
ggctcgagaagactttaaataacagatgtatggagctacgtaaaacttgcaatcatccatccctgaattacccattacttagtgaattatctacaaattcaattgtaaaatcttgcgggaaattgtggatcctggataggatccttataaagcttcaaagaactggtcatcgagttttgctgtttagtaccatgacaaaactcctagacctcttggaagattacctgaattggcgaagacttgtttacagaagaattgatgggacaactagtttggatgaccgtgaatcagctataatggactttaatagccctgattcagactgtttcatcttcttgcttagtattcgagctgccgggagaggccttaaccttcagtctgctgacacagttgtcatttatgatcctgacccaaaccctaaaaatgaggagcaggctgtggccagagctcatcgtattggacagaaaagagaagtcagagttatctacatggaagctgttgttgacaaaatctctagccatcagaaggaagatgaattgagaagtggaggcactgttgatatggaggatgaacttgtgggtaaggatcgctatataggatccattgagagcctcataaggaacaatattcaacaatataagagagaatcatcgagaggggaatgtaattagcaataagaatagaaaaggccccatcaaatcctttcttaagattggggaggatttctgggcattgctaggtggacggcgaggttattaatgctggacggtttgatcaaagaacaacacatgaagagaggcgtttgactttggagacattattacatgatgaagaaaggtatcaagaaactgtccatgatgttccctcactgcaggaagtaaatcgcatgattgccaggagtaaagaggaaattgaactgtttgatcaaatggatgatgaacttgattggattgaggagatgacacgttatgatcatgtgcctaagtggcttcgagccaatacaagagaagtaatttgctctaaaaaatgccctcaaagtacatcataaggaaaatagcacagagaatgaaggagagaggttcacctttagctcgtgatctgatagataccgttgttcctgacgtttcttctgacaggaacacattacagaatgaaggggaggaatcatcattaacatcattaaaaaataagcaaaagttatcttcaaggaaagtagctaatacatccaaattacatggatcacctaagtctaatcgtttgaattgcacatctgctccttcagaggatggtaatgaacaccccagagaaagttgggaggggaagcatctcaatccaaatggatcttcagctcatggcactaagacgactgaaatcatccagagaggatgcaaaaatgtaattagcaagctccaaaggagaatcgacaaggaaggccatcaaattgtacctttgctaacagatttgtggaagaggattgagaattctgggcatgcaggtggatctgggaacagtctgttggatttacataagattgaccagcggattgatagaatggattatagcggagtaatggagcttgtgtttgatgtacagttcatgttgaggggcgcaatgcatttctatggatactcatatgaggtaagaactgaagcaaggaaggttcatgatctcttctttgatattttgaaaattgcgtttccggatacagactttgtagaagcaagaggtgcactatctttctccagccaagttcctgctggtactgcagcatcatcccctaggcaagtgacagttggccctagcaaaaggcacagagtgaccaatgatgcagaaaccgatccatgcccgtcacaaaagccgtcacaaagcggatcaactaccaacggcgaaaacaccaggttcaaaggtcatttgccacagaagaactcaagaaccggaagcggcagtgcacgcgaacaacctcagcaggataaccctccactgcttgctcatccaggtcaattggttgtatgcaagaagaaaagaaatgaaagggataaatcattggggaagggtaggactggatcaactggtcctgtttctccacctagtgctgctataagaagtccagggtcaggttcaaccccaaaggatgctagattggctcaacagggaagggttagccagccatctcaacactcaaatgggtctgctgggtcagttggttgggcaaaccctgtaaagcgtttgagaacagattctggtaagaggagaccaagccatatgtagattttttcatggagacaaaaggatggtatataatggagatattattggtactagtttttcagaagagttttagtggcccttgcctttgatagggtttagcccatactgttaatagggttagttcttccattgtattttatagctacctcaaatgaatgggttaaattacaatggtctccatttttttttttagatgcatcttgcaggaattgcttttctttatgtagctgctgaatctcttgtatagtaacttcttggttcatagtagtccatacaaggattaatctctataaggtagtagttacctcttccctttattggggggcagtattggcatggaatcaagtgaatttgggtctgaaagaaaaaggggacgacccaaggggaaaaagcatcctaattataaagaggtggatgatgagaatttggaatactctggagtaagttctgatgaaagaaatgaatat

SEQ ID NO: 119834 - DNA, 690 bp, Glycine max
  Clone ID: PAT_MRT3847_79218C.1
aatttcctcaatctttagaaagtgccagaaacaatcagatggttgaagaagctggcacctcaggatcgtcctcagacagtcaaagagtgagacagatagtatctccatcagtctcctctcagaaatttggatccctctctgcattagatgctaggccaagttccatttcaaaaaggatgacagatgagttagaggaaggggaaattgcagtatctggtgattctcacatggaccatcaacagtctggaagttggattcatgatcgtgatgaaggtgaggatgaacaagttttgcagaaaccgaagattaaacgtaaacgcagtcttcgtgttcgacctcgccatgccactgaaagacctgaagaaaaatctggtagtgaaatggcatctcatttggcagtccaagcagaccacaaatatcaagcgcaactaaggactgacccagaatccaaactatttggtgactccaatgccagcaggcatgaacaaaacacaccagcgttaaaaaataagcgaaccttaccttcaaggagagttgccaatacatccaaattacatggatctccaaagtcaagccgtttgaattgcatgtctgtgccttcacaagatgctggtgaccactccagagaaagctgggaaggaaaacctatcaattcaagtgggatctcagcacatggcactaagatgactg

SEQ ID NO: 119835 - DNA, 639 bp, Glycine max
  Clone ID: PAT_MRT3847_79219C.1
acacatattctaccattctcacagagcgaacttcatgcctggcaaccaattctaacacctactttgctctatctctgtatttactgctttaggacttatactctttcctgttggtcttgcttccttgtttgtcatacatagtggggtggaaggtacattccgatatgaggatgaatgccttccacctgatcataaagatgacgccatggcatctatcacagacgtttggtcatcactaatcttgcaccaagaaattgactgctaagaatctaatgaacgcccctgcttctgtctattatcaggttgctaacttttaccacataccactcgccgatgcactctgaagtcacagatgaaagaagctgaggaggaacgcgcacgagaatgatgccagctcatgtagacccgaagactatacacccaatgacatggcccataccccaagtgttccttgaggccttatatgcttggagtctttgtattgacacatacagacttacgagctttaacaaggattcggtgatcaacacaccaaacatagcgtgcaggagtgaccagaatgggaccttcgtgaccgatgcttatccatagaatctgcaagctgggagcttgattgcgtgttgctagacttagcgagag

SEQ ID NO: 119836 - DNA, 457 bp, Glycine max
  Clone ID: PAT_MRT3847_7921C.1
ggtttttttttttttttttttttttttttttttttttttttttttttttttttttttttttttttttttttttttttttttttttggaaccccccaggggaaaacgtttaaacaaaaagggggtaaagtaacccgggtttcaaaaaacccaaaatggaaaggggggggaaaaaaaaaacaaagggcccggaattttcacccccaaaatcataaaaaaagacgggagggcccaaaaaaaggtttgggttttagtcacgagaaaaaaaaaccactggttaacaaacatggggaccactaaaggggccaaccaagggggggggaccattttaaaaaccttaagaaaaattttccaaaaaaaaaacttttttttttttaaaagggggggggaaaaacccaaaaaattttggataaagggggaagaaatcaccaaaaaaaaaaactgggattcgaacccggt

SEQ ID NO: 119837 - DNA, 332 bp, Glycine max
  Clone ID: PAT_MRT3847_79220C.1
aaaatgcatacggtgaagagaccactgacggcactggattatctgcttgtcaaatgtaacgacaagctgtgtgaagaatttaaagaattttgcccgaaatttaagaacgattatcaacaaaattgccctaatgccgagtatgaagcaatttgtccgttactgaagcatgcgattcaaatatgttgccaaaaacacgcataactctgcaggccacggtaagcgtttggatgtgcttgtagttaccactatctatcttggatttgcttacgtattgctactttagtattattgtctcctgtaccaccttgattttggacttgagctctatatat

SEQ ID NO: 119838 - DNA, 599 bp, Glycine max
  Clone ID: PAT_MRT3847_79221C.1
gcactgttgacttcatatttggcaatgctgcagttgtgttacaaaactgtaacatatttgcaagaaaccctcccaacaaagtcaacacaatcactgcccaaggccgaaccgacccaaatcaaaacactggaatttccattcacaattcaagagtcacagctgcatcagatttgagaccagttcaaaactcggttaggacttatcttggaagaccatggaagcaatattcaagaacagttttcatgaagacttatcttgatggcttgatcaaccctgcgggttggatggaatggagtggtaactttgcattagacacgctttattttggagagtacatgaacactggtccaggttcttctactgctagacgtgttaaatggtctggttatcgtgtcataactagcgcttctgaagcctcaaagttcagtgttgcaaattttattgctggaaacgcatggctaccttccaccaaagtgccttttaccccttctctttaattaagtgatgtttgttgttatttgttgattgtttgattaattaatttcatttctttcattcgttgtgattgttaaaataatcttctcctagcatgctgatac

SEQ ID NO: 119839 - DNA, 341 bp, Glycine max
  Clone ID: PAT_MRT3847_79222C.1
ggaaaacttagcttgatattgggcattcacatggattcagacaggaggaacatgtacttagcccatgaaagtgaaaaagaaacgtacatgaggaccatcttatgcactagggctggtgaggtataattggggaatctatttaaaggccagtatcagaatccatcttcctttatcctgatagaaaatcaagatagaaaatatattttcttcatcaggaaaaaaaaatatagagccttaaagggaccttgatatcattatcattctcaaaataagagtaaatcattcagattttgacccacaaaaagactttcatcttaatctaaaggcggattaacttgggc

SEQ ID NO: 119840 - DNA, 401 bp, Glycine max
  Clone ID: PAT_MRT3847_79223C.1
acctcaagatgacgggaacacctcaaattaaaacacctggggcatacatcaagataaacttcttttacaacccaggctgattaaatgccggcaggctttttctccccctcaaggggaataacctgaaacggaaaaaagggggggaaaaaggggataaccccaaagcgagaaattagatggttccccttctcaaacaaacacacccttatgccccccccaaaaataaaaaaaactttgcccccccccgaagacaggtaacatttacaccccccccattaaggaaaacatattctttgcggttgctgagcaaaatttgcggcaagtatcctcgcctttaagcacggcattattctttcccattaaaaacacaagtctttttctccctcggacccctgggcgga

SEQ ID NO: 119841 - DNA, 317 bp, Glycine max
  Clone ID: PAT_MRT3847_79224C.1
ccacgcgtccgatttgggccttaattgaaccttgggcctgactttgttgggctggggatggggccttagttgtgtagtcttgcaaagtgtttgtcatatgagaatgttgatctttttgaaattgccatttagatatggtattgggcgtgtaatggatgttctgttttatcttctaccattgttgctagtgacttagtggctaaactttcattttacatgacccaagtactgcctatacacttggtaatgagtatattatgcatatagaagtactgtgtttaattactcacttctatatttgtgtaaggaattttata

SEQ ID NO: 119842 - DNA, 316 bp, Glycine max
  unsure (1)..(316): unsure at all n locations
  Clone ID: PAT_MRT3847_79225C.1
aacactcataacacaaagcacaaagcaaagctcatccttggagttaaaaaatggcagcagcttcttccatggctctctcatccccatccttggctggcaaggccgtgaagctgggcccattaagccccagaagttgggaagggtgaggcatgnggaagaccgtcaaccaagcaaggtttcctcaggaagcccatggtacggcccagaccgagttcaagtatttgggggcccattctttnggcgagnccccggtcttaccttaaccngtgaanttcccagggganttaagggtnggaanattgctgggctttccgca

SEQ ID NO: 119843 - DNA, 1179 bp, Glycine max
  unsure (1)..(1179): unsure at all n locations
  Clone ID: PAT_MRT3847_79226C.1
gccaacaagaacccaccccaagatccacccataccccacgacgtccggctccccgggtcgacccacgcgtccgaagcaggcttcatagtaatggcagatcttctccaccactctccctcattcttcaaaccgccgcaaaactcaaccatcttcgccatcaaagactccgccatcaaaaacacctcccaccctctctggttcctcaaaaccctcctcctctaccacaccaccacctccaacgcctattccttcaacgacctcgtcaaaattccccaaggaacgtgcctccccaccctccttcgtgataaaaatgtttctctcactaagcttgaccttgaccatgcaccaaactccgtggagattaatcacgtcttgatatcaaaccctaatatcttcctcggagagcaacttgccgtgcatggcgttcttgcgccgttctctccccttcagccgcaagaccttcttcaacggggttttggttttgctattcgcacacccacttgccgctccaacgacgtcaacgtctccgtttccaagaacggggttgagtggaaccgcgtcgttcacttgctccgtgcaaaagggtatgcttcgttctcgattgcgttgcattctgttcttgatgggataaagagagacttttctgggagtttgggttatgtcacaatcttcgctcctcgcgatttgactttacttggataccctttgactattcttgatagagctgtgaggcttcatattctgcctcaaaggtttgtttacaaagaaatctcttctctgccggttaggagtttgttaaagacgctcatgcctgatgagcatcttgagattgatggggttctggattttgtgccgggcatggttgttaatggtgttgtgattgtggcgcctgacatgatcatttcggagaaatttgtggttcatgggatttctagagcttttaagatggctgaggttactagttgaagatattattgaaggtcaatggagtccatacattatgatagggtcagggaaatttgtagcaattttgcttttgggtgcataagtttgtatcatttttagtttcattggataatgtacaaaacatgtatgttctcgtaatcnnnaccttcctctgtttcttgtcctgctaaatttcctgtttctatgatgttgcacttgccactgacaagtagc

SEQ ID NO: 119844 - DNA, 323 bp, Glycine max
  Clone ID: PAT_MRT3847_79227C.1
ctcgggccggtccagcggattgaattttaagcgggattttgcatagcttccggggagataccatcccaccctcttagcctcatatacggtgactatgcttacctacttgcgttcggtaattacattcttctcatcagccgctccaggaccaaactagttcacaagatcactgttattttagagagagattgtgagaggatgtttggtccacaaaaatcttctctgaaagatgctaaacctaatactgctgaccatgcccataaccgattagataatgatgaagagacaagcgatccaaggtataatttctctaagaagacttt

SEQ ID NO: 119845 - DNA, 503 bp, Glycine max
  unsure (1)..(503): unsure at all n locations
  Clone ID: PAT_MRT3847_79228C.1
gattaatcgaattgattttataaaatagtaaactcattttttcttgaactagtttgaaaaaaaatcaatttgagttaggttcggttacaatctggttcaatccgaaccagtttttttgaacacccctagttactgccttgtacattttaccctcccaggtctccctatgtgggagaacaattaaaatgagggagattacatgtggaaaaagtgggacaacaatgattcaaatattttatattgtcattttcagagagttctgagtgactggtcggcaacattctttacgattttcaaattggtgccgcagaaacttggtgattcaaacgcgtctattttgaagccggtaagttggtatcgatagatgagtatctagatgggtatttgatggaaagaagaaatagatattgaaagaagttggaggtgcttgagcttggaatgcaagaaataagaacatnatttaagctctttttattatcttcagtggtattactgttcatgtt

SEQ ID NO: 119846 - DNA, 450 bp, Glycine max
  Clone ID: PAT_MRT3847_79229C.1
gtcacacgtccgctcataagggctctcacgaggaggtgattgatgacatcggagaactcgtcttgtctggcagacaaaatataactattgatatctaaacgcacagtcttcaaattggaaagtacaccacattatccctatgtcttatattcaccttattcttaactgctttgagaaacgttactacaaaatgtagctgccttggtagggatagcctaagaaacgatatgggagaggctataaaaagaaagaggattgtgattgtattgatggcattaccataggttccttagatgatgtctccctgctggacctgtgacttcatttttcagatctgtcaggaacacccttgattttgacttcgaagatgacaatgaaggtcgttggcaatctactgagcctccatcactctacatattcattaactgcagtacacgtgaacttgcgtat

SEQ ID NO: 119847 - DNA, 1555 bp, Glycine max
  Clone ID: PAT_MRT3847_7922C.1
ctcctctctccctgttttccctgccaaagtaacctcgttagtgacaaacaaaaagctctctcacactgagtgaaagaaagagaacaattttgaggacaaagtgaagagagaaagaaaagaagaaagagtgagaggtggcaatgggtgcaaggttggggatgataacggcagcttgatgttgatgtgggaagatgggttttgccgaggaagagtttcagattgtttggaagagattgatggagaggatcctatcaggaaatcttttagcaaaatgtccattcagttatataattatggagaagggttgatgggaaaggttacatctgataagtgccacaaatgggtctttaaagagcctacggaatgtgagcctaatatctccaactactggcagagctcctttgatgctcttcctcctgaatggatagatcagtttgagtcaggcattcagacaatcgctgtgattcaagctgggcatggccttctgcaacttggttcttgcaagattattccagaagacctccattttgtgctaagaatgagacacacttttgaatctctaggctatcaatcagggttctacctctcccaactcttctcttcaacaaggaacacatcctcttccacttccctttcttcaaaaccatcctccattccaactaggccaccccctccactcctcaactggggtcagagaccacttggatcttccgcttctatgctaccctctcccacctttcagcatgcagccagaatggggttcccacaggccaaagatgagacccatatgttcctcatgcctcatgcatcagaacatgcaagaatgggagacatcatgggggagcatgagaatgacataaaatggccaaatggcttatccatcttcaatgcactcactggaagatctgatgatgctaaactcttgttcaatcaagagagcttggggggcaaaccaagtgatgatcacaatcaccaccaccaccaccaccactctctcaacccaaataatcccacctcatcagtgcaaaatgctaatagtgtggcaaacccaaatgagttcttgagcttggatagccacactgaaggaggaggggcaaggaaactggacaagttcaagaggtgcttcactctacctgctagaatgacttcatcttcatcttctacttcaatggatcaccatcaacaagcaggtgtggagtataggaattcaggaggtagtatgtaccaggatgtcatggagacctttttggagtgaatgtggggagaataaggtaagttgtgtttgggaaatgaagacgaaaaagttgtatttaggcatagtagttattttgtgttccttaattttcgtgtgttaagctttctttcctttttgtatcctgtgttttttcttttcatttctgtcatccactcagagggacttcattaatgacaatttctttctttttgtttgattagacatggaagttttcatgctttttacatacatgtcctatccacaagcagtatacgatgacaatgtttttttatttattaaaggaaacatgtaatttaatca

SEQ ID NO: 119848 - DNA, 277 bp, Glycine max
  Clone ID: PAT_MRT3847_79230C.1
gggaaaggtgattttccaatggattgtccccttcatgacagtctgcttcgcgttcattacaagggtactgttctcaatgaagaaaagagggtattctatgatacaagggtagacaatgatggtcagccattggagttctgttctggagaagggcttgtaccagagggatttgaaatgagtgttcgtttgatgcttcctggagagatagctcttgtcacatgccctcctgactatgcttatgataagtttccgaggccattaaatgtccctgagggtg

SEQ ID NO: 119849 - DNA, 362 bp, Glycine max
  Clone ID: PAT_MRT3847_79231C.1
ctattcttaaatccaaaagcgctggacggaaagcttgctcctttgctgatgcatatcacgaatattaaagaatggatcattttggcacttcatcaaatttcaatccttatctaacaacacacatcaactccagcctactatcctctgctcacacctgtatcaattgccttggcaccatcctgaaaacacccacataaacacacctacgtcaccttcactatcctcgatctttattggactgccatgacacactctaccatttacctataaaacaacatatctatcagcatcctttgcgccaaccaaatctaaaccttcttatatttccatatgctagtcagaaacgaatttatttatttcaa

SEQ ID NO: 119850 - DNA, 324 bp, Glycine max
  Clone ID: PAT_MRT3847_79232C.1
ttttaacatatttttatttttttcaaatctattaattatttaaaaggggataagcactttaatgagaccaaaaaaaattcttatctccaacaaaaacatattaaatactttaaacaaataaaaaaaaatgggggaaaaaagcataaacgtacaacattcacaaaattctccctggtgagaaaatcacataaaaacatactaaataaggggaaacctataacaaaatcaaaaccctcttggggaagaccgcaaaaaatatactaccccaaaggaaacaataatccaatgcacccaaggcttaacatggtctcaaaattaaaaggg

SEQ ID NO: 119851 - DNA, 280 bp, Glycine max
  Clone ID: PAT_MRT3847_79233C.1
ggaccagctgtgatcttcaacaccgacaaagcctgggacgaccaatggacttactgggttggaccgtgtgttggagctgcggtggctgcatgccatcatcattacattcttaaagctgctgcactcacagctctccaatcattcatgaccacggcttcattaagtgtctcgactaccgagactagtatctgatctcctgcgtatgacatgcgatgcgcacagtgtcagcacacgactcggaattcctgccgtgccagctgctctcaccactcgtccattc

SEQ ID NO: 119852 - DNA, 334 bp, Glycine max
  Clone ID: PAT_MRT3847_79234C.1
gacagtactaaacactatattgacacgaagaataggattcttgtagttgggggaactggttacattgggaagtatttggtgacggcaaatgtctctttaggccatccaactttggtatatacacgccctcttattgcacaaactccgccctcaaaggcacaactttgcaatgaattgaactccatacgggtcaaacgtgtccatggagaacttgaacatcagcagattctggctgtgattaaacacgtagacattgtgatatgtcctctggcatcaccaccacgtgattgatccacctcaaaattatatatgctatcacagttgctgggtaata

SEQ ID NO: 119853 - DNA, 1077 bp, Glycine max
  unsure (1)..(1077): unsure at all n locations
  Clone ID: PAT_MRT3847_79235C.1
tgtnnannaaaatcnnncctagaaaagggcnnncaaaacggttcttaatgtatagatagtcaatgccgaggcattttttatttgcataccagaaataaaggaaaaacaagagtatatgaaataagctcacaggagcaaaaggtggtttgtttaagtagacataacaataagcacttagcagcagcctgaatcatcattttgctagttcattcttctcttactttaggacctgagtcgttccagatgtagcatcgctagtttccgaatcaaccgaacagctacccactgactcaaccgaacaactaccaactgactctgcataatcttcatccttcttaatgctttcatttgaaatagaagggtcactactgtcatcatcacttgatgaatcgtcgctcgatgaatcatcgctagacaaatcgtcactcgatgaatcatcactcgaagaatcttcactggacgaatcgtcactggatgaatcgtcactcaacaaatcgtcacttgatgaatcgtcacctgatgaactatagcattttgaatcctttggaagtgacaagatagttgatgtcttcttgggttcggggacaggggtggtatcattctcggtcctcttccttttaagtaattccgtacccagtgcatagagaccaagctttgttttcttagcatagttcacataacacatcagatcagagtaggaatagaagcgttttccagtactcggacagtaatagaactttagagacagggagaatgctggatatgattgttatctcacttccagtgtgaccataatatagacgtcgtattgtctgaacctctttggacaacattctggtaatcttctcttgtgatgctccatataacacggtggcaacaaacatcctcggccatccaaacatttctgttgtgatttgttaagcactcactcgccagtacgagaaaaaacagaaaaattggtcggtaacggcggctagctctcccgaaagctgcaatcactcatggaaaattgagtggggtggggagaatcacggaactaatcggaaaattatgagatctttttgggggaaaaaatag

SEQ ID NO: 119854 - DNA, 470 bp, Glycine max
  Clone ID: PAT_MRT3847_79236C.1
ctaatataaataaaacaccaaaaactgggtgattgcttacaccaccatacctgatttgccaaattgtagaaatggataatgttgcgcatcatccaaacagacttgtagaaggggcagaatttgtcatatctatcacagccacacaaaaaggtgccaacataagaacaaataaaaacaataatataatacatattaaagaagttaaccaattacaaggtcccttacggtgtaaaggcattttgagcaagataatcctctctcaaaagctttgcagtttctaaggtgatcttatctccttcagctaaagcatccttgcccacaagctggattaaacaaggtcaataaatgatccagttaagtttactaatagaacaaatgcatatacatcctaacaaattttgtccaaactacaaaacaacaccataatttagtagcatttagagctccacttatcattatcaaacacattg

SEQ ID NO: 119855 - DNA, 333 bp, Glycine max
  Clone ID: PAT_MRT3847_79237C.1
gttttcccttcgaggatttaatacagttgcatatctgggattcgaacacgagaccagtaggtaagctaaaacaacccgtgctggttgatctatgtgctcggtggttgggtctactttatttgttcctgtgggctaggactgcatctcttatgcgtatctgtctctggattctgctggttgcaaaggaatttctttcactctggccgctataacaaagtcaaactattctcgcacctctaggatggtgtggggttactattatggagtgatttggctttgtgtttattatttatggggggggtcttatattgtagatttttttttgtatttttt

SEQ ID NO: 119856 - DNA, 362 bp, Glycine max
  unsure (1)..(362): unsure at all n locations
  Clone ID: PAT_MRT3847_79238C.1
acaaaggaaaaacgncatcggagaaaccaaccaagggacaagggcgacgcacaggcgaccacggnaccgaggaccccgcaaaacncancggccggggaaagaacccccaaggcgcagaaagaagcgggagaanggaggaaggggacgcnaaggcatgctcatagccaccaccaaggatcgggctcaacaatgtcgaagcgcatcgaaagaccagcgtgggctgagcccttaaagggtgaatacaggggtgcacatgggcccggacccccccgaagggaaccagccaagacgcaaaacggggcaggggcaagaggacaaaggggccaaggagccctcaaacaccgagcccgatgagcatgcag

SEQ ID NO: 119857 - DNA, 359 bp, Glycine max
  Clone ID: PAT_MRT3847_79239C.1
aacccccggggggcaccgaaccagaacaaccgggacgacccacgcgcccgatttgccacaccaccacacacagactctggggggacaacacagccagggccagcggcagcaacgcacaccctggagagcccaacaaccacgacggggacgacacccgggacccagcaagcaccggaaaagacaagagccgcaagaaaaacaaccaactccagctgaaccagaaacgcggaacctcagaacccgaagccaacaccctccgaggcgaaccccacaaaaccaacggaagcaccctcgccgggacaagagtcaggaacaaaaacacagaaaccaaggccaaacgacaagcccgaaccacacca

SEQ ID NO: 119858 - DNA, 2057 bp, Glycine max
  unsure (1)..(2057): unsure at all n locations
  Clone ID: PAT_MRT3847_7923C.1
agtcagaagcagaagaaaacccaaagtcaccaactctagcagactttgcacccgcggaagaaagaattttttgtggtagcagagacaaacaaacaaacaaaggggtaaaaccaaatcggttcctaactcccttcctccttccctcacccctcgcatgctgcttttttctttctctctttctttgttgtattgtgctttgttgtaagagacagaaagaggataaaagctgtccccacagtttttcatggcaacaagatactcatctcctctctccctgttttccctgccaaagtaacctcgttagtgacaaacaaaaagctctctcacactgagtgaaagaaagagaacaattttgaggacaaagtgaagagagaaagaaaagaagagtgagttgtttcagacagtagtagtagttagatagagaaggtggaagtggaaaaagggtgtttgttgtattgtgaagtgaaacaaggggtgggggtggtgtgaaacaaaaaaaggtgtatagtgagagagaaagagagagagagatggtgggctcaggaacaacaacaacaacagatagaagcaaagaagctgttgggatgatggcccttcatgaggccctcagaagtgtgtgtctcaactcagattggacttactctgtcttctggaccattcgtcctcgcccaagagtgagaggtggcaatgggtgcaaggttggggatgataacggcagcttgatgttgatgtgggaagatgggttttgccgaggaagagtttcagattgtttggaagagattgatggagaggatcctatcaggaaatcttttagcaaaatgtccattcagttatataattatggagaagggttgatgggaaaggttacatctgataagtgccacaaatgggtctttaaagagcctacggaatgtgagcctaatatctncaactactggcagggttcctttgatgctcttcctcctgaatggatagatcagtttgagtcaggcattcagacaatcgctgtgattcaagctgggcatggccttctgcaacttggttcttgcaagattatccctgaagacctccattttgtgctaagaatgaggcacacttttgaatctctaggctatcaatcagggttctacctctcccaactcttctcttcaacaaggagcacatcctcttccacttccattccttcaaaaccatccaccattccaattaggccaccccctccactcctcaactggggtcagaggccacttgaatcttccgcttctatgctatcctctcctagctttcaacatgcagcagccagaatggggttcccacaggccaaagatgagactcgtatgttcctcatgcctaatgcatcatcagagcagcttgcaagaatgggagacatcatgggggagcatgaaaatgacataaagtggccaaatggcctatccatcttcaatgcactcactggaagatctgatgatgccaaactcttgttcaatcaagatagcttgggagccaaaccaagtagtgatcacaatcaccgccacactctcaaccctaatccaaatgctggtagtgtagcaaacccaaatgagttcttgagcttggatggtcacactgaaggaagaggaggggcaaggaaagtggacaagttcaaaaggtgcttcactctacctgccagaataaagacttcatcttcatcttctacttcaatggatccccatcaacaacaagcaggtgtggagtataggaattcagaaggtagtatgtaccaggatgtcatggagacctttttggagtgagtgaatgaggggagaataaggtaagttgtgtgaactttgggaaatgaagatgaaaaacttgtatttaggcatattagttattttgtgttccttaattttcatgtgttaagctttctttcctctttttgtatccctgtgttttttttttttttttctgtcatctactcagagagacttcattaatgacaatttatttctattagtttgattagacatggaagtttcctacatacataatcctatccgcaagcaatatacgatnncaag

SEQ ID NO: 119859 - DNA, 690 bp, Glycine max
  unsure (1)..(690): unsure at all n locations
  Clone ID: PAT_MRT3847_79240C.1
ggtgttttgtaggagtggctgagtttgatggatctcatcagaaaaaaggaggtttgtttaatttcaatggaatcaagggcgtggcttgtggtattcttgcagcttgtgctgttacttctgctgcatttcctgttactgctgctactcaggttttaattgagcttaaaattttaaatgcatttgctaggatatcttattttgatctatggaagttcaacaaagaatcatataataattaattgactgctaggttcttggggttgcctgacttgcttgcagtcatgtaattaaacttcatattttagaaagaaaactgctgggattgatatgccttgaattcccaatattcactgttaagctcccatttgcaaacacaagttaaaggagaccacttgtttgtttgttcattagttgctttgtggaactgtcaagatgatcgactaaggttgcaaaaaatgaagtggtttctctctcaatgtatcttttgattcctttcagttaacatgatataatcaacatanttcggtcgttacagctgataaggtgatttttctttggttacctacttaccataggaaggaatgatggatagcttatggttntgaggatgtatgatgattgatgaaatagttaatttttgtgaaggcaacanatatgttcaaattattacactcagcttttgacatgcta

SEQ ID NO: 119860 - DNA, 300 bp, Glycine max
  Clone ID: PAT_MRT3847_79241C.1
gtgacagacagacagtcagatcatccggctcacagaatcgtgtgatctgcaatatctccgaaggaggggaaatggtaaaggacatgcgctccatccagatcacgacaggcgcgctaatgatttgagtctgcttgagaaccatacagaccaatactgcaccagcagcatgaactcatcgcagtggacaggctagtatagtatcaggaaacagaatgtgtgacacagttactggctgtaataaagagataggttcattattgaagaatcactatgaagatggtattttataccgcgacgaat

SEQ ID NO: 119861 - DNA, 276 bp, Glycine max
  Clone ID: PAT_MRT3847_79242C.1
ccgtgctcctgggtgtgctgcaggggcaacagcagagcctacagcagggggcacactccaccggctccagccgcctgcacgacctctactggcaggccatgaaaaccctgggagtccagcgccccaagtcggagaagaaggtgccaaggagatccccagtgccacccagagccccatcagtaagaagcggaagaaaaagggattcttgccagagacgaagaagcgcaagaaacgcaagtcagaggatggcacgccagcggaggatggcacacctgc

SEQ ID NO: 119862 - DNA, 488 bp, Glycine max
  Clone ID: PAT_MRT3847_79243C.1
tactttaaaacaaactagaaattaatacaagaattaaaaaaaaaagggaaaggattcatattaattttgtaatgagattaatgaacattttaaggatggagtattcttaaccataaaaccatgtactcccttgatgaacattgacaataggcttttgatattatccgtaattaatcagcaggggaactcaacaactggaacacatgtgaaataactccccgtgtaaaaccactttccaacatgctatcaatgtgcctaccaaaggaatacaaatagaacagccaagaaattacgagattattttttctcctcttcatttggtggcttgtcttcattcttctgctgaggctcagactgattttgcaaggaagccagcaaatctttgacagatggatcatttgggtcaaccccaggaagcgatgcaaggatagaagatacaaaggactgatctgccaacagcttactcacgtcagactggcttgccgagt

SEQ ID NO: 119863 - DNA, 361 bp, Glycine max
  Clone ID: PAT_MRT3847_79244C.1
gcgtgcgtccaggggaacgttcacgctttcgaagatgtcaaattatgatgaaccggtgtacatgttgacgaaccttaaaatcggaatcaaaagcaggtcggtacttgagttaaagaatatatggattacttcctactactctgtgtgcgattttttaagggaaagaaaatcactctctgcgctggacacagacttggtgaatcattattttttccactataagaatatttgctgaacactgtcctatgtgatataggatatcgtgccagatttaaacttattatgcttctttttaagatctctggttgatagtaagcttcaagctggggaaattttggattatggctaccacttttctatc

SEQ ID NO: 119864 - DNA, 1004 bp, Glycine max
  Clone ID: PAT_MRT3847_79245C.1
aagcagctgccaaaaaggcatcagaggatgcttccaaacaggagaaagatggtgagcagcaagctagcccacaggatacaacaatgactgagggtgccagtgcagcagcttctgaagccgagactaagagaactgatttgacggacgatgagaatgctcttctacagcaggcccttgcaatgtcaatggatgatcccacaattaaccatgaagtgagagatacagatatgtctgaagcagctgctgaagatcccgagttggctctagctctccaattgtcagtagaagacagctcaaaggactcggcaagccagtctgacgtgagtaaactgttggcagatcagtcctttgtatcttctatccttgcatcgcttcctggggttgacccaaatgacccatctgtcaaagatttgctggcttccatgcaaaatcagtctgagccacagcagaagaatgaagacaagccaccaaatgaagaggagaaaaaataatcttaatagtctcattgtggttttatttgtagtattcctttggtaggcatattggtagcatgttggaaagtgattttactcgggtagttatttcacgtgttccaattgttgagttcccctgctgattggaacgagtatatgtctgttgattaattacggatcattgagtagagcacatttcaaaagcctattgtctatgttcatcatcaagggaatacatggttttatggttaagaatactccatccttaaaaatgttcatcaatctcgtcacaaatttaatatgaatcctttcctttttacaaagacccggaaaaaagaaaatttccaaaatggctgcttggtcaagttcaaccacttgcctatgaccctgatcaaccaaaacttttctggataccacttccttacaaagaaagacatcaccaagttgagttgcagaaaactcagcgagtgctaaagtaatttagcagataatttatgcaagctagaagttaaagcgtcagcggtcggacga

SEQ ID NO: 119865 - DNA, 228 bp, Glycine max
  Clone ID: PAT_MRT3847_79246C.1
gcccgccgatatgtctattcatagccttgctggaaagccacatttcactacatgtcgaattccacaacaagtcaataccggtggcccctcctgacagttgcgcagccgggatgcccaaggggacgcgctctgtaattgcgcattaagagatgcgggtgtagtcgctacggggcaggatgaacgctacacttaccaattgcctatcgcatggctcggatcacattcttc

SEQ ID NO: 119866 - DNA, 217 bp, Glycine max
  Clone ID: PAT_MRT3847_79247C.1
ctggaatccttaaagggggcggccttttttttttttttttatgaaaccgggatatgccatcggtattgggcgccttggacccaaacatttaatttttattttttaccaccaaaaaccgacttttaaaaactggccaaactaaataaccgtacccggccaaaactaaaggggaaaattatcacgccagtataactggcttatgccaaccaaaaataaa

SEQ ID NO: 119867 - DNA, 239 bp, Glycine max
  Clone ID: PAT_MRT3847_79248C.1
ggagtttctcaaggtcccgtatcgatgatgaaggcactttctcacagacacactatcataggttcagtgtgctatacttggatactcatatgtctgacctgattcagcactatgccgatgtataagtcgaggtagcagatcctgttgtctcatttggtgatactgttgttgaatcttcctcagtggaatgttttgctgaaacaccatacaaggggaataaagtaactatggttgctgat

SEQ ID NO: 119868 - DNA, 3109 bp, Glycine max
  unsure (1)..(3109): unsure at all n locations
  Clone ID: PAT_MRT3847_79249C.1
tactactgcgagaagacgacagaaggggaataataataatacttcagaaaactcaactagtcctcattgtcactgcgtcacgaaccctaatcccttttcttcttcttctcttcccttactctcatcctcgattcagtggcagaggtgacggaattcacgtgatttccatgagtggctccgttttccttgaatcgaacaccacgtctgttcacggttcgcggtttccgaaattgagctcgattcctcgtcagtggtgatcgtcagtgcatgcatcctcggattggtaatgtgcgagcttgatccatctatttgcggcgttttgagttaattttgcctgactgggaaatcatggcgcagagtaattgggaagcagataagatgcttgatgtttatatttatgattatttggtgaagaaaaagttgcataacactgctaaagcattcatgacagaagggaaggtttctcctgatccagtagcaattgatgctcctggaggttttctttttgagtggtggtctgttttctgggatattttcattgcgaggacaaatgagaaacattctgagactgctgcagcatatttagaggcacaacagattaaagcgaaagaacaacagcaactgcaaatgcagcagttgcaattaatgcgtcaagctcaaatgcaaaggagggattctaatcatcctccccttggaggtcctgtaaatgctatcactacagaaggagtgcttgggcaatctactgccagtgctttggccgcaaaaatgtatgaggagcggatgaagcactccaaccccatggatacagagacatcccaaccacttttagatgctagaatggctcttttgaaatcaacaaatcatcctggtcagatggttcaaggaaattcaggaagtgtgacggcaactttgcagcaaatccaggctcgaactcagcaaacacctcaggatatcaaacctgaagtcaacatgggtaccatgcagagatccttgcctatggatccttcatcaatttacgggcagggaggaatgcagtcaaagcctggaattgcaaatgcaggattgaatccgggagttggtagtctcacattgaaaggatggcctctaactggcattgatcaaattcgtcctggttttggagcaccagttcagaagcctctccttcagagtgcaaatcagtttcagcttttgccgcagcaacaacaacaacagatccttgcacaggttcgggcacaaggaaatattggcaattcacctgcttatggagatatggatccacaacgattaaggggattagctaggggaagtttgaatgctaaagacggtcaatcaattgcaaatgatggatcaataggctctccaatgcaatctacttcatctaagatcaacatgccacagatccaacaatccacctcccatcaacaacaggatcctttgcatccacaacaattggtgcagaataaccggaaaaggaaggggcctacatcttcaggaccggccaacagtactggtaccggaaatacacttggcccttctaattctcagccatcaactccatcaactcatactcctggtgatggagttgctatggcgggtaacttgcagaatgttgctggtatatccaaaggtttgatcatgtatggtactgatggagtgggctgtcttgcatcttcaacaaatcagctggatgacatggaacattttggagatgttggctccttagaggacaatgtggaatcatttctctcacaggatgatggtgatggaagggacttgtttggcacgttgaaacggaacccttctgagcatgctacagatgcttcaagttctatttcctttgatgacggcagagttgttcgctgaagcttcacctcagatgggaaattataagctagtgctggacgtgacaagaaggttgttctgtggaatgtggagacattgcaaacgtggaacatggagacattgcaaacagaaagtactccggaggaacacagtcttattattactgatgttcgcttcagaccaaattcaactcagctggcaacatcttcgtttgatacaactgtgcggctgtgggatgctgcagatccaaccttccctttacatacatatagtggtcatacttcacatgtggtgtcccttgatttccacccaaagaaaactgagcttttctgttcttgtgacaataacaatgagattcgcttctggagtattagtcaatattcttccacacgtatttttaagggaggatctacacaggtgaggtttcagccaaggcttggtcaccttctggctgcagcaagtggcagtgttgtgtctctctttgatgttgagactgacaggcagatacacacattacagggacattctgcagaggtacgctgtgtctgttgggatacaaatggagattacttggcatctgtgagtcaagaatctgtcaaagtgtggtcacttgcctctggggaatgcattcatgaacttacttccagtggaaacatgttccattcttgtgtttttcacccaagctactccactctcttggttatcggaggataccagtcattggaattatggaacatggctgagaataaatgtatgacagtgtcagcagctcacgagtgtgtgatatctgctctagcacattcacccgtgacaaggatggttgcttctgccagtcatgacaaatctgtaaagatctggaaataaaattgattattttatgatttaaacaaacatataagatgtgctacatgttatattttcaaggtataacaacataaaaaaacaaggttgaatggatgggtcaagagacgtatctccaccctctcctaatcttcttatttatctatttgctaccctctcctaatcttcttatttatctatttactacggagaaatttaaatcaatacttggttgctagtcatatattgtgcaattgtttcttttaaattgttgttgttattgcttggttgtttgccagatgttgtgcaaatgagggttgtcattgttattattagccccttttcttttaatatccaaaatgtatgttgtacaagttttcattgtcttttttactaattaacagatgacaccaattaattagtnnng

SEQ ID NO: 119869 - DNA, 480 bp, Glycine max
  Clone ID: PAT_MRT3847_7924C.1
atggcgggctgggggttagcgtttttggaagcttctagaaaagttacgaatccggcgatgttggatgccacgacgtgggagaacgaaacgacgtcgaagatcttggcgagcaacggggcgtcgtttaggtcggcttcgatgatgaggatttggtgggtcgtagtaggagttgaagttgtcgagcccgaggacgccgtcgccgcgcttcttcagggagagggagcagtgggagccaacgaagcccgccgcgccggtgaccagcaccgacatgccgtgggggcggcgggggagggcggagtggcggacctgattctcccatgcggggccgtggaaggcggaggagaggaggaggtggtgggtggagagggtgtagaggaggaggaggaggatgaaggatgtcttaaggagtttgaagctgttgagtctgcggaggtagctgttgtaacgcatcagctttatggttttgctggtgtccggtga

SEQ ID NO: 119870 - DNA, 110 bp, Glycine max
  unsure (1)..(110): unsure at all n locations
  Clone ID: PAT_MRT3847_79250C.1
canccagtttgctggaccaatacctccaaagttgttaagcatccctagcttcagaaaagatggaaacccgtttaatctcaatggcaattctactatagccccagcactcc

SEQ ID NO: 119871 - DNA, 628 bp, Glycine max
  Clone ID: PAT_MRT3847_79251C.1
cggctcgtcaactagtcctcactgtcactgcgtcacgaaccctaattccctttcttcttctctttttgctttcgatctttctctcttcttcaattcagtggcagaggtggctgaattcacgtgatttccatgagtggctccgttttccttgaatcggacacggcgactgttcacggttcgcagtttccgaaattgagcttgattcctcgtcggcggtgatcgtcggtgcatgcagcctcggattggtaatgtgcgagtttgatccatctatttgcggcgttttgagttaattttgcttctgaccgggaaatcatggcgcagagtaattgggaagcagataagatgcttgatgtttatatttatgattatttggtgaagaaaaagttgcacaacactgctaaagcattcatgacagaagggaaggtttctcctgatccagtagcaattgatgctcctggaggttttctttttgagtggtggtctgttttctgggatattttcattgcgaggacaaatgagaaacattctgagactgctgcagcatatttagaggcacaacagattaaagcgaaagaacaacagcaactgcaaatgcagcagttgcaattaatgcgtcaagctcaaatgc

SEQ ID NO: 119872 - DNA, 895 bp, Glycine max
  Clone ID: PAT_MRT3847_79252C.1
cggaaatacacttggcccttctaattctctgccatcaactccatcaactcatactgggggtgatggagttgctatggcgggtaacttgcagaatgttgctggtatatccaaaggtttgatcatgtatggtactgatggagtgggcggtcttgcatcttcgacaaatcagctggatgacatggaacattttggagatgttggctccttagaggataatgtggaatcatttctctcacaggatgatggtgatggaaggctcggaattcggctcacattgaaacggaacccttctgagcatgctacggatgcttcaaaaggcttttccttcagtgaagttggttctatacgcaaaagcaacagcaaagttgtttgctgtcatttctcttcagatgggaaattattagctagtgctggacatgacaagaaggttgttctgtggaatatggagacattgcaaacagaaagcactccggaggaacacagtcttattattactgatgttcgcttcagaccaaattcaactcagctggcaacatcttcatttgatacaactgtgcggctgtgggatgctgcagatccaaccttccctttacatacatatagtggtcatacttcacatgtggtgtcccttgatttccacccaaagaaaactgaacttttctgttcttgtgacaataacaatgagattcgcttctggagtattagtcaatattcttccactcgtgtttttaagggaggatctacacaggtgaggtttcagccaaggcttggtcaccttctggccgcagcaagtggcagtgttgtgtctctttttgatgttgagactgacaggcagatgcacacgttacagggacacttttgccgaggtacactgtgtctgttggggatccaatgg

SEQ ID NO: 119873 - DNA, 296 bp, Glycine max
  Clone ID: PAT_MRT3847_79253C.1
cccccgccaatatcatttttttttagaaacatggaactcaaaagaagacatggtcttcattattcaaacaaggcaaaatattgatcatttacagcgcactaacaccgcgtgctagaagattatccataacttaaaccataaaagaaaaaaaacttgggagagaacatgatacagctccttgtaatgacataatttaatcattatactacataaatggacagataataacaccgaagatctctcattgcatttaaatgaatgaaccctgcctcgctgagcctctttgacgaaatttg

SEQ ID NO: 119874 - DNA, 229 bp, Glycine max
  Clone ID: PAT_MRT3847_79254C.1
ggttgccgccaagaaaaccaagaagacccatgagagcatcaacaacaggcttgctcttgtcatgaagagcggcaaatacaccccttgggtataagaaccggtctcaaatctctttaggacttccaaggggaaattgatattcatgcttaaccactgcccccctttgagaaagccggaaattgaatactatccattgtttgcaaaggttggaattcatctttccaatgga

SEQ ID NO: 119875 - DNA, 265 bp, Glycine max
  Clone ID: PAT_MRT3847_79255C.1
aagtgaagcgaacaaactcaaggacggggaggaagaaaagggggaaatgaatgggaaagatttggaatatgcaaaggagattgtggcgatggctgagtacactgctgcagaagagaagataagggcgcacaagccacagaagcagaggtttgatgagggagggagccggactataacacacgagaatggatatgagagaaaggaaagaaccgggataaaggacgggaaatctatccaggaggttggaggcgaagggggagatgga

SEQ ID NO: 119876 - DNA, 625 bp, Glycine max
  unsure (1)..(625): unsure at all n locations
  Clone ID: PAT_MRT3847_79256C.1
ccccgcgtccggagcatcttagaccgtgtttccctttccgactttgatgccttgcttctagtaaaggacaactacttactctccagtgaattncanagnnnagnnagagggggatttgggggggnaaaaaaaagaaaacccccctcttttggggggatattccccttttttcccggggaggcccccaaaaggggggggcactctccccttaagggggcctttttttttttaaccccaatattttttccccccccaaaataatgggggcccaaaaaggcccccttcctttgttntgggaaaaggggggggaaaaaaaatggggnaaaaaaaaaaattggttgttttttggaaaaaaaaccccccccccccctctttttttttttncccctttttttccccccaaaaggcaagagacctttttttttaaaaaaaatcccccccttttattataaaaaaattttttcccccccccccttaaaggggggggggcccccccccgggttttttttttttttttcgccccaaggggggggggaaaaaaaaaaggggggggggggggccccccccccctttttaaaaaaagagnncccccccccccccccccnnncccccctctttttttttt

SEQ ID NO: 119877 - DNA, 536 bp, Glycine max
  Clone ID: PAT_MRT3847_79257C.1
aagcccccccggaaaaccccaacctcaaaaaagacaagggccccccttttttttttggaggttaaaccgggcgggccccaaaggggggggggggaaaagctacaagggccttttttaccccccctctgggaatcaccccccccaaaaatgggggggggaaaaaagggttcattggtcatgggaatcccccccccccaaaaatggggcccccccggacattggcaaagggcgacaggtccaaaaaaaccctatcacgaacggaaaccccggaaaaaaaaccctttgggaaaaaaccaactttggaaaaccctgggcaaaaaccccttgaaaaaaaaaagggggccgggaaaacctgaaaggtttccagggggcttttcccccccttaaaagaaggaaaaaggggggcgtaatcaggggaaaaacaaccggggcaacctacaaacttggaaaaaaaaagggtgcccaggggccccccgccccaacaaaggggggcccgccccttgactttggcggccctttcccaccattttggttaa

SEQ ID NO: 119878 - DNA, 146 bp, Glycine max
  unsure (1)..(146): unsure at all n locations
  Clone ID: PAT_MRT3847_79258C.1
atcagaagccactgtnttgtnatnaatcagtctcaacttctgttgggcgtgcnaagcaaaactgtgcaagggttgtgtaattgccanaaanaatcnnaaatattctggttnaatgaagccanacaagtnaaagtctacacanagaa

SEQ ID NO: 119879 - DNA, 381 bp, Glycine max
  Clone ID: PAT_MRT3847_79259C.1
ggagcaagaggttaataaagggggaggcggcgtggtaccaaaggagcctctctctcctgcctgcgctcgagggagcaattgaagagaagaagaagtaataagtgaggctgtccctgttgctcctgctgttggaatggaatttgacagctacgatgatgtctattacttctataattggtacgccaaggaacagggttttggggttagggtcactaatacctggtaccgcaagaccaaggaacgttacagagccaaacttagctgcagcagtgctggcttcaagaaaagaactgaagccaatcgccccagacccgaaaccaaaacaggttgtcctgctatgatcaaagtcaagttgatggactccactagatggagaattat

SEQ ID NO: 119880 - DNA, 645 bp, Glycine max
  unsure (1)..(645): unsure at all n locations
  Clone ID: PAT_MRT3847_7925C.1
tgcttcaaaacaagcataccaacaaaccacaaacaaaaaatagcagtgtatataaacattaaccaaaatcactaaaaacaatgtgttgaaactataatcattataataataatccaaaaagcatcatcaggaatttagaattcctgtgactggtcctgagtgtcctgtgtctgaacatcctcctcatctgtcagatgaagtacgtgagtagctggaggtgaagtgttcaaagttaggattggtgtggtcgggtcctctggtatcttgagtataggagtggaggggtctgctacatgctaaggtgaggataggtccaccactggtgtggatggatctgatgtgacctctcgtgacctctcaggagtagcagcaacttcctgtctaacctgtgtctcacctgcctcctcctctannntgaatggctctggaacggtggcctcagatgatgcatcctctacatgttgtggtacttgggctatgggaccttcatcttccctgtgaagagaaggttgggccccaagctaggctaccctctctagaaattgatcaatggaaggaatggatcctggaggcaccaccaattgtaaactctaaagtaaaatgatttgtccctgatgaatgctctgaagcatggcttcaaagcac

SEQ ID NO: 119881 - DNA, 434 bp, Glycine max
  Clone ID: PAT_MRT3847_79260C.1
gaacgtaacaggactctataattgatattgcttgaggtatattgcacgttgtgcatattataaggaaaatacgttagactggacatcttatgtttgcacttaacaaatcgagaatcatacaaatgttacacgctcgtaccattggatcgtatcgcgctcgtatcatgacatccttcacgaacagaagtctttacctggcaccacagtgaggccttgactgttacgaatgccagaaagtatccatgaggtatcatcatggatcgcacaatcaagtgcgcactcgcaaaggatctagcaaggcagtggacgacttggacaatactgtagtatgggacaatgatgctaccatgcgagacgagctagggaagagctttaatgggctggtcaaatgttttaatggcatcatgcgagtcaaaaagctcaattgcaatgtc

SEQ ID NO: 119882 - DNA, 493 bp, Glycine max
  Clone ID: PAT_MRT3847_79261C.1
ctcgagccgagaaaatgaaaagagtgcgtaaagtaaagtgggagcaagaggttaataaaaatggagacggcgtggtaccaaaggagcctctctctcctgcctgcgctcgagggagcaattgaagagaagaagaagtaataagctacgatgatgtctattacttctataattggtacgccaaggaacagggttttggggttagggtcactaatacctggtaccgcaagaccaaggaacgttacagagccaaacttagctgcagcagtgctggcttcaagaaaagaactgaagccaatcgccccagacccgaaaccagaacaggttgtcctgctatgatcaagttcaggttgatggactccactagatggagaattattgaagttgagcttgaccacaatcacttgattaaccccaccagtggaaagttttacaagtctcataagcatattcctcttgggaccaaaagaaccttccacttagacgacgaccatga

SEQ ID NO: 119883 - DNA, 229 bp, Glycine max
  unsure (1)..(229): unsure at all n locations
  Clone ID: PAT_MRT3847_79262C.1
ggaactatgtgacgcatgtgccgatcctgtggtcgcggtaccacgngagaaagagcgcgtgtattatttccgtcaaggacatatggangagggggaggcgtcgacgaatcacgtggcagacgatcacagtgccggtgacgagcgaccacacaatgaggtttgtcagatgatcagctatcatatggatgccgggcacgacacggatgatatgtatgctgaggtgagtgtg

SEQ ID NO: 119884 - DNA, 290 bp, Glycine max
  Clone ID: PAT_MRT3847_79263C.1
gcggtcttcttacattatactactttaccacacttatactttttatttgaaataacaaaccatgggataagtggaatcatcaacaaagcttggattgtactggattccgtccttttaagcaaacgactcggggagttttggggtgaaaaaaaaatgtgatttggagaaacaatcaattcagtttttcgggggacattaagtttcaacaaagatgatagatgttgcacactcatacgatggagactaacaaaattgtaatccgtgcggtcgaaggaaaaaaatgatcttta

SEQ ID NO: 119885 - DNA, 847 bp, Glycine max
  Clone ID: PAT_MRT3847_79264C.1
ccacgcgtccggaaaatgaaaagagtgcgtaaagtaaagtgggagcaagaggttaataaaaatggagacggcgtggtaccaaaggggcctctctctcctgcctgcgctcgagggagcaattgaagagaagaagaagtaataaggtaatactactactgttactctgtgtatccgtagttaattggaaagcattttttaggtttagggtttgtgaattttgatagattagattagatggataaagtgtgtctgaacagtgaggctgtccctgttgctcctgctgttggaatggaatttgacagctacgatgatgtctattacttctataattggtacgccaaggaacagggttttggggttagggtcactaatacctggtaccgcaagaccaaggaacgttacagagccaaacttagctgcagcagtgctggcttcaagaaaagaactgaagccaatcgccccagacccgaaaccagaacaggttgtcctgctatgatcaagttcaggttgatggactccactagatggagaattattgaagttgagcttgaccacaatcacttgattaaccccaccagtggaaagttttacaagtctcataagcatattcctcttgggaccaaaagaaccttccacttagacgacgaccatgaccaccaccaccacttagatgcagctgctgctcaacaggttcacaaaattaccatgtttcgaactgtcatagtcgatgctcaggatgaaggggaatcccaaaacgccctctattccaatcagttgaagctgaacaaaggcgattctcaagccattcttaaattttttagtcaccagcatttggcagatccacact

SEQ ID NO: 119886 - DNA, 171 bp, Glycine max
  Clone ID: PAT_MRT3847_79265C.1
ctcgagccgaaaaaagatcatacatagtagtgttggtgggttgcacagatgcttgggggtattctccataggggtcataagataaaagggacagtggtgttgatgcgcaagaatgtgttggacgtgaacagcgataccagcgattggggaacttcttgacaaggatacgac

SEQ ID NO: 119887 - DNA, 142 bp, Glycine max
  Clone ID: PAT_MRT3847_79266C.1
gactgttaaatcacaagaacttggaggagccacctcaattgctgaagatttcggatatcaaccaggtgatggtattcttggattaggatggccagcattaagtgctgacaacgccataccacccatgcaaaatcgtctctca

SEQ ID NO: 119888 - DNA, 415 bp, Glycine max
  unsure (1)..(415): unsure at all n locations
  Clone ID: PAT_MRT3847_79267C.1
acgctctaaatactcattccatacgtaccatacttatcactacacaaattnaaccgggtgctatcgcacaaatcaaccacgagaaacttattatatatttatttcctcaaagccacccacagccataatcaattgtatcacataactatcaacatccacgtattcacttacagttctataccccacactttccaagcatatctaatttgaataacaaagaccactatggtacatcattaactccaatgcgcttccagatgattacaccgaaacacataagattcaacaatcaacatattagattgtcatgcttactgacatcaaataatcacaaattaatctctaaattaatcgaaatatatctttattatatagaaaatttatcaaccacactaaccttacatacaaagttttt

SEQ ID NO: 119889 - DNA, 535 bp, Glycine max
  Clone ID: PAT_MRT3847_79268C.1
ttgggcacctttgcaaacacatctccacttatttttgaagcagtggtttggtatgtgttctcttttggaggtcctatgagcactgcccatatctgcatgcatgcatcatacaagaatgactcaccttgtaggtgcatcttgatctcgaacatctaatgccagacaaaattagggtacattgggttgcttcggttctctggttcttaccccataaatcaagggtcttgtttgctcctagcctctttaaaaagatgcctattaaacctacaagagttttatatgcatgaagttccatgggctaacaaataacaggctagatttggtatttgttgctggtgtcagatttgcttgattgatgtcaaatctcaaaatgatttatattctataaattaaatccttctacataaggagatgagttttaagtatatagattgtaatttcagtttgattcaatgttctattattatggcaatgaccacattggcagcagtggccacgtcaaccaccttcaatttcattctatttattctctaag

SEQ ID NO: 119890 - DNA, 264 bp, Glycine max
  Clone ID: PAT_MRT3847_79269C.1
tcgttatgcagcggatgattactgctcctgattcaattgatcatattgatctacttgcgagcattgatttgatgggcttacagggagctggtcaagctttcccatacaagattgattgtgatgataagtttgggtcgactaacacacaagatttctttgatggaaattatgcagaggatgcttggttaccaattattgggaattgtctttatgctgtaggtcaattaccttaagaagctgtcaaagataatgctacttgtggta

SEQ ID NO: 119891 - DNA, 277 bp, Glycine max
  Clone ID: PAT_MRT3847_7926C.1
aaaacccccccaaacaaacctaatgtaaacaaacattttatgaattataaatattcgcctaacaacctgttaaataaatagaaaagcgcaaagtaaaaaatccaaattaaaaattctcaaaactctcataaatcttcacaattcaaacaaaacatttaaaatactcacacctaacacttgcatcattcatcataaaaattatcgataacaacttaacaaaacttttaacaatccaaaccaactcaaactcaaagatttttaaaccaaattaacaacc

SEQ ID NO: 119892 - DNA, 368 bp, Glycine max
  Clone ID: PAT_MRT3847_79270C.1
ttttaatgcttcgcatatctaggcattaattattaaccaagctggaattgatccaactcattcatttacagtaccagtaacagtatgacggtgtgacttggtgattatgcatgaaccgaaccattcaacaacgggaacaatatagatatttacacgaattttgaattgcacatgttaatcgtattggtaatagaaaaatcattcttataggcaacctgcccgtggatcattgtccaattgccgtaaggaaacggtatactaaaatttgtatgatggaaatttatggggcactaaagggaattcagggaccctgtgcgaagggttccaaggtgtcttgaggggtacattctgaatcatctgcaagtttc

SEQ ID NO: 119893 - DNA, 491 bp, Glycine max
  Clone ID: PAT_MRT3847_79271C.1
gctaactagaaccttgaggagcccgaaaacgccctctaccgcccccgacgatcacactaggatgctggatgagtcgtctccgtttaagggccagggtatcatcgcctactctattccttggatggatcatgtgtgcctgacctgatccataccagaggatgaacgccttgacactagaagaccgatatgttcatggacctcttcttgcatgaccatattgagaggaagacagcggtggccgattacgctgcgatggacatggctgatgactttttgacccttgacgaggatcctactctcgacgtcaacgctcgagaggcttgacagtcagagcttttactcacgatctaataacaagcgagactgcaagctcaaccgcaacaccgaaccgggccctaacacagctatggagaaggccgctgatcatcaagatagcagcagaggagctacacagccagtacgtggagacagatggattgaagacatggaca

SEQ ID NO: 119894 - DNA, 226 bp, Glycine max
  Clone ID: PAT_MRT3847_79272C.1
gaactttcgatgaaccgcgttcacaggtttccgcaccttaaaatctgagacaatagctatcgctacttgatttcaagagtctctcaatgtcttcctacttctttctgtactgtgtcttaagggatagagaatcactctctgtgctggccacagactgcgtgaatcgtatacttttccacacatcatacggatttaagacgatacgtgctgtaggatcaactttcta

SEQ ID NO: 119895 - DNA, 299 bp, Glycine max
  Clone ID: PAT_MRT3847_79273C.1
cagacgcgtgggcaggagtgttgtgatttctaaatctgagattctgaatctgaggctacgattagaagtttaagttgaagaatcaaaatggtgaatcattctcaagcatggttgttgtgatttctaaatctgagattatgtatcttaaactactttcaatacacacatttaatgaatctgttggtgaaacattcacaagcgtggttcactatttggctcatgacttcaacgcttacacttttagcacaaaaatagttttgaccctcacgttactgtgaatatgaaccatttaacatttc

SEQ ID NO: 119896 - DNA, 155 bp, Glycine max
  Clone ID: PAT_MRT3847_79274C.1
caaaaaaaagacggcgccggccccccccaacaccgggcaaccgacaagccgaggacggacggaccgcgaccggcgaagaccaaaaacaggcgaacggcacacccaaggcccaccggcaaagccagcgcacacagcggacccaacagccgcaaacc

SEQ ID NO: 119897 - DNA, 326 bp, Glycine max
  Clone ID: PAT_MRT3847_79275C.1
cttacgtatcactggtacctgccgagctaggaacgccaagctcgcgacggctgtgtccggagccattcatgacaatataaaagcttgaagataccttctgactgggggacacttacattctgaccacacccaaactctaccagccctatgacttggacagcgggtactataagaaccccctgatgcaacacggcgacgctgacccacatgggcccctaaccaacgctctgcaacatgatggagatcacggcaatagtgaacatagtattaacgaggcgtatgcgaccgtcacagtgatggagccacagacgatgcgaaacatgttc

SEQ ID NO: 119898 - DNA, 432 bp, Glycine max
  Clone ID: PAT_MRT3847_79276C.1
gtttgagatcactcgatttctctgctttttgtccattagactttatttaatttcttccattctaaacagcgaattgcttttacgccaccataaaatatgggtttggccatttccggtctgttcagtcgacttttcggcaaaaaggaagtgcgcattttgatggttgggctggacgcggcgggaaagaccaccattctgtacaaactgaagttgggcgaaattgtcaccaccattccaacaattggcttcaacgtggaaactgtcgaatacaaaaacatttcattcaccgtctgggacgttggtggacaagacaaaattcgaccgttatggcgatactatttccaaaatacgcaaggactgatttttgtcgtggacagcaacgaccgcgagcgtgtgggcgaggcgcgtgaggaactgatgcgaatgctggcg

SEQ ID NO: 119899 - DNA, 402 bp, Glycine max
  Clone ID: PAT_MRT3847_79277C.1
gtggaaatgtatgtgtctcattggggttttaggctgaatcttattatgatgcttgcggcatcaataaagctattttttatatatacagattttttgcaaaagagaggagcccccccatccattctcatcgcacaattttgaaagactaccttcttttgttgctaggaaagaatatagctactctattccctgaacatggaaaccttaactagaatacatctgatgaccctgacagtggcacaaaatctatgaggaagctggcattggaacccgaagttcttgttgccgaaagccctctgctagacgttgagagatcccaccgatgacacgctccccaagcctgcgggggtcatgatgctgaagaacctgccctacaagtaggaaaagaactgcatcataatg

SEQ ID NO: 119900 - DNA, 168 bp, Glycine max
  Clone ID: PAT_MRT3847_79278C.1
aaagttaaaaaataaaacgaaaaccccgacctatggaggaactctctgatgaaaaaatcaaaaaagcattcttgaataaaattggcaggcacctatagaaaagaacgggttttccgcaagaacagagcgtgtttttttttacaagtgggggaaacacggttgaaacaa

SEQ ID NO: 119901 - DNA, 345 bp, Glycine max
  Clone ID: PAT_MRT3847_79279C.1
gctgccaatgttctcaaggctactgtcaagccttctccggaggctgtaactggggcttgagtatttgctttactgcttccttctgttttttctatattgtatgtaggtggttatagcgttaagtgtgagactttctctgtctttctgcatgcacgtggtatagtgttaagtgtgagactttctctgtctttctggttttgcgtagaacatcggtgtgccttatagattgtatgtatgtggtgggaacttatgtgttgtgcctttatagtctatcttttgatttaaaaaaccttctcctgatgttaaagtgattttatatatacttaacattaataagggcgtccg

SEQ ID NO: 119902 - DNA, 809 bp, Glycine max
  Clone ID: PAT_MRT3847_7927C.1
aattcggctcgagggcgggaagaagcacggcgccgcgcagctcagggtttacaatctcggcaacacctcgccggtgccggtggggaaactcgtttccgtgttggagacgttgctcagggtgaaggcgaagaagcacgtgatcaaaatgccgcgaaacggcgacgttccattcacgcatgctaacgtgagcctggcgtggagggacttcgggtacaagcccaccactgatctcgccactggtctcagaaagttcgtgcagtggtacgttgggtattacggggttcgcttaggggtagaaaaggaaaagatttcgcttgattgatccttaccgtgccactccattcattttcacatgggttttcttttcttctttttttgtgaataattattattattattattatctactcttttttttttttgagtggtgctggtggttatagttgtggcggcccatgtgagaatgcataatcatgacatgacccggtggatggaaggacatgaatatgaagatgaacctaggaatataaacgtggtagagaaggaagagacaaatgttgaagaaatagaaagtaataaaagcaaggacaagagcaagtgtatatatctaatctatgtgtgaagtggtggaggggaactgagctgtaataatgatgggtgggctctactttaagcttttggaacttattcaatttattatggtattttcaaagttaagtaaaattgtgtataaacaataattatatgatatagacatgcaattttcttacaattacattattatattaattttctgtttatctcaaaaa

SEQ ID NO: 119903 - DNA, 514 bp, Glycine max
  Clone ID: PAT_MRT3847_79280C.1
atccaaaaacaccggccatttattttttatctattcttcccatccgcatatacatacgaattctttgcacggcatgtcctttaacaaaaatgcacaccactagctcggcatcctaaagacctcgccacccgatatttaagtgctgcactttgtctggattctccacggtaaacaatccacctccacccttcatgaccactgtccttccacaagagcgcccggctcggtaataaataaaaacccgaactacgattcagggaagcggttatggaccaaaccgggcttgctacgggctcaccgaggcctcacagacaggaacagagaattctgcttaccgagcctttgctaaaacgcccttccccgcaaattcctgatcctatgccttgccaacctgttgctgacgtgccggggctcaagcctcaggatctgaccagccccacccttatcctaatgacttatatggaagtccgtatggctgtcaggaatggcgattatggatgcgaggatgagtttg

SEQ ID NO: 119904 - DNA, 235 bp, Glycine max
  Clone ID: PAT_MRT3847_79281C.1
aacaaacctcagaagccaggcatgatactctcctcgatccaacaccctgagggactatgggggtaatacagactcatagcgtgacaggtcactacgatccctaattcaagtgcaaaaaagaccacgtgattgctcctagtcacaacacgtgtaaaatagaattataggatatcatacataacctctgcatcaagacaaatatatcgaaagacgcgctactagacatggatctaaa

SEQ ID NO: 119905 - DNA, 770 bp, Glycine max
  Clone ID: PAT_MRT3847_79282C.1
aattaatacaaagtatagattgctagctatatatcaaagaaaaagcttgctttgtgtggaggctgcagagaaaattcaaggtggtgttcatggccatgatgtggattagagtcatacttatactagcggcttgcatgcttcccctttcagtggaagccatggttcgccactacaagttcaacgtggtggtgaagaatgtcacaagattgtgttcaacaaagcccatagtaaccgtaaatggaaagttcccgggccccaccatctatgctagggaagatgacactgttttggtgaaggtggttaaccatgtcaaatacaatgttagcatccactggcatggagtgagacaattgaggacgggttgggccgatgggcctgcttacataacccaatgcccaattcaaccgggccaggcctttgtgtacaacttcaccctcacaggacagagagggacactttggtggcatgcacatatcctttggcttaggtcaactgtgcatggtgccttggtcattttgcctaagcttggagttccttacccttttcccaaaccccacactgaaaaagtcatcatattgagtgaatggtggaaatctgatactgaggctgtaataaatgaagctttgaaatctgggttggctccaaatgtctctgatgctcacacaatcaatggtcatccaggatccgttcaaaattgtgcatcacaagggggatacgaacttcaattcaacctggaaaccctacttactaagaatatcaacgctgcactg

SEQ ID NO: 119906 - DNA, 694 bp, Glycine max
  Clone ID: PAT_MRT3847_79283C.1
actttttcttttcatccatcgattaaagacttgcttccccctggctcggctacagaactactgaatgccgctgtcgctgttcctcgacctgacagtggccttgctcagctcataaaagtcaccaccctcaaatctatcgatgaaagagacagcatccagctgcagaagacattgtagatgtcgccaacaccgacaaccacgatgactcccaagactccaacgactccgagatccgcgcgccgaggtgacaacgtctggtggagcctcccccatcctgtcagaaaatccgccacgaatatcactccgtgctcatatgtgttagactatcacttcccatgactcccactggctacaactgactgcacacggccagagaccagaagaacgcacagcgtgaaaggcataagctaacaaaacagggcgatgcatgtaaatattgtcgattttcgttaagtgcctgacactcctgaatctactactaccgttatgcgccaaggaggcatcgtccattggccgctaggacataaagaggacggactacgtgaaccatcgcaccagtctaccgtttgggcataaaagagccgtagacctctaccgcgtgaccctcgagggaggcaacgattcatatcttgaccttctggaagaggccaacgtctatatctccgccttgaagatacaagaaggagccatgact

SEQ ID NO: 119907 - DNA, 450 bp, Glycine max
  Clone ID: PAT_MRT3847_79284C.1
agccacgcttaatatcaccctaaaaagttctcttttcacacaacacaacacaaaccctgtgtgtgtttatataaatcatcatcgcatcaacaacatcttggtttgtgttgtcacttaattttacaccctccaccacaaactcaaaggttgtcatgttcaacacaaaaaacaacacttctatgctttttgtaatgtcttcatattaaccttcttcgtgatcacccatcaccgtcacatccctatcttaatcttaaacttaaccaaaatcaccacctatttgccccaaaataagtgctaaagttaaaattcttaataatgaattttactcgtacaaatccacttttttcaatttttgcttttttatcaagacccaaaacactctcttcccttttttggttctattcacaaaatcaatctattccaatttattaaccaacaacttttcttttt

SEQ ID NO: 119908 - DNA, 224 bp, Glycine max
  Clone ID: PAT_MRT3847_79285C.1
gcgtcctcatcatatcaagacataccagactatccaaactcttttttcatttgcagcatcaaaatgattcgtagcaggcatgggatctggagctcgacctctacgtttttgaacgtcgctactccacctgccgctacacccgccgttgccggctgtttatatgctattctttcaacctcaacctctgctatctctgagatctcactgccctttggcatcccact

SEQ ID NO: 119909 - DNA, 646 bp, Glycine max
  Clone ID: PAT_MRT3847_79286C.1
gcaaacaccacttccattattattgttccgcaaaatccactttcttcgttccaaatttggagcttgcaggcattgctttgagcatctcgttttgttggtcccaatattaaaaacaaatcattgctcccttgtgatttgtttcatccagaatcttcacaaaaacaccatttatatatatatttgtaggcaaaatttgagttccttgttaggaaaatggtgtattcgaaggcacccacagcgtactactcgaccctgcacgactcaatatcttctctgtgcaagaccattttacccttcggcctcaagaaacatcggtgtctcgtttccgcagagcagaagctgtggcagcttcaatccgacaacctcaaatggcagcgagattctctctatcagatgctgaatttggtggctcttcacagagatgacattctttctgaagctgaggtttcggctttcaggacccatttgctcgaaacccttcttgcttctccccctccgcaccaggatcatgccctcatcatcaaagatcagctcatgtttctgcacgaactccttaatgcaaagtgcatttccgatggggagtaccactcttcaagaaggcctttgcttgtgagactcgcagttctaggaggtgagactgaaggca

SEQ ID NO: 119910 - DNA, 700 bp, Glycine max
  unsure (1)..(700): unsure at all n locations
  Clone ID: PAT_MRT3847_79287C.1
catgcataaattctgctttaatttgaaagacatgctctgtttatatggatcaataacttttctagcatccagagcattaggaaaacaagaagctttgatcacaaaatatgccaactccttggacactttcattttaacgaatagcaagaaacttcgatcacaaaatactgttttctggcactagaataacagtcaaatttaattatataatacttgggtacactggtcccttagacagaccaaggcgaacttccatcccatgatgcatgtccaatggccggaaagtctctgactcacgggggtctgcaaacaacatcaatggcatttaaagagacagagaaaagtatgaacaacaatgtgccatatgccaattaaccaaaaaaaaaggaacaacaaataagattgcatagctcaattatcatggataccaaattcgcaatcatagcattaattccatagaacaaagctttacaaaaatacatgattttgagcaggctatgtcttttttggtggttaaaagcaatgtggcttaaaatattatcactaaaactgtgcaatcatttatcttccatacttccagtattggngtttaaattatgatgcatatccaatcaaatcataaaacatactgcagggagatttcaacagcagattctaaataagcctgaatcagattctaaatcaaatataaaacatactc

SEQ ID NO: 119911 - DNA, 708 bp, Glycine max
  unsure (1)..(708): unsure at all n locations
  Clone ID: PAT_MRT3847_79288C.1
ccacgcgtccgagagaagccaagagtggtgctgcagcagcgtgaggaagagaagaacaagggaaagaaagataagctaagcaaagcaaagcaaagcaaagcagcccccctaagatctctctggtaattgtgataacagcaaaagaggatcttttgtggacacaatcaaatttctggggttgaaagataatctatttttctgtgcgaatttggggtgtaggtgattatggttgttgatgagagggtgtagctgattcggcggaaaaagaggattttggtgtggaatggacaggattagagaagccagaagaagcactatggctgcaaatggattaaccagacgaagacacaggactaacagtcttagagactcaccagaggaagatggaggcatggagctgcaagaaccatccaggttgcgagatcgaggagggagtgggaaaaaggatcgagatcgtgaaagggagagggaaagggagagagatcgattgggtcggagcaagaagagaagaggagataggttgatgcatagcagcagagaagatggcggagaagacacttctgaagagagtatcaacgatgaggacgatgatgacgacgaaaacngtggcggcggcggaggtagcgcttcagtaagaatgcttccgttgaacccatcttcgctctccaaccaccaccatcggaagagcttccctnncgcgaaagtttt

SEQ ID NO: 119912 - DNA, 911 bp, Glycine max
  unsure (1)..(911): unsure at all n locations
  Clone ID: PAT_MRT3847_79289C.1
gnagatttcaggcagagtttgaaagctgaaccacagaaaatggagagtgaaggcagaccacgaatgaaaggtattatgatatggtggaagagacacaaatgaaaggtattgtggtattaccgctctgttctcccatggcagctcctctgcaggttgtattatacggaaatcagcctcacccagaagccaagtttttgtttttgaggagtactggtcgttgcactaattttcaggttcactcctctcgcagagcaccccctggtgttgacaccagaatccattgggaaaacgaagatgaaggttggatcggaggtaccaataccaaacaccaacaaacccacaaacccaataacatgttacaggctgatgactttccagatctcctctctgcttctttaggttctcattacgaattcttaggcgtatcaccagatgcggatttagaagaaattaaagttgcttatcggaaactgtcaaaggagtatcatcccgacacaacttccctccctctcaaaactgcctcagaaaagttcatgaaattaagagaggtttacaacgttcttagcaatgaagagagtcggaaattctatgactggacccttgctcaagaggttgcaagccgccacgcagagaagatgaaaatgaaattagaggatcctcgcgagcaacaactcaagaactgggaacctgttccagacatggttgaccgccttggtggaaggaatatgaagcttagtgatcaggcagtttctgccatcactattgatcttttcatcattgtttttgccatatgttgtatcatatatgtaattttctttaaagaaccctattactactaattagttaaccaattataacaccgtatatgttatacaacagaataaaaaaaaaatataaaacatttcaagatt

SEQ ID NO: 119913 - DNA, 636 bp, Glycine max
  Clone ID: PAT_MRT3847_7928C.1
ggtacggctgcgagaagatgtccatgcatgtgtgtggtagtgagaaggattgagaaaaagaaagtggtgtccaagcaatggcaattatctctggtatcccttaatttatatgaatgttgtcacagaggcctttcttttccttatgatgttgctcttgttcctaccaaagcagcaacattaaaattaaaacatggcatcttcaccggacaccagcaaaaccataaagctggtgcgtaacaacagctacctccgcagactcaacatatccttcaaaatcctcttcctcctcctcgccctcctcctcctttacactctttccacccaccaccaccacctccccctctcctccgcctgggagaatcaggtccgccactccgccctccctcgccgccccaacggcatgtcggtgcttgtcaccggcgccgcgggcttcgtcggctcccactgctccctcgccctcaagaagcgcggcgacggcgtcctcggcctcgacaactttaacccctactactacccctccctaaaacgcgcccgccaacacctcctggcgaaacaccgaatcctcatcatcgaagccgacctaaacgacgcgccgttgctcgccaagctcttcgacgtcgttttcttctcccacgt

SEQ ID NO: 119914 - DNA, 333 bp, Glycine max
  Clone ID: PAT_MRT3847_79290C.1
gtaaaccaccattccacatcaacaataaaaaaatcaattcagtaggttcaattgatgcagaagctacttcacattgcttctggtaaacatcgagagagggtgatgatgcacgttgcacatttggttcggaccatgcacttagtttctcacccaagctaaaattaacttgtgtacttcagcttttggaaaagttagataagagagtttctatgaaaattaagtgcattagttgattttagcttaccagaaaagctcaattcattttacctttttttattttcttttgctatcagtacttttggagaactttatctaaatagagcataagcatgt

SEQ ID NO: 119915 - DNA, 208 bp, Glycine max
  Clone ID: PAT_MRT3847_79291C.1
cgcacatcacaggacgtcacctgtttctgtataggttggtgaaatctcaagagccatacatgcgtcacccgatcaagctgttatgtcttaggatcccctggctattagtcccatgttctaccatgtggatgatatttcaggagatagatgagagtctcctaccgaatcacactcatgcgtgcctattcgaagaccctgtcagccatct

SEQ ID NO: 119916 - DNA, 442 bp, Glycine max
  Clone ID: PAT_MRT3847_79292C.1
tttttggtatcttcaatttcatccttaatttatttatttaattttccaagtttgggttatgtataattatataacaatagttcatgtcacagccataaattcatatcaggcattcaaaagttcactacttcttcctctttacagactaataggttgtaataaaatggggtgagtcagaaacttgattatgatcctcttcaaagatcaattgaatacatggcatggatttgtcttggaagcctcctcttgttatttaccaagagtttatgttttctcgtcctttgaaatggaaacaaaaagcgtgtccctggtactgcttctgcttttgcctcctaaaaaaaatttccaagggctccaaggatatcaccatttttcccacaaaggacaaggtacttgagcctcctttcttgataataatctaactggggcaattccaattttt

SEQ ID NO: 119917 - DNA, 423 bp, Glycine max
  unsure (1)..(423): unsure at all n locations
  Clone ID: PAT_MRT3847_79293C.1
gtatcacatcaatgaccaaagcgatgaccaaagcgatgacgagggcgttggtggaccaaccatcacctccgttgcaatatcaccaacctaggtgtcaagtgaacatgaaccttgaccacctgtcacactacattaattgtcaccatttcattcatcaacaagataatctacaaccaccaaccgtgcacacgaggttgtcatgaccttcgatgaaaaagcacaatgtattcgagtagtcaaagaatacaacatcaaaaatcattntgattgaagaataatatattccgactagagaaggctaaactctatgtgtgaatgaatntgatagacacaaccacacatttattgtaacatagactcaatccccacttcaaatacccaaaccacttggaatgtttagggttatgttacaatcctaaaagt

SEQ ID NO: 119918 - DNA, 824 bp, Glycine max
  Clone ID: PAT_MRT3847_79294C.1
cccacgcgtccgcgaggtgagggggatcaccgtcgatggcgtgcaacggctctgggtgccagtccggtggctgctacaaagacgaagacgcaacatgtaagcaaccacccaagtccgaagaagccgattcaaaaaaccctagcaatgtctgcatcaagtgcaagctcaacgacgccgtttcgggctacggcggaatcgacgatggtcgtttctgcgccgattgcttcaaaaccaacttgttcggcaagtttcgtttcgccgtcacttcaaatgccatgataactcccacggacaaggtcctcgttgccttctctggtggcccttcatccagggtagctttgcaatttgttcatgacatgcaagagagggctcagaggaacttcgatgcgagtagggaccggtcgttgccggtgtttggtgttggagttgtgtttattgatgagagtgccgtgttgccgattccttctaatgaaatggaggaagcggttgaggttgttagtgaggttgtgtcgagtttggccccaccaaggaaggagttgcatattgttcctattgagaccgtttattcctcggattctggtgatgggaaggagaggataaccaaggtagtgaacacagtgattgatccaacgggaagggaggatgtattgctctgtctgcgaatgttggcgctacaaaaggttgcttctgaatttgggtataacaggatcattctggggtcatgcatttcgaggattgcttgccatgtcatttcagccactgtgaagggttaaggatactcattacctgccgatatacaggatgttgatgctagatgggaagat

SEQ ID NO: 119919 - DNA, 404 bp, Glycine max
  Clone ID: PAT_MRT3847_79295C.1
accgctcgtacgctcaaccacacagtttgcgcatcagtgggtacggctatcaatctgtggggatggctctgaatccaattatccgctcacgatcttattcaccatcctagtaaccgacctgacatagtctatcctcaacagttgcttgagacattgcgtgcatattgtagcaataagtgtgttaaatgctatggatcgcctacactgagtagctactgcagatgcactcatctaagtgcgtagaccgcactatggaacccactgacgtaaccagcatcatgatatgaagttcacaccgctatcgcccatgatatggacatcagcgctggctaatcactgggaatcctaatttatagccatctaacattccgtgctgtggctcttcatgctggctcattcaatat

SEQ ID NO: 119920 - DNA, 434 bp, Glycine max
  Clone ID: PAT_MRT3847_79296C.1
acggctgcgagaagacgacagaagggtattcctttcacatcaatattaaagagtacacaaataaaggaatattttgctaataaatatttaaaaagtagataagaaatatgagatagaaaataataaataataacaacattttatttaaattttaaaagacttttctataaataacatttgaagtcatatttgtattatttctattattaataaaaatatttttgttaatagaatattattagaaaagatatgaaacatttttattattaacaaaaaatatttaaattttgttaatatatcgacattcagatgttttgtattaaatttttataagaaaaaattaaaaaatattaaaaattatgctatattcatgtctatcgggtgacacaaaattagacttaaatttaacaatcaataaaaatattcctattcta

SEQ ID NO: 119921 - DNA, 411 bp, Glycine max
  Clone ID: PAT_MRT3847_79297C.1
ctctcaggttttagaagctcagctaagcacaatagagagtttaattaggccattaacatatcatatgggtgtgactaagcctcatgtgcttatgctgttgatcatcatggttgtctcaattgcagagaaaccatcagtaatagaaggaagggctctttccttgatatctggtcaaggtaattttactccctctcttattgtgcttgctgattttgttgtggagtccagtttttaatataaagatacttttaccattaactaattagaattttttagatataatttttaaataattatcttaaaaataactataaaaagaaaagattccattaaagacaatcaatcaaattttttggcatctaaaaaaaaattaattttcaacaaagtttgttgataaaaaacttactatat

SEQ ID NO: 119922 - DNA, 458 bp, Glycine max
  Clone ID: PAT_MRT3847_79298C.1
atcccacacgattctcatcacgaaagaatcgtcgatcaagatgagagccaaatggagaaagaagcgggttcgccgccttaagcgtaagagaagaaagatgagagctagatccaaataaacgcatcgcatctcaacctgacttgactcatctttcatgatgttacgacttcacacgcctcaacgatactttggccgaagcagggcactcgccattctggcgcctctgggacctcccgcgacgcactgagctgggatttgactttgggaactacgtcagggtggttgaaccccgcacttgagcagctgttagggcacacaatggacattacgatggatgggatatgacaatcggacggtcaggcaaaagacggtgttggatcgaagactattaaatgctcgacgatgcgacgcatccagaacatggttctaagacaaagaaatacagagaatgcctccgg

SEQ ID NO: 119923 - DNA, 563 bp, Glycine max
  Clone ID: PAT_MRT3847_79299C.1
cccacgcgggctcgaggacgcgcggaggatcatggagggattgttgatcggaccacggcttaagatggtggtgttgcatgacggatgacaaaggtacagttttttccttgaattatgagttcaggttcagaggtcgacaacttcggggattttgaggggtcgagtttgtggttaaggtggacagaggtattcgattatgaagatgtgtctacctctgatttgagtttgggttctagcagcttttcttctaggagttcgacctccttgtccgaggacaatccgacataacttgctattgaggagaatttggtggatttggtttagatatcgtccaacgaaagagtgagtgttgacgcacctttaaatgataatgtgacaatcattgttaagccgaaatgtcaagtgccagtaaaaaagaaagagtactcgccgattactctactatggtattcatgggttgatggtgaggtggattccttctattcctgttacaacgataaagtcaatattcttcactttatcaattgtgtaaacatatgtacttttacggacgaagaagtgaa

SEQ ID NO: 119924 - DNA, 1940 bp, Glycine max
  Clone ID: PAT_MRT3847_7929C.1
atggcttttgtggcttcagtgagaagaattgagaaaaagaatggagtgattgagaaaaagaaagtggtgtccaagcaatggcaattatctctggtatcccttaatttatatgaatgttgtcacagaggcctttcttttccttatgatgttgctcttgttcctaccaaagcagcatcatttgaattacaacatgctaacaaagcagcataaaaaaccatggcatcttcaccggacaccagcaaaaccataaagctgatgcgttacaacagctacctccgcagactcaacagcttcaaactccttaagacatccttcatcctcctcctcctcctctacaccctctccacccaccacctcctcctctcctccgccttccacggccccgcatgggagaatcaggtccgccactccgccctcccccgccgcccccacggcatgtcggtgctggtcaccggcgcggcgggcttcgttggctcccactgctccctctccctgaagaagcgcggcgacggcgtcctcgggctcgacaacttcaactcctactacgacccctccctaaaacgcgcacgccagcacctcctcgccaaacaccaaatcctcatcatcgaagccgacctaaacgacgccccgttgctcgccaagatcttcgacgtcgtttcgttctcccacgtcctccacctcgcagcacaagcgggcgtccgctacgccatgcagaacccccactcctacgtggcatccaacatcgccggattcgtaactcttctagaagcttccaaaaacgctaacccccagcccgccatcgtttgggcctcctcgagttccgtctatgggctcaatgacgaaagcccattctccgaactccaccgtacggaccagcctgcgagcctctacgcggcaactaaaaaagcaggcgaagcaatcgcgcacacctataatcatatctatggactctccctcaccggattgcgcttcttcactgtttatgggccctggggaaggcccgacatggcttactttttcttcactaagtccattctccagagaaagcccattgacgtgtaccagacgcatgacgagagagaagtcgcgcgtgacttcacttacatcgacgacgtcgtcaagggctgcctcggtgccctcgacacggcggagaagagcaccggcggcgtcgtagggaagaagcgcggccccgcgcagctgagagtttacaatctcggtaacacatcgccggtgccggtgggtaaacttgtttccgtgttggagacgttgctcggggtaaaggcgaagaagcacgtgatcaaaatgcctcgaaacggcgacgttccgttcacgcatgctaacgtgagcttggcgtggagggacttggggtacaagcccaccacggatctcgccgctggtctcagaaagttcgtgcagtggtacgtcgggtattatggtgttcgcttaggggtagaaaaggaaaaacacgcagacttggcttgattcatcctttccgtgcccctccattcatttattataattatatgtttttttgttgaaacttgtgaatggtgctggcggcccatgtgagaatgcataatcatgatttggtattttaatcccggtggatggaaggacatgaatatgaagatgaacctaggaatataaacgtggtagagaaggaagagacaaatgttgaagaaatagaaagtaataaaagcaaggacaagagcaagtgtatatatctaatctatgtgtgaagtggtggaggggaactgagctgtaataatgatgggtgggctctactttaagcttttggaacttattcaatttattatggtattttcaaagttaagtaaaattgtgtataaacaataattatatgatatagacatgcaattttcttacaattacattattatattaattttctgttaaaaaaaaaaaagagaaaagaagaa

SEQ ID NO: 119925 - DNA, 282 bp, Glycine max
  Clone ID: PAT_MRT3847_792C.1
gactcttacaatcacagttgtcgagtcaccggatctgggttgcatagattcagagaaaattttccactttcaaatagcaagcaccgtcaatacccacgggttggatcggtgagactgttcattcaatcaaatctcatcagatttgggagatcatcaccaattctgttagccgatgcacaattgtaacatcatcactgcaaatacggaaggcattgatcatacgtatacggcactgaatctcccgtagtcgtcgttctttcaggaatcatgcaaccccgatta

SEQ ID NO: 119926 - DNA, 268 bp, Glycine max
  Clone ID: PAT_MRT3847_79300C.1
ctcaccacctctagtttatgatatcttcatttctctctagttgtttcaagggaagaacaagtgctatttgggaaccacattgaagaagtgagaaagaggaagctccaaaagcataagaaaaataagactgaagatggaaaaagtctaaattactatgtgctacttcttgtacttggtcatttcctttgttcaggttcaagtaggacacagaaggaagcaccagtacatatgaatgtactaaggcataatgaagaaaaacaactaaaat

SEQ ID NO: 119927 - DNA, 224 bp, Glycine max
  Clone ID: PAT_MRT3847_79301C.1
cccactcttacggaggtttttcaaacctatcgggcgagtcatcgtttcggtcgccgtttctgtgattggcgaatcgatctgttccttagatacataacgtttttgtttttccttattcttctacgcccgatatattgtttaggagttacggggaattttttggattcaaaaatcctaagtgttttgatatactataaaaggtgcagaggacgtgcaagtgttcg

SEQ ID NO: 119928 - DNA, 385 bp, Glycine max
  Clone ID: PAT_MRT3847_79302C.1
gagttatccttgaaggtaatgcatgcctatgtggattcctttaactttcaagggatggagtttgatgaggcaatcagggtctttcttcaaggattcagactgcctggtgaggcgcagaaaattgataggatcatggaaaagtttgctgaacgttattgcaaatgtaatccaaaggccttttctagtgctgacactgcatatgtcctagcctattctgttataatgcttaatacagatgctcacaatcctatggtgaagaataaggtgtgctcacaatcttatagttctgtaaattgatgtacacataaggctttgatatgttttgggaccttgtaagttagtgttttttcatttttagtccctgtaagttggtgccttttcaaaa

SEQ ID NO: 119929 - DNA, 745 bp, Glycine max
  Clone ID: PAT_MRT3847_79303C.1
cagcacacagtcacttatcttggaaaattataataaaaaaaagtagtacagcttgttaggtaactgttgccatcatatttccatgaaaatccaaatttttaacatccaatcactaatgtgacacataccattatcgttatatgcagacttttaaaagcttatactcagttattaccaagtaatatttaaaagtcaacgtaagctaagctcacccttaccaaacctacacaagacattataaaatttgacacgttatctcacaacgcggtcttcaatagttcgatccaatattataaatcttccacacagaatgaagaaagaaaaaatcaaagggaactattctaacgaaagaatactcgtgaacaagcagaacaaacaattctaattccatgtctaggaaatgagcctctacctaatcctgagtggaagaatagcatgtttggtttcacatctcatctcagatatagtttttcacatttattgagaagctagtagttataactttagccttttatatcctaaacgtgatttcttacttctcaactggtttctaaacaggcatgtatgtaaggaattttggatcctcaaagaaaattgaatgccaccatccaaaagaataagattattcattaggggtacttaatcataatcaggagaaggaagaatacatactcggagcatgtggagacttttcttgaaattttggaccaaaagggggtgacagttcctgttctggtgttggttt

SEQ ID NO: 119930 - DNA, 330 bp, Glycine max
  Clone ID: PAT_MRT3847_79304C.1
gccacgcgttctgccaagcgttcgcacatcgttacagatccgtttcaagtttcactggggacttcatctgttgatgaaactgctgatttgaggtaataccataccagaaactatgcttattctaaccgctgctgattgtgctaacaacctctcactattcagccagaatgctgaacgttttcggttggttcttgctagtggattggtggttagggcaacgaaaggatccactaaccagatgtcgctgatcggaatgatgattgaaccgatccaataggcgaagaacgagctcgcattgaatcccacctcaaggtatgctagactcgtgcg

SEQ ID NO: 119931 - DNA, 317 bp, Glycine max
  Clone ID: PAT_MRT3847_79305C.1
ggctcgagctaagattgtatttcatgccatgatatgcaactcttaagtcttaaacctggtattgatatttatctttagtttgtccatcatgcttaaaaacattaggaaaccaattacaccctattggagtgaggagcttgaacaggcatgcaacatgaaagccaaggtagtaaactctcttgtttgacattttatacattggcttgaattgtagattgtgaaaaacttatttgttgccctcaatattgtaatatcaaaatggattactcaattggcttaatgatttgtttggcttcaaaaaaaaaaaaaaaaaaata

SEQ ID NO: 119932 - DNA, 563 bp, Glycine max
  unsure (1)..(563): unsure at all n locations
  Clone ID: PAT_MRT3847_79306C.1
gctaagttaagtgcagtaccgtgggattaaggaatgnttgggcctnggtggatgatcttngnccngtttactgaccgntggnatntagggggacacataaacccggcggtgacatttgggctgtttttggngaggaagttgtngttgnccagggcgattttctacattgtaatgcaatgcttgggtgctatttgtggtgttggngtggtgaagggtttngaggggaaaacaaaatacggtangttgaatggtggtgncaactttgttggccctggttacaccaagggtgatggtnttggtgctgagattgttggnactttngtacttgtttacaccgttttgtgngnnancgatggcaaacgtaacgccagagactgtgangtgcccattttggnanctttgggtattgggttggnggtgttgttggnttatttgggaancatagttatnannggaactggtataaaacttggtcgtagtgttggtggtggtatnatgttnaanaaggaccttggttgggatgatgaatggatattgtggaggggaactttgattggtggtgg

SEQ ID NO: 119933 - DNA, 857 bp, Glycine max
  Clone ID: PAT_MRT3847_79307C.1
caagggcaagtcctggctcgacttcgtcctgttctctctctctctctctctctcatcactgccatgttcttcgaatcccgatccctcctcttcccgctccttttctctctcttccttgcttccgccttcgcttcagagtcagatcacaagtatcaacatgatgaacaagttaacctttgggtgaacaaagttggtccttataacaatccacaagaaacatacaactattacagcctcccattttgtcatccatctagtagtgctagtgctgcacacaaatggggtggtcttggtgaggtcctgggtggcaatgagctcatcgatagccaacttgaaattaagttccaaagaaatgtggataagactgtcttttgccagatagatctcgatgaagcaaaggtgaaacagttcaaggatgcaatagagaataattactggtttgaattcttcatggatgatctacctttgtggggatatgttggtgagttacatcctgataagaacagtgataatggcaagcatgtcatttacacacacaaaaacattattgttaaatacaacaatgatcagattattcatgttaatctcactcaggatatcccaaagcctttggaagtaggaaaacatttggacatgacatattctatcaaatgggattctaccaatgtcacttttgggcgtcgctttgatgtctacctggatcatcctttctttgagcatcagattcattggttctccatttttaactctttcatgatggtcatcttccttactggattggtgtcaatgatattgatgcgaactctgagaaatgactatgcaaagtatgctcgggaagatgatgatttggaaagtct

SEQ ID NO: 119934 - DNA, 318 bp, Glycine max
  Clone ID: PAT_MRT3847_79308C.1
aacacgagggaaaaatagaatttcattattcgcagctacctgtacataggctgaccatcctgattcttgctaatcacttcctgatcgaccaagaatatgaccccacaaaaggacactactctttctcttaattaactttttgaaccataccataccttaccctgagaataagctgtatgcagagcccacatgaagggttgctgctcactctttcaaaggaaattttactttttttctctcctgaattttatacgcaccgaggggagggcatcactatgaaatcagtgggtgacaagctacttaacccacccaacatgg

SEQ ID NO: 119935 - DNA, 699 bp, Glycine max
  Clone ID: PAT_MRT3847_79309C.1
ccgtttttctcttttttttcttgctgcataaacccttcgtgcttccctaatacaagcatcttctgcaactcccaaagcaaaaccttgtgcgacacagcatcagcgcaatgcatcaacaaccatgaatccacgtttcaccactgcacaattacaatcccatgagcctctcgtgcatcctcaaacacaggatcttccctccacccccttcccccttcaccctcttcatccaattcggctcgaggaaacccaccgtctccgcccaaacccgcttagaggacagagtccgagacccccacttggacaaactcatgtcccacctcaaaagactcgaccttgttctcagaatccaccacctcatgtccgcgcgcaagcgcggtcccttcgtctccctcaccctcctctcccgctggcgaaacatcctcggactccacatccccgtggggctcttcctccgcaaatacccccacgtgttcctcgtgttcgtccacccttttagaaaaaacacgtgctgcaggatcaccaaaaggatgaaagagttgatcttgctcgaagggctggtggttaagcagcaagaaacggaggctgtgaagagggtaaagaagctgttaatgatgtcattgaatggcactcttcgtttgcacgccttgaggttgttcaagaagagaatgggtctccctgaggatttcaaagactccattc

SEQ ID NO: 119936 - DNA, 416 bp, Glycine max
  Clone ID: PAT_MRT3847_7930C.1
cgctcggccccaggggaagtaatgttgttctcgccagcaagtatggctcgtcgaaaattgtggacgacggcgtcactgtcgctaaagaggttgacatggtggatcccgatgagaatattgctgccaagatagtgagacaagcagttgccaagacacactactggattgttgatggaaccacgacctttgttgttcttgctcaagctcttatagcggaaggtgtaaagggtgatgcatgtggggccagccctgtgctcatcacacatggcatagagaagacagcgaaagctcttgtatgtcagcttaaacagaggccaggcgaagatgaatatagagagttggcttatgtgctagcacacaccgcacgggacacttgcgaagaacgaaatttgattgctgactcattgagcagagct

SEQ ID NO: 119937 - DNA, 240 bp, Glycine max
  Clone ID: PAT_MRT3847_79310C.1
cacaattcacaccaccaacacaaaatgcctatccaaattgctgcacacctttgacatgagtatcacgttgccatgccactgtcctacacataatgctgtacagacctgaaagatcgatacaccaatacccactaccaatgctgctaaacacataccacacatactaatccatgctagtcacaagcttcacttactatctacatgtgactgacatactcaatgcttctgagaccccaacta

SEQ ID NO: 119938 - DNA, 569 bp, Glycine max
  Clone ID: PAT_MRT3847_79311C.1
ccgacaaaatcctatgtgatatacttgaaaaataatcacattaagaatattattaatataatgtgatgagatagacaaataattatatctctcgagcatgatataatacgattaataaataacattgaaaaccatgtctcttagatgtattgcggtaagaaaaatgtctcttagatgtattgcggtaagaaaaatgtctcttagatgtatagttttttttttactgctcttagatgtatagttaagaatttgaatttcaaatctgcgtatacggaaaaaaaggacatatgttaaaagaaattagtatctcaaataaatctctctatatctcgagaaatttttactctcgactaaaaaatactctatctacccaaaatttaacagtcacaataatttctactttaacagtcacaataatttctactttcttttttattccgacaacaatttcaggttatgtcaggctccaaaaagtaatcgtgagcggtttctttttttcttcttttaaaaagatcacttaactttttttttagcagaggagaaagattaattaactttacataacataa

SEQ ID NO: 119939 - DNA, 257 bp, Glycine max
  Clone ID: PAT_MRT3847_79312C.1
ggtccgatctggtattggttggagcacgcgcgccaaacggggaaaaagggggggggggtaatagaaacttccgcgcggcggcactaaatctttttttttttcccggcgggaacatgggggagcaaaagaaaaaaaggcataccataaacgaaaaaaaaaaaggaggaagtttaaccccgtcgaccgaaagcgaaaggggggggggggaaaaacccgggatcaaagcccgggtggcccaacaatatattggggggggt

SEQ ID NO: 119940 - DNA, 234 bp, Glycine max
  Clone ID: PAT_MRT3847_79313C.1
gacgcaacctctctctcttcttttcttcagttcggtggagggagggagccgtagcagcggaagctctagcttgggtcgcgaatcacaatggtgagtgttgttgcctaatctcctcttcacaatggtttcgatcctttttctttcgacattttacttgaattaactctccaatctgcgagaggattaaagaagcatctgaagaggcttaatgccccaaagcattggatgcttgac

SEQ ID NO: 119941 - DNA, 865 bp, Glycine max
  Clone ID: PAT_MRT3847_79314C.1
ctcgagccgctcgagccgtgactctggaagggaaggatgcactgtgaccactcttaccataactgcagaaccaacgcgtccgagtggatgagaattctttatattcatgcattggaattgctggtgctcaggctgcacaagaaatagcagctccgttagaagaggaagtagcagatgatgtttatccaggtgttattccggtgggacgaggtttatctacaatgacacggccaactacctgatatttttggactatgttttggcctgcttgctttaagatcgggaggagtgtctggaagtttgatgacaagttatcgttcgaaggattagctgcatgtgtgacaacacaagaagttgctgcattcatttaaacattcaacccattcggaatacaagctgttcgatcaaacctgggaagcggttattgacttgcgtgtgattgatttcctcaattatccttatctccagttgaatcactaataaaatgctgttactacctatactttgtagaattagaataaagaaaaaatgtagaatcaatcactaagatgtagatgtatgtataggtgccattttttgtccctcggccgtaaatttttttcgggggaactccgaccgtatcttagcgtaggaagttagttatataaattgtacatcattgtttccgcgtatgtaaaccaagtttcttcatcccatcgaaacgggaacttgaatgataaattttcaaagcggtggtgacagccactccgtgggtggtgtgagcttgattgtagtaacattcactcttatttctgctgctagtgtccttctgttcaaaagtgtcaggtccaaatgatttgcagggccacaaagctcgtgatgcatg

SEQ ID NO: 119942 - DNA, 604 bp, Glycine max
  Clone ID: PAT_MRT3847_79315C.1
gtcaatgcctactggttggattatagctatttacaagcttcttctgttccaggaaggacatatcatgtatcaaggatctaacatttctatatgaagttgccactattgaggatatataccgtgcatatgaacagttgaaagtggatgagaattctttatattcatgcattggaattgctggtgctcaggctgcacaagaaatagcagctccgttagaagaggaagtagcagatgatatttttggactatgttttggcctgcttgctttaagatcgggaggagtgtctggaagtttgatgacaagttatcgttcgaaggattagctgcatgtgtgacaacacaagaagttgctgcattcatttaaacattcaacccattcggaatacaagctgttcgatcaaacctgggaagcggttattgacttgcgtgtgattgatttcctcaattatccttatctccagttgaatcactaataaaatgctgttactacctatactttgtagaattagaataaagaaaaaatgtagaatcaatcactaagatgggagatggggtgggtaggggcccttggttggggcgctgggggcggggtgtgtgggggggg

SEQ ID NO: 119943 - DNA, 331 bp, Glycine max
  Clone ID: PAT_MRT3847_79316C.1
actcgaatcgagatggagagaataaggagctttagtgcacaaccgaacaagcacatttgttttcttactatttcatgttaaactgcgtggggagaaattcccattgggggcggtgcatatgggcgaaatgaacttgaaaggtggcgcattcacactattgtagagctttaaggctttaccctttgtttcagcagatattctcgctgaaccttaacagctttctgcagctaaggactacctagaaggttctaatcagaactattgacggaacataccggctgttaagagccatgacaatccaattgaggatgcaaaactctgaacacctgcc

SEQ ID NO: 119944 - DNA, 1597 bp, Glycine max
  Clone ID: PAT_MRT3847_79317C.1
ggctcgagattgaagactcttgatctttcattaaaccttgttggagatgaaggtgctaagtgcttatgtgacatattggtgaataactctagcattgagaagctccagctaaacagtgctgacttgggtgatgtgggtgcaaaagcaattgctgaaatgttgaagaaaaattcaagtttgcgggttcttgaacttaacaataacatgattgaatattctggattttcaagtctggccggggcacttcttgagaataacagtatacgaaatatacatctcaatggcaattatggtggggctttgggggctaatgcattagctaaagcacttgagagcaacaagtcaataagggaacttcatggaattctattggagatgaaggaatctgttctttgatgacagggttatcttcacataaagggaaacttacacttctagacataggcaacaactcattaggttcattccatgtcgctgagtatattaggaagagcagaaaccttttatggttgaacctttacatgaatgacattggtgatgagggagccgaaaaaattgcagttgctttaaaggaaaatcggtcaatatcaactttggatctggggggaaataacattcacgttgatggcgttaatgccattgctcaagttttaaaagataacttagttattaccactttagaacttagttataatcccattggaccagatggagccaatgccttggctgaagttctcaagtttcatgggaacataaaaacccttaagcttggttggtgtgagataggagcaaaaggggcagagtgcattgcaggtgctttaaaatacaataccaccatatcgaggataaacgtgcgagatcaacgtctaagctggggggttgcccaagttatagctcgcagcttgattgtggtcaatgaagctttaatctttctagatttaggatttaatgaaataagggatgatggaagcttttgctattgctcaagcactcaagtctaatgatgatgtagctgtcacatcactaaacattgccagtaacttcctaacaaaatttgggcagggtgctttggctgatgcgagagaccatgttttggagatgaccgaaaaggaaatcaacatcttcctctagaagacactatattctgcgataaattcttgatataaactagagcaggtttattattattgcatataagctgccggcaagtactggtagtggtaagagctcgttcacataatttttttgagttctgaccattcagtgagtgaagtatagaaattcgtgtactgtagccttaaattgttgatgttgaaaccgttaacagttgcatattctattgatctcttggatgatatagctcatccacaaaagtgaatttgttaagattattgttatcattcttggtatagttttttataagttacaagcatgatagcttgtcagcaaaaaggcatcacatgtagtttgcctttgctaatggtagattttttcttttggaccttttgttgccaagttatatagaattgtctaatgggtgttttgagaagactttgtattattattttattatgtggcaaattttattgtacacatg

SEQ ID NO: 119945 - DNA, 2719 bp, Glycine max
  Clone ID: PAT_MRT3847_79318C.1
tctttttaatacaagatataagagttcaaatccaccgttcacttcctcgagcttggatagccgtgactctggaagggaaggatgcactgtgaccactcttaccataactgcagaaccaaagaattggcaaaatgcaattagagttgctgttcaagaggttcggagacttaaagagtttggggttacccagggtgaattaactcgttatttagatgcccttctgaaagatagtgaacacctagcagccatgattgataatgtatcttctgttgataacttggattttatcatggaaagtgatgctcttggacataaagttatggaccagagacaagggcatgaaagtttacttgctgttgctgggacagttacccttgaggaggtcaattctgttggtgccaaggtgttagaatttatagctgattttgcaaagcctactgcaccacttcctgcagcaattgttgcttgtgttccaaaaaaagttcacaatgagggagctggtgaaacagaattcaagatatcatcaactgaaattacggatgctatcaaagctggattggatgaacctattcagccagagcctgagcttgaggtgccaaaagagctaatacaatcaacaaagctagaagagttgaaaaagctgcgcaagccggcctttattcctgtaaatcctgaaacagatgctacaaagcttcatgatgaggaaactgggatcacccggcgccgtctcgctaatggaattcctgttaattataagatatcaaaaactgaaacacaaagcggtgtgatgcggctgattgttggtggtggacgagcagctgagagtcccgagtcaagaggatctgtgattgtgggtgttaggacactaagtgagggaggtcgtgttggcaacttctcaagggagcaggtggaacttttctgtgtaaatcacctgataaattgctccttggaatctacagaggaattcatatctatggagttccgttttactttaagagacaatgggatgcgtgcagcctttcaattgcttcacatggtgcttgagcatagtgtctgggttgatgatgctttcgatagagcaaggcaattgtatctgtcatattaccggtccatccccaagagcttggaacgctcacaactgctcacaaactcatggtagcaatgttggatggagatgagcggtttattgagcctacaccaaaatcactggaaaatttaaccctgcaatctgttaaggatgcagtgatgaatcaattttttggtgataacatggaggtatgcattgtaggtgactttactgaggaggacattgaatcttgcattcttgattaccttggcacagctcaggccgcaagaaatcacgaaagagagaaagaattcaacccacccttatttcgaccatctccatctgatttgcagtttcaagaagtatttttgaaggacaccgatgagagggcatgtgcttatatagcaggaccagcgccaaaccgttggggttttactgttgatggagtagacttgttagagtcaattaataatgcatcaataatcaatgatgatcagtcaaaatctgatgcacaacagacacaaggtttgcagaaaagcctttgtggtcatcctcttttctttggtataacaatgggactgctttctgagattataaattctaggctcttcacaactgtcagagattctctggggttgacatatgacgtgtcatttgaattaaacttgtttgataggcttaaactaggatggtatgtgatctctgtgacatcaactccaagcaaggtccacaaagctgttgatgcatgcaagaatgttcttagaggtctgcatagcaacaaaattactgagagggagttggacagggctaaacggacccttcttatgagacatgaagctgaaattaagtcaaatgcctactggttaggattattagctcatttacaagcttcttctgttccaaggaaggacatatcatgtatcaaggacctaacatttctatatgaagttgctactattgaggatatatatcttgcatatgaacagttgaaagtggatgagaattctctatattcatgcattggaattgctggtgctcagactgcacaagatatagcagctcctttagaagaggaagtagcagatgatgtttatccaggtgttattccggtgggacgaggtttatctacaatgacacggccaacaacctgatatttttggactaagttttggcctgcttgctttaagatcgggaggagccatgtctggaagtttgattacaagttgtcgttcaaaggattagcggcatgtgtgtcacaacacaagaagttgctgcattcatttaacattcaaaccactcggtatacaagctgtttgatcaaacctaagaagcggttcttgacttgcgagtgattgatttcctcagttatccttatcttcagttgaatcacgctaataaaatgctgttactacctatacttttgtagaattagaataaagaaaaaatgtagaatcaatcactaagatgtataggtgccattttttgtctgtcggccataaatttttttcgggggaacgccgaccatagcgtaggaaaaattagttatataaattgtaaatcattgtttccgcgcatataaaccaagtcttttcttcatcccatccaaaagggaaatgataatttttcatgctttcctaaattgaaagctagact

SEQ ID NO: 119946 - DNA, 472 bp, Glycine max
  Clone ID: PAT_MRT3847_79319C.1
cccacgacgtccgcccacgctgggcggggcgggggagacctcgagcactgtcacacgctcctatatccgatcctccaccgtcgctctctcgaacacaccaacaccatcgtgatcacatgggacacgcagcacctggcatggcagtccatgatgactgcaacttgaagctttgggaggtgaaggcaaaaaggacacaccgtctcatagtaaataagagtgaggagcagcagaagcaggtcatggtgaacaagctcgagcagcctggcctgggctatgaacacttgactgccggccttcctgagtcacgagaggaggtaaggtgttcatgatttggagtacctgacggagcggaatgtccctaaaagcagagtcattcacgttgcgagatcccttgacacatcacccgtgagcgagcaagatgacagactgcgagctgacaaagacagcatgctaagaggcgagcctggatcgg

SEQ ID NO: 119947 - DNA, 681 bp, Glycine max
  Clone ID: PAT_MRT3847_7931C.1
gagagagagagagagtggatgaaatgttagagagagaaactctgaattcacgcgtccagctaccccttttggctctgattttgctttccgtgttcttcgagggtttttggtttctgggttgtttctgattttggggttttgggtttctctggaacaaaaatagttcaattttgttgttggggttttgtgagtaaaaagcttgatatttgtgtatggagggtgtttctgaaggagagaagaagaaggagccagtggaaggagagaataagagcaagcgcaaaatgaagacggcttcacagttggaagttctggaaaaagcctatgctgcggaggcttacccttcggaggctttgcgggctgagctatccgtgaagctgagtctgtctgatcgtcaattgcagatgtggttctgtcaccggagactgaaggaccgaaatgccaagaagctgcaaaatgattcatcccttgcgggggctccggcggtgggtgaggagggtgttgagcaagtgacaggggctgatgttgggcgtgattgtggtttagcttctgggccattcaatcatctggattcgcggaaaattgcgcctcggcctgggatgacggcctttcctagtatgggagctggattgccagcagtggtgggcagcagttactatgaaccacctcagaacatggatgtgc

SEQ ID NO: 119948 - DNA, 369 bp, Glycine max
  Clone ID: PAT_MRT3847_79320C.1
gggccgacccactcgtccgaactggccataaaaccctaaaatagagtgctatacgatagataccagttttgtagttacaggtctaggttaatctcaaccatggtaatgcagacgacactgatgagtttgattctgttgctcgcgttatatactatagatgtgagtgcttggaccggtgatatccatcgaagagtagtttgacacgtttgtggagaatcttctcttggacctgaataccatattctagaatgtgctgacgtagctgttctctgcatcaccaaatctggtgaaactctaaattatcacgcattcactgatgctaaagggatatacacggttgccgaaacaattctctacagtgatcactgg

SEQ ID NO: 119949 - DNA, 321 bp, Glycine max
  Clone ID: PAT_MRT3847_79321C.1
tcttatttgatgcttgagatgaatacataaatgccgagaatgctacatatagagcatatgtggaaatcagtactgcgacaccaatactatatagagtgacaagcttcattgtcctaggttatgctttacaaattaatggcatacttggatacatgaagcactcggtgagtctattgaagcagaagctggggtgtgagggactacaacacttgcttggcggctctggtatcatgatggataagaatgcatcatgctgcacaaacattgaacagagtacatccctttggggctgcattataattgacagacgctgacactacc

SEQ ID NO: 119950 - DNA, 180 bp, Glycine max
  unsure (1)..(180): unsure at all n locations
  Clone ID: PAT_MRT3847_79322C.1
ctaaatcagttcacgatttcacagttaaagatgccaggggaaataatgttaatctcgccgattacaaaggaaaggtcctctcattgtcaatgttgcctcaatgggttgctatcaataacggttacatgaggatcaagaagtgattgactnacgtggnaggagnagggtgggntncccanc

SEQ ID NO: 119951 - DNA, 131 bp, Glycine max
  Clone ID: PAT_MRT3847_79323C.1
cacacacatgctatgaaacatggaccagcgttactttttatgaacgggaaaaggagcagcgggctagctgattattatggcgggtggggcatccttcctatcacatcaacacatacacaaccgatccccac

SEQ ID NO: 119952 - DNA, 284 bp, Glycine max
  Clone ID: PAT_MRT3847_79324C.1
ggtttttgttagactttataaaagggtaaagaaagacagatatgatactttaggagcaagaagatgagcaagaaaatatgttaaattgcttttttctaatcttactttgcatctcatacatcacttatttatagaactcttaagaaagtttaagaattataaatttttttggtagataacagtttaggtgagttgggtcctagaggctcattaaggtcagggcaagaattataatatatttaaatatgaataaatgaatagtgtgttatttagagaagccctgt

SEQ ID NO: 119953 - DNA, 395 bp, Glycine max
  unsure (1)..(395): unsure at all n locations
  Clone ID: PAT_MRT3847_79325C.1
gggatgaggcaaggttgtttccagggagaggtagttcacatttttctcttacagagataaaaaagaaattaaagcatgctatgggaaaggagagacatcgaaaccctgaagggatctcaaaaagacaccctgctgctgaatgtcaaaataagtggcctaccagcaaagccattggtaaagacaatgttggaatgagatctcctaataaagaccacttcttcattgaaaaaattgcaagacctaccactggtgctatgcaaggagacaagactggtacagctaaagattctgaattgattgtggaacatgaaaatggtacttattcaaaacaaagggtttccaacttatatattgaggccaacaaacatctgtgtgagattgtaggtnatggagac

SEQ ID NO: 119954 - DNA, 1604 bp, Glycine max
  Clone ID: PAT_MRT3847_79326C.1
atttctttcatttttatttgccttttctttgaagaaaccctcctcttactggccttctcattcttttctctccgccatggacatctcattgccattcacagtcctcttgattatctcaatcctctgcaaccttaaaggactcgaacattcttcactggtagagggagagggaatggatttcagcgagctgagaaaagcagtggaggaggttgaactggtggatggtcactcccataacatagttgccctaaactccacctccatctccggttttgttcaggcctttactgtgggagcctttgttgatgctgatgccattgcttttgcacaaacctctctatccttcaagagaagtttgagagatgttgctgagctatacggaaccgaggtatctttgcaaggtgtagaggaataccgtaaagcgtctggaatagaatccatcagctcaacatgcctcaaagctgcaaaattctctgccatactcattgatgatggcatagaaatggacaaaaagcatgacatgcaatggcacaaaaattttacaccttttgttggcagaatcttaagaactgaacgtgtggccgagcaaatccttgaacaaggtttgcctaatggatcttcatggacaatcgattcatttactgaagcatatgtctcaaaggttaaatcagttgctaaagagatccatgctttgaaaagcatagctgcatactacggtggcttagaaatcaatttaaatgtgactaaaacggatgctgaggagagtctgaaagaggtgttaacaaatactgcgaaacctatttttctactaaaatacaaaaattacaaaaatcttgttgactacctcttcttgcaaagtttggaaattgctctatcttatgacttgccaatgcagatacacacaggctttggggatagacttttggatttgaggaagaccaatcctcttcatctccgttcagttcttgaggacaagagatattcaaagtgtcggtttgttttgttacatgcatctcatccatactcaaaggaagcatcatatctagcttctgtttactcccaggtttaccttgattttgggttggcaattccaaagcttagtgtacatgggatgacttctgcagtcaaagatttgctaaatctggctccattagataaggtgatgttcagcactgatgcctatacatttcctgaaaccttctacctaggtgcaaagaattctcgcgaagttgttttctctgttctgcatgatgcatgcattgatggtgagctctcaattcctgaggctgtggaagctgcaaaagacatccttgcaagaaatgcgatccgcttctataagattagttcacccaacaatgctggccctccttagttttttttattattattaaagtgtccctggaagaacacgaacccacaacctttctcttttctcttcactctttctcaacaacgggatcatccttatatctccgaggataattcaataaagtaatcatgttgcataatcgaaatgttgaatacttctagctgcatttataatgtcataacaattaaacaattcgtgatattattatgtccactatgatatatactcgtttata

SEQ ID NO: 119955 - DNA, 378 bp, Glycine max
  Clone ID: PAT_MRT3847_79327C.1
ctagccattaagaataccattgatatctatcagaaagggggcttgataaaccagtttctacttcctgcgcatgcttcttttcctaagtcacgctctatgcatgaccgacagaaaatttatacccgcactaaacgctattcatagataccctggtgaaaattgttccacacaaatttgctactgctttgctgactattagtgctagacaccactccatgaagcactattctaaatgagccaaataagctgtctcaagctcgcatattgcctaccatgatgtgctttctttaaaacaaaagcttgatgctctaaggaagaagaactcacatatcgtggacgggtgcccttattccctgggcacgtataatgatcccgaag

SEQ ID NO: 119956 - DNA, 499 bp, Glycine max
  Clone ID: PAT_MRT3847_79328C.1
tgagtttttacttttaatttatctgcctctctatattatctatttttttatgtatattttgtatacaggtcaggttcttatttcttactttgtggggcttttccaccttgttctctgtgtatattgtcctccgacaaatagttaaactataattaaattggcctctattttgtgggcaactctcagcatcttagttaattcatttctccatagatgtttttatctttgattggcctgttgagcattgttatcctcttgaatttttgtttggagttctctcatgcctatctctgttacttttggtgttatgctatgatgacccctggattaaaaatcaaccatattgctactccttggtccatacctcatgcaacagattcaatcaaaattcttactctgctattccatttggtctctcatattgtttcccccttacatatttgctatctctcttctatgaatgcttctggcatctgtgcttccttcacagttcccctgc

SEQ ID NO: 119957 - DNA, 204 bp, Glycine max
  unsure (1)..(204): unsure at all n locations
  Clone ID: PAT_MRT3847_79329C.1
tgttgttcgaatatttgagaatcatgtcattgttggggagttttggnagcaaaagcaagtcagcatgctgnnatanacacgccnaaatncattgcaagtngatgtaaattggaatcctgattatgaagcatcttnnagtcnaccggaggttcacagnataggtttctccctgncagtgttagnagagtgaatgtcaccnacttc

SEQ ID NO: 119958 - DNA, 388 bp, Glycine max
  Clone ID: PAT_MRT3847_7932C.1
ttttttttattatttaaaatatattataataatggctatgttcataaataatgtttatctatgtatgacacaggtcatacactctaatgtgtgtgtgtgtatatatatataaccagctggatgttagcatcctattatatggatttgtttataaatggtccaatccacaaccctcctatgagtaccatagatttaagtacatttgatattatacccagtctttctcaaactattttttttttttaggtttttttcttctttcaattaagtttgattcaactatgtcgtcaaacttaaggacaaggaaggatcgaagaaagattgagatgaagatgacaaacaaaagcaaccttcaagtgcccttctcgaagcgaactaatggggtatt

SEQ ID NO: 119959 - DNA, 548 bp, Glycine max
  Clone ID: PAT_MRT3847_79330C.1
cttttttttttttttttttttttttttttttttttttttttttttttttttttttttggcaagaggaaaatttcccacggaaatttttgaaccatatggcaagttatacccccacaatttttttgaactttgacaaaaaaaaggcagtagcatcacccctataatttccttttcacaaaagggaaaaaagccaaaatcactcgggctaaaggatatagaagcaccacctaaaacaccgggggggcaaaagaatacaaaaaatgggattaaattgaatcaccggacttgccacatgcatttaactggggaagggcaaaaaaaaagcagcgcatgctctgaaaaaccaaaaagtttcaaacacatgttctgaaaaacctgaggaaaagacttgattaccaaaaattggggcctatgcaaaaaccactgacgggtcctggataaaggaaggaaaccatggtatcaacccaaaaaagggtctcttcaacacaaaaaaattttctcttcccccattataaggtttccttaacaaaaaaaaaaattataggttt

SEQ ID NO: 119960 - DNA, 490 bp, Glycine max
  Clone ID: PAT_MRT3847_79331C.1
gaaggtttcccgtcatcactgtatgacgttccatcgcttctcatggggggggtggggaggggggatagaggataacgtgaaaggcgtgggagagcagctagagattgaacgagcggagaacggggggtggggaaaaaaaacctagaacaggtagaaaccatacattaaggagggaaacaataaaaaaaatgaaaagatataaaataccttaggggtgaacaactgacgttaacgactacgcaaaagtagggttttgggtggagggaatgcgtaggctgataggtttagggacaacgacccatatagcggaaggacgtgatattaagccatacgccgtagatttgggtgtattttcaaagattagtattaacgtacgtcagaatttcgtaagtaatacaagacgacatataattttgacaatagagtcctgcacgtgcagatgggcatggtagtgcaatattcgtaccaacatcgtctgctgtgaattaat

SEQ ID NO: 119961 - DNA, 423 bp, Glycine max
  unsure (1)..(423): unsure at all n locations
  Clone ID: PAT_MRT3847_79332C.1
ggctcgagcgcactttatctgaaagcaaattccctacctagggtcaaccgtgacgccataggggctcttgcgcgtttgaacgccttcaacatctttgcaacgggatcaggtgctctgatggtcggaacctgagggagatgtcaggcagagggcggggacggcggggacggcgaggatagagaatgnacaactaccaagggaacataaccgcgccgcattacgaaggatacactgacaccgcgcgcacgatttgtgatgcgaacaaaaataaagtcaccgtgaacgccatcaacaccgattctgatgcccagaggatgattgttcataaaggcaatgatttctctgttcatactgctatcaaagagtggactttcaaggccatttctggtgttgataacaagccattgatcactaggaactaca

SEQ ID NO: 119962 - DNA, 226 bp, Glycine max
  Clone ID: PAT_MRT3847_79333C.1
gtcgtaagctcggaattcggctcgagagccgcgatcgctggttgccgcaccttataaccgggagccaaagcaatcgttgcttgatgccaagaatctctcagatatcttactacttgtacgcgtacggctgtcttaagggaaagagaatcacctctctgtgctggccacagactacgtggataatgatcttgtgcactcttaggctatatgctgaacactctactat

SEQ ID NO: 119963 - DNA, 349 bp, Glycine max
  Clone ID: PAT_MRT3847_79334C.1
gcggtcagtcttcatagctcataacgtcattactcttacatctcattatgtgctgacctgctgggcagggtgtgctctaaccggttcatggccagatgaacatgcatctgaactgcctagtacttatcgtgaatctgtaccactttgctattacaatttacgacgtgatgcaatcaaatatgttgaaaaacgttcactatcaatccagatctatcatgctcccattagaactctggctgaagctagctacaaggttttctccctattaaatcagagttctgggacaacatagggagctacagcagccgatggaagcaggggtgaattgcttgtagcagatgacgatgtt

SEQ ID NO: 119964 - DNA, 194 bp, Glycine max
  unsure (1)..(194): unsure at all n locations
  Clone ID: PAT_MRT3847_79335C.1
ataagnacaaagaaaagaacataactaatgacaaaagtttgataaccgtgaaaaatgggaacaagaaactaagcggcaaataccaatgactttatatgaaccaacttctttgcaaatccagctgcactgggacgacattttttatagaggggtgttatggggaacaaaaaaagcttttcactgaagagagctca

SEQ ID NO: 119965 - DNA, 467 bp, Glycine max
  unsure (1)..(467): unsure at all n locations
  Clone ID: PAT_MRT3847_79336C.1
cggacgcgtgggcggacgcgtgggtgatgatgctctgctggggttgagaatgaaaataaatggggcttggcctgggtatatggtgcaaaatgccgtatgtcactgtattaatgtgaatgttattttctaggtgctgaacttgggacgttaaaaaaaaaaaaaaaaaaaaaaaaaaaaaaaaaaaaaaaaaaaaaaaaaaaaaaaaaaaaaaaaaaaaaaaaaaaaaaaaaaaaaaaaaaaattaaaaaaaaaaaaaaaaaaaaagggggggcccttttaaaagaaccaaatttaaatacccggggattgaaaggtaaaattttttttatggggcccccaaaataaaattaatggcccgggttttaaaaaggtgggaatggaaaaaaccttggggtcccccatttaaatccctttgnagaaattccccttttgccaggttggggttttggcaaaaagccccccccccg

SEQ ID NO: 119966 - DNA, 377 bp, Glycine max
  unsure (1)..(377): unsure at all n locations
  Clone ID: PAT_MRT3847_79337C.1
tgtcggcggccgccctttttttttttttttgctcaaaactggtaaatttccagatcaataacgattgcggtgacgccagaaggatacaccatacataagggaaaacaggattggggaaaaataaggtgttaggcgatgcggacaattaaattgctctatggcatgctaagtcanccccttatggcacacacaggaggcgtcccaccccaatataaaaaacagtgtactccgatgcattaacatgaagggcttaccctaatgacttgggcgattctcctctttcataccattcactaggcaagccggaaccgtatgattgttgctgcggcaaccatgtttcttgggtcaggatggacctctccgtacttacggatcta

SEQ ID NO: 119967 - DNA, 452 bp, Glycine max
  Clone ID: PAT_MRT3847_79338C.1
ggctcgagtacggctgcgagaagacgacagacagggataccgtccttgatattactgcacagccttccacttctgatcctaattcttttctagttttaacagcctttgctttcccaaaccctggtagatacatgcaaagtgcagtgcacttaaagccctcatcttcacatgtttccacattcttgccactcacaagaatggcttcagttttggagaagctgttacgatgcatgttattgcgttccactgcacctggtttggcccaccagagatcaaattcatctgagggtgcacatgatgctcttccctcaccacatgacttgctcctccttaactgcatgtcttgcagttggtcatcctgcatctgatccatgtagccgacctcatccaatggtataagaatttgttggtgttgatggatgagtgtactagcttgacatggtgattctatg

SEQ ID NO: 119968 - DNA, 868 bp, Glycine max
  Clone ID: PAT_MRT3847_79339C.1
ccacgcgtccgcgggtttccgcaattggcccgtattaaaaagttagggatatggaagattcacggcggcacgcggagggttgcatgaagggagagtttgattcctttgggacagagagtgagattaattaaaatattaggtagttaattaattaaattaaaaggaaaggtgaaggctcctgcgatggagcaagcagtgtcactgattggtgccctgaacctggtttctcgcaacctccctcttcccccagacctctttgacaccgtttcttctatctatcaccgatctaatcctctctcttccgaggccgatgcaccggaacaagatttgttggccgaccttcaaaatgcgctgttggagcaacgtcctaactacgcctctgcttccaaattgaacaaaacaagggaaagccgttatcacactcagattcgacaccgcttaacccaactccaaggattgccttcaagcagaggagaggacctacagactatgtgcttgcttgagctttatggactaaagctagctgagttgcagaggaaggtgcagactgacgtgaattctgaatactggctcaatgttaaatgtgcatatccagacaggcaattatttgattggagcatgatgcggttgcgtcgtccgctgtatggtgttggagatccattttccatggatgccgatgatcaaataaggaagaaacgggatgctgagagactatcaagattggaagaacaggcaaaaaatcatatggaaaccagaaaaagaagattttttgcagaaatactgaatgcggtccgagagttccaattacaaattcaagctttttttgaagcgaagaaaacagaggaatgatgggtgtacagggcatggc

SEQ ID NO: 119969 - DNA, 686 bp, Glycine max
  Clone ID: PAT_MRT3847_7933C.1
aattcggctcgagctttcagatcaattctaggaaactcctacaatattatgacatcataccaaggcgtgttctagctacaaaaggatacgacaagtgcgatgaaaagggaaaagttgcttttgtttcagcatatgggattcaccagctccatatattcatctttgtgctggccatttttcatattctacaatgcattgtaacactggctttgggaagaactaagatgagaaagtggagagcatgggaaaatgaaaccaagactattgaatatcaattttataacgatcctgagaggttcaggtttgcaagggacacaacatttggaagaaggcacttgaactcttggagccagtcaacaatttcgttatccatagttagcttcttccgacaattctttggatctgtcaacaaagttgactatttaacattacgacatggattcatcacggcgcatctggcaccgggaagtcatgcaagatttgatttccaaaagtacatcgaaagatcacttgaggaggattttaaagttgtagtggggataagcccaatcatatggttcttcgcagtgctattcctgctgactaatacacatgggtggtattcctattattggctccattcatcccattagtattatcttattagtgggtgctaagttacaaatgatcattacaaagatgggact

SEQ ID NO: 119970 - DNA, 696 bp, Glycine max
  unsure (1)..(696): unsure at all n locations
  Clone ID: PAT_MRT3847_79340C.1
ccacgcgtccggacgggtttccgcaattggcccgtattaaaaagttagggatatggaagagatagagcggcgaagagagggttgcatgaagggagagtttgattcctttgggacagagagtgagattaattaaaatattaggtagttaattaattaaattaaaaggaaaggtgaaggctcctgcgatggagcaagcagtgtcactgattggtgccctgaacctggtttctcgcaacctccctcttcccccagacctctttgacaccgtttcttctatctatcaccgatctaatcctctctcttccgaggtacttcttcttcccttctttctcactcgcaacacgacttttttattttcttcttttttgtatttcgcaggccgatgcaccggaacaagatttgttggccgaccttcaaaatgcgctgttggagcaacgtcctaactacgcctctgcttccaaattgaacaaaacaaggganaagccgttatcacactcagattcgacaccgcttaacccaactccaaggattgccttcaagcagaggagaggacctacagactatgtgcttgcttgagctttatggactaaagaaccgagaaatgacaagaactgtgtcctttcttggcaggaccattnttctggcagctagctgagttgcagaagaaggtgcaaactgacgtgaattctgaatact

SEQ ID NO: 119971 - DNA, 253 bp, Glycine max
  Clone ID: PAT_MRT3847_79341C.1
gagtgaaattctacaatctcatgcgcgccatgtgataggtctccttctcccaccactttgggtctttggcagcacacacttccactctcactcactcctaactataaactataaaatcctcccttcctcttccggaatctgattattaaattcgcatgtgtattaattactacatatagctagatcttagggagcgtcctctgtttaatttctagatcttgcttcaaggaaaatccaggataccaatggctca

SEQ ID NO: 119972 - DNA, 358 bp, Glycine max
  Clone ID: PAT_MRT3847_79342C.1
cttaatgtgttccgaggacccatagtggtataaaaccacacaagacttttgagtgaaatcagtgccaggggaaactgacattgccgcaaggcactcacccaagagcaaaaagaatgcctatggctatagggggaggagctgaggcaaagaatgctatgccaacgaatatgacaaaagctggtattacaatgtggagaaataaaggtggacatctcggacaccaaggaactaagatgactgctacctacattaaatgtacagtctctttgacctagcatgtggaagaatggatgatgacaccactaattattgggctacaccacacaaaatggtgcaattaggagagattcagagaaaa

SEQ ID NO: 119973 - DNA, 393 bp, Glycine max
  Clone ID: PAT_MRT3847_79343C.1
cttgcttctctctcttactaactttactatgttctccttctacttagttgtcccctcagggttagatctcacgcgttgtgcgacatactgtgtatatatatttaatataatctatatccatatatctcttccttctgattctaatccgatctataatctatttcaagcatacatatatataaatatgaaatatttggaagtaccctttatttattttcttcttgagaaacctctccttcctagctatatggatttgccaaggtacgtgagtctttccctctttaagggattactgctgggatttgattcataaatcaagggttcctgttatgtctttatcattgtcaaatctctttccttaagtgaaagtatatggcttgtaatcgatacatc

SEQ ID NO: 119974 - DNA, 359 bp, Glycine max
  unsure (1)..(359): unsure at all n locations
  Clone ID: PAT_MRT3847_79344C.1
atttgccagacaaccccgaaggcagccccgagagcggcgactggacccaccacgggggaagacacacaagcgcccacccgaaacagcgagggagccgccaaagccaccagccgaaaagaaaccgacangcaagacgagcccgagaagaaagcccgggagagccaccagctcaagccggaaaaacaagagcaaaccagcacaccagaaggaaagaccagcggcggcaggaaacctgcgccagcagcaagcaccgcaggggccctgcgaaaagccacctccgcgacacccaagagcccatggggcgcgcctgcccaccccgggcccaaagcgaaaaagagaagcacaggcccgcggaacac

SEQ ID NO: 119975 - DNA, 391 bp, Glycine max
  Clone ID: PAT_MRT3847_79345C.1
ggctcgaggaatcaagatcctgagccgattaatacacgatgcatatccgtcaatcagtaaaggctatatgttagcagtaaggaacaagatattaattcttcatcatatggttattgattggagaatgacatagcgccaccttgcatgaatcatcgaagagatgcttcttgcataatctgatggtcttaaaacaatagcctttccaaactgcgttcgccatctaatgagcttgaagtatctactgatgggaaatgatgccggtctgtgctgcgtacctactattcctactgtgaattgtattaactgccatgagagctcgctggaaacacctagtggatactaaaaattattacatgttcacaacttctcacgacatacgaagacggaggca

SEQ ID NO: 119976 - DNA, 1025 bp, Glycine max
  unsure (1)..(1025): unsure at all n locations
  Clone ID: PAT_MRT3847_79346C.1
gtgtgcggcatttccccctttccaaaggatctgttcagttcatttcgctcacaagtgctcctccgaaaaccgaaataaaaccgttcccatcgtgcgaacaagttcaatcgattccaaagtctaaaactgtgaacgttctttattgtgaactctctgataaccgaagaaaaggacatggcctcaagaacagttgcaaaagacataatcactcttcgcggttccgctgcaattgttagcgagttcttcggatatgctgctaacagcattctttacaaccgtggagtttatccagaagaaagctttgtgaaggttaagaaatatggcctccccatgttgcttactgaagatgagggtgtcaaaacttttttagccaatctaactgctcagctctctgaatggcttgaagctggcaagttgcagagggttgtccttgttataatgagcaaggccaccagtgaagtgcttgaaaggtggaacttcagcattgagactgactgcgaggttgttgagaagggtgtctcgagggaaaagagtgacaaggagatcatgagagagatacaagccattatgaggcagattgcttcaagtatcacttatttgccatgcctggatgaaccttgcatttttgatgtgttagcgtatactgacaaggatgtggcagttccattcacatgggttgagagtgatccaaaactcattgcaaatccgcaaatggtgaaattgcattcctttgatactaagattcacaaggttgacacacttgtatcatacaagaatgacgaatgggatgagcagtaatggcagtccgtgtcttgtatttttttgttcagcttcttgcgttttgtttcttcaggtcttgagtgaatttcctgttttgttagacctgtaaattgtgaattttccattcacattgttagatgtgtgtactactctggganncaacgggtatttattattaatcctcccttttgtatgtttgacctgttnnngcagtaagaattaccatgtgggtgnnnnnnnnaagg

SEQ ID NO: 119977 - DNA, 1112 bp, Glycine max
  Clone ID: PAT_MRT3847_79347C.1
ccacgcgtccgtttcgcttaccgtgttcccacaaccgaaacaaaagcttccccattttgcttcatcgtgcgaacaagctccacccaaccctaagtcgaaaacttgaactttcgttgttcgaaattagactctgattacagaagaaaagacatggccgcaagaacagttgccaaagacataatcactcttcgcggttccgcagcaatcgttagcgagttcttcggatatgctgccaacagcattctctacaaccgtggagtttatccagaagaaagctttgtgaaggttaagaaatatggcctccccatgttgctaacggaagatgagggtgtcaaatcttttctagcaaatctaactgctcagctctctgaatggcttgaagctggcaagttgcagagggtggtccttgttataatgagcaaggccaccagtgaagtgcttgaaaggtggaacttcagcattgagactgacagtgaggttgttgagaagggagtctcaagggaaaagagtgacaaggagatcatgagagagatacaagcgattatgaggcagattgcttcaagtatcacttatttgccatgcctggatgaaccttgtgtttttgatgtgttagcctatactgacaaagatgtggcagttccattcacatgggttgagagtgatccaaaactgattgcaaatccgcaaatggtgaaattgcattcctttgatactaagattcacaaggttgacactcttgtatcatacaagaatgacgaatgggatgagcagtagaggccgtctttgtcttgtatcttttgttcagcttgtatcatacaagaatgacgagaatgtgttttgtttcttcagttcttgagtgaatttcctgttgttagccctgtcaattgtgaattttctattcacattgttcgatgtatgtactactgtgggattcaacgggtattagtattaatcctcctcccttctgtatgtttgacttgttgtggcagtaagaattgccatggtagggatctcaagaaatctccctgttcttttcagagaaggttggattcatccatcatttcattcagtcttgtgaaacaaatgcctcattatgagtattaattcatttc

SEQ ID NO: 119978 - DNA, 180 bp, Glycine max
  Clone ID: PAT_MRT3847_79348C.1
acggctgcgagaagacgacagaaggggataaatcaaaagctcagagaacccatcccgccgccgccgtgtgctccgaccgccacctccattcgccgtgtactctcattcccttaataaattatggatttctgctcttactttgttgctctccgctggagttgaagtgtgatgggtttaggt

SEQ ID NO: 119979 - DNA, 404 bp, Glycine max
  unsure (1)..(404): unsure at all n locations
  Clone ID: PAT_MRT3847_79349C.1
ctggtcgcccgcctgcacgtaccgggctaattatggtggcagctcattaatagcggccgccctncctttttttttttttttgatttatttcaattcaatggtgtatctctacacgctgaagttggtgccacataagaaatggtacggccaaacagttcaagcatttgggaagattgagcctacaaactctgggccacattatagcgagagcacatcccctaatgaatgttaaatagacaataaaatgtgctcggggagaatcaaccatgaaaccaaccctgtaaggcctggggcaaaagggggcacaatacccaaaggaaggaatgcccagctcataagaagctcccggcgaaaataaacaattcagattttggccatgagaagcatgattaggccctgtaaat

SEQ ID NO: 119980 - DNA, 458 bp, Glycine max
  Clone ID: PAT_MRT3847_7934C.1
cctcatcatctttctcggcatcaagaacccaaatttcggcgccttcagttacaataataacagggtgagtgtgctctatgcgggtgtaaagatcgctgataggcaaatcaatggtggcagggtgcgtttcagagaaaccaaagaaattaatgttactgtgaaattgatgtccgctaaggcacccattagtgagaatctttctattgacattagttcggggtcgttgaatctcacgagtaatgtcaaatttagtggcacagttcatatgctcaagattatcaacatcagaaagaccatagaaatggcttgtgctatgaagctcaacttgacctcgcacacaattcagggtattcaatgccaatagctatttttcctttgctttgtactgcttgctagtttcttggtgttctcttctacaatagtacctttattttatttattttttccttacgttaaaa

SEQ ID NO: 119981 - DNA, 164 bp, Glycine max
  Clone ID: PAT_MRT3847_79350C.1
tccggtgcgcaaactgtgggcgctgaagcgcgctgtcgtggcgctgcccgaggcgccccgccacgtcttcgtcgacggccgcgaccggctcgatacggcatgcgactgcgaggccgtgatcggcggcgacggcatcgtcctgtcgatcgcggcggcgtccatag

SEQ ID NO: 119982 - DNA, 243 bp, Glycine max
  Clone ID: PAT_MRT3847_79351C.1
ttattttcctctaaaacttaaaacctcaaactccggatcatcctctttcccgggaggggggcaatattaccatgttgtacttaactttattcctaatttaacaacataccttaaactttcattataaccactatctattaaacattgtaattacaaaactattccatctaacgtttctaaaaatattccccccatccgaagctccgaacaattccctatataaattccctatctcaaatttat

SEQ ID NO: 119983 - DNA, 252 bp, Glycine max
  Clone ID: PAT_MRT3847_79352C.1
catgcgtcctccaccatcgatcaagaaccccatcaattaaattgcctaccattcttcgcctatcctccaccctcatatctaattcagacacctcataattcattccctaccctttttcatgtgttctccaccatcaaatcttgagccctacgaattgattacctaacactgtttgcctttccaccaccctcaaattttgttccgagacccacattttaatgcctacaacttatcatgagtcctccaccaacc

SEQ ID NO: 119984 - DNA, 720 bp, Glycine max
  Clone ID: PAT_MRT3847_79353C.1
cttttgcaaacaagttggtgcaattttttcagaaggtctgggaggagtcttctggtgaaagtctgctgcagatacagcttcttgttgctctgaggaactttgtggttgctcttggttaccagtcacccatttgctacaatatactactgccaattctggagaatgggattgatattaatagtccagatgaactcaatctcctagaagatagcatgctgttatgggaggccacactttctcatgctccatcaatggtgcctcaattgttacaatatttttcacgccttgtggagataatggaaagaaattttgaccatttgcaggttgctgtgaacataattgaagattacataattttgggtggaaataactttctgagcatgcatgcaacaaatattgctaaaattcttgatttagttattggaaatgtcaacgacaaaggcattctttcagttcttcctgtggttgatatcttaatacagtgtttccccatggatgtgccgccacttattagcagtactttacaaaagttaatagtaatatgtttgagtggaggagatgatcacgatccttctaaaacatctgttaaagcatcttcgctgccatcctggctaggcttttggtgatgaatacaaattcacttgcccaattagcatcagatccatcaacttctcaactgcttcagacagcatccatcccagttcaagaaaatatacttct

SEQ ID NO: 119985 - DNA, 522 bp, Glycine max
  Clone ID: PAT_MRT3847_79354C.1
cccgcgtccgcagaaccgaaacgaccctccgtttattcttttctttctcttataaatgaaaaccacatctctctgattaatacgcactctcgctcaaagcataataaggtgagtttgaatttggttgggaggctcgaaataatgtcgtcgacgacgcagaatcgtcgttcgtcctttacttcctcgacagcgtcgtctttggcaaaagcgaaacgacttccatcttcggtgtcgttgtggtcgtcgtcggggaaggcgaagagggttactactcagaacgtggctgtgaagagagcgcctctcgccaacctcaccaatcagaggaacgcgtcttcttcttcttcttcttctttggtgcaggtggttcaattaaagtttccaagaccaagaaagaggctcctgcaagaaccagcatcacaaaatcaacaatttcttggaacaaattacccggagtaaaatctggtaactcaagctcagttgttattccaagggctaattctttaccacgaaagaaaggatgct

SEQ ID NO: 119986 - DNA, 122 bp, Glycine max
  unsure (1)..(122): unsure at all n locations
  Clone ID: PAT_MRT3847_79355C.1
acgtaagctcggaattctgctcgagggatgaaacaatnaataaccccaagtctgagagtgcacaagnaggtacttttttaagagccatgcgcagaggtccaagaggtggattccatggtcgt

SEQ ID NO: 119987 - DNA, 1289 bp, Glycine max
  Clone ID: PAT_MRT3847_79356C.1
ggctcaagtagacccggttcattcagcctcgctcttatgcataaccaactcggctttttggatatgcactggaatgcagcataagcatgcaagcgacgtcgttctgggtagccaagtttccatttggcgtaagggcgcagcagcacccaaccgtgaagagagactccatggccgagtgcaccgtccccaagtgggcccaaaaaaccgtcagcttgccccctctccggcgcggctgtcatcttgtcacttccaagatagtgaaggaaattgagcaagacctctccggcttcaagtgtggcctagctcatctcttcttgcagcacaccagtgcttctcttaccatcaatgagaattatgactcagatgttcgcgaggataccgaaaccttcctcaatcggatagttcccgaggggtcatctgcgccatggaagcatactctagaggggccagatgacatgccagctcatattaaatcatcgatgtttggttgtacactcacgataccgattacaaatggcaagcttaacatggggacatggcagggtatatggctctgcgagcatcgggatcatcctacctcacgaagagttgttgtcactcttaatggaatatgagagtgctaagatctgtttgctatacctcaccttcgtgatgaagacaatctcgctttgtaatttataacaggatgtgtgctacagatctaccttttttgccaatgtaatttgagtgccttgatatgatatggacacaactgcagatagcattatgaccctttaatgcatataagtattccaaataaaaattatgagggctaattacattaacatcctctaagattcaacaaggtaacacttatacaaaccgtcgatgtttggttgtgcactcatgatacccatttcaaatggaaagcttaatatggggacatggcaggtacgcccctccgcttcaatgtagaagattggagattccgctaagaatgaggagaaccatacaactcgttaggagcttgtcagaactcagcaggaacatgagtatatctctacatgagattgagttgatgctccatatgattggttttatgtccacaagagattgacgtaacttcttctaagaaggagtatatcgccacataacgatgaatgccatagaatttgatttatttagtgttgtgtacattggttgtgatattatcattgttatatgaaaaacatgtgagatgacattaaaatatcttgttatgaggaaattattattttcaaatattcatgttatcactagtgttattattg

SEQ ID NO: 119988 - DNA, 217 bp, Glycine max
  Clone ID: PAT_MRT3847_79357C.1
cacgcatccacataaactctcccttaagcttttacaatctaagaaagaactaacggacaagacactttttaaaagggcacatcccacaccaatcctcatactaactccatacctaaccccccacaaaaccacattaaccccatactaaaactaccacaactcctatcacttcaaaacctttcacataaccaacaataacaccatacataaccacaaa

SEQ ID NO: 119989 - DNA, 469 bp, Glycine max
  Clone ID: PAT_MRT3847_79358C.1
aaatgaaaattgcttttatcgctctcttattgatcattggtagtgctattgctagtgattatgtcacactcaaagcaaccacctacgagaaggacagccttatccacagcttgagacagattggttatgagtatgtcttgcaaaaaggtatctttgaaagcaccagtgtcccccttgaaaatggcagctggaaactcaattgtactgaatccgttaccagaagaattaacggttcaaatgtctactaccaatttattgtcaagctccaaagccaaactgctcccactctcatcagagctagatacaccgtcagatacgacagcaacactggcaacgccctcgttacctatttcatttacactattctttctaataaccctcgtggtcctttccttgctgatttaccatcatatgttgatgttagaaaattgagtgacatagatagcgaacttcaagataagcttgatga

SEQ ID NO: 119990 - DNA, 760 bp, Glycine max
  Clone ID: PAT_MRT3847_79359C.1
ccgcaacataaagtgcagcacaccagtgcttctcttaccatcaatgagaattacgactccaatgttcgcgatgatactgaaaccttcctcaatcggatagttcctgaggtttctttctttctatcaccaatttgatgcattcatctgctccatggaagcatactctagaggggccagatgacatgccagctcatattaaatcatcgatgtttggttgtacactcgcggtacccattacaaatgggaagcttaacatgggcacatagcagggtatatggctctgtgaacatcgggatcatcctaccccacgaagaattgttgtcacacttaatgaaatatgaggtgctaagatctgtttgttatacctcaccttcgtgatcaagacgatctcactttgtaatttatagcaggatgtgtgctacagatctacctttttttgccgctgtaatttgattatcttgatatgatatatacactgatggcacatgcaaaatggtcgatgtttggttgtgcactcatgatacccatttcaaatggaaagcttaatatggggacatggcagggtatatggctttgtgagcatcgggattatcctacaccgcgtacagttgttgtcactcttaatggaatatgatgagtagctcacggctatttgctttacttcatcttcatattatcaataacacttttgctcgagaatatatggatatagtctgtcaactattgtattttttagttgaagtttgaatacctttctggg

SEQ ID NO: 119991 - DNA, 114 bp, Glycine max
  Clone ID: PAT_MRT3847_7935C.1
atctatcgaagggtgaagcagcttcacaaggctgtatggatactgagtgaaggcgtctgttgatcatagcacaattacttgacttgatgcataaaagggggtcatgtactatgg

SEQ ID NO: 119992 - DNA, 1976 bp, Glycine max
  unsure (1)..(1976): unsure at all n locations
  Clone ID: PAT_MRT3847_79360C.1
gtaacagtaacaatctccgttttcttcttccatcttcctctttctcttcgtgcatgccttactccattatcttcttcttcttcttcaaggaggtgcaatatatcattatttttgctgagcaaaaaaaaaaaatgcatgcacaaaatttatcagtgataaagaactgataaaagatttgcaaatgcttaacgctggaaccttctttgcctctgttcaggcagaacattcacatggcttattgcaatcgcacctcctgctttatctttcagtaccggacttgtggaaacactattcataagaatgttgttagacctgttattagaatccaggcctaacccacctcatgaagaatatttgaagcgtctacccttttcttgcaaaccaaggtttttgaagaagtgcaaagtttcctttgtgttgtaatttccttgttactgaactgggaaaaatagtaaacttgttacactcgtgccaaggtcctagttacaacctgtgtctgttttcaaatgtctgatgctgctatggcagttgtgaaacctgagatgaaatcctacatctggcttcaaactgtggatggttctattcagcaagtagaggaagaggtagccatgttttgccccatgatatgccaggaagtacttcaaacaggcatgggatcttccaaaaactatgctatatctcttccacaacgtgtcaatcctgcaatcttgggattgatacttgactactgtcggtttcaccaagtaccaggacattctaacaaggagcgcaaaacttttgatgagaagtttattcggatggatacaaagaagttatgtgagttgacatctgctgccgacagcctccaactgaagcctttggttgacctgaccagccgagcacttgctcggattatagaaggaaaaactcctgaggagattcgtgaaacatttcatttgcctgatgatctcactgaggaggagaagctggagcctctgagaaacataactgatgatccacgaattcgacttctaaacagattatatgctagaaagaggaaagaactaaaagagaggaagaaactgaaggatgttgaggttgaggaggaaccaaaagatgagcgttcagttgaagatcttctatcatttattaatggtgcagatggagatatgaagggaactagaacaaataaaaataaaaagaagaataggagaaggaaagcccatgcaaaggatatttcttcagaaaatacaaatgaaaacgataaggaattgaatcctcttccttctgcatatcacgatgtcaattttgacaatgccttggaggcctctgcaagtaaacactcgaggacgcaaaacctccctgctattaatttttctccaaaatttgaatttattgatggagatgttgacgatgatttagatcctgcgatgaaagaggagcttgacagggaagtggaagattttgcacgaagattaaattcagattggcctgaaaggatgcaaattttatctttgggccaagacagaagactagtgccaatttctatgaatagcaatggttcaacgcacctttatacaggttttgatcagaggtagcgcagcactggcagataatccaatttccaaggtgagtggaagtggaagttaaagtgatcttgaaaggatggcagcttagggtttgctgttgcctgaatcttggaagtgcaagtctgtgtgaacaccatgtgagtaatatttgtttgttccttctaacttataaccaaagtgtagctttgttttttaaaaatttgaacattttgaattctgcatggggagaggggcaaataaaagagagacaaagaagtgtgagaagaaaagagtaaaaaaagagaatcttggaaagcaatttgagtgttatcgactcatctaccttgaccttgnttccttgtatttattccagnctccactatttttgtcaggtctttgaattttttaaaattaattcattattatttt

SEQ ID NO: 119993 - DNA, 369 bp, Glycine max
  Clone ID: PAT_MRT3847_79361C.1
tcggcggccgccctttttttttttttttttttataattcacgtttgttacctttgttctcttgttttgacccaagaactttttgttccgagttggggcctctcactcattgggcaaattcctgcatgttttgagatatagatgccataggggcccaaatgtttttttcctgaaagttaaaaggctaccgtcgtgagatggttttagatttttgagttttggccactgccgcgcttgcttgcaagagcatgctaggtcacaggggttaaagagagttacccctgttcacttcaaaaaacctcgagcccaattgccgggattgggaaaaccgtgtgggaacccatctttttttttttggggcacctaaatt

SEQ ID NO: 119994 - DNA, 391 bp, Glycine max
  Clone ID: PAT_MRT3847_79362C.1
gcattgttttgcttacagaattccataaagaataacctcacaaccctccttccttttcctttactttttcttacatacatacattcatgccaccaaaggcaagagattgggttttaagctggtaaaataacagtgaagttaggtacaaaatggcttcagttggtgtggcaccaacatcatcaggcttgagagaatccagtggtgttgatagattgcctgaggagatgaatgatatgagaattagggacgataaagaaatggaagccaccgttgtcgatggtaacggaacggagaccggacatatcattggtactaccattggggggagaaatgggcaaccgaagcagactataagctatatggcagagaggattgttgggcaaggatcatt

SEQ ID NO: 119995 - DNA, 404 bp, Glycine max
  Clone ID: PAT_MRT3847_79363C.1
gctaaacatctggcgtacaattggtacgtctggtaccaaggaattcatggaagccgggggtgctggtgctgatgttagtatgattctacagcctcgtgttaaaaatgatactctgtatatcactactgcctactaagtcattgttacctccgcgcacaatgatgatgagcagtacctttgggagtcccaagctggaggttcattcactgccaccagggatacctctggtgaggatgttggcagggttactaagatcactttcttactcaatgaggatcagttaaagtaccttgtggaacgccttttcaaagattttattaagaagcattctgagttgattatctacccaatttctctttgggttgtgaagactacccacattgacacctctgacgattatgatc

SEQ ID NO: 119996 - DNA, 491 bp, Glycine max
  Clone ID: PAT_MRT3847_79364C.1
cccccccccccccccccccccgacccacaaagcgaacccatgtttataatattgttatttccgtcctagggggactgatttatatggtgtacatttaaaacccaaatgggggtccttctatactcttataattgagcccctttcgggtgctaggaagccctccttttttaaaatatcctcttttgggagaaatataacatgcctgatctgggaaagcaccctctttggtgcatgtgtaacctgatgccatccgtcttgaaataaaattgacatgactttttataagaaaggtcaccttcaatatcgcaagggcttcaactttgagacaaattttacggttacaattccttatcatgggcaaactttcaacactgggtacattggaaattgatgttgatactgtttcctgggtcgtacacttgatttctgaagatctgtttctgagaagctgacccttgccattcttgaggggattgattcccctgagctta

SEQ ID NO: 119997 - DNA, 420 bp, Glycine max
  Clone ID: PAT_MRT3847_79365C.1
gccacttaaaaaatttggcctttctggaataaatgatatgaagcaaagcattctgtcatggaagctacaatcttttgcaacttggctttatgtgtttaattttgaacggcaaaaccctacctatctgtagtttactccctacacaggtgcattttgcttataagggcagtttatcttcttttttttgacagagcagtttatcttttatgcatgaagtcaatgaaaagtagtagatgatcacaaaaatctactcagattagaaatggaacatagaatttccgttagatggaagaatttgtgtaatcctattgaaaacatttgtccttttgaagaagggtcttctataaaggctcatcacattgttgatatatgaaatggtgatttgatggttgacacattcacctattaaaaaaaaaaaaa

SEQ ID NO: 119998 - DNA, 263 bp, Glycine max
  Clone ID: PAT_MRT3847_79366C.1
aatggccttgagaattgcattccggataatcaatcttacggagatgaaagcagaactagcagaggagatggatgtataactgattcattcaatgatgatgactccagctcttcatccagcaaagatgcttttggatcattctcttcaaaatgtttgacaatgaaaagagatgatcacggattggaagagtgggaactcacggaaagtcctcaacatttttatcttaaagataagtccgcttttgacgttgtcaattgttcaga

SEQ ID NO: 119999 - DNA, 1514 bp, Glycine max
  Clone ID: PAT_MRT3847_79367C.1
gtagcaaaactcaaaaacgcatttgctttttcctcccccggtcattctgtaatacctttgcatgtacatccgtactatttatacatatagagtaacgatttcttggatcagagggctcaagggaaattaataatactaaatctctaagcctatctctgcatcatgattacccctgtcgttcgacgcatttcagaatgcttcgtcaaaccacatggtttaaccgaaatgtcaaaccaaacatgtcatttaacccattgggatattgctatgttgtctatgcactatatccagaagggtctactctttaagaaacccaccccacttgttgatccacatgatttcattgggaatctgttgggaaagctcaaacactctctttctctcaccctctcccatttctatccattagccggtcgccttgtcacccaccaaacccaaaaccctccctcttacactgtttccgttgattgcaaaaatagtgatggagccagattcatctatgcaactctggatatgaccatatctgatatcctctccccagttgacatcccacttcgtaattccgtcattgtttgaccaccacaattgcactcctccatgattacgccaccatgcccctgttgcccattcacaatcgctggtttccaaaagattgcgctccaccaatcaatcttcctttcatacatcatgatgagattataagcagatatgaagcacccaagctgagagagagaatcttccacttttcagcagagtctattgcaaaactgaaagcaaaggcaaactcggagtccaataccaccaaaatctcttcgttccaatcattatcagcgcttgtttggagatccgtaacacgtgcacgctccccaccgaacgaccagagaacaacttgcaggttggcagcaaacaatcgatcaagaatggaaccgcctctgcctcaggaatactttggaaactcagttcatgtagtgagtgcagaaacgacaggggaattgcttgagaatggtataggatgggctgcatggaagttgcacatgtcggttgtaaactataacgatggtggctcaagagtgggagtgtatgatcttggtcgttattttgacccgtactgtgtgatgatgggtagctcgcccaggttcaacatgtatgggaatgagtttggaatgggaaaggcagttgcacttagaagtgggtatgccaacaaatttgatggaaaagtaacatcatacccaggccatgaaggaggaggaagcgtagatttggaagtgtgtctttcgccagctgtaatgagtgcactggaatcggacgaggagttcatgaatattgctctagtttctgtttacaatcctctctagtcattattcactgttacttccatcgcccccataataatcatttgtcctagaataatccgttatctttaattagtattattttaaaatacatcatgttaatgtgttttatgtattgtgaattcatatatcatataataacaacacgtgatttattttgtc

SEQ ID NO: 120000 - DNA, 207 bp, Glycine max
  Clone ID: PAT_MRT3847_79368C.1
cacgaattttcttgcactatggataaacatacatatactggtaatgaggaactttcaagcaacgatctcgaaggactacaaattactaatgggctggagtgtaagataccttgcagttcatcttaggtctcacatgttttagattacctgggactttttgtttccgctaacaaagctaaaaagaattttgtatccaccacagttcag

SEQ ID NO: 120001 - DNA, 175 bp, Glycine max
  Clone ID: PAT_MRT3847_79369C.1
gcgcccacgcgtccgagctttactcttttctttgtgactgcaaaactgaagaagccaagctcgtctactcccgatgctcacgcatgaacttactgagcgccagcttcaccggcttgacaccaattgtcttgactctacacgatagttctgttataaaggtcatccgcacgctcta

SEQ ID NO: 120002 - DNA, 268 bp, Glycine max
  unsure (1)..(268): unsure at all n locations
  Clone ID: PAT_MRT3847_7936C.1
ctttcgtaggactgtcccttctatgcagttatcgcctcatgagatacgatggatgatgtgctctggangtactnggtcataattgtgcagatggacatatcgtccttctcctgcccttctcaaggccttgcttgactccggtgccacagctacttgtttgttcttcaagtggtcctccagattcgcagtcgatcactggtgagggtcacatagagtggattgtgatttcagatggtaagtttggaattggagatgatgtgcagatgat

SEQ ID NO: 120003 - DNA, 330 bp, Glycine max
  Clone ID: PAT_MRT3847_79370C.1
ggctcgagcacaactcatcaggctaacgctgtgttgaacgtgatcaatccgggactacataacacgattagttacattatgggggccctggacaagcatcagagggaggataacaacaggctaaagaaaatgcatgtgtatatacaaatggacatcgagaggctacatgctgctgtataacaactccaacgttgagactaattgctctacgtgcaaaggagacgtgtacaattctgctgacaatttgttgtctgtgtgaaacaaaaagctggatatcacgttctgaatgtagtccaatgtcaggatcctgttcctgagcgagactgaaac

SEQ ID NO: 120004 - DNA, 607 bp, Glycine max
  unsure (1)..(607): unsure at all n locations
  Clone ID: PAT_MRT3847_79371C.1
atactttgagaatgttgggggcaagacacttgatgcagtactcccaaatatgagagttcttggtcgcatacctgtttgtggaatggtctcacagtacaatctgacacaacctgaaggtgtaacaaatttggcaaatcttatatttaagcggattcgaatgcaaggttttattgttggtgaattctatcacctatatccaaaattcttggagtttgtcctgcctcatattagagaaaggaaggttgtgtatgtggaagatattgctgaaggtcttgagaatggtcctgcagccttggttggcctctatagtggtcgcaatgttggtaaacaagtggttgttgttgctcgtgactgaatgcagatgctttcgttggacattgctgtctttttttatgattttggtgttgaatattcagggctctttgtatgttttttgcaatcattttcaattgtggtatttgtgatagcagtgtaacttaagcaactcttagttgaaacgtattccctgagtggtatcatatggtaaagccttttgttacttaattttgttgtgaagatgaggatacaatttcgttacgtataatttttaattaaggtaatcnnnnnn

SEQ ID NO: 120005 - DNA, 648 bp, Glycine max
  Clone ID: PAT_MRT3847_79372C.1
cctgattggggtaccattccctcttaaacatccttggatccaacgctgccgccaccgaccccgctcgatcatcgttcctcggacaacacgaattctcagcttcacggtggtgctgccgccacctcaacggtgacagcatctcgtggtaactataacttatggggttccataattgatcaatctgcgttgaatatcatggcagcaacgacacacaccccatctagtaacatggggtgtgttgccagcagtgtcatgtcgacgcagattggattccacaggcctaatcatttgtcactgagcctatcttcacaacaaacaccatataggtctctctctggggagattcatgctatttctccggcgagccgtggcggtggcggcgatgatatgaggggcttgcacaacggggtttctagtatgcatagtgttgctttgggtttccaattagtttgaaagcaacacacgagcttcttgatgaaattgtgaatgtgggcacgggaatctccaaaggggaggaatctatggaaggggctaagaaggagaagatgaaagggaatattgaatccacttctggggttggcgatggttcgagctgcggaagggagaataatgatcgagccaaacaaggagttgaactcagcacagcac

SEQ ID NO: 120006 - DNA, 312 bp, Glycine max
  Clone ID: PAT_MRT3847_79373C.1
attatataatttgcacttaatttgattcatgttttagtgggagatatgacaatattaacattgaagaattattcgccacaataagaggggaaaaaaacaaaaagaacattccacttgcaaaaactaggcctacgggggctctgaaataaagactaaaaaattagaaggaggcataaacattgagaattttgagaagacaagaagagaggacccgcggtggtagggtgggggaagaaaggagtgatcagaaacaaaaaaaaagggtttgatcacagagcgggggtgagggaaaacatgtctccaaggggccct

SEQ ID NO: 120007 - DNA, 498 bp, Glycine max
  unsure (1)..(498): unsure at all n locations
  Clone ID: PAT_MRT3847_79374C.1
tttgtcgcgtgggttgaaattgtggataggtatgacattgattgtgtacctgaagactttagaagtaacaaggtcgcgtatattaaagatgactcaattgccaaaaactgttcacgattgttaaaggtacttaagccaatgaaagcaccaatttacatatattatcagcttgataactattaccagaaccaccgacggtatgtcaaaagtagaagtgacctgcaactcttacatggacttggatacaatgacaccagttcttgtaaacctttagagtcctcacacaatcttccaattgtaccttgtgggttgctggcgtcggagtctgttcaatgatacatatnacattcagtcgtgggccatcagaattgaaggtcaataggaagaattttgcgtggaagagtgatccgtgatcacaaatttggaaaccatgtttacccatttaattttcagaatgggactttaattggnggtggaaagctggatccaagtattcct

SEQ ID NO: 120008 - DNA, 429 bp, Glycine max
  Clone ID: PAT_MRT3847_79375C.1
atcatgtgggaggatgacatcgtaggggtgaagagaagagatggtgaaaggcacaggcgcgggacataaatgacttgagggcgacctccgacttcttcacagctctaacgccgttggaagatctacaggatagactgctcagatcacccgaacagagactctctaatacaatcatatatgggtgcacgtggacactacttaaacctatggcatatattctcctacattatgcataatcatatcatcgtacttgttaacactgtatctggatctgcgccgatcatatctgctctgtctgtagctctctcagggatatcaaagtcatgggacgacttggaccctgattatcttaggctagatgcgtactgtgaagacactactcctgctgattgtacaggtacaacagatccagctgatctgaagtgactt

SEQ ID NO: 120009 - DNA, 379 bp, Glycine max
  Clone ID: PAT_MRT3847_79376C.1
gcgggttgataacacactgtggttggatctctactatagaagcaatatgtgctgcggtgccaatgcttacgacttctgtgtgggcagctctaataggtgcatgacacccctgcaggcgtatctccgcaagcgcacctgctaatgtcactgcagatgactcagtgtacactggcttagctgaagctgctgatgtcacagacataatcaatgctgctgtgaccccagcttctgatgctcaatttccaactctcaatggccttgaactatctgcaacaaggatagaccttggtcctaggggtgtcatcccactccacaatgatccaggatgcctatgaactactcattgtgctataaggtcacatacttgctggattcatat

SEQ ID NO: 120010 - DNA, 434 bp, Glycine max
  Clone ID: PAT_MRT3847_79377C.1
gtctcgtgtttttttttttgtttcctgtatgcgttccagaaaccgaactaacaatttttttaaagcgggtgataagtaatgccaacgcaaaacacttttgaataaagggttaatcaaagcccaaaccgtcatatccctaattgaacaaaaacatagaccaaaccttttaaattcttgagtaaacttaaaaccgcaaattaagcctcggcctttggggagactaaggtcaagccgcacttgccgcaatagtggcggacgaagtgggttgccataaagggcccggcgccccccttggcgttgggcaacttctttgcgagcctttggactttttcaagaatctccacctttcaaaactgaaaaaacgcccacttgaaccttttgggggtgggcaagaattttttgggctctgggtgggactttctttttgcactttt

SEQ ID NO: 120011 - DNA, 1435 bp, Glycine max
  Clone ID: PAT_MRT3847_79378C.1
cccacgcgtccgcaaccacacaagcaaagtgtcttctctttctcttcctttgctttgcatccatcgttaataggattgcattgcattgaattaaaaaatgcagagcagaggatcgagtcacagagtctccagtatgggcaataatcgatcccgcattcccgcgctcctcatctccatgttcgctgctttcgcttctatctacgttgctggaaggctgtggctggacgcagagaatcgcgtttatctcatcaaagagcttgataggatcaccggccagggacaatctgctatatctgtggatgatacattgaagatcatagcctgcagggaacaacataagaagcttgatgcccttgagacggaacttgctggagctaggcaagagggctttgtttcaaatcccttgatagagactaatggaacttactcgacgagaaggccgttggtcgtgataggtatactgacaaagtttggccgccagaagaatagagatgcaatccgcaaggcatggatggggagtggtgcatctttgaagaaaattgaagaaggaaagggcatcattgtgcgatttgtattggtagaagtgaaaatcgtggagacagtcaagataaagacattgatcatgagaataggctgactaatgacttcataattctcgataatcatgtggaaacaaatgatgcattcccaaagaaggccaaattgttctttgctcatgctgcagacaaatgggatgctgagttttatgcgaaagtcaatgatgatgtctatgtaaatattgatgccttgggagctacactagctactcatttggacaaacctcgtgtttacatgggatgcatgaaatcaggggaagttttctctgagctgaaccataaatggtatgaaccagagtggtggaaatttggtgacaaaaaatcatactttcgtcatgcatcaggagagatgtatgttatatcacaagctttggctaaatttatatcaataaacagatctattctccgtacctatgcccacgatgatgtgagtgctggatcctggtttatcgggcttgatgtgaagcatgttgatgaggccaagttttgttgctcatcatggtcgacaggagcaatcggtggatttatttgagcctcgttttgaatcattttatatgataaacgacaatttcccttgatgataaatagagagcagaagaagtttgaggaatttatattgtggactggtggtacagctctgtagcttatacttccctatgtactgtaagtgggatatcttagaggatgcaatcttgtaatagagtatgctcatctaaatttttttccctttcctttgaaaaatcttgtacatacgtggttttagatatccctgaaataaatttgcttaactgttgtacagaaaaagcataggtggttctgcttctactcttatttggagg

SEQ ID NO: 120012 - DNA, 478 bp, Glycine max
  Clone ID: PAT_MRT3847_79379C.1
tacggctgcgaaagacgacagaagggggggggaaagagagtggattcttggtgactttcttgaccagaaaagtagcaaccgcagcaccaaagactttgctttgcatctatcgaattctaatccaattctctctgcatctacatatacaatatcataatcgttcataagattgcatttgcattgatttcaaaaatgcagatcaggggatcgagtcacagactctccagtatgggcaataatcgatcccgcattcccgcgctcctcatctccatgttcgccactttcgcttctatctacgtcgctggaaggctgtggcaggacgcagagaatcgcgtttatctcatcaaagagctcgataggatcactggccagggacaatctgctatatctgtggatgatacattgaagatcatagcctgcagggaacaacataagaagctcgatgcaattgagacggaacttgctggagctagacaag

SEQ ID NO: 120013 - DNA, 1468 bp, Glycine max
  Clone ID: PAT_MRT3847_7937C.1
aattcggctcgagctcttttggacaatggaaagtggagtacccttccttgactgtctcttgcaaaacactcttagaagcatttgctcatttcccacttcttcaacttcttccaagtgggtgtatgcagtcttctggaggatagtacctcgaaactttcctccgcctaggtgggaatttggaggaacagctcttgatcgctcaaagggaaacaaaagaaactggatccttgtatgggaagatggtttctgcgattttaatgaatgtgaacaagggaggaatggatgcttgaactacaagtttggagctgatgtattcttcaaaatgtctcatgaagtttatagttatggagaaggactaatggggaaagtggccgcagataataatcataaatgggtttacagtgacactcaaaatgggtgtgaatctagctacattggtgcatggaatgcttcaatggatcatcaaccaaagacatgggagtttcagttaaattcaggtattcagaccattgctgtcattgctgtcagagaaggcttagtacaacttggttcatttaacaagattgctgaagatctcaattttgtggttagcattcaaaggaagttcagctacctccacagcataccaggtgtattttccattcaaagaccacacctacccattcaacatccatgcattgccaaaccaaacctacaaatgatggaaagcaatgaaatgaccctatctgcctataatgcaacaaatcaagtcacaagagtcaatggagtgcatgaggaaaaatccagcttcttttccatgatatccatcaacttgggtaggaatccaccaccccaaaatggaacaacaacaacacaagggtcacctctttggtcagctccaccttccttgcccaacatgtcttgtagttttggtgctatgctatcaaagcttccatatgttactccttccaataatccccctcaagttcttgaaaccaataagaccaaccacaaagtgaagattgaggagtgcagatttcatggtgctgctaatggagatcagaacaaaaatgcagggtggaatccttgataaataagagagaaccgctagcaacacactcttttaaacacatacttcattgttaactttattggaaattacaaaattttgtgggtttggcttcttatttactgagtcgcactcataattttgcagtttttaatgaattttaacagatgataataagtgtgttagaaagaatgtgtcaaaaggtgtggtgaatcatcaatgcaatcttgatttgagaatgactatgatcatcccttagttttagttagcttgtaataatttggtgtttttgaagagagttggttatatttctctaccagcacaaggccaccacacggggtatataggtggaatgtttatggtctactattttctcttttgtgaattaatgctaaataaatataaatgcagtgaagatat

SEQ ID NO: 120014 - DNA, 552 bp, Glycine max
  Clone ID: PAT_MRT3847_79380C.1
ggggacgggggggccaccccggaaatcccggacgggacccggggggggaaccactttccccaaaagggaggcaaaaaaaagcggggggaaaaaagggaaaaagggggtcccgggggaaaatggtaacccgccaaaaatcccacaaaaaaaacaaccgggaagaaaaaagggaaaacccgggggggccaaaggggggaccaaacccaaaaaaagggggggggcccaacggccccttttcaaggggaaaaaccggggggcccagcggaaaaaaaaaaccgcccaacccccgggaaaagggggttgggaaatgggcccccaggggggtttttttttcccccagggaaacgggaaaaaggggagggcccttaaccgccgggcccaaaaaaagtggaaaaaaggggcccacccgggttgcccccaaaaggaaaaaacccgggtggaggggggaaaacgggggaaaaaaaaaagagcgggtttgggaatcggcgaaccccacaaccgaaaaatccccacaaacgcccaaccggaattgggaaagggcgccaatggccc

SEQ ID NO: 120015 - DNA, 398 bp, Glycine max
  Clone ID: PAT_MRT3847_79381C.1
cccaaaactaacgctgaatacctaaacgttaacaaggtcggaaaataaaacatcccttaaatttttaaccaaatttttaagttaataagggaatgcccggacccaaatccgggggcgaagtttccaaagaggggcctccggcggggtttgttaacaattttttttttttggccaacatattccatacaaactacgaggggatgcgatgctttaccctttaccccccacccagttttgataaaaacaggggggaggtttaactttttttttcatggcaaacagcccgaaacatagtttatttttggctaaaacggctccttttttgccatcacagcccaaaatggaattttttccctttttagaaacggagggcttccacaaaaaaatatgccccgccc

SEQ ID NO: 120016 - DNA, 216 bp, Glycine max
  Clone ID: PAT_MRT3847_79382C.1
ttctatcgcacgtggctacatactatgatagagatggaaagacttttcataccacagtagggggcatgaaatatcccgtgactatcaacctatggcaaccagattaaaatgctattgaatcggctacatgtttgcaagcccatcacacagaggatgcatttcgtgttaattattggacaccaaacttcctaataagagtagctagttattccacat

SEQ ID NO: 120017 - DNA, 229 bp, Glycine max
  Clone ID: PAT_MRT3847_79383C.1
ccaaaacaatcaaatccatttattccacacccttctacatccctcttggttttgcgctatcaaccttcctacattttcccataaactctcacactatccattcccataccattcagtcatctcttctttcattataccattatgcatctatcctacctatcctatactcttattcagctccttaatgatacattcatactttatccatacttacctttcacttctaacc

SEQ ID NO: 120018 - DNA, 486 bp, Glycine max
  Clone ID: PAT_MRT3847_79384C.1
gggatagatccttttcttggtggaattcaaaaagaggccattctcatgatgcccctcgatgaatacattctccctgctgaagctcaagacatggttgaggaatggttagattgtgttgatgaggaggattcctttgaggaagtttctttaagtgcagcacttaatggggtagagggttcggactatatggaaagaattcctcttgccacattggaggttttatctcatgtgctgttacgcaagactggagtaatgggcataaggagattagattgtggggatggtgaaaatatgacattgattcctggaaccagtgttgaaaaggcttacaacaagctaatgagtacactggagaaatgtgctcctacattggttggcattgaatgtaccaaggatgagaaacttactcgtatcttaattctcgacaaacctaatacgcgctgcttcactattctacctatggagtttaatcttgtggtccgacag

SEQ ID NO: 120019 - DNA, 537 bp, Glycine max
  unsure (1)..(537): unsure at all n locations
  Clone ID: PAT_MRT3847_79385C.1
attccgttccaggaaggtttcccgtcatcactgtatgacgtcctccttctttgggggggggggggggggggcaacacgcaccaccgggatgtgtgaaaggagataggggaagggagatgagagagaaggaaagcggagacagggggctaagcgctaaaagaagaagaaaaaaaatcagggttgtggagataatcaggaataaatagatgagacaatcgctaatagcggttggctgcaaaacagaatgggcccatacaaaagataattgaggtggtggtattaattcatagcgcgtttagacgtcgcgtattgcaattaaaaaaattagacaaaggtttagggcagcagacatattctataagagaaacgtaaacttacacgggcaatagtaacgtacgttgtaaatgaaaatcacagcagggcgcctgatgcgtaggagtatgaatagagatttacantggtaggaataggggttataggctaaaaaggttgcggcaataataagttgtgagtaggtaaatggntgaagatggcaat

SEQ ID NO: 120020 - DNA, 154 bp, Glycine max
  Clone ID: PAT_MRT3847_79386C.1
tacacgagctgtgacgtctcatgcgaccatacgtcagcttgcacgctctagaacgcgtgccgtatgaaagaagtgttgtgggcggaaagaggcagaggtgcaatcaccagtgtggaagcacgaaacggtccttcccggctttacattttttcta

SEQ ID NO: 120021 - DNA, 240 bp, Glycine max
  Clone ID: PAT_MRT3847_79387C.1
ataaccaaaatggtgtataaacacctaaaatcataagcaagcaaaaaaatgaacatctatacagaccaatgacctttttaggtaaaaataaatttcatgtttgaaacaaaccggtgtgaagtctgaaaaaaattattgtgaataagcttctcgggtccttcaagcttaataagatcgtgttcaaatgaaacacataaatgcaacctagtgaagccttataccaaaaaaggaacaatatac

SEQ ID NO: 120022 - DNA, 603 bp, Glycine max
  Clone ID: PAT_MRT3847_79388C.1
gaaggagttcttaaagttcttgatcctagacttccctcagttccccttcacgaagtgatgcatgttttctatgtagccatgctgtgcgttgaagaacaggctgtagagagaccaactatgcgtgaagttgttcaaatactgacagagcttccaaagccacctgactctaaagaggggaacttaacaataacggaatcatctttgtcatcatcaaacgctttagaatctccatcctcagcccctaaggaagatcaaaatcctcctcaatccccaccacccgatcttcttagcatttaaagtgctctgttgggtgtttcatcttagttcccttgggttgtgatcgcttatccatttactttctttttctgtctctcttctgggattggttttttttttttccctaactgaaggtgttaatgtttggattttttaatggttttgtacagtaggattgatgggggtattttcttataaagtcactgtcttcatcatgtagtactgctttttaatttttatttgcgcccgttgttggggaggattcaagggatacaattaaattactcgtttgtttcctgtaaaaagaggggaaataaaaaaggggga

SEQ ID NO: 120023 - DNA, 266 bp, Glycine max
  Clone ID: PAT_MRT3847_79389C.1
catttgcttgcgtctaaatcgcgatgaaggaagcggccgaactgagatgcaaacctttgttgtaaaactcttcagggcgaacatctaaacagcaagctttccactaacaaaccacttacactatggcattgatattacaagcatcgatgcataaagcgagaatatggaatcatatgctgtgctatattaaaacattgctgaaataccttaagactcaactgtgaccacaagcctacgatcgtgtgcattgctctcgaagctgataa

SEQ ID NO: 120024 - DNA, 215 bp, Glycine max
  Clone ID: PAT_MRT3847_7938C.1
tttttaaaatatgactttttattacaacattgcccccgttttaaaaaaggtgatcacgcggtttccataacctataatgaacacaagatgccaggtggtggtgcctctataggctttaacaaaagagaatttacaggtttgaaaaggcacactaaacgacaaaggcaggtggacagaatatagaaaatttaaaaacacttggaaggccgaaccaa

SEQ ID NO: 120025 - DNA, 270 bp, Glycine max
  Clone ID: PAT_MRT3847_79390C.1
ttcgttttttatttttatcttttttttttttttttttttttgattctttttttgatcttcttatttagtttccgttgatatttgatccacacaaggaaaagcacattgccattcgatggacattgcgggcaaaccgaaaacgaccgggtcgacagatggcaagacaatagagctccgggggaagggacgctgccaacggaagaggagaggccaggcgcaaaaaggaagagtcccctagaatggcagaggcaaacagagcttttgcacatt

SEQ ID NO: 120026 - DNA, 2763 bp, Glycine max
  unsure (1)..(2763): unsure at all n locations
  Clone ID: PAT_MRT3847_79391C.1
gggttggaaaactctactttttgttgtataaaaggcaatacaagttagcagccaaggatctcttttcaattcttccttttttacagtggcttgaaagtgagcttcaatgaaagtaggactgtatctgcatggtccagtggcagaaggaggccccccaagaaatacaagtaagaaatttttggttccctttctattgccaaaatctcgcattttaacgtagcggtgaattataatcctttgccgaaaatcattttattgcttgctcaaacttaacattcaattactctccataatcgaagattagaaacaacagttataaattaaacatacaataaccaaagcgatcgatcacatcttaaagctcacatcactcaacaccaaattacgacgatcccaacctgctgagcgcttcttgagccacattcaactgtggctccaactccaaagcctctttataagctttcttcgcttcctctcccatcttgttcccttctgtaggtttctaaaccaggcccagatagtttctcctttagatttcgctcacgccacacaactcctaccaacaaggtgctctgctcgttcactcctctctcatacagcctctggctcctcctccggtgaaagagggtgagaagaggagttagcaagcaatttttgtttcttttgggagttgggacccctcactcacatggacgcatcaacggctttaatgatcctataccgcaatagcggcctatttaatatggttcaccttcttcactcgctccctaaaaggtccacgtgtctggcccctattcggcagcctccctggtccgacaaccaacaacccacctgcgcgcttcactagctacactccactgtcgctccatcccgagacccttatcataagcttttcttcgcttcccctcccctcttgctcacttagtaggtttcccccaacatgcaccacgccttcgcgtttcgcggactcacgcttcaccgactcggtcaaatcagccagcaccgagtcaacgccgcgccgctcgctcatcgcgatcttcagttccgccctcttcagaagcgcgtcacctctctcgtcctccgcgagcgaacccgctgcgagtggagacaacgcggcgtcgagcgcatcgagcgcgttggtgcggaagccctggaggtcgagcgccatggacttgaggaggtgcgaggcggcgtccttggggtcgagcgcgatggccttctcggcctcggctagggcttgtttggcgagggaagttgcggaggaagcgcttttggatcttctggcttgggcgaggagctgcgcgcctttgacgaaatggcgcttggcttgcacggcccgtgggttcgggggacggtggcggagcttggcgtagaggttttgagggatgccgtgcatccagaggaagctgaaaatcgtgagcgagatgaaaacgacttgtaacgccacgtcgcggatcattgctttcttctcgtcgaactccatttttttttttttggtttctccgatctacagatagatgagatgaatttttgacgtgttgaggaagggctcagttgtgtagtgaagctcttgttccgtcagagactttatgcataccgtagccgccttcccttcatcggtcgctcttcaagttggttcttctggctctgcattaagaacccgcatgtggaggaaaagatcctccacgagctctgcagtgtcctcaagtttacacgtggagatgatatctccacgtggctcgaggagcctctggtgttcgaggaggtagaccgcctggtctatctcaaggcagctttgtctgagacgctgcggctgtacccctccgtcccggaggattccaagcatgtcgtgaaggatgatgttttgcctaatgggactttcgttccggcgggttcggcagtgacctattcaatttactcggttgggaggatgaagttcatttggggagaggactgcctcgagttcaagcctgagcggtggctctctccggaaggggacaaaattcaggtgcaagactcctacaagtttgtttcgttcaatgcgggacctaggctttgtttggggaaggacttggcttacttgcagatgaagtcaatcgccgctgcggtgctcctgcgccaccgcctcgccgtcgcgccgggtcaccgtgtcgagcaaaagatgtcactcacactgttcatgaagtacggtctcagggtgaatgtgtacccaagggatctcaaaccggtgctggaaaagttaaccaccaccgagggtgctattactgttggtcaaaagtgattttgatttggttaattaaacagatagatacatcatcggtttaaataaagaaataatattaattataagaaatttatatattacttaatatagaatattgacgatgatgtatcatttcatctgtgttagtttaatttacgttgtctgtatagatgaaatttccctttactcacaagtttctcatctgatgatgaatactatttatgtttttgtaaacattttgatgattaaaaagtaatgctgctgcagttcgggaagctatatttgtgctgtaatttatcatggtgggtgccttcacgaacgggaactatttggtgacactgatgtagatgtagttttgttattttaggactctggcatacttgcacagttaaagccctagcttgtggtctctgtcactataatgtaatacaggtcactgagatcacattcgtaactgccacatttccagannnnggatatnnnnatttccagcaannnna

SEQ ID NO: 120027 - DNA, 445 bp, Glycine max
  Clone ID: PAT_MRT3847_79392C.1
gtccgaaaaaatataaaaaaaaaaaaaaaaaaggggggggggggggggaaaaaaaaaaaaaaaaaaaaaaaaaaaaaaaaaaaaaaaaaaaaaaaaaaaaaaaaggggggggcccgtttaaaggggccaaatttacctacccgggcgtgcgaactaaaaatttttttttagggggccctaaattaaattcactggggcgggggttaaaacctgggaaatggaaaaacccttgggttacccaatttaatcccctttgggaaaatcccctttttgccaagtggggaaaaaacaaaaaagccccccccaatcccccttcccaaaaagttcccaccctaaatggggaaagggaccccccctttaaccggccattaaacccgggggggggggggggtacccccaagttaaccctttaattttccaaggccctaacccccctttttttaat

SEQ ID NO: 120028 - DNA, 947 bp, Glycine max
  unsure (1)..(947): unsure at all n locations
  Clone ID: PAT_MRT3847_79393C.1
tcctctanagcggccgctttttattttttttttttttaaaatccttcggcgaaaatcattttattgcttgctcaaacttaacattcaattactctccataatcgaagattagaaacaacagttataaattaaacatacaataaccaaagcgatcgatcacatcttaaagctcacatcactcaacaccaaattacgacgatcccaacctgctgagcgcttcttgagccacattcaactgtggctccaactccaaagcctctttataagctttcttcgcttcctctcccatcttgttcccttcgtaggtttcccccaacatgcaccacgccttcgcgtttcgcggactcagcttcaccgactcggtcaaatcagccagcaccgagtcaacgccgcgccgctcgctcatcgcgatcttcagttccgccctcttcagaagcgcgtcacctctctcgtcctccgcgagcgaacccgctgcgagtggagacaacgcggcgtcgagcgcatcgagcgcgttggtgcggaagccctggaggtcgagcgccatggacttgaggaggtgcgaggcggcgtccttggggtcgagcgcgagggccttctcggcctcggctagggcctgtttggcgagggaggttgcggcggaagcgcttttggatcttctggcttgggcgaggagctgtgcgccttggacgaagtggcgcttggcttggacggcgcgagagtttggaggacggtggcggagcttggcgtagaggttttgagggaggccgtgcatccagaggaagctgaaaatagtgagggaaatgaaaacgacttgtagcgctacgtcgcggatcattgctttcttctcgtcggcctccattttttggcttctcgtcttgctcacggatctgcggatagattgatagagatataaatagatgatttcagaacctctgctcgagccgaat

SEQ ID NO: 120029 - DNA, 1349 bp, Glycine max
  Clone ID: PAT_MRT3847_79394C.1
ggtccggttccctttcgctcacacaacacaactcctaccaacaaggtgctctgctcgttcactcctctctcataccctctggctcctcctccggtgaaagagggtgagaagaggagttagcaagcaatttttgtttcttttgggagttgggacccctcactcacatggacgcatcaacggctttaatgatcctatccgcaatagcggcctatttaatatggttcaccttcgtcactcgctccctaaaaggtccacgtgtctggcccctattcggcagcctccctggcctcatccaacacgccaaccgcatgcacgactggatcgccgacaacctccgcgcgtgcggcggcacgtaccaaacctgcatctgcgcccttcccttcctcgcccgtaaacagtgcctcgtcaccgtcacgtgcgaccccaaaaacctcgagcacatcctcaagctccgcttcgacaactaccccaaaggccccacgtggcagtccgcgttccacgatttgctcggcgaaggcatcttcaactccgacggcgacacgtggctgttccaacgtaaaaccgccgcactggaattcaccacgcgcactctgcgccaagccatggcgcgttgggtgaaccgagccataaagcacaggttctgccccatcctagccacggctcagaaagaaaacaaatcagtggatcttcaagacctcttgcttcggctcacttttgacaacatatgcggcttggctttcggccaagacccgcaaaccctagccgtggggctcccagataacgctttcgctctctccttcgatcgagccaccgaggccactctacaacgctttattttacccgagatcttgtggaagctgaagcgatggctcaggctcggaatggaagtgagcctgagccggagcctgaaacacatcgacaattacctctcccacatcatcaagaaccgcaagctggagcttctgaatggcactgggtcccaccacgacgacctcttatcccgcttcatgaggaagaaagaatcctactctgaagagtttctccaacacgtggcactcaacttcatcctggcagggcgcgacacgtcatcggtcgctctaagttggttcttctggctctgcattaagaacccgcatgtggaggaaaagatcctccacgagctctgcagtgtcctcaagtttacacgtggagatgatatctccacgtggctcgaggagcctctggtgttcgaggaggtagaccgcctggtctatctcaaggcaactttgtctgagacgctgcggctgtacccctccgtgccggaggattccaagcatgtcgtgaaggatgatgttttgcctaatgggact

SEQ ID NO: 120030 - DNA, 546 bp, Glycine max
  Clone ID: PAT_MRT3847_79395C.1
agaattaataatccttgggtgaaaatcatttattgcttgctcaaactcaacatccaattactctatccataatcgtagattagaaacaacagcacttataaattaaaagcgatctcatcttaaacctcacatcattcgatagctcggttacgatgatcccaacctgctgagcgcttcttgagccacattcgactgtggctccaactccaaagcctctttataagccttcttcgcttcttctcccattttgtttccttcgtagcactcccccagcatgcaccacgccttcgcgtttcgcggactcagcttcaccgactcggtcaaatcggccagcaccgagtcaacgcgccgctcgctcatcgcgatcttgagctccgccctcttcagcagcgcgtcgcccctctcttcctcggcgagggaccccgcggcgagaggggacaacgcggcgtcgagcgcgtcgagcgcgttggtgcggaagccctggaggtcgagcgccatggacttgaggaggtgcgaggcggcgtccttggggtcgagcgcgagggc

SEQ ID NO: 120031 - DNA, 1092 bp, Glycine max
  Clone ID: PAT_MRT3847_79396C.1
ggctcgaacagatagaaagaaaagaaatttcaccgtaccagagaacaaggaaggatagaagaaagtgaaagaaaatggcgttgtacatggacgaagaagagatttggaagtgtccgaagcatccatcaaagagaagaagaagcggaatttgccctacttgccttcgagaccgtctcgtaactctttgccctgactgtgctaacgtgcgcccctgttcctgctacgcaaccagctcctcctcctcttcctcgtcttcctcctccttatcgcgtttttctggcgccggcgatggcgtcggttccgtcggccgcgtccacaacctcatcgagcaagagcctgggctccgccgctcgcgctccatggcgattccgtttctcaggtcacggtcgcggttctctggcggcggagatagggtttcggatctcgacagcacgagggactcgccggcaatgaacggaagccggtcggcgaggtcgttctggtcaatgttcaagtcgcagaagagcagtagacacggcggcggaggaggcggcgcgccggagcaagagtgggaggcgaaaaagatattggcggaggaacgagacggcgatggtggcataaatccgatgatggtgcggtcaaggtcggtggcagtgacggcggtaacggtggtttccggcgacggagaattgagaccgcggacgaaagggagagggtggttcttcccaagtccgatgaaggctttccggcaatccaaggtctctaaagtgattcaggaagggtctcctttgtatagaggttgaaattttgtagattaaaaaaattataataataataacaacaaatactttatataagtttatatatattaaccaaaaaattaaatttttattttgtttcagtacggtcttgatcatactcgtcgagctcccgttgcgttacagttcagctgggaatgttgaatttgcaattttgcaatacaaatacaatgacagaaaagtgttattattaattgtttagctactagtctatatttatgtaactatgtatatgtatatctcctacgatttgtgatttctaaattttagtgaatgttcgtcggagaatgagatt

SEQ ID NO: 120032 - DNA, 2431 bp, Glycine max
  Clone ID: PAT_MRT3847_79397C.1
tggggttttttcggcgaaaataattttattgctggctcaaacttaacattcaattactctccataatcgaagattagaaacaacagttataaattaaacatacaataaccaaagcgatcgatcacattttaaagctctcacatcactcaacccaaaattacgcggagcccaacctgctgagcgcttcttgagccacattcaactgggggttcaactccaaagcctctttataagctttcttcgcttcctctccccaatattgcctcttgtactttttatgctgattgcccttgaacccttcaagtttcgacacacattgttcactctcacaatatttgcatgcaacagatctcaattattcaccaatcaaaaccacttgcacattttttagttgaacacaataatttcatctatcactcccgttttagcccccacttgaatactacacagctagggtttactttcctcatttaagctgcaatggatccaattgaatttgcgtggtgatggtaatagcagcctctagctcctccggtgagggaaggtgcaagcaataaaggtttaattttttgttttgggagttgggcccagcactcacatggacgcagcaacggctttaatgatcctatcagcaatagcggcctatttaatatggttcaccttggtcactcgctccctcaaaggtccacgtgtctggcccctattgggcagcctccctggcctcatccaacacgccaaccgcatgcacgactggatcgctgacaacctccgcgcgtgcggcggcacgtaccagacctgcatctgcgccctccctttcctcgcccgaaaacagtgcctggtgactgtcacgtgcgaccccaaaaacctcgagcacatcctcaagcttcgcttcgacaactacccaaaaggccccacgtggcagtccgccttccacgatttgctcggcgaaggcatcttcaactccgacggcgacacgtggctcttccagcgtaagactgccgcactggaattcaccactcgcaccctgcgccaagccatggcgcgctgggtgaaccgagccataaagcacaggttctgccccatcctagccacggctcagaaagaaaaccaatcagtggatcttcaagacctcttgcttcggctcacttttgacaacatatgcggcttggctttcggccaagacccgcaaaccctagccgcggggcttccagataacgctttcgctctctccttcgaccgagccactgaagccactctacaacgctttattctgccggagatcttgtggaagctgaagcgatggctcaggctcggaatggaagtgagcctgagccggagcctcaaacacatcgaccagtacctctcccacatcatcaagaaccgcaagctggagctgctgaatggtaatgggtcccaccaccacgacgacctcttgtcccgcttcatgaggaagaaagaatcctactcggaggagttcctccaacacgtggcactcaacttcatcctcgctgggcgcgacacgtcatcggtcgcgctcagctggttcttctggctctgcgtcaagaacccgcgcgtggaggaaaacatcctaaacgaactctgtactgttcttctgtccacgcgtggagataacatctccacgtggctgaacgagcctcttgtgttcgatgaggtagaccgtttggtctacctcaaggcagcattgtctgagacactgcggctttatccctccgtgccggaggactccaaacatgttgtgaaggatgatgttttgcctaatggaaccttcgttccggcaggttccgcggtgacctattcaatttactctgttgggaggatgaagttcatttggggagaggactgcctcgagttcaagcctgagcggtggctctctcctgaaggggacaaaattcaggtgcaagactcttacaagtttgtttcgttcaatgcgggacctaggctttgtttggggaaggacttggcttacttgcagatgaagtcaatcgccgccgcggtgctcctgcgccaccgcctcgctgtcgcgccgggccaccgcgtcgagcagaagatgtcactcacactgttcatgaagtacggtctcaaggtgaatgtgtacccaagggatctcaaacccgtgctggaaaaattaaccaccatcaagagtgttactgttggtcaaaagtgattttgatttggttaattaaaacagatagatacatcatcggtttaaataaagaaataattataagaattttatatattacttaatatagaatgatggtgtatcatttcacttgtgttagtttaatttacgctggctgtatagatgaaatttccctttactcacaagtttctcatttgatgatgaatactatatatgttttgcatgtaaacattttgatgattaaaaagtaatgctgctgcagttctg

SEQ ID NO: 120033 - DNA, 362 bp, Glycine max
  Clone ID: PAT_MRT3847_79398C.1
agctctttttttttttttctttttatatttttctgtttcttttttttcattttgggttggggcggaaaaaaaatcccaccttcttcatttaacctttcttcaaaaagttctacttctttgaaactgacatgcatagggggccaatcttaccttacacctagtattgaaaaacaacacttgcaaccctcaagtttccccactaacattcgtggctatttttaacgaccctctaaactgtaaaatctcattattttatgcaacctgaccttcctaaaaagatttttacccaaagattatccccttatcaaacggtggcgaactgccacaatgcaatggaacttgcaaccgccccttttttgggt

SEQ ID NO: 120034 - DNA, 269 bp, Glycine max
  unsure (1)..(269): unsure at all n locations
  Clone ID: PAT_MRT3847_79399C.1
gggggggagaaacacccttcatacatttctttttacatttattttaaacccccancacgttcaggggtggttctttttagcttcgtgggcgccctcaaactctgaacctctttccaccatctttaccatttattattctaaaacattattgcagctgtctcattgatacaattactgttactcagagttattgaggtgcaaaaatgagtacacatactacgttgtatattagatacaatgatatacttctagtggtcacaccatttcaa

SEQ ID NO: 120035 - DNA, 272 bp, Glycine max
  Clone ID: PAT_MRT3847_7939C.1
caaagaggatgttgctcccgacgctgtcaggcacatatgcgttcctgataaaaaggtctactatagcgacatcagtcggggatggcctgtaccgcctcccgcactatagatcagataatccacaacttgcacaatgccaataagcagctcatggtggcatttatctgggtaggatacatacatgcactgatctcactcccgctcggagcgaccgagggctcgatgcgtcgtaagagccagctggatgaggtatgtttgtccaagtgctatgc

SEQ ID NO: 120036 - DNA, 1465 bp, Glycine max
  unsure (1)..(1465): unsure at all n locations
  Clone ID: PAT_MRT3847_793C.1
ccacgcgtccggtgcgtatacttgtagctcctttctccacaaagccgcgttcggcgacccaaacccaaccctagattgagagaaaaatccccaaaaacaaaacacacatctctttcattctctccctcaccaaaccctagattgaaagaaaccctaacacaccatgggaacacccgagacatcgcgcgaaccctgccccgatcgcatcctcgacgacataggcggcgccttcggcatgggagcggtgggtggctccgccttccattttctcaagggtctctacaattcccccaagggcgatcgcttcgtcggcgccacccaggccgtgcgcctcaacgccccccgcgtcggcggcagcttcgccgtctggggcggcctcttctccgccttcgactgcaccatggtctacgcgcgccagaaggaggacccctggaactccatcgtcgccggcgccgccaccggcggcttcctctccatgcgccagggcctcggcgcctccgcccgctccgcggccttcggcggcgtcctcctcgctctcatcgagggcgccgggatcatgctcaacaagttcctcagcgcgcagcagcccatgcctatgatcatggacgagctgccgccgcagtcgtcgaccgagcagtcgtggctcggagggtggttcggtggagggaacaaagaggagactgccaccaccgccggctccggaagcgagacgaagattctggagagttttgatgcgccccctgtgcccaattttgagtataagtaagtggagaagttatcccatggttcagttcagaccagaccaacgtagtcctaattgatctccacatgtcatgaaattgattgttatagtaaattggaaaaacttgactagttgtcatttagagattgattgatatcataaaacatgtggtggtctgaggctatctaaataattttctcaagtaattcgggtttttggttttaggggtagttattttttgtggcggagttgagaagttaatattgaatttgtcgttgaatctcacttgatgattgtctatcatacaatacaatgattttgtttacctgttttccttttcttttttgtttttttacaataatgtgtaatgtaagtgtagtggtaggctttcatcacatttataatttatgtattgttttcttttgaattaaaattttgatatcatatcagatggagttattagtgtaaggatggattgtggcttattttgaatgtttaaatgtcgtctcctttcgctggaaataggagtactacacagtttgagggtgctgttttatgacttttgtttttttggagtaagagcattatcctctatctacttaacacaggttacacaatactcagaatgagatgaaatgtggaatctttaacatttaagtatgtanaattctatgtagttnctnttatnattgtgtgcancatatgtttctgtntgatnttaat

SEQ ID NO: 120037 - DNA, 212 bp, Glycine max
  Clone ID: PAT_MRT3847_79400C.1
acgcacgcgtccgcccatacgaccgctggtaccgcgatgactttggcgcccactcaggcctacaacgcgttcgtcgacactaccaagaggaagactacgaacctgcgtgccgcggaaggggtagcgctcttcgacacgtgctacgaccagacggctctgcaaagcgtgcgggagccaacagagacatttcacagcaactgcgacaggacgtg

SEQ ID NO: 120038 - DNA, 670 bp, Glycine max
  Clone ID: PAT_MRT3847_79401C.1
cattattttccttctagaaacccatatgataccaataagattgcaggaggttcttctagtggatctgcttctctcgtgtctgctggactgtgtcctgttgcccttggtgttgatgggggaggatctgtaaggatgccagctgctctttgtggtgttgttggtctaaaaccaacttttgaacgtatacctaatgaaggagttcttcccctaaactggactgttgggatggttggaatactagcaggcactgttgaggacgcattgattgtttatgcagctatcagtggtgagattccatatcataaaaccttcagtgtatcgaccaagataaatcttccacggctgagcttgacaaagtccatatctgacatcaagttagcaaaatacgggaagtggtttgatgattgcagtgatgatgtcagaatatgctgcaccaaaactttgcacatgcttcaggatcattacagttggaagatcatagatgtgaccataccagagatagaagcaatgcgcctggcacattatattacaatcggatctgagtgttccactgcacttgattcttttaaagaaaagaattttgcagaattaggatgggatgtaagggtagcacaaagcatttatggtgctttcagcggcttggagtatcttaaagctcagaaaatgagga

SEQ ID NO: 120039 - DNA, 363 bp, Glycine max
  unsure (1)..(363): unsure at all n locations
  Clone ID: PAT_MRT3847_79402C.1
tttaatttttttttttttttttttttttncgcattttctcatttatagaacagacggaacatgtcgacatattactaaacgaatagttcttcatttttagataatcacatggactatgttataacttaaacatcgttttgcaaactctattgaaccaaaccacttgttttgtaaacaaaaagtgccccaccagttaaaaaaccaattaaagtcacagcccaattacctaacccagtcttcccgccatcttaaacatcaccggttgaagaccattctttggtgtcgcaaataggactgtaaccatcgacattaccaccatatttgtctacaaactgtaaaacaccctttccctttcctttcctg

SEQ ID NO: 120040 - DNA, 298 bp, Glycine max
  Clone ID: PAT_MRT3847_79403C.1
ttttttttttttttttgttttttttttttttttttttttttttttttttttttttttttttttttttttttttttttttttttaaaaaaaatttccacccttcaaacattttcaaaaaaccaaatggaacaccaaaaactgtcaatttccccattacccagtttcaaaccccaattaaaccccctgtaaattaacccgtgccatattaaaattttcccaaaaacctttaaaaaattatccaattattttccccccaataaggaacccccagaaggccgtaaaacccaaaacatacccc

SEQ ID NO: 120041 - DNA, 487 bp, Glycine max
  unsure (1)..(487): unsure at all n locations
  Clone ID: PAT_MRT3847_79404C.1
gctctaggacttggatatcttccttactattgtggatatgatcgagggagcttttcttctaccacacttacgtgcacaggcgatagggctactggtaattaatgaaggagatgcactcattgaactcggtggcctaaaagaacagcggcaggatcaaccacaggaagatcaacctttacaattgcggaattatagagccgcattgtctgaacacgatatatttggggtcccagcatgttatccagtcgtggtcatcgctacctcaaatctgaanttctttgctattggtattaatgccgataacatccataggaacttcctcgcctgttcccaagacaatgtgataagccagatactctatcaagtgcaagagcttgcattgcctgagtctgcacaagctgttgagaagctattaaagatccaaagagaatactactctgtggatgctcatcctaagaatagagaggaggggaatcacggactaaag

SEQ ID NO: 120042 - DNA, 550 bp, Glycine max
  unsure (1)..(550): unsure at all n locations
  Clone ID: PAT_MRT3847_79405C.1
tcgtctagctatctcgatcgaactgtccaaggtcctgtcacacacatcaacagggggcctagctgcggccttaaatatgtttaggtctaacggtaggcatcaccagtgcgtgaaacgttgccatttgctaacgcggcaaagtgagcagtatttgagctaaaggcaacaaatatacgatttcaaaaattggtggtgagaaacaacattggtagttacntaaaataagcaaacgataaggtactaacttgtttgggtaataattagccccgcggccgatagccggaaaccaaaggaaacatatgatgaaacaaccagagacggggcaacagtgagcatagtaacaaacaacttaggcacccacaagacaacggggcgctaaaagttgcccaatacgaaggccggggcttagggaaactgcccaaacaataggtaacgatgggtaacggttgggcgtaagaactaacaattagatatgcgccaaacacgctacaagtggcgacataaactcgcaagcgcgtagactgaaagggtacaatgctacgaggggatg

SEQ ID NO: 120043 - DNA, 225 bp, Glycine max
  Clone ID: PAT_MRT3847_79406C.1
cttcaaccttcttccctcttgcgtgacttgttgaggcttcatcaaaatggcgagatttctaggtctcagaggtcgtagtctagcgagcgccatcagcatcacgtgcggactttgctttttatgtttcggctatgcccagggtgttatgggcggtctcttgaccgttcagcagttcttggacagatttcctcaggtcgacattgtgaacgagagttcgttccacac

SEQ ID NO: 120044 - DNA, 258 bp, Glycine max
  Clone ID: PAT_MRT3847_79407C.1
gccacagcgtatcgtaagtagtctagggtccaagctcccactatccactgagattcagccctctgtcactttgattcgcctgcaagggattataccatacgctcgatgggaattgcccttaaaggcgtctcatacgactaatccgcctcaacagggtcaccaacggcacgtgcctttggggagcctaggcctgctactgcttatcaacaaacgaaccgactacgcacacatctgatgtagcccctagtcggacttata

SEQ ID NO: 120045 - DNA, 1816 bp, Glycine max
  unsure (1)..(1816): unsure at all n locations
  Clone ID: PAT_MRT3847_79408C.1
gcaattgctttatgcacctccatataaaataataaaaccccaggatgaataatgtgtcctttattagtcttataatgtgcacnccancttcctttctccatagtagcccatcacattctcctttaccttgtgtcattcgactgggctctctatagcaacccagcggatctccatatttgtcgttcaatgacgctanccgccccatcaccgatggtgaaggcaccacaattgttaccgttgaagccactttgcagttgaaggtaagtggatgtgcgtggtatttttttgtttggatcaataaaacatacaagtactccaaaaaaatgtattttggagctatctgtaccattctagatcaatgattccgtaatgggcgaagggcaatgtgggaatattaaaaagcacgggttgcaagaagaaaaatggagtgaataaagctatagtctaggccaattttgatggacccaatcataaaaggcatgtatgatgtaacaaaaagaaatcactgattaacaaaaaccaagtggaaggtggagaagaaacaaaaagaataataaagagttgaagcgaaggcgtggacccacgcgtccgcggacgcgggggtagctagctaggcagccacgagccttggcgcattttcttttttctgtgggcgagtataataataattgcagtaaaatggcatttctgaggtcaatagcaacaacagcaattgctactatacctgcagccttagcattctcatcatcttcatcatcttctttccctcgctcttcccaatcccccaatccccaaaatagattaggtcttgtcaaaacacttgctactcctccctctgctctccacatggaccacaaactctcttctcagcctgacgctgtcttgcccgagttactgacggagttcatggtggacatgaaatgcgaaggttgtgttaatgctgtcaaaaataagttgaacgagataaatggagttaagaacgtagaggtggacttgagcaatcaggttgtgaggattctcggttcaacgccggtgaagactatgactgaagctttggagcagactggtagaaaagcccggttaattggacaaggagtgccggaagacttcttaatatctgctgctgtttccgaattcaaaggtccagatatttttggtgttgttcgcctggctcaagtaaatatggaactggctaggattgaagccaactttagcgggctgtcgccaggaaagcatggttggtctattaatgagtttggtgatctgactagaggtgcagcaagcactggtaaaatgttcaatccggtaaatgaggaaaacagtaaggagccactgggcgacctgggaacactagaagctaacgaaaagggtgaggccttctatagtggggtcaaagaaaagctgagggtggctgatcttattggacgatctgtggtggtatatgcaactgaagataaatcagaacatggtataactgctgcagtaattgccagaagtgctggggtgggtgagaactataagaaactctgtacgtgtgatggcaccaccatatgggaggccacggatacagattttgttactagcaaggtctgatagataaagtaattcactgaaaacaaagcattgcaatttagttgtcttgtcgcccatcagctctaccatattttgaggattgtatccgcctttcaggaaaggaattcatctgtgtttagtttacattgaatttcttcaccagaattatgaacttttggataagatggttgttaatttgacaaatctcttatgttcttaataaggcacaagttatcgcactaaa

SEQ ID NO: 120046 - DNA, 646 bp, Glycine max
  Clone ID: PAT_MRT3847_79409C.1
ggagaaccaattaatcactttgccttgagaatgagtttgcgtaactgatgtgactgatcagacacttagccaaaaagaaaaatagtaacattctcatcacagagcctacaacaaaaacaagtctaagcgtgatgattcccagtatctgcttttgaatcagaatgcagaatgccatgcatatttatgttccatgggttaatggcagagacatgttcctaaggagtcattagtcaacgaccctctactaaagtaacagttatgtcattggaaccagagttcagtccaccacgtgatgatgaatttgtcccagagaaaaatctctcggaatataatcctggccttccaggttgggggaccaacacactctcactgtcgaacatcaaaagcactgatgacattgttggcctatcttctgggtgctgttgaatgcatgacagacccacttgaatacaccttagagcttcagatgtaggaaactgattcttaagcaatgcatccatcagcttcaaggccctatcttcattccatagcttccatgcatggcctaggagattcagtttgtgatctgggggaataaatcctttgtttttcttgccactcaacagttccaagagtaaaaccccaaaactataaacatttgatttga

SEQ ID NO: 120047 - DNA, 258 bp, Glycine max
  Clone ID: PAT_MRT3847_7940C.1
attcccttcacaccattctcactcgacagctttcacactctgagaaagcatggctgataacacattgatcagtactgctatctcagccttcgcatctctcataacttcctcaaaatccagatttgccatcgcagttcctctaactagatttggtgtcaccaatgtctcttctacacgcttttttattcgtgctgactggatgctaggccagatctagatctccttaccttgatggttcagcacctggtgcatttggat

SEQ ID NO: 120048 - DNA, 557 bp, Glycine max
  Clone ID: PAT_MRT3847_79410C.1
gaaatagagtgaatatcttcctttaatacaaacttaataaaaacttaacgcctgaacatttactgatttattaaatttatacgagatcatttcaatgaaaggataacaaataagacacattttatttttgaaaacttaaccaaacaaacttctcaacctaataagaaaacgtctaaataaaatctacaaagttattccacacttttgaacttaagacataaactccacaatctcgctactggccccctgcagaaaatgttattccaccaccacctctagatccatcaaattattacacaagtttgaactttatggctcctcgttagatcacgaattttcggctcctcgtgatccacataaattggtttttgggttttcaatgttttgagggacaacatctttttattctcagctaccaacaagattttacaacccttgtggtcattcccaaagggtattccaatctcggccaagccgattttatgttgaagatcacgaacgatgatcaggatcttgtcctccctcttaatcctgtcacacaaaagggtagctctttc

SEQ ID NO: 120049 - DNA, 392 bp, Glycine max
  Clone ID: PAT_MRT3847_79411C.1
ggattcccggtcgacccacgcgtccgctagatctagatccccgcctccaaccttttttttactcccccaactcaatcattggaggctgtgatatccctctcaggggcttcaggtgactacacatacacatcctgctctactcactacactttagaccgtggtaaaaaaaaatgcacaccttaaatttgttacaaaataaaaatatactttatttaaataaaattaaatatattatgataaaataaaagttaaaaatatctaaatttttctaaacttttttttctcttccttcatttttattaactcctatattatattaaatttatatctttctccccctctttgaagaaacacaaatttaattccccactccccccatatatattcttttt

SEQ ID NO: 120050 - DNA, 170 bp, Glycine max
  unsure (1)..(170): unsure at all n locations
  Clone ID: PAT_MRT3847_79412C.1
ctccgttttggctctcaccaaccacagatttccccttctcngtgtcttcctgcgcgttaccaaatttgattttacctntnctctctttatatncttctctncaaattctgatactttctacgccggccactcagtttctctttcgtttttctgtgtcttatctntctttc

SEQ ID NO: 120051 - DNA, 511 bp, Glycine max
  Clone ID: PAT_MRT3847_79413C.1
atgactgcacactgccctcatacttaagactcggaattcggatcgcgaaaactgaaaacctctggttcgttggcggaggctcatatgctgtagcactcagggcatggctccggctcacgcattccacaattaacatgtggaagtctggcaagttctgcagttgctcttgctgactataactgctcagaacatgatcaacataatggagagtcagctggagctgaatgtgaagcagtattacatgctactactcgactgattgagcacaaactcgctgccaatggactggaactatcggcatatgctaatgctgatgatctcgaaggagactgagactatttgtatgcaattgctgatgctgctgcatgcagcatttcaatatgcggatcctgatgcagtctgcaagcctatggatgaagcgcagaatgctacataggacttgctggatgcttatgccaaatacattactgagtactaccctggaacctaggtgcaatgtgcagacttatga

SEQ ID NO: 120052 - DNA, 278 bp, Glycine max
  Clone ID: PAT_MRT3847_79414C.1
cggcggcatctccggcgtgctctgggcctacttctcctctacgtgctcgacctcccctacttcttcaagtagaaatcatcaaagatgcgtatatatatagctccggccgatcctcctctctagctgcatggtatgtaggtggtgtggtccttgtttcatttcactccagcggtgatcagcgccgtgtatatctgtaattcctctgctttgcacatggatggattgggatgtaacctgttcaacttttttttaccttattggatgcatcattcagagct

SEQ ID NO: 120053 - DNA, 1572 bp, Glycine max
  Clone ID: PAT_MRT3847_79415C.1
gatagaaaggaaaggagcgatagagcgcgttccgctaagcattaaattagaattccagatttaacctcgaagaggcagcagcaccctgtgttgtattacaaacacatactacatgcacttttctttcttttctcttcttcttctatccataatttcaattccatttgctctctggaccgagtcaggcggcggcgaatcggcatgactcggcgctgctcccactgcaccaacaacggccacaactcccggacatgcccgtcgcggggagggggcggcgtcaagctgttcggggtgaggctgacggatggatcaatcataaagaagagcgctagcatggggaaccttaacctctcctcctcctcctcctccgccgccgccgcacatctgcaattccgttcatctccttcttcttccaacctccccgcggcctcatcgcccaatccaagctccccgtgctccgacccgccccaaggctacttgtccgatgaccccgcccacgtctccaccttcgctaaccgccgcggtgatagaaaaaaaggtgtgccatggactgaagaagaacatcggctgttcttaattggtctccagaagctgggcaaaggagactggcgtgggatagcacgtaattttgttgtatcaagaacccctactcaagtagcaagtcatgcccaaaagtattttatccggcagagtcatgctaccaggagaaagagacgttccagcctttttgacatggttccagatatgtcttcagatcaaccttctgtgccagaagaacaagtgctgcttccacctcccgagaactcacaaccttgcaatggaaaatcacagccttcattaaatctctccctcaaatcagaatttgaacctatggagactacttctcaagaaaatgtgcaacagaccaatgaacctatgatgggatcaaacagattgacaccaatggctcctcatggatgctttcccgcatatttacctgttccttttcccgtgtggccatcaacttgggttcacccctttgaagaagttaagggaggagagacatgccaccatcagatccacaagccaatcccagtcattccaaaggaacctgttaatgttgacgaacttgtgggaatgtctcatctaagcattggggaagcacaggtacgtgatagagagccttcccctctttccataaagttgttaggagagccctcaaggcagtcagcattccatgcaaatgtcccggttggtagttcggatttaaacaatggcaaggacaacgcaattcaagctgtctgagcttgtaaggtctggtgaagacagcagcagtaattaagccttcttttgctcatcttttcatttgtaccattatatatcattttttttattcctgatccctagcatttaatcttccaattagtagcaagttatatggtggtatgtagatcaggttagatcaattcttggaaaatatttattctttctaactgtaaacaaatgaagcttaaataatcaaatagcaccaagaggttctgttctgttcctcttggtttggctatttttagagtcaaaaaaaaaaggacgaag

SEQ ID NO: 120054 - DNA, 1543 bp, Glycine max
  Clone ID: PAT_MRT3847_79416C.1
ccacgcgtccgggcaacgaaagaagcgatagaacgcgttccgctaagcattaaataaaagccgttaaattagaatcggagatttaagctggaggaggatattctgaaatcccatccaatcgaaggctgtgaagtgtgtgatgcactctatccttctttctcttgaacccataattccatgactcggcgttgctcccactgcagcaacaacggccacaattcccggacatgcccttcgcgtgggggcggaggtgtgaagcttttcggggtcaggctgacggatggatcaatcattaagaagagcgccagcatgggcaacctaaacctctcctccgccgccgcacatcaccaattccattcatctccttcttcttccaacctcgccgccgccccctcatcccccaatccaagctccccatgctccgaccctccccaaggttacttgtccgatgaccccgcccatgtctccaccttcgctaaccgccgcggtgatagaaaaaaaggtgttccatggactgaagaagaacatcggctgttcttaattggtctccagaagctaggcaaaggagactggcgtgggatagcacgcaattttgttgtatcaaggacccctactcaagtagcaagtcatgcccagaagtattttatccggcagagtcatgctaccaggagaaagagacgttccagtctttttgacatggttccagatatgtcttcagatcaaccttctgtgccagaagaacaagtgttgcttccaccttcccagaactcacaaccttgcaatggaaaatcacagccttcattaaatctctccctcaaatcagaatttgaacccatggagactacttctcaagaaaatgcgcaacagaccaatgaaactatgatgggatcaatcggactgacaccaatggctcctcatggattctttcctgcatatttacctgttccatttcccatgtggccatcaactgtggctcccccgtttgaagaagttaagggaggagagacatcccaccatcagatccacaagccaatcccagtcattcccaaggaacctgttaatgttgacgaacttgtgggaatgtctcatctaagcattggggaagcaaaggtacgtgatagagagccttcccctctttccttaaagttgttaggagagccctcaaggcagtcagcattccatgcaaatgctccagttggtacttcggatttaaacaatggcaaggacaacgcaattcaagctgtctgagcttgtaaggtccggtgaagacagcagcagaattaagccttcttttggtcatttttcatttgtactatcatatataattttgttttcctgatccctagcattttaatcttccaattagtagcaagttatatggtggtacgtagatcaggttagatcaattcttggaaaatacttattctaactgtaaacaaatgaagcttaaataaagaggttctgttcctctaggtttggttaattttagaatagcaccaagaggttctgttctgttcctcttggtttggctatttttagagtc

SEQ ID NO: 120055 - DNA, 329 bp, Glycine max
  Clone ID: PAT_MRT3847_79417C.1
cacatgacgctgaagatctcgcaagacctcgacggcacgtcggacatccaaaagttcacgcagatgcgggtacagctgcaagccgtctcgctccggatgcagacgttgaggagcaacgagcagatggcaacggcgatgaagggtgcgactagggctatgggacagatgaaccgaagtctcaatctttcacaaatccaaaagatcatgaacgacttcgagaaagaatcgtccacgatggacatgaaagaggagatgatgtcggacgctgtcgacgacgcgattgacggtgaagacgagggcgagggcgaggagatggaaagcgacacgat

SEQ ID NO: 120056 - DNA, 331 bp, Glycine max
  Clone ID: PAT_MRT3847_79418C.1
aagccttctcggtgcatacaacttcttgtgggataggatgagagcaattcgaatggacctcagaatgcagcacattttcaatcaaagggctattactatgctggaacagatgataaaattacatatcattgcaatgcatgaattatgtgaatacactaaaggagaaggattttccgagggctttgatgctcatctcaatattgaacagatgaacaaaacttcagttgatctgttccagatgtatgatgatcacagaaagaaaggaatcaatattcccaccgaaaaagagtttcgaggctattatgctcttcttaaactggataagcaccct

SEQ ID NO: 120057 - DNA, 294 bp, Glycine max
  Clone ID: PAT_MRT3847_79419C.1
ggaatttcttacacatcgcacaactaatgtgcgtggggaaacaactctgcgggggtgatcggacacatatttgaatcctatgcggcatgatacctcagtgtctacagtaccaagggactgtgacatttgtgctaacaaaacaaccataaacaatatgtgtgcatatgggctcaaacctggtatgttaagatctactcttttgaggaccattcctcaggacatgtgacagcaaactgagtgaaatctaacctcaacagtgagatcacgatgaaagtttgattctagcatgcagag

SEQ ID NO: 120058 - DNA, 226 bp, Glycine max
  Clone ID: PAT_MRT3847_7941C.1
ctacaaacggggcggggtaaataaaaaaacacttcgttcaccaccaaaaccccaaaggccaacaccagggggtaaggaacaacaaaccagacataaacctccagactgcacagaaccaaaacgaacgacacacaggaagggaaaaggcggcaaccccccagtcagcaggcaaaaaaggaatgatccaggtacgcacagacagacctggcgccaagactcaaaaaca

SEQ ID NO: 120059 - DNA, 374 bp, Glycine max
  Clone ID: PAT_MRT3847_79420C.1
ttttacttttttttcttatggggggggtgtttatttgggaaacacaatttttttttatgaactcaaaaacggggaattggatacttttagccaccattttcatgtttacataacaacaacttttatttttcaaaccattttatataaattaatacccctattgctaaggttgaacacaaaatcaaattcaaatgacaaaacacgggttattaacctggttttgtttttttaatcaggacaagcacaaagggggggggcatgtaatgttctgcaattagaccttcaacataaaacctaagggggatccttcacttgggaagaactaactttacctatcattaactggtgatccccatttttggttgtgccaaaag

SEQ ID NO: 120060 - DNA, 780 bp, Glycine max
  Clone ID: PAT_MRT3847_79421C.1
atttccttcgtcggaaatgagacccgggggtgccgttgctctgcttcatcgtgacgcggcttctgtgccggttccggccctgccttgcactcgagatcttttgtgttttttggcctcccgctggccgcggccgtgccctcctatctgttcctctctgctttttcctgcctggtcactagattttgctttctcttcttttgctaaccctgatggtcctccggtgtctcgctcgtgtcctggttccccgggaacagttttgccaaagcgtttccttggatggaaaatagaggtgtgagtgctgatgctgagctccaacttgctgattttgggccggatcctgcccagacatgtactggaaatgaaaagggtgacaaggccttccggattcctcagtccagacgacctaatctatcctcactgcaaataccagcacggtcactagatattgcattatctacttttgcaaagactgatggtcctttggtttcacgatcaagtcctggttccacaagaggacttcccccaaggccaaattcagccaaagtcaggtcttcaatgagaggtttacttcctcagaggagcttcaagataaatacctgttcccaggatattgaaaggacaggtctcatagttcctaacactcccccatcagatgctcctttggataaaccttcctcttctactcatctgtctcttaataataaggttatctccccatcaacaaaagtttcacattcattaccagttactccatttgcaacttcggctgcagagaatgga

SEQ ID NO: 120061 - DNA, 517 bp, Glycine max
  Clone ID: PAT_MRT3847_79422C.1
cttacgttcaaggatgttgtttttgggattgttgtggagggaacctttgttgagggaataaaggaagaggttgtactctcccctacgcatgctctgtcccttatagctgccggagaaggtaattgctaaattaacagatggaaaggaaactcatattccttatcgagattcaaagctcactcgattgttacaatcatcccttagtggccatggacgaatttctctcatttgcacagttactcttgcttctagcagtagtgaagagacacacaacacattaaaatttgcacactgaaattatggatgagaaatctctgatcaagaagtatcagaaggaaatttctgagttaaagcaggagttgcagcagttgaagcgtggcatggttgagaatcccaatatggccacatcttcacaagaagatctgattactttgaagcttcagggttgtgctgatgcatatatcttggattatctaataagtgtcactgtacttggtgggagactttataatatgcc

SEQ ID NO: 120062 - DNA, 225 bp, Glycine max
  Clone ID: PAT_MRT3847_79423C.1
caagaatttccattgcatgcaaagcaaatacgcattatattactagttttaatttgttttgtcgtttgcttctttctttgattaatgatgactagctttaaggttgcatgtgtggttgcgatgatgtgcatggttgtcccatgagtcgtaaccatggcaaggcgaatcacgtggggcagcgcgggagtgttcgtgctcagtatttgagcggggaacgtcgacgct

SEQ ID NO: 120063 - DNA, 764 bp, Glycine max
  Clone ID: PAT_MRT3847_79424C.1
ctttcaaagatcgaatgttatgaacatggtagacttataaccaaggtacaaggtgatggagtcattgtggccacccctactggaagcactgcctattctacagctgctggaggttccatggtccatccaaagtttccctgcatgctgtttaccccaatctgtccacattcactctcatttagaccagttatacttccagattctgctcaacttgaattaaagattccagaggatgcaagaagcaacgcctgggtttcgtttgatggaaagagaagacagcaactttcaagaggagattcagtacgaatatctatgagtcagcatccacttccaacagttaacaagtttgaccaaactggtgattggtttcatagcttgattcgctgcctaaattggaatgaaaggcttgatcaaaaggccttataaagcatatgaaagtgaagaacaaagatgcactattctcctgtactgattatacattaagattgcagaactttgctatagtatattagttataaccaaattctaacattggtttcccaagagaagatagggtttgccaatgtgttttcagtgttattgtggcaagaggctgttgtatatattgacatttaaagctgtaaattgttgatctcagaagcagctattggtgctctcaaagttcaccactcgtactatttggctgcacttgacccatttaaatataaataacacaggcgcaaggtgctagacacttctccgcctccaaatcacattttctttag

SEQ ID NO: 120064 - DNA, 459 bp, Glycine max
  Clone ID: PAT_MRT3847_79425C.1
atatacccatgacatctagtgaccccattgtaacataacacaaaatgaaaaattggctgacacaaaaacactaaaccaccctttttttaaactgttaaacattgaaaagaaagggggatataaggaaatggaatgtaaaaaaagcagttcccagggactcctccaaaaacaactcatgttctgccaccattatgcaagaatccgctcccagagaagaaactgaggccttgtctttgggagaattagaaatacccgtgggtgaagagagcatttgtggtgcgcattgcacatggggggttaccccaacctgatctatgtcaagaagggctggagatagatatttcgccactggaacaaagagcgctgccccatcatgaagctgggggacactctgaaattagaatgacccacaccaccattagccgagacgtgacaaaaaaaacccaggggcctttaaaa

SEQ ID NO: 120065 - DNA, 691 bp, Glycine max
  unsure (1)..(691): unsure at all n locations
  Clone ID: PAT_MRT3847_79426C.1
gtcttcccaacctaaaaagaacaacaatgggaagtccaatggaaaaaagaataggaatgtaaagagaacgattattaagattataggttttatgattattgcctttttcgttctattgctactcggtatcttgttgtttgcttattatgcgtggaaagctccagcatttagcgaatcaaaattagatgatccaattccagcaaagatttacgataaaaacggagaacttgtaaaaacacttgataacggacagcgacatgaacatgtgaatatcaaagatgttcctaaagacatgaaaaacgctgttttagctactgaagataaccgtttctaccaacatggagcattagattacaaacgtttatttggtgccattggtaaaaacttaacaggtggatttggttcgcaaggtgcgtctacacttacacaacaagttgtaaaagactcattcttgacacaacaaaaatctatcggtcgtaaagcacaagaagcttatctttcttatagattagaacaagagtacagcaaagatgaaatattccaagtttacatgaataagatttattattcggatggcgttactggaattaaggccgccgctaaatattacttcaacaaagatatgaaggatttaaatttagctnaannagcttatnnanntggtttaccgcgggttccgagccgtgactga

SEQ ID NO: 120066 - DNA, 171 bp, Glycine max
  Clone ID: PAT_MRT3847_79427C.1
ctctacatcaccctcatcctcaacactttcattgcctgatcaacatcctacaacgacatcgtacactactgcaggggaggaccaccacttacaccttgtactactatctcactttctcttattaccaaaagctcgtgctctcaccaaacttaaacgccccgacatcctaca

SEQ ID NO: 120067 - DNA, 265 bp, Glycine max
  unsure (1)..(265): unsure at all n locations
  Clone ID: PAT_MRT3847_79428C.1
cactactgtatcntgcntgccgtttcatgcatgctgatgtgggtgggtgccttggaagttnctgctnngtgaatcagagattaggagctganattagttntcactcattantccctgngnaatctctgcataaacttcttagnctttcttcacttgntggntgtattangtaaatgatgcncaccatantgttagatgagcttagcntctnattatcngctcatgngacntgtaaantngnngaaaattngtggttnatgtcant

SEQ ID NO: 120068 - DNA, 159 bp, Glycine max
  Clone ID: PAT_MRT3847_79429C.1
cccacactaccttcaaaccctaatttacatctttttaaatctcaataaacctagggggcgattcggtctcatttaaaaggtgcatagatatgacttatctacaaagcctgtcaatatactaatattaaattctatcatcaacaattactcaactacaac

SEQ ID NO: 120069 - DNA, 242 bp, Glycine max
  Clone ID: PAT_MRT3847_7942C.1
cacaaacgtccaatcgaacgcaattaaagtagctaaaaagtcgaataccactgcgtagttttctattccaactattctaatccgataggtgactctaatctcaacgagaagtttgtctgtcgcacgaatattgagcgctatgatacacaaggtgtagtctatcgatacgtctgacatggaacacattcatggtatacgcatgccatataggatggcgtgaaattgaaacaatgtataaccga

SEQ ID NO: 120070 - DNA, 809 bp, Glycine max
  unsure (1)..(809): unsure at all n locations
  Clone ID: PAT_MRT3847_79430C.1
cccacgcgttcgaccacgcgtncgcccacgccactttgcgctatcttggtgcgtactacggaatacacactaaccgactcacactgtgtattaggttccgttttccgctaatcgcaaggtttttccatgactgcgcgaccattctccgtcactcttcccagaaaatccccacacgctctcctcttcctccccccttcgtcgcattctccgattctttcccccgtcgcggatattgacacgttcgagagcgggttagggttttgataggttcgtgatttcggtggagaaagagagggacggagatagagagtgagagagagaaagtgtttgttagggttttttgtttggcgtgtttcttgttttggagatggggagcgacgatcgggacggcaacacgctgatcaaggcgaatttcaccgccgacggagcggggaggctgaaggagagtgtgatggagaagctcaaggaattcatgggggattatacggacgacacgcttgtggattatgttattgtgttgttgaggaatggtaggcgcaaagaacaagcaaggaatgatttgaatgtttttctgggagaaaacagctattcatttgtatcctggctctgggatcatctggatatgtatttaaatttgtatgtacaacctgaagcattgcaggatgaagctcctaaaaaaaagcttacagcggaggttcaagctggagatgatgattctcagtatttaaattcacagtcagaaagaggaaaatctagtaagttatctagaagtcggcataacaaagattggaaaggattgatgaaggaag

SEQ ID NO: 120071 - DNA, 371 bp, Glycine max
  Clone ID: PAT_MRT3847_79431C.1
aaacaaaaacgcctaaagatttttttgaaaaaaatttaacaacattcttgcactaagaggaggggaaaaaaatcaacggcccggatcatgcgggaaggaatgaaagccccttatgcggtttgatggtagaatcgcactgatttatgaccgctccctttacgccaaaaacaggggggccctcagataggaccttttggttcctataaaaaccaatcgaagaaagcgttccgggtttttggacatcttattcacggaaagtttgctactatggccaatgcctttttggagatccaccttaaacaaggctttgtagggcaaattatttctgccttaaaagtggaggaaccacaggggggggcccctttttattg

SEQ ID NO: 120072 - DNA, 412 bp, Glycine max
  Clone ID: PAT_MRT3847_79432C.1
aattcggctcgagacggctgcgagaagacgacagaagggattgtcctaccggaacccaagtatgtgtacacaggtcaaacacccatacacccatttaggtactaggagacttagatatatggttgactgaatacctaccgtatagttaacattattttctttataaattatattatttttgtgtaatttatcatttggaatttgttttctataattactatgcttattatgaactagctttggttaaggttgtagtagtatgtaacaacagagtgctgggtttgtaactgatgatcagatagaatcaacaatgcacatgctgatcaaaaaagaaaaaccaagaataaaacacatgcctttaatttctaggagttaaattctgattaaatatccgggaaatgttgatgcaaca

SEQ ID NO: 120073 - DNA, 787 bp, Glycine max
  Clone ID: PAT_MRT3847_79433C.1
cccacgcgtccgtacggctgcgagaagacgacagaagggagataagttgtttgtgtttgttgtaattggaaatttggaatcaatttgtggggatgagaaggatttgctgtgaaacttggtaatcgtgacaacagagttaatgacaatacaaaatttcaacattgcatgaggtcctgtgactgtgttgcaagcttgcagttggttgggagtgttgtctgttatttaatttatctattttaatgttgtttgcttgggtgcagttgcaaatgaaaggttaagaagtttaatccccgattaattaaccgtcttttacattgacctactgtagacaaataggttcacagtttaaattggggattgaatcgttgaacgaagcttctccagacgcctaatttagaatattcaaatgttcccttttcatccttaattcaatattaagagacagagagaactctgctagagtatattcaattgcaaatgttgatgtgtcacaaatttgattttatgatcccaaaatgatttaacttccttgaaagctttcgttgattagtgttaagtatgcaaagtttaaggtgaattgatctcttccccaaagacaaggtgacaaatataaagcattggatattggatacacatgccccatcatgggtatttagtgtcgatatcaaaagaaaatgtaaaaaaaaagttatatacaatataattttctatattttaataaaaaaaattgttttttaactaatattctaaagtattgattagcaccaataatctatgcaacctttcc

SEQ ID NO: 120074 - DNA, 429 bp, Glycine max
  Clone ID: PAT_MRT3847_79434C.1
tgcttcttcctcattggcttcgtcctttcttccattctcacttcttcttttgacttgcttggtcattgtttctgcgcttcattggggagcttctgcagcttgaatctctggtgaacaggtggtccaacatcagtggctggttcaattcctctgcggcccttttctccgcggctctatctctgtccatctcatatggtccggtcgctgcacgccttcccagcgagccatcctctccgatttcatcacctccctttcctcttctccaatctccactgcccatccatccgtcgccacgtggtggtaaggctctgtaaaatacttccttctcatcaagtcggctccttaacccagcctcaccctcgctctcggtgcccaaatcctcggcgcgaactactcccttggaacatctctcaccaccgactacatcgt

SEQ ID NO: 120075 - DNA, 345 bp, Glycine max
  Clone ID: PAT_MRT3847_79435C.1
accggatcggaatgcccggctggacccacgcgtccggtagcctgtcattactcaaacattatgggttccaaacactcacatcgattgggaccttggttctttcttacacgctgcacattcgaaaccactgaattgtaacctttaactttctccaaaatggcttgcatataattgacattaatacacaccatttatcaacaaaaaatgaaaattgcattgaccctaataaacaattaatggcctttacaatatgcacttacatagaactcataacactcgcatattcaccaattctactaactgaccaatctgaactgctttttcgtattcatgcataacttcata

SEQ ID NO: 120076 - DNA, 409 bp, Glycine max
  Clone ID: PAT_MRT3847_79436C.1
tatgcagataaggcgtacatagaatttcatgatgaatgctggggagttcctgcttatgatgacaagtaagttctaagcactgaatagtactcccttgattttaattcatgagctttttaaaagttttaaaattttatcacttccaaaaaaaaaaaaaatcaagaaaacaactattttgtctttcaacaatactttatatattggtatgttacctaaatatctaattaattcacaattatactctaaatatcttatgctaataattggtataactaataagacgagtggttcactttatatgaaaatgatttgacatggatggaggaacattgttgcactatctcacaactttttttttttctttccctaatggcaattattttgattgggtgaaccatgaaacagcaaa

SEQ ID NO: 120077 - DNA, 394 bp, Glycine max
  unsure (1)..(394): unsure at all n locations
  Clone ID: PAT_MRT3847_79437C.1
gccgaagcgaaaaccgaaggagcccaaggacgagaagaaggaccccccaacaacaagcagagccggacccgaccaagaagaaaaganccacaggcaagccacaattttttttattaaagaaaggccctatgctggaggagctttcctagcgactataaattttcctccagattatgccgttaagccatataaggttgcatccaggacgaaggcgttccacccaaacataaatagcaatggaagcaattgacttgatatatggaaggagcagaggagccctgctataaccatttacaaaggcgcgcactacaaatgatacctgtagacggacccaaaacccgaggaaacaacggacaccagaattgacgccgtgcacaagaaagatagggaaaag

SEQ ID NO: 120078 - DNA, 245 bp, Glycine max
  Clone ID: PAT_MRT3847_79438C.1
cgaccacgcgtccgcccacgcgtccgacggctgcgagaagacgacagaagggaatatgacacagaaattaaaattggtatcaagattttcgtcccttagttagtcactctcttttgacttccatttgaacttttgcataattgtatgtatgtgtcccaatccttttttaacgatatcctcaagttatcaacaatggccaaaaaaaaaaaaaaaaaaaaaaaaaaaaaagcggccgctctagagga

SEQ ID NO: 120079 - DNA, 401 bp, Glycine max
  Clone ID: PAT_MRT3847_79439C.1
gcacgagcgtaattgaagtcgcacattaattaatgcattttgcacctcggttttcgcgctttattaatccttctttttctttcctcactgtctcacggcttcacgctcagctgcagtagattttaacttgattattaggaagcgaaaatgcttacgtgcatagctcgtccaaagaaacctgatgagtcggatccaaacaacgcgacaagcgccgctaaatcgcaagccgtcaaatctctcacttctcagataagggatatggcgctgaaggcttcgggagcgtacaagcattgcgcaccgtgcacggggccagcgacgcaagggcgatttcagagcaacaccaccgagtcggacgcggattcagaccggttccggtggtcgtaccggagaacggggagttc

SEQ ID NO: 120080 - DNA, 191 bp, Glycine max
  Clone ID: PAT_MRT3847_7943C.1
ggaactctttggtctttaaaactagatgatttcgagggattctaatgtcataattctctaacttgtcataattgaagttgcttttgtctgtacatctcctatcaaggttgtcaattttacaactcaatcatatttctgactccctttctgaagctaccttctcaaatgggcagacaattctacacaaacct

SEQ ID NO: 120081 - DNA, 167 bp, Glycine max
  Clone ID: PAT_MRT3847_79440C.1
gcgcccacgcgttcggttggcctgaacctttaagaaatcgacatcttgtagcttttagaagatatttacccaacacaagcaagattttataaatggattagttgcccaacagctgctgttccaaaggcagtggcagaaatgttcacaggcttggcacagagtaaggg

SEQ ID NO: 120082 - DNA, 159 bp, Glycine max
  Clone ID: PAT_MRT3847_79441C.1
tgcatgcggctgcgagatgactaccgtatgtggagcaacaaacagtgctcctacctgaactcgatgaacaacaactcattggtttaatgttctggatacatgcattcttcatgttgaatgcgacttttatctacagtgtgcagctagcttatatgaatt

SEQ ID NO: 120083 - DNA, 159 bp, Glycine max
  Clone ID: PAT_MRT3847_79442C.1
aggtaccggttgcaaaagaccaccgaaaggtaccgcttgcagaaaaccaccgaaaggtacggctgcaaaaaaacgacgaaaggtaccgctgcaaaagaccacgaaagggaacccccttcataaaaaaatttctgtatataatatacagcacccttttcc

SEQ ID NO: 120084 - DNA, 702 bp, Glycine max
  Clone ID: PAT_MRT3847_79443C.1
agtaaacaggaacattgacactgatgttattgttgctgaggtccgggaaacaagccgcaaaccagatgagatgtatcctatgctggagaggataagtccaggaccaagaaagctagaactatttgctcgcatgcacaatactcatgcaggatggatgtctcttggtaatcaattgagtggtgtaaggttggtggatgaggggttgcgggcaaggtttaaggctgcttatccagatgtggaggtgcagccagcatcccctcccagagcttttgctatggaagtagacactagtgttgctgctcactcgggccgccctttttcagccacagaatcaaagtccacttcaacacagtttgcggagcctgcagcagctccagaaactgcctttgtttcagaggataagccattggctattgatgtggacattggctaagtttccacttttgatcatgcttggtaggagcaattccttgaagctgaaggggaaacagcattttgacctttgtactgtgttaatttgcagtctttcacgtttttagtttgagtaacaaggtatctgggtagaaatactaaaattagggaggatgcttttgtaaatcaaataattgtgtaatagttgttagtaatgaggagtgttgtaaaagtctcgttttgcttgtactttacaactgttttttttattgttcaagcatcaatttcctt

SEQ ID NO: 120085 - DNA, 163 bp, Glycine max
  Clone ID: PAT_MRT3847_79444C.1
gtcattgaattgaagttattgcgcttcctggatatgcacgtgtcgaaaagctccaaggtgccatgcggcattttattccaagagttttagaccctcatggattgagacttgagtgtcttcagatttctgacgctatggtgaatcttgctattcagagatgttc

SEQ ID NO: 120086 - DNA, 442 bp, Glycine max
  Clone ID: PAT_MRT3847_79445C.1
ccgcccacgcgtccggttgtccatagggggtagtttcgggaaacacacggtggagaagcccgcgccggattccgaagcgcgtgtttcaaattcggatagtcgcgatggaatgcgcgtggtggtggagccgagcgacaagcacgacattcaggcgttaaggagaatggaggcgaaaaagaagacagagcagaagagggagcgcgtgagggaaccgtccgagcccgaattgaaacgggatttcaagagggagaaaacagaatacgggaacggcgttagtggcgcgtggaatgcgacgacgacgccgtttgacctgcaccaattcccgacggtgcagtacttgccgttgaataacgggtctccgttaccgtgctgggtcggaggggaaaagattgtgggtgctggagttgacggcgttaacggcggaagaggaggaaatatcaaa

SEQ ID NO: 120087 - DNA, 329 bp, Glycine max
  unsure (1)..(329): unsure at all n locations
  Clone ID: PAT_MRT3847_79446C.1
cacgcatccgctgaatataancttacttttctggcattttcctacttaacaaaaaacggcctcatatgtatatttcaacgcttttgcgaccctaccaacccaaatagtactcctatgaacctcttccatatctccaaacttgcaatcactatattgaacacctaatttactactcaacgattggcttactaatacctactaatagcacttgcaaaacacacttctattattcgtttaaacaaaatatctgacatcaaactctatacgtacttgttttttcacaacgaaaactattttattgacaaaaaaattatccagagaacaatact

SEQ ID NO: 120088 - DNA, 400 bp, Glycine max
  Clone ID: PAT_MRT3847_79447C.1
gcttaatttcatcagtagtgtgtgtttgaacacaaagaagcacatttaccaatgtgcatttgtgtgtcatgcagtaatggcaggcttatacttgcatatgcttggtaattattaactatcttgtaattatctagctagttgctgcaaaaggtgtgattagatttgtttctagttggactatgaaataggaagaatttgcatttgagttaaatacaaagattttaatattcataattgttggttatatattcccccaatgaccaaattgttgatttgccattagttcttgagcttttttcctagcaacttgaccttttgtgtaacttcatttcttgccaccagttttaccaatataccaattttaaattataaatattttgtaggagcatgccaacctttg

SEQ ID NO: 120089 - DNA, 260 bp, Glycine max
  Clone ID: PAT_MRT3847_79448C.1
catcctttacataaaaagccacactactacatcattactacatattccacaatactccatgcaacaaagcgtgccgagtcactaccatcatatatcacggaaacaacacatttccatgtccctacccacaaacccagtattatcttatacatgggagctgcgacttcaacaccggcttctattacaaatgaacacgcttacaatctggattctgtgcttacaacgaacgagaatgccctctaacggaactacaatcatgg

SEQ ID NO: 120090 - DNA, 474 bp, Glycine max
  Clone ID: PAT_MRT3847_79449C.1
ttggggggggggggggggggggggggggggggggggggggggggggggggaaaaacgtaaaattgggcagggcaaaagtgcacgacaagtaagagagaaagataggaggcaggggataagcatgtacatagaaatagtgacagttagttgaaggttgctaagaacaactgtattaagttgaactacctaagggaaaaacagaaacaatgaaaagcaagggggtgaaacagaaagcaattagggcagtgggaggggagggggggtgatgtaagtcaaaccatttggagggaactgggcagaaagacctcagaacggccgagactgactaaccctggctggtggccgacgcaaaccttaaagagtgtatgtagagtgaacgtagtaccacatatattaaagccaactgtttaaggcaactaagctatgaaggcacttaaaataaccttaaagcgccgtagatttaaggcaagttta

SEQ ID NO: 120091 - DNA, 398 bp, Glycine max
  Clone ID: PAT_MRT3847_7944C.1
ctcttatcacagcttatcttggattgctacaaactatggcttcttatgttggaccatatctaattgacggttctgttcagatccatagtggacaacggctgtatgaaaaccatgggtataaattggaacctgcatttgacgttgcaacgattgtgatgtgcctgacccgtaggcattgcatgtttaggttgcagcaggttggtctacgaatacgagcgctgattgatacaacgatctataataaggctctgaccctttatagtcatcaaagcagggtcagacttctggtgagataatgaatttcatgactgttgatgctgtgtgacaaggtgtaatcagttggtttatgcatgaatggtggatggagggaatgtaagtatcacaagcctagatgatta

SEQ ID NO: 120092 - DNA, 393 bp, Glycine max
  Clone ID: PAT_MRT3847_79450C.1
ggaactagtcattgcgcaagatattgatttagctgtcaagtacctgagatttgtgttgtacgagatacttctactcatattgcgtgtatttatggagatcatactaaactggcagcaacatctaatgattaatgggagaacatggtaaccctgacactgacatatgggagagtctgagacagatctatgctcatgtgtgatagactataaccgacacagctcgtgtatgaattagagagatttcctaacgtgacatgattggtacgatttggcatttctcctttgccacaccattggaagcaggatacattggcactgcaagtagtgctactcctcatacagatgatctgtcatctcagatgtgcatcgtcagatggactacggattgtgcat

SEQ ID NO: 120093 - DNA, 751 bp, Glycine max
  unsure (1)..(751): unsure at all n locations
  Clone ID: PAT_MRT3847_79451C.1
cgctcgagggcggcgggggcccggccggggctccctcgtgcacttctctctccaccatgcaccaagccatttcccacagaagcttcatccccataggagcacgtggcatgccacacgcaggaggaatcaaagaatccaatggcacctatccatccaaagctgccacaatggtatcggagaacgcggtggtaatcattggaaaacggggatgctgcatgtgccacgtggtaaaaaggttgttacaaggtctgggagtgaaccctcccgtgtacgaggtggacgaggaccacgaagccgccgttgctctccacctgtccccgcagggcgccgaaacggtgcagtttccggcggtgttcctggccggcaagttgttcggagggttggaaagagttatggccactcatatctcaggtgaattggttcccatcttgaaggatgctggtgccttgtggctctgactcttactctagctacctccatcttttttttctacatctgctcttttttttttaaacctattttctcgagtgggaaattaattagatatagcgaaattaattttcttaggttcaattccctccttttttgtgttttatttttcttttcctgcgtctcttaactgggcaagatgagaaactgcgttgttaacaactcccttgtgttgaaaagtctggaagagagatattgtacattttgtttcaattagttgatgtcgacgtacaagttcatcaatgccacnnaaaaaanaaaa

SEQ ID NO: 120094 - DNA, 1018 bp, Glycine max
  Clone ID: PAT_MRT3847_79452C.1
caacagcaatgtctctgttcttacattgccactgcccctcaccacagcatggccactctctcacccttctcaaccttcaattccaaacctctctgtgcttctctacctaacccctctttcttaactcatcaacaacagcaacaacacccttatcctctcaccacaacgaccacctctgaccataagcccctctcagtttccacactgcccagaaagttgctctgtaaaccacccaaaggaaagtacgtcagagaggactatcttgtgaaaaagttgtcagctcaggaaatccaggagctggtaaagggagaaagaaaagtgcctcttattattgatttctatgcaacttggtgtggaccatgcattttaatggcacaagaacttgaaacacttgcagttgagtaccaaaacaaggcgctgattgttaaagttgatacagatgacgagtgaatttgcacgcgacatgcaggttcgcggtttgcctactgtgttctttattagccctgatctgaacaaagaagctattcgaaccgaaggacttctcccaatacagatgatgagggatatcattgacaaggatatgtgaaacaacaaagggtttctgatcacctgacatagtttgtgttcctggatcctgctatatactgcctggtgtaatgctatcctatctggggggagaattgaagtgctaaccgattcatatgattttggctattgaaggttgtaaatcgtatgatatttatgtaagcttttagctcgacatactctgtagtgtatcacatgtgatgtcaaatggaaggacattttaacacaatcatgtatttgcaccccacatccttcaaaatataaaatgttattggaagggacaatctgtgtgtataagagtgactgagttgagcttgcatgcttaaaatttattatcctgtcaccttgccggtatgcttttggggtgcaattgaatgtgacaagtatggttctaatattctaggaaaggaaaataaaagaaggggttgtctag

SEQ ID NO: 120095 - DNA, 823 bp, Glycine max
  Clone ID: PAT_MRT3847_79453C.1
gcgagaagacgacagaagggattgacacttatgttttctggaatgttcatgagccatctcctggcaattacaattttgaagggaggtacgatctggtacggttcatcaagacagtgcaaagggtggggctctatgtccatcttcgcattggaccttatgtgtatgctgagtggaactttggaggatttccagtttggttgaactatgttcctggcatcagcttcagaacagataatggcccttttaaggccgcaatgcaaggtttcactcagaaaatagtccagatgatgaagaatgaaaagctatttcagtctcagggtggtccaatcattctttctcagattgagaatgagtatggaccagaaagcaggcaattgggagctgatggtcatgcgtacacaaattgggcggcaaagatggctgttggattgggcacaggtgtcccctgggtgatgtgcaagcaagatgatgccccagatccagtgataaatacatgtaatggattttattgtgattatttctctccaaataaaccatacaagcctaacctttggactgagtcttggagtggctggtttacagaatttggtggtccaatttaccagcgacccgttcaggatctagcatttgcagttgctcgtttcgttcaaaagggtggctcacttttcaattactacatgtaccatggaggaacaaattttggacgatcagctggagggccattcattactacaagctatgactatgacgctccaattgatgaatatgggttttgatcagggaacctaaatatgggtcattttgaaggaccttcataaagcta

SEQ ID NO: 120096 - DNA, 262 bp, Glycine max
  unsure (1)..(262): unsure at all n locations
  Clone ID: PAT_MRT3847_79454C.1
cagaaaaccatcatggttttgtcagtnggtattcttnnatttgtagcagtacacgttggtncagtaagagagaggaaaaaagctagaaaacttttcantggtagtaggaaaatacaagcaantgngaacttaattggcagtgtctattgttgtaggttaatagtgaccattattggaatcgtaagtnagggaagctatgggcaaagctacaangtggttgangnggttgttgggaaagangnnagagnaggaccaccgtggc

SEQ ID NO: 120097 - DNA, 4784 bp, Glycine max
  Clone ID: PAT_MRT3847_79455C.1
ccacgcgtccgctttagcgtccgcaagagcgtgggaacaaaagcacaatggtcactaggtacacagttttagatcagattcaagaatagaacccatacctcactctctctctctgtcttatatagtttcaaaactttccctccattcagttgtaggggataaacataaacatagcaagaagctatggaaaccaactcagtttccaagcttctgttacttgtcttcactgttctgtttgttggttctgagttgatccattgcagtgtcacctatgataggaaggccattatcatcaatggccaaaggagaatcctcatctctggctccattcactaccccagaagcacccctgaaatgtgggaggatctaattgggaaggcgaaagacggaggccttgatgtcattgacacttatgttttctggaatgttcatgagccatctcctggcaattacaattttgaagggaggtacgatctggtacggttcatcaagacagtgcaaagggtggggctctatgtccatcttcgcattggaccttatgtgtgtgctgagtggaactttggaggatttccagtttggttgaactatgttcctggcatcagcttcagaacagataatggcccttttaaggccgcaatgcaaggtttcactcagaaaatagtccagatgatgaagaatgaaaagctatttcagtctcagggtggtccaatcattctttctcagattgagaatgagtatggaccagaaagcaggcaattcggctctgctggtcatgcatacacaaattgggctgcaaagatggccgttggattagccacaggtgtcccctgggtgatgtgcaagcaagatgatgccccagatccagtgataaatacatgtaaaggattttattgtgattatttctctccaaataaaccacttcttctctcttcttcctattctcttttggacatcaggtttacagaatttggtggtccaatttatcagcgaccagttcaagatctagcatttgcaggtgctcgtttcgttcaaaagggtggctcacttttcaattactatatgtaccatggaggaacaaattttggacgatcggctggagggccattcattactacaagctatgactatgatgctccaattgatgaatacggtttgatcagggaacctaagtttggccatttgaaggaccttcataaagctattaagcaatgtgaacatgctttggtttcttcagatcccactgtgacatcattaggaacgtatgagcaggctcatgtgttctcttcaaaaaatggagcatgtgcagcttttctagcaaactaccattcgaattctgctgcaagagtgaagttcaataacaggaactatgacttgcctccttggtcaataagtatcctcccagattgtagaacagatgtatttaacactgcaagagtaagttttcaaacttcacagatacaaatgttgcctagcaattctaggttgttatcatgggagacctatgatgaagatgtatcttcgctagccgaaagttccaagattacagcttctggactattagaacagatcagcactaccagagacactagtgactatctatggtatataaccagtgctgacataagttcatcagaatcctttcttagaggaaggaacaagcccagcattactgtgcattcttcaggccatgctgttcatgtgtttgttaatggtcaattttcaggctccgcttttgggacaagtaaagacagaagttgcacatttaatggccctgccaacctacgtgctggaactaataaaatagcacttcttagtgtagctgttggattaccaaatgttggattccattttgaaacatggaaggctgggatcactggagttttgcttaatggacttgatcatggacaaaaagatttgacttggcagaagtggtcataccagattggtctaagaggagaggctatgaatttggtggctcccaatggggtctcatctgttgactgggagaaagactcactagctgtccgaagccagtcacagttgaaatggcacaaggcatatttcaatgcacctgagggagttgaaccattggccttggacctgagcagcatgggaaagggtcaagtatggatcaatggacaaagcatagggagatactggatggtttatgcaaagggttcttgtagttcttgcaactatgctggtacataccggcctgccaagtgccaacttggttgtggacaacctactcaacgatggtatcatgtgccaagatcatggttaaggccaacaaagaacttgatagtagtatttgaggaattgggtgggaatccttggaaaatagctctagtaaaaaggacaacacatactccagcaaactagtgaacccgattcaaagaactgaaaaaacgtgaatatggccagtcaaatggtgatcgacagggcaacgtgcaatgggcccatggtatagaaattggtgatcataatgttgagggaataagttaatgcttggttcaaccgttgatgtcttcatctccaattctacattattcttcattgcataaaaaatagagaaccgtgaataatacaaaaaaaaaggtgtggccaagttgttttttaatttattcttatagtatgtacttaaaaagagaaaataacaaaattcagaggtgtgcttttattcacttgtgtaatgtgtatatctcaaattctcaatacatgtaatgcattttagtggttgccttatacgtttttcataaaattctattaatttgctaatacgaattagtcgctaaattgccatttaatcatacgaaaaaaagacaatgcaacaattttatttttatacatcactcgatgttctgccaactcaatgtccatagagaaaacatccaaactgacttgaaaacattaaaatgcattattctttgtcttctttcatattatgatacttcacttcaagaagaagaagcagcagcaacagcagatgcatgcttggctttggtggcttgaaggtcatccttactagcaccaaccaccttgtccacgatctcgccatctttcaagatgaggaaggctggcatggcctcaatggaatattcctcaccaacaggcctcacttcatccacatccactttgaggaagatcaattcaggagttttctttgcaatctctgcaagaactggggccataaaacggcatggaccacaccaggaagcagtaaaatccaccacaatcagttttttggagtcttttgcattctggagttgcagcttccactcatcaacggtgtggacgccgatgacctgtccctcttccacttcagccattcacaaaatctaagtctagagagacaggaatttttttttttttttttttttttttttttttttttttttttttttttttttgaaagaaaacaatattgaaaatagaattgtaagaaaagtacactcgataaaaatccttctagacaacaggacctccagatcttgtaatgcctaccacaatgttggaggaaacgcagaaaaattcaataaaaaaatgggaaacagaagccactcttccaagttattgaaaattcaatattttatccattcatgaagagcctagaaatgctctcgtctgtggagctaattattttccctcctttcaagggccaccaaaaaaattgaataaagtttggaactccgatcacttttctaaaaaatgaataaaaacctcaaggtttgagggcaattgccaatccaaacctgggatttttatccagggccttggtgtcaatctcaccagaaacagtaaacactgactttggtatgatctcgtgctgcaggagggccccgagctttccatgattgttgagccttgctttgacctgtgtcagagggtcaacagcaaaagaccctcctactgtaaaagtgttctcatttgttgagaactttctcgtgatctctgcaactgcggcactcttcttcaatagatccagatgatggaggtatgatgctttaatgctgtcaccccttgtcaccaaggattactgaagcagaagaatcgggtctcgtgacactaatcccagcagtgtattttgtaaaaccaccagatgaagtgtcatagcctgcctcagcacccaaagcaatggttggggtaccaactgtggcagaaacatcaatgacaggggattgcttcagtgcaacagctgttgttaaggtagcatggtcatggaagtattgaacctctaacttgccagaattataatcaggcagcttaaatgaagcaatagtcttggtggatggaagaacgtcattaaatgtgagggttgtggagatagttgatgcggtgtcaagtttaacatcaataacagtgttcttatacttgtacagtgctgccacatcccctgttgagagtcctcctttcgtcacagatgttgaagtgagggtcactccggagacgctgtaggaggaaacggtgagtttctgatcggagctgtagtccttagtcaaaagatctttggattttttgccgatatcggtgaagagacccggtcccttgctcattttcgattgcagagagacagagagacagagatcttgatgcactaagattcacgaagcagggtgtggcgaggaaatgacgccctttttcttcattttttttatatcttaaatgcgaaatgatgtaatttggaaccgcgaatctggatggttgaactggttttgtctcatcgtgcgtttccatccgttgatttaggaggcgattatgatgcgtgggaccatcatgccctcttc

SEQ ID NO: 120098 - DNA, 431 bp, Glycine max
  unsure (1)..(431): unsure at all n locations
  Clone ID: PAT_MRT3847_79456C.1
ggtaaggctttttttttttnnttttttttttttttttttttttttttttttttnnaacctgggaacccttttgaaaatttggtctttaaatcggggcttcttaaanaaattgggggggnntaaaaaagaagaaccttttgggtttttttttttgggggggggggaaggaaatttggggggggggttnccaaaaaaaanannttccggggggtgaggggggagaatttttttaaaaaaaaatttttgggcgcccccattttatttttggaaaaagaaaggttcagacaggggatgnnncncccagggaattnntttttaaaaagggaaaatttttctttgtggaataaagggaaccgaacccnnggggttgtttttttatcaaaggggggcaattttattttgggcctggggggaaaacaaaccccaatttt

SEQ ID NO: 120099 - DNA, 147 bp, Glycine max
  Clone ID: PAT_MRT3847_79457C.1
tcttgcgttcacgcggccggttttggattgttgataaattgtatccattcatgtagctagtaatacctaggcctagtgattatttgcacaattaggaacatatataatgaataatacagtggtgggtctgtcatattcttagttgac

SEQ ID NO: 120100 - DNA, 933 bp, Glycine max
  Clone ID: PAT_MRT3847_79458C.1
tgcagctatagccatgatggcttcttccctttgagagatttcaccacacaaaaattagtgaagagagacttgttagagattatcatcatagtaaatttcccagatagcaaaattaatggaggttcaatctcctgcagcaaaacgtcactatgacatcaccatgtcaagaagaacaaggaaacaacaacaacaacaacaacaacaatttccagtgcaaggcaatgagaaaaccaaatcagaaatggatgatgaagcaacaacaccaaaggatgttcatgttcatgtcacagaggaaacaaaatcttctcaaactaatgtttctattgctgatgaggtgaaagagggtggtggtgagagtgaccacaaaagcttgaagcaactcatcatatgagatgatgatcacaaagaatcaaagaaaaagggtaaccataataacactaataataagaataatagtgatgatcatgacagaggtggcaaaggaggatcaagaaactcacttggtgaacatttcactgaggaagagaagcagcataatcttcagctggttaggatgcaacagaataaagacaacctccaaggcttgaagttcaagaagttggtgcgtcgctacgccaaagttttggggcatttgatgaaggctaagcgtgatccctcatctaggaggtgatgctgggaaaaaacctgttttcaagttatcaacttagccagggaaaatttttggagttttactagctggttattaatttggttggttgatctataatttctatgtactattattatgtgcttatgttttggccaacaaaataccttagcttttatttctcgatcgatctcatgttattcttatcatttgtgtatcccttattcatgcatatggcttattatattttatatatgatcaattgaatcattcttatatgtgtttta

SEQ ID NO: 120101 - DNA, 663 bp, Glycine max
  Clone ID: PAT_MRT3847_79459C.1
cacagtctgaacgccttggctattaatttgccaagtggatgggagtccaaactccacagggtagagtcattcacaatacctgtttagaatggcaacaaataaaggaggctgcagaaaaagctagagaagcagcaaattctgagggtgatgaaattggtgaagtgacatgttttgaacttttggaagcacttgagcttagccgatgtctattttttatgagttatgtacatggttcacccttgcttgaaaattccagtgcatttgagtcaagggaatctgcagaaagaacatcagaagctcttggcagggtactgatgttggaccttgtcatcagaaacgaagatagacttccttgccatgagcttaaatggcgaggaaatcctgcaaatttgttgttggctggaaagaatatctgtgcaaatacagatgcactagaatcagcttttgattctgcagttaaccgatatagaccaaaggtgatcagggcatttcagaaagaaagaaagtcaacttcagtagattgcagactcaattctcataatcccggcttgatatcacaatcttatgatctctcagacatcacagaatcaccaagatctgctgacatgagctttcaaacatcaggagaatcactgtcttccgactttaacattggagctattg

SEQ ID NO: 120102 - DNA, 251 bp, Glycine max
  Clone ID: PAT_MRT3847_7945C.1
ttttgtttactcatgatcaatataaatccatggcgatataccactcctaggtaggaaaatttaaaatcgaccttgctcattacacgtctactaaatatgtgagcttctcaaaacagcctatcgcgtagcaacaagaaaaaattgtaaataatgtactatctgtgctactttcttatcctaaggttggttgttattgccatacacctgtttggctagagacgataaattaggcggtcaccgactcgtgagca

SEQ ID NO: 120103 - DNA, 1170 bp, Glycine max
  Clone ID: PAT_MRT3847_79460C.1
gaacttggtgctgctcgagtgaacaaggatggggcagatgtcaaagagctcaaagaacagatagcctgcctcaaggcagcattggcaagaaaggaaggtgaatcagaacattctttatcaggcagctctgaaaaatataggacaatggctagtgagctatcaccttatcatgcaaaccaacagggtgctgatattgtgagcccagggtgccggcaaccaatgcttgatgtaggcaatatagagcttcacagtagtaccacattgagacaaaaaactcagagctatgattttgatgagatgtcaacgaattcaccgccctggcccccggtgaataatcctagacaactctatggggatgatgacagagaaactggctcgaaagagtgggtagataaagtcatggtaaacaagcaagatgctaataaaactgagaacatcttagggtgttgggaagctcacagtgggaacttatccgatgtcttttatcaaaaatatctccaaggttcttccaaaatgttctcagaacgatcctacaacatgttcatgggaggcaacaaccagtttaacgttgctggttcagatgacatggatgatcttgatgatacaaccactgattcctcggaacctgacttgctttggcaatttaatcattccaaacttaccagcatagccaatggcaacggatcaaaggctaggagacctgtctcaaagcccacaaatagcccagtattgagcaagaataatgttcattcttctcttggtccttcaccttcaaggaaacaatcaaacagtgtctcacatcgaacagcaagacatccacctccagttgacatgaaacgtaaaactgggagtagaaagtaaacttgttttgaaacgttaaaagggtgatttctatttttattttttatttctttccccctttttctttttttcaattttttagatggagggcttttgcaataatatttctttttattttttattttttattttttgggtttatgcttgtaagttttgtaacttgtatttacgcagataatggagcaataatgcccgttgcttgtaccatgggtccatgacattcttttcattttacactgtagcttttaggtgatgtaaaaatttcaaaaccactgaaacgatcaaaattgcaacaatggtttgatttgt

SEQ ID NO: 120104 - DNA, 102 bp, Glycine max
  Clone ID: PAT_MRT3847_79461C.1
aaataaagaatgctattttctgtggcaatcagcaactgatagagagatgaatctgcatttattgctcaaaattcattttgtacaatacatcgtatactaact

SEQ ID NO: 120105 - DNA, 972 bp, Glycine max
  Clone ID: PAT_MRT3847_79462C.1
atccacatccacctacacaatcaaacaaacctcttttatatatcactcactcctctcctttcccataattaaaagattcatgatgcttacactctcactctctgtgcctctgcagaagcaatacccattttccatctctcagcttccttcctctgcttacattactctctgcaaatggggtcttttcattctcagcctactcctcaccgctctcatcttccgcttccgccaaaacgcaactccctttcctcttatcatcgctcattgtgattatagccacaccgacgatgacgacgaaatctactccacatcggagtttgaagatgacgatgacgaagaagaagaagaagaggaagaagaagaagaagaagaaagaagggatgagtatttcagagtcagaggttctaccaacgacgaacgatgtcgaagcattggcgatttcttatctctttcagaaatcgccaacaccaaaagcgtcgttaagttatgggacaccatagggtttgggctagggtttggttttgagcattttgaccgttcatctgaaggaagcagcgtcgtctccgtttacgacggggagcttcctgatccggcggtggtggtttccgccggccaaaacgcgtcggggaatttagcggtgaggatttgggacacgcggctccggcggcggataccggcgatgatggcggagtggggaccgagccttgggaagaccgttggagttgaatccagcgaagtacacaaggttttcgtcaaagatgacggccgttacgagtttacggttggtaacatgagaaatgccatgtcgccgttacaatatgtaacggattcacacctcgatttgtggtggcctaattccttaattgtgaaaatttaaatacaaaaaacaatatatttgcttgtacagcatttttatttttattttatgtaaaatagtggcaattaaattaaaatatataaaatttcttacaa

SEQ ID NO: 120106 - DNA, 177 bp, Glycine max
  Clone ID: PAT_MRT3847_79463C.1
gaattctttacgaggtgcgctttctcttttataattttgtttcttgtctttcttgctttggagtgggtccccatcccatgatgtcctttcttatttgcaactgtgcaccccactatttgacatgccaatcgtgtcactggccattatactcctctaattttgcacaaaatatttagc

SEQ ID NO: 120107 - DNA, 458 bp, Glycine max
  unsure (1)..(458): unsure at all n locations
  Clone ID: PAT_MRT3847_79464C.1
cgagaagacgacagaagggataatgggaataaccaaataatacacataattcacaaataaaaacaaggaaaacaaaaataaaatgcaaaagccaaattgcatttatcgatacgcaacaagggttttcttatgttaaaataatcatcatatgcgcgttcatgttttgcgtttggattccatgagaaaaactttttttttctcctagaatagtcatccattctttgtttctcgttcacgtgtttattttttttatggctgttggttttgtttccttatgcatgccatgattcaatgccatacatgatatacatgtgatacataatctttgactctattatatcattatacgaaaaaaaaattccaaacttacaatcataattataattgcgaagataaaatcccaaaataaaattagggttgatgtaacaaaataatacaggtataacacanaccaaata

SEQ ID NO: 120108 - DNA, 247 bp, Glycine max
  Clone ID: PAT_MRT3847_79465C.1
ggccgacgatgaggttgatgcggcagcagcggggggggcaccgccgccgaagaaaacaacgttcaaaaaattcatcttggggggcgtggttctggaccctcttgtggtcatgtccaccgaccagctgatgaagatgttcattgctccagcacttaggatgctgcaaagaggtctgacgaagaaccccgtggcctttattaagaagctccgcgcttctaaggaggcaccaccaggtggtgagaagcca

SEQ ID NO: 120109 - DNA, 315 bp, Glycine max
  unsure (1)..(315): unsure at all n locations
  Clone ID: PAT_MRT3847_79466C.1
gaagncggctcgagggccccaggtccagaattacaggcctgattttacacacaccaggagggtataccggtgggaatgttggggacctcactgttggattaatagatgtactccgcaacaaagggtactaacccaccatgcaattgcatgtccatccacccactgtcgagggcatactaccatagatagtgtgagcaataccatgcctctatgcagttgcacatattatgcagactatatatgtaacaaaactgacattgataatgagtcaaacgctgggtctgatgcagactcacataaaacctgactcctgtc

SEQ ID NO: 120110 - DNA, 485 bp, Glycine max
  Clone ID: PAT_MRT3847_79467C.1
tttttttttttttttttttttttttttttttttttacatcaattactggcgacgggatcctggatccgcatgatatttatttctacaatttgatcatagggaataagttggatcccgatacaacagataacaattaattagctaaagagaaagaaagaaagaaaaatatgttgcaattaaaaatcatgctatgctaattagtcctaaaaaaaacatattaaagatgaaaattgattatgcacccagtttgacaaaagtacatgattgttaagctgcagtgagggctttatccttcaatagggattctggtggccttcttccaaaaaccaaagcaccattaaacgtggcagaagtcaaatgatccccacacacatacaaacccgacttaacttttgggtctttctttaaatccgggggcgggcactgattgggctgggccaacccgattcgataagtcctcaaatgggtccatttcgaaaccattt

SEQ ID NO: 120111 - DNA, 437 bp, Glycine max
  Clone ID: PAT_MRT3847_79468C.1
aagcaaaagataagaaacccctttcattatgcagggaaaggactaaaattttaatggttaaggggccggggggaaaactggacaaaaaaaataaagggggacccttaaaaagggccctccgggggtggacaggtggtacaaggaaatcaactaaactatcaggggggtatggacacacccccaaaaattttttggagtcagggaaaaaaaaaacttcatagccgggggactcgggggaccaccactggaaaaaacttatttaaaccactggcaggaagccactagcacccttatttacataactatcaattaccctaaaaattacatcttcaaaattcttcaattagggaccagttaaaagagggcaattatgaaagggggaaagatccttgaccctctggtatgggaaacaagagcttctctttaatcctttcttt

SEQ ID NO: 120112 - DNA, 163 bp, Glycine max
  Clone ID: PAT_MRT3847_79469C.1
ccatgggatgccattatgatttgctcactagctgtttgataaaatgctccagctgaatctttttgtataagatgtggttttcgtccgtttgatagtgtgcactgttagaattatcgtgtgcttaatgtaatcaacttaaggcatcagttccctgagctagtgg

SEQ ID NO: 120113 - DNA, 224 bp, Glycine max
  Clone ID: PAT_MRT3847_7946C.1
atcatcgcgtgatacagtaggtacatgacgctgcagagggtagtgacggtaccgcatataatcttggagatggctgatattccaccagatgattactcttggagaaagtattgacataaacccattaaaggagcacctcatccaatgggtcactacgagtgcagtcgtgtgacagggtgtccagcgcgcaaacatgtggaacgagctttgggtgatcccgctat

SEQ ID NO: 120114 - DNA, 173 bp, Glycine max
  Clone ID: PAT_MRT3847_79470C.1
cccacgcgtccgctcacgggaaatgctgtcattcagaacatatattgctcgatatgacaacgagtcactcattgtcgtgtgttgatttaacactgaggcatacagcgagctaatctctttgagaatgaccaattcccatcgctcagaagagtcttctagtaacttctaagagg

SEQ ID NO: 120115 - DNA, 110 bp, Glycine max
  unsure (1)..(110): unsure at all n locations
  Clone ID: PAT_MRT3847_79471C.1
ctcttccatttctctacgcggtntctcttgtcttccatgccgtgacttgcttccaacgtntatatgctgtgactgtcactgntatagcgagaaatntcacannnatgncg

SEQ ID NO: 120116 - DNA, 322 bp, Glycine max
  Clone ID: PAT_MRT3847_79472C.1
gattcacagattagtttgttgatcgagacaaccatcatcagtgtgatgaacatgatagtgtccttggtttcttcgctgctacaattttggcatcatggcaatgccatgcttactacatgttccctctccgattgaacactggctatggtgcccgtactccggaggtaaaatgcacatattggaagcctgctgtgaaagcacacatcatcattggatttgaaactattcctgaacagtgcgttgatgcagcaatggattacatccatgacgaatattatatatcatactccacaacagttaaccagcaagcttacatttatgc

SEQ ID NO: 120117 - DNA, 563 bp, Glycine max
  Clone ID: PAT_MRT3847_79473C.1
gggggcaaaagttttgcccccaaaggtaaaattattcagcccggggattcaacacccggccgaaaaaaagaaccggcccaaaaaaaacttttttgaacaagaacaaaaaagggggggcaactacaaagtctatttcagggggaaacatcccacacccaaattgtttatttgcagggggggcccctgaaacttaaaggccttttttatttacttttaaaaaaaacttataaaaaatatcggaaacaaacaagttttgacccacaaaaaaacccaccatttttggaaaacccccaacgggaaaagggaaaaccccccccagctccttaaaaacattaaagggttcaaacccaaaaaaaattttgaattttgggaacccgaaatcccccacttccaatttgttattaagaaacttgggttccaaaaacccaaatttaaaagccaactttttagccaaaggtaacagcccattttttgtttttggaaggaaaaaaacatggggaaatggcccttatcttcaccttgcttggagggaaaaccaagggctttgaaaccatcaaaagccc

SEQ ID NO: 120118 - DNA, 252 bp, Glycine max
  Clone ID: PAT_MRT3847_79474C.1
tacggctgcgagacgacagaagggatttactactcgtaaagactcctagaaagaatatgtgccgcaaaaaaaagagcttacgatacacgcaatatccgccagcccactaggtcccccatggaccggggatttaattcgggcccgggaccttcgggatcgcaagcttgccaaaaggcgggcccatttcaacttccgggaaaccggggactgacgatttcccggcgaggacttataccccggtcacattcccaa

SEQ ID NO: 120119 - DNA, 463 bp, Glycine max
  Clone ID: PAT_MRT3847_79475C.1
gagcaagctcaattatgaaactgacgacaagccaatgctgtcactggatttgatgcaagaattaagctgcaaccttgggacaatacaagctactgtgattggtaagctctataatgagttggaaaaaggaattccaagcatggttgggcatttcctatcctcacttgcttcattacactctatgatcatatgtgtgagcattaattatgttccaggtcccatggtgcctcatagtgaaaggttcctctttccgccagtttgtcagagaagctatcatttatttcgctgtattgccaatcatggtgacaaagatgtttcctcagaaaatcactcaacgtattatccactgttgatggagagtctacagaacgttatacgtctcgatgctcaatataggtctgctgagagtgaatgggatgaccaacttgactatcaggatgatctctatagtgctacggttctt

SEQ ID NO: 120120 - DNA, 304 bp, Glycine max
  Clone ID: PAT_MRT3847_79476C.1
aaaaaaaaaaaaggcagtttattgattccattgcaaaattctacttttttacaggctaactacaaaaccaaacaatggttccggggttaactgaaaatcccaaattaactcccccccccaatagctgatcaactgggggccttaaagatctccccggggaactacttggaaccttgattcttactattgggttggccattggctttttttcaccaaaagccctccctggggcctccaacccgcccaaaataactccctttttggggatggtactaaagcaagccttaacactcccactggtttg

SEQ ID NO: 120121 - DNA, 1011 bp, Glycine max
  Clone ID: PAT_MRT3847_79477C.1
ctcccatcaggtgctcgcgtgtccctctgcttctttcttcttttccttcctccttcttgtgcagggctacctgttccgtttcctggatggtgggattgaggccgatcttcttcttcatctttcttctccttttctattcttggtttcttcttttagaaatgaacgtgaagggtatcatggatggtaaaattggagctgggaacaccaattgtattgttaaggaggatgtgaatgatgattcgatatccattggatcactatcagaagattcaatgaacacggtgtgttcattttattcatcagaataggcagaggatgccctataaagagaggcttgtctatgttttatcaaggcaaggctcagtctttcagttctctagctagcgtggagagcatagaggatcttcctaagaagaaagagagattttatatttagaaagggaaatcatgcaaaagcttttctctagcaagcgtggagagctgaggggatcttccttcgttcactccaaaggctacaatatcaaagaaagcttcgagagcaactttcgcgtctgcagtgctaactaaaagagggagtttccttggaggctccagaacttccttttctatacagaagaacttttgaaatcctccaaccttgttaattagagcttggttattatttcatgcacagaatagggaaaattttgagtccctcaccttcagcttaattttctgacatgaagtcgtattgttatttggtaattaattaatatacatatggttcattagtatatattattactagctcacgaagaagtcatgtcatattgtttattggtaaatgattaatatacatatgattcattaaaaagatatgattgctaatttgcacatgcatgcaaggacttttttagttagttgttcgtgataatattaaaaccggacgcgtggtgctaattagcacatatatatgcaaggatttttaggtagttgctcgtgataattgagagataggctagctgtggaata

SEQ ID NO: 120122 - DNA, 227 bp, Glycine max
  Clone ID: PAT_MRT3847_79478C.1
acgcgtccgcccacgcgttcggtcagaactactctgattagctaactagacttagctagcaaatggggcagcgtgctcgctcctcttgagccgcttaaacggttcaaaaatcacgccaatgagaggcaccgcttaggcacaaaccctgatgaagctgcttgcaagtccttcattcaaaaagctcacagaaacatagcacgttgggtgtatctgagcacccttaacac

SEQ ID NO: 120123 - DNA, 2368 bp, Glycine max
  Clone ID: PAT_MRT3847_79479C.1
ctcgagccgttcttgcaaacggacccatacatgaaatagaatctcaattcaattcctcttcctcttcctcctcctctgtccctatcaatctcttttgtaaacttctctttggactcttccttttgcatcaggctttctcccgatactcctcccttctctgcacccaacgaaaagcacaattctttttctccttttcgataaccccatcacacattctgcgtctaaaatgccaaaataataccccccttgtcttttccttcttgctgggcttctccctttagagctcttttctccacactcatcaatcgcacaagacaattccctgctcaaaatcctgactatgtctctaggttttgtgaacgaactatcctcaaaatctgtttcccacgttgtggaggagttccggaagcatctaacactgtagttcttacctaaacattattactctttgaactgcttcagtgagtgctttctgttgttgttgttgtcgttgttgtttccaagatgggttgtgtccatggcaagtgttgctgtggtgacagttcttcatcagatgatggttctagggattaccgagaacttgacttcattaatggccaccccacgcgtccgctcgctcagagatcattgaagcatgttcctgttccttcccacaacttcattttggagtacactttcctcagtcagcgggggtactaccctgattcacctgataaagaaaaccaagatagtttctgcatcactacacaactccaaggtaaccccaatgtccatttctttggtgtctatgatgggcatggccaatttggtagccagtgttcgaattttgttaagcataggctggttgagaagttgtcaaatgaccctgcattgttggaggaccctgttcaggcttacaattctgcattcttggcaacaaatcaagaattgcgtagtactagtgagattgatgattctatgagtggcaccaccgcgattacggtgcttgttattggtgacactctttatgttgctaatcgagctgattctagagccgtgctggctgttaaggatggaaaccacattgttgctgaggacttgtcctctgatcagacaccatttcggagggatgaatatgagagagtgaagctttgtggggcgagggtgttaagtgttgatcaagtggaagggctaaaggatccagatatccagcattggggtgatgaagagagtcggggtggcgatcctccaagattgtgggttcctaatgggatgtatcctggaactgcatttacaaggagtataggggataatttggcagagacaattggtgtcattgctattccggaggtgaaaacggttcagcttacacctaatcatcttttctttgttgtggcaagtgatggcatatttgaattcctgacaagccaaactgttgttgatatggcagcaagctatatggatcctcgtgatgcatgttcagctattgcagagaagtcgtataaactatggttggaacttgagaacagaacagatgatataacaatcatcattgttcagatcaaaggtctctctaattcaggtacatctggagttggatccgatgagatcaatggtgggggtactgtaatgaattccaggacaggaactcatgagatatctgctacccctggatctaatgtttatcgttctgtcagaaacagtttatccgatttgcactcctgtcagcatgtggcttcagtgacgagcgcagcgatagaggttcactctccagcatgtccaagaccaattgaatgatgattgaagagaggctttactgaagcttcatcaagtctctttgcagtttctcccaagtggtacatttccacgttccaacttcctgagcattgtgcattactgttgtacatttactggtcactacattttaggctgccaacttgccagcttaaggtgctctgcattatcttggcagcaaaaggaattttcagaatgtaaaaatcacagttggtatttggtaaaattcaaatttcatgcagaaaccaaacccctcagaggagaacacttgtgctcaccttcctgtgacgcaattgcacctccactctacagatttgatctttggaaggggaatcaataacgagcttgaaataaaaggaaggtggtatacaaggagctgtgactgtgactatcatttgcaatggatcgttgaagaaactcataggatggtcgatggtaaacttgggaggcagacagatgctactcagcatttaaattcattgtcctcattatcatgtagatgtggatcaaacctttgtctggattgtcgattgatagaatttcaagattaatttcatattgcccaaaaaaaaaaaaaaaaagaaaaaaaaaaaaa

SEQ ID NO: 120124 - DNA, 799 bp, Glycine max
  Clone ID: PAT_MRT3847_7947C.1
ccacgcgtccgacatttaacagtctctttcttcttattgttcatgtaatagtaataatttcatggctattccatctcctaaaattttcctcctcttaacattcttcttctcacattctatagctgtgaagtcctccaatgtttccacaaccccaacattgcatgcaaccttcccatttcctgaagttagcagcttcaattcatctaagctttcaatctcaataaacataaatccaaacatcatcaacacccttcttcagtccctccaagcagcaatatctgaagccacaaaactatctgatctattaaacaacgctggacataacatcatagagaacaaaataggagcagtccaagactgtagagaacttcaacaatccaccttagcttccttaaaaagatcactatcaggaatccgttcccaagactccagaaaactagttgatgcaagaacctacctcagtgcagcactcaccaacaaggacacgtgtctagagagcttagattctgcttctggtacccttaagccagttctagtgaattctgtgatcaactcttacaaagatgtcagtgactctctctcaatgctccccaagcctgagaggaaggcttccaaaggacacaagaaccggcgtttgttggggggtgtcaacgaaaaatcgccgtctcttgcaaagcatgatgggagagagcttgttgtggctgcagatggaactgggaactttagcaccatcactgagcctatcaactttgctccgaataacagtggtggtaggacagttatctatgtcaaagaaggg

SEQ ID NO: 120125 - DNA, 489 bp, Glycine max
  Clone ID: PAT_MRT3847_79480C.1
cccacgcgtgcggaccagcttgcgaagctggtttgcaattgtatggggggttcagctgatgtatgggaagatgatctttttgctatctggagggagcgcattaatgatctaagagattgcttaggatctgttgttgtaccaattggcagtctatctactggactttgcaggcatcgtgctgtattattcaaagtactagctgacaccattgatttgccttgtcgcattgctaagggctgtaaatattgttcaagagatgatgcctcctcatgtcttgttcgatttggacttgacagggaatacatgggtgatcttattgggaagcccagttgcttatgcaagcctgattacacgatcaatggtccatttaacatatcatatgcctcacccttactctttggtcatatgggtcgagcatggcctaccattggtctcaggtcactggccaaacaatatttatcagattggatgtctgctgaacttggcttt

SEQ ID NO: 120126 - DNA, 928 bp, Glycine max
  unsure (1)..(928): unsure at all n locations
  Clone ID: PAT_MRT3847_79481C.1
ctggccgcgagtcagcgaataacagccttgatcttccaagtaacttaacttccgtaaatggttgacagatacaagaaaagtagaaagttgaaagagagagaaacatcgagctgcagttctgttctagggttacacttgtttccattgctggtaaagaatctccaatcttccaacactgcgtcactcgctttgttcccaattcagtccacaatttactttttccactttcccctaacctcccactcggaactcgtcgttacctatcgataatgaatttggggttacctcgctcacatccatcggtgtttactctgtaattaggaaccatgtcgaggcccatgttgcttgttttcttgctgattatacttataatcacctcacagttcgagtggaagcagcagcttgtggccgatgttgactctaaccccagcgtgtcgcagaagcagcatcagatttccaaggctggagaaaccgttaaggagaagattattttagtgcaagagaagaatattcgaagactgaatgagctagttcggcatctccaggagcaactgcagcagtgtagaggacgcaatggaactataaatggcactgtaagccctctagctgagcggattcttgagcttgagcgacagcaaattttagaggattaagcaaatgcagcaagtatggtaaatgatgttcattgttatgctcaagctgtgaagttgttccttaattcgtttggagtgaacgttgtagaagatttgttccctatctgatcaattatgattttcaactctatctcaatggaaagtgaagtattgtaatcttgctcaaaaagttgttgaatgatatagaagcattatatcttataccggttagatcgtttctgtagtttaacattttcacatttctctcttgacatctaatactgccgtcctttnng

SEQ ID NO: 120127 - DNA, 383 bp, Glycine max
  Clone ID: PAT_MRT3847_79482C.1
ggctcgaggtgtggtaccctgacccgaactagttgccggcgccgcttcacctaccgcaacacccatgatcattcccgagccgaaccttgtagtgatctgtaatttcgtttttgaagatggagtaaggtgcgctaagaaagacttctgtctggcagatcgcccatagattgatgtgccatatctgcacgtgatgaagctgatgcagcgctattaatccagactagatctcgagggacacatttccgtggatgcactattcctggtggctgaccaggcgacggaaacgagatactcatgacatacctgaaccttccttacgaaataggccctgccacttgtgacaatcaggccgagcccgctggacgaccattctgcggcccacc

SEQ ID NO: 120128 - DNA, 469 bp, Glycine max
  Clone ID: PAT_MRT3847_79483C.1
agccagtaagttacttgaaaccaccctttggaattgtcactagaaggggactttaggatcttttccattagattcctaaatgaggggcacatagaaaacttactttggcatattccttgattgcctcatgcgtctcttcatggcatcacaatggacatgtcattcctgcatttttcgtttatcatattcgtgcattgcatttgcataaatcattgcattaccacacatctgcatttagcatgctcttttgttctaacaactgcatacattttattttcatcatttgcatatcatgatcactcatgcatgacccttgcattttccctctgcataaaaaagggggaaaacaaaacaaaaaataaataaataaaacaaaaaagaaagccacaccactttcttagttacatgtgtacttttaatggctataaaccaaccttattgggattatacacccatttcaaaaagaaat

SEQ ID NO: 120129 - DNA, 386 bp, Glycine max
  Clone ID: PAT_MRT3847_79484C.1
actgctgcgagaagacgacagaaggggggaggtagaatagaaacgaaaaatgtttgcatgggaaaagagcagcgggagtggaagatatgcatcgtgagagtggaggcaagcaggcaaacacgagattgagacggcaatagagtggcatagaggaaacgaaaaggaactgattgggaagaccatgacaagggaacgaagcgtgaaaagacgctgctcactgaactaaagtgcgtgatcttacatctctcctttggcaaagaggaaggactgttaataaatccccactgcatggaaattcgaacacttgctgcgcttgtacgggaaatgggtcactacaaatacctgaggatcccacgcgagggaaaaagtggtgacaatcatcttga

SEQ ID NO: 120130 - DNA, 266 bp, Glycine max
  Clone ID: PAT_MRT3847_79485C.1
ctggaggcttcactaactgggaatcccttgatcagcttgtggcatcacaactgaatggacaaactccgacatattgcagtgatttgcaattccccgcatttctatcatcctcatacattgctacaacaacacacattgctcccacaatacaggattaccccagctacgacattgacctgtggaaccactgtgcttcgcgcgtgtccaacactccaaatgtaacactctaatcaaatccttcttttaatttcttcccatgtcagatt

SEQ ID NO: 120131 - DNA, 328 bp, Glycine max
  Clone ID: PAT_MRT3847_79486C.1
ctcacgcgtccgattgctctttaagctgcgttacttgttaattcatacccgtgggacactcatttatcgatgtgcgtctggctaacgtcctaaaatggagtacatgaaccagcaacctatatatgtacagcttcaatgctgataatatgataccttgcatccactacatcactgttcttgcaaattcatgtggccaaaacattcaagactatatagccgtaaagctagtcgtatatacatgcaaatttgatgactagtccaacctgctctacactatctatggaacaactatagccgatttaagggcaattggatatgacctttacta

SEQ ID NO: 120132 - DNA, 562 bp, Glycine max
  Clone ID: PAT_MRT3847_79487C.1
ccctctcgtccggtttgagattttatagacaaaatgttatgtacaaatatttattcaatcttcttttataaatggctgccaaactcaacacggcttatctgagctctcatcgagggataatcaaaattttgcagattgatttcgggctcattgtttgcactttactttgcatcggcagttacggctttttcagcggatgcttttacgacggaaaaatcggtgccgccagcggaattaacgcagtcatcgccatactgaacattgttttctttgtgctcaatttgatggacactcacaacaacaaatgggaacgcatttacacactcgtggcactcattcttttcgtcgtagcatttgcgctgatgctatggaatctgctggagacccattcgtactatggccagaccaaaataccggcgacggtgtttattggcatccaaacggccctcttcattcgagactaccgaattctgcacggccaagcctatacatagcgaagaaaagatcaaattaaacgataatgaatagaatgaatgatcgctgaaatatgccaaattccttt

SEQ ID NO: 120133 - DNA, 492 bp, Glycine max
  Clone ID: PAT_MRT3847_79488C.1
tatcacatgatttatgattaattcacaatataaaaaattctaattaaaactatcctctaaaaatttagactagagtaaaatagtttattttgacaaacaatttttttatagaaaaaaattactactatgtgatttcctaatggaaaaatcaacgacacaggttcaactatatggctatatcagatgaaaggcagagaagcatgccaacgataagagacagagaagctgggcaaatcctagcattcccagaagcagttctattaaccagaccaatcagccaaaaattcagaggagaggtatgcaatattacaaaattgtgtgaaacattcatcaatttttagttaataactaatttttgtctaataatatattaattgattatttatgatgagattttttctttcaattatatgattttttcacatacgactcgaacttgagatataaggatcatatttaatatcacttggatcgataactatcaataataat

SEQ ID NO: 120134 - DNA, 2123 bp, Glycine max
  Clone ID: PAT_MRT3847_79489C.1
aaagttattgacgtgaaataagaataaggcctttgtctagttgctacgacacaggcatgaaaattaattgcagaaaattaatacgtgaacataatctttatatatttttggggcttgcaaagattgcagagacattttatgggtctacaagggattctcacgtcaaaattttatcgcgtgtaaatgctctattcttgtatgttctgatatataattttgactggatatgaccgaaatgggatggtctctggctctacaaaattttcaaatcacaagctcatgtatgaaaaaagagatggcactaggtcaactacagaccaggcaagccctgcatactgaacaaatctaattccggtatcaacatcgaatgccttgtgctgggaaaggagcttttgcaagtaaccttgtttaagcttatcagacattttacctgtcacagatccattcagtgtaggtatatagccggttgattttattgggatgcccaaggtgttcgctaccacaggaatggtccattttgcgagagtcttactgcagaacttcacaattagaattgtaggtattcccaatagcatccttcccagaaatacaggtatagtcagctctgacgagaacaaacgaggaacattggcatggtgaaattgatggtatgtttgttgcaccccagagacaattcccaatgcaacaccatcgaaagcagtgtgatactcaaagcttggagttggaagttcaggagttggataagcaaaaagcaagagaaagctcaaggcagcccaaaaggacgtaacattttgtcctgagatcacaaaactgtccatgtattcatcaaccgtaagccaaaatgcaaggacaacgagtccaataagaaggccagcaagaacatcaaccacactatgcatgccaagataaattcttcccaaaccaatgaaaaacaccagcatgcaggcaagagaaactccaagataagtaacataggcaccttgaatttgagtatgagtcaggacatagcgcaaaaggtagccagataagcaaactgtgttaagtgtgtgagaagaaggcaatccatattctaacgcattatcctcttcatcttttgtggcagttactctcttgacaggtggagaagcaggtcttggagctgaacccacatcctttgtgcagttcccaatataatcacaaaacgccatcaacaacgtcatctgcctcgccaatttgccatgaccactccagaatagcagagggagaaaagcagtgtaaaagggcacagaaacaacgcaagacaacccagagaaaagtgtatccaggaacccaaacccgtaactctggatcttgaggataataggggtttgagtgtcaacgtgatgagtaacccaaggttgtaagaaagacctaagtttgcgagtagcgttaaggtatgaagcagaaacaagccagaagattattccacctaaaaccgcaccttgccacactgctgcaccctcaccctccattcgtctttcttctctctcttgtgttttgggggaaaagagaagaagagaggaaccgaagaaataagaaaggagactcgctggaacaaaaatggctgaatcaaaattattggaccgtggaagttggaagaaacggtattctcaacactcaactttatttctttctctcacaatataaaaaaaagcggtgatcggatcttgcttctctattcggcgtttctattttgctttgaatgacaagaaaaacggaagatttttttctgggccatgaattttatattctttgaactatggactatgatccacggattcggtggaatttggctggcggaaggagaagcttgaaatttcaatgcgtagtcaatggtgaaaaatcttctttcttctttttttgtggaaattgtaagggacaaggattttttttttttttcaagggacaaggattcttaagttaatttatttctttctgcccacaagtaaaataaaccaactatcttggcttaattttttaggtcacacgtattctaaattacattttctgtttttgcttctcttctcatcttcattctatttttttttttacgattttggtttggctttgaggatgggttgggtagccatgctttatctcgcctt

SEQ ID NO: 120135 - DNA, 579 bp, Glycine max
  unsure (1)..(579): unsure at all n locations
  Clone ID: PAT_MRT3847_7948C.1
ccacgcgtccgcaactgctcatgtttgatgcaaattgccaatacaatattatgctccctgatattattttgttgaaggaaatttgaggcccctgggcaaatagcttttggctacggctggtggactacatatagtacaaacaggaacattatgttatcaggtacttgggtgcaatacagtttgcctctagggtacctaaagtttggagttgctaagcagaatcggacgggtgttttggtttctgggatatttgtctgcgtcatgtaaatttgagatatttatctgcctcaggctttacatgagttgattgttttctgtaaggcatagggaattttaggcagcaattactatacttctctatttgattaaccgttaagctgtacagaaaggaatgccattgtgtatttattagtttctcattaattgcatatatgacagaagacacagatatacaagttagcttccaaatgtacatatctaaaaactagtatgataatanagagtggtttttttttttttttgtattgacataaggatgttaaaaagtttcatcagcatcacttggtaacccagttactc

SEQ ID NO: 120136 - DNA, 885 bp, Glycine max
  Clone ID: PAT_MRT3847_79490C.1
cgcgcactttctctcttctctccgcatctccaactctctctctcacacacgcactctgaaacaaaaaaatagaaatagaaaaaaaaaacaaaagttaaaaaaaaaggttagttattcttcttcaaccacgccatggagggtcttccccaaggttaccgtcccaacgttggtgtctgtctcatcaactccgatgatcagatttttgtggcttctaggttgaatgtcccaggagcatggcaaatgcctcaggggggaattgaagatggtgaagaacccaaatctgctgccattagggaacttcgagaagaaactggaatagtatctgctgagataattgctgaggttcagaaatggttgacatatgacttccctcctgctgtgaaggctaaagtcaatcgtctgtggggaggtgaatggcatggacaggcgcaaaagtggtttcttatgagattaacaaaagatgacagtgaggtcaacttaactaatggggaagcagaacctgaatttgcagaatggaaatgggcagaccctgaagaagttattgagcaggcagtggactacaagagaccaacttatgaagaggttataagaaccttcaagccttactttcaagggagtggaatatctgccaaatgtaaatcaacaaagtggtgaatgttatgagtgtgcattgtagttttatccattttcttatctaatttcactgagtttggatagcactcagctatttgtaaagggatgatagttagaactgtccattaggtacttgccttcttgtaataataagctatgtgcaaatgcctaatttctattctaaacctccctgcaaggatgattgtgaatgtgtatagaactgttcaataaagtaggaagcatttgtgcggc

SEQ ID NO: 120137 - DNA, 2122 bp, Glycine max
  Clone ID: PAT_MRT3847_79491C.1
cagcgcgcactttctctgttgtgtccgcatctccaactctctctctcacacacgcactctgaaacaaaaaaatagaaatagaaaaaaaaaacaaaagttaaaaaaaaaggggagttattcttcttcaaccacgccatggagggtcttccccaaggttaccgtcccaacgttggtgtctgtctcatcaactccgatgatcagatttttgtggcttctaggttgaatgtcccaggagcatggcaaatgcctcaggggggaattgaagatggtgaagaacccaaatctgctgccattagggaacttcgagaagaaactggaatagtatctgctgagataattgctgaggtttgctcataatcttagctctatctatagatcagtgatatcttacaacattcaattaattgagttcaaagtagttttaccattgtgtaataaaatgaacaaaaacaatgtctgagagcatgaaacagaaacacccagaattagattcaagagaagcatttatacatctatgtcttggtacattatatataaaacactgatcattttgataaccgggtggatgttgatcttttaatacatttggccgagcttgtgcgttacaggttcagaaatggttgacatatgacttccctcctgctgtgaaggctaaagtcaatcgtctgtggggaggtgaatggcatggacaggcgcaaaagtggtgagtatttttttttaattttatttcatgtgctttacatagccatgtacttgacatttcagtgctaacttctgaaaatattacctctaatctaaaactctggtggtgtatctctataccaaaaaatatgaccaccaaactgggtgaaagattaatgaaattaaatcagtttggtccataatgctggttaaaacatttgaaagagtttgtgaatgcatgaaacattataccaggataagtgtccaaagaagccccctcacaacttacatggttgctaaaatattagcttggcagtatagaaagcaagatggatggttggtttgcttgactttgtaaaatgaaaagaaaaagacagatttatgatgtaaagtctgaattcaatgtgtgaaagtttaaaacttaatttcttttctttagctgaagcagatgtaagcaactggaaaaaaggtcagtcttcaacaatcaacacaatgaaggctgagaaaaggcaaacatgaaaatcctgagtgtgagtgaagagagacaaataatacctgtggtattagtatatggagattacattgtgatccttttcctagtaaaattggtgtttgtgttttgtgcattttttccattttgtgtggtagttgtttgatctggagtttcaggtttggtgcctgttttgtcaattgtgtacttcaatgtagatatgagaaaccattgacttttctcaataggtttttcattactcaagctggatatcctgtttacttatgacatgccaatttaggttaaaatacggataacttaaaaattcttagtgtcccaaacttactactttttggtagtcagaatgataattgtcttaactcttaattatccagttatgtaaatgtacagttaacaaagccgatacatttagttgagtgtttctatgtctatatcctaccaaaactctgctttttctgccattgattgcgaacatttgataggtttcttatgagattaacaaaagatgacagtgaggtcaacttaactaatggggaagcagaacctgaatttgcagaatggaaatgggcagaccctgaagaagttattgagcaggcagtggactacaagagaccaacttatgaagaggttataagaaccttcaagccttactttcaagggagtggaatatctgccaaatgtaaatcaacaaagtggtgaatgttatgagtgtgcattgtagttttatccattttcttatctaatttcactgagtttggatagcactcagctatttgtaaagggatgatagttagaactgtccattaggtacttgccttcttgtaataataagctatgtgcaaatgcctaatttctattctaaacctccctgcaaggatgattgtgaatgtgtatagaactgtttaataaagtaggaagcattgtgcagcc

SEQ ID NO: 120138 - DNA, 402 bp, Glycine max
  Clone ID: PAT_MRT3847_79492C.1
caaagtgtacaccatgtcctcatgtcaataaagaatatatttttttctttctccggaagaacaaaaaatcttatgaaaaaaaaaaaagaacagtctggaagagaattctaaaaaccaatattacatatctaatcaaactactaactgctaacttccaaaaaatattaacaatgcgggccgccccccaacttttgacctcttcccccctgaatttatttcccacccaaacctctaggccttcccatttttcctttttgtggaccttttaaaacctggccgtaaccatggccatacttttttccttcttaaaatttttttcccttcccaattccaccaaacatacaacccgaaaacataaagtttaaaccctggggtccctattgagggccctaccccccttta

SEQ ID NO: 120139 - DNA, 430 bp, Glycine max
  Clone ID: PAT_MRT3847_79493C.1
gagggggggcttggggcaacttgggcaatcaatcactcgccggcttgcccatggatataataaggctgttgctcgacaatgagttgacccataagctgaactgtaaaagacagcatgttatgacttgcttgtttctcatggagggaagatagttccatctgtttggagtaatatgccaattcaatacaatgactcaatcatggactctaccatcaactgttaggagaatggtaccctctttgatgtttcccatatgtgtgggctgatcctcagagggaaggacgctgccacataacttgaaaagctggtaattgccaatgtatgctggcttgcccctgcaactgggacgaagactgtgttcacaaaatgaaaaaggagttcatatggatgattcagctatactcgagtgaatgcttaccacatatatttg

SEQ ID NO: 120140 - DNA, 395 bp, Glycine max
  Clone ID: PAT_MRT3847_79494C.1
cgtatgcatgctgagcagttgggtcaagaccacacgcaagggatcgtactcgtttttatactttgtcttatctatgatgggggacaagcttgagcatgcgattaaataattatcctttccggtttttatcacaccaacaaattatattattattttataggataataatacattagtagctccttgatgatctttcatttaaaaaaaaataaaaacaaaccgatataaaaccaaaaaaaacaagaaaagatcttaaaaaaagccttccctgtctggagatcaaataaaactacaaaaaatcattcctactggcacctaatggcttgcataccatgattaaatagaactattttgaagctttatctatatcatgaaaaattaactgactatttgaa

SEQ ID NO: 120141 - DNA, 371 bp, Glycine max
  Clone ID: PAT_MRT3847_79495C.1
cgttgaggacattaccgacacgcacgccatacaaagtcgtcacgtcttaaacagtcacacggaatgtacggtttctcataccacacaacacttcacggttcaactcgctcgagtcaaaactacagtcagtttcgttagtccggttcaggaggaatttagcaagtgtgcactaggaaccaatcataagatagaagaaatagctgccgtcaaagcggttagtactcgtgggaaacggttcacagttcatcccgatcaacgcaagagtggcgtacatacagaatgtaatagagaagagattgcaatccaacaggaatgcacaatacatgaggctgtggtcgaaccggtttcggttcacaacgaagtcaatggtg

SEQ ID NO: 120142 - DNA, 403 bp, Glycine max
  Clone ID: PAT_MRT3847_79496C.1
tccggaccgagtgagcctatgaagacgtcacgacactcatcataggtaaaagtcgcgcccactgccaccgcgtccaaagatgatcgatgatcgagatctgtgttactttgccagtgttcttggcgcctgcgtctttggactagtgatcgcgcatcattttgtcgtggatgacccaaaggtcgaaggaaactacaaatgctgttatatgtaagatggaattttgtgtcgcagacttgagaatgagaacgatagcttactaaaactcccataaacatcagaggagcagaacatttcaatgtttgctatacttatgcgtgctcccgtaagctatcttttgcaggtaaggagtgattgatggtaaactactgaagatacggtattctcgttagaaaaagaatgaaac

SEQ ID NO: 120143 - DNA, 619 bp, Glycine max
  Clone ID: PAT_MRT3847_79497C.1
gcattgggtaaaatataatattgagattggtcattcacaaatgtgagattaatcaatttttcaattagtttatgacattgggattagccaatctgcttgaattagtcaacactcgcagcctgaccaacacgacgaatttcaaaacaggaagcaaataaaacatataaagctacatctatgaaatttgctagctatatgttacatatgattcgagtaagatcaatactagcaaacagatcaaacatcaatgctcgtttttcctttcgttgagtacctatgcataataatccaagcttgctttcttctttgcttggacttggatgatgccttcatcaaagtcctcatggttcacctcagttgcatcgcggcaaagggccaacatgccagcctcaacacagacagctttaagttgtgctgcattgacatcgggatgaacattcattttccgagaatggatcagttaatgttgggtgtggaaactcaatttttcaatccaatcgaccagaacacataagggcaggatcaagaatatcagcacggtttgttgctgcaatcaccttaacacgatcatcactactaaaaccatcaagctgattgagcaattctaacattgttcgct

SEQ ID NO: 120144 - DNA, 362 bp, Glycine max
  Clone ID: PAT_MRT3847_79498C.1
tattttttttttttttttttttattttttttttttttttttttgcatttgttaaatcaaaccttaaattatttgccatccaaatccatttggggggatttcaggccctacccccacttaaagggggttccaccattacaaccattcccacaatttttttattttttaaatgacccattaaaaaagcatttgtattataataaaaaaaaaaaagaatgggaaagtttaaaaccgggtccaacacacccaaatttgctgacataatgtattatcagcactactatcctttaagggttttctggtattttttttacccctttttttttttacctcttttaaccaaaaaaatggtgtgtggtttga

SEQ ID NO: 120145 - DNA, 882 bp, Glycine max
  Clone ID: PAT_MRT3847_79499C.1
gtatgagtccggaaggagacacaaggaaatgaaaaataactaaataggaattatgttaattatgcccctgatagggattccccagaaattggtgacgtaatagtgcgtgatgagcctcacattacttctcttcctggttcgctttcttgtaatcctccttcttatcccccgctttctggtgattgttggtataactgcacttctgaagacatttcaggagaggacaaaaagcatcgccttcgtaaggcattaggtcagacagctgactggtttaggagagcattgtttgttgagcctgtcaagggtaacctgagattaagtgggtattctgcatgtggacaagatggaggtgtgcagcttcctcgtggatatattgaggagggagtctctgatgccgacttagttcttttggtgactacaagacctacaactggaaatacacttgcttgggctgtggcatgtgaacgggatcaatggggtcgtgctatagctggacatgttaatgttgctcctcgtcatttgacagctgaggcagagactttgctttcagcgactctgatacatgaggttatgcatgttcttggttttgatcctcatgcctttgctcattttagagatgaaagaaaaagacgccgtaataaggttaccgaacaagtaatggatgaaaagattgggcgaatggtaacacgtgtggtgcttccacgtgttgtcatgcattctcgacatcattatgcggcattttctggaaattttactggcttagagctggaagatggtggaggacgtggcacatcagggtctcactgggaaaagagacttctgatgaatgagatcatgactggttctgtggatacatccctttcgtagtttcaaaaatgacat

SEQ ID NO: 120146 - DNA, 419 bp, Glycine max
  Clone ID: PAT_MRT3847_7949C.1
acgagaatggcatctatgactaccttacgtagctcctctcaggctgcgttggaaggtcgcctcggctccacacgcttgaatgtcgcggagtggaaagcgagatgtgcctctgtcacacacgcagggctcaccttttgagctcgtcgtcagggcttgaaatgagcctacgtccgaagtacccgtcagcgacagatttccctcgtgagtctgaggctagaccactgcctctacctattggcctgagcagaggtgctccggtgaatattcttatgaacgaatcttactggtccaatggcactggttcagtgtttgctgttgatcatgaccaccacactcgctgccctgatgtggtatgatgctactgagtctactatgcccgtgtatcatcacacaactgtgctatggatgagattgcgtac

SEQ ID NO: 120147 - DNA, 2130 bp, Glycine max
  unsure (1)..(2130): unsure at all n locations
  Clone ID: PAT_MRT3847_794C.1
ggtccggttttcggtttcattcacaacttcaacccttcctttcaatttttttcctacctacctaccaatcaacacctcgctggttcttgcagtggcgttacacatggatcggattccgatctacacgccgatggtgctaatcggaggattcgaagcctggtgccacggatctacctactgtacagaggtgtggcgatcgtgttcgtgttgctcttaaggtcgctttcggaagatcgtttgttcaacgatcggagattgcagcacagatcgagtgaagaaagcgtggctgtgttcttcgcattccgatgtcggttcatgttgtggtattgaaattatgatggggtttttaatgggggaaattattgtgttgcgtgggttttatgaaacagagaaggttctggtaaactttgttaaccgacctttgccatggcaggtgcgcttgcatggcaggtcaaaaatattaataaaaaatcaaataatttttggttttgggggagatcgcacgggaattccgggcttctccctctggtgtgtgtgatgttcttctttctttttacttcacttcaattgactctctctctcctccaccaacccgccaatttttctctctctaaaacacatgacatctccttatactcctcgccggcgatccagctccgaccaccgcaccaggccagaaagagcgcccccctcccccggttacgcctcctccgagttcagcacctcctccaccgtctccgcccaccggaactccgtctccgccgtcgccaagtccttcgccggaatctttgccgggtgcttctccccgccggattccgacaactccaagagcctcggggattccgaggagttcaagtcttcttccactgtatcaaatgcttccagagctggtagtcagagagggcatggctcgaaacgaggtaccagcatcagttcatacaacatattaccagcgaaagaaccaggcagtgttgagttcaccatggaggaaatcttccgagtcacaagaaacttctccccttctttcaagattggcccaaggtggttttggtgctgtctatagggccaaactcctggatgggactgttgttgcagtaaagcgtgctaagaagagtgtgtatgagaagcatttgggggtggagttccaaagcgagatccaaacactatcacgggtggaacatttgaacttggtcaagttctttggatatttggagcaagaggatgaaaggatcattgttgtggagcatgttccaaatggaacccttagagaacatttagattgcattcatggaagcgttctggaccttgctgcacgtctagatatagcaattgatgtttctcatgctatcacctatcttcatatgtatatagatcatcctatcatccatagagacataaaatcttcaaacattcttctcactgaaaattttcgagctaaagtagcagactttggttttgctagacaagcccctgacagtgactctggcatgacacatatttccacccaaataaaaggaacagctggctacttggaccctgaatacctgaaaacttatcaactaactgaaaagagtgacgtgtattcatttggagttttgcttgttgaacttgtcacaggcagacgccccattgaaccaaaatttgaactcagggagcgaatcacggcaaaatgggctatgaagagattcattgatggagatgctatctcagtcttggacccaagactggatcagactactgcaaatactttggcactagaaaagattcttgagctagctttacagtgcttggctccacgcagacaaattaggcctactatgaagagatgtgctgagatcctttggtccatccgcaaggatttcagaaagcagctatcagcttcgaactttcgctcattttccacttcttcccaaagaagcacctcaataaaagaaaagtgaaaatgctgaagttgcaacacttggcatcaaagaatgtaagttagaacaaaccatggccttgggagaaaaaccattcttctatataatgattggcaacttcggcacttggggtggtttggtgtttgactaanngtgcatgtagaaattcatattctgtgnaaaatgtacatgagaattttggcttgtgtat

SEQ ID NO: 120148 - DNA, 268 bp, Glycine max
  Clone ID: PAT_MRT3847_79500C.1
agcatactcatgacctgttgagattccacataccacccggatggactggacctttacgactcctacctcaggcccatatactatgcctctccttattaaataaccaaaacactcatcacgaacttcaaaatatacgccggatacgtgggaatagtcatcgcgcaaaccatcataaatactgacctttcataccagccttttctcttctacaccaactgctacaagatggaatgctagaactcaaacgtacatacgaaatcatattact

SEQ ID NO: 120149 - DNA, 638 bp, Glycine max
  Clone ID: PAT_MRT3847_79501C.1
ctctatcaataatctgtagagttagcttgtcatggcatatttattaattgagtccttgtaatgttgccaagctgtttctggatttgcggattatttcaactcagtttgaaatacaatgttagttttctgttggctaattgtgggtgctctgttctgttgaattattttattttccagatttttgagaagaacccaaccaaaattaagaactatggtatatggttgcggtatcagagtaggactggttaccacaacatgtacatggagtaccgtgacaccactctaaacggtgcagttgaggcaatgtacaatgaaatggcttctcgtcacagggtcaggagcccttgcatccaaattatcaagacttaatgtgggtcatgaatggtttgcaagtactagagcacgttgcactttcacattcagtaaatcaagatcccatgggttttcaagacagttagtttggctaaaggttttttaatggggttaaacttaaggttctggtggaaaatatcctggtccataataaaaatgaggaggaaaaattgaccaatttaaaaaaaaggccggccaacccaattctaataaaaaaaaaaaaaaaaaaaggccggcccccttaaaagaatccaagctaaggaagg

SEQ ID NO: 120150 - DNA, 303 bp, Glycine max
  Clone ID: PAT_MRT3847_79502C.1
gaggcccccagtgcacgaaaccttttattaagggggcttattggccaaaaatatccctaaaaattaagggggggggggaaaaattctgaatttcaaaccccaggggttttttgcacaaaccccccgggggtaagggggggtgccctaaggggtgtttaatctttaggagcggggttttcattcggggaatttatttaaagaggcgctttggaatcccttacaaagttttttcgcccccaatgggaattggagaatgtacgctcaccccaggggcagggggggtttcccgggccgggaaaattt

SEQ ID NO: 120151 - DNA, 584 bp, Glycine max
  Clone ID: PAT_MRT3847_79503C.1
gggctcaaatttttaaccaggcttaaagagggaaaaaaaaattaaaaggaaaaaaaacagccctctcttattaggaaaaagaggccgaaacaaaaaaaaaacaagctttggaacaagagggaaaccccggaaggaatggcactggcacaaaaggaaaaccctggaccagtttctaattcaaacctcccccaaccatcaacaaacagatccggagaaaacaacacccccagggggagttcacgtctgcctgcaaaacccaagggttaaaagccatccccttttatccaagcaaataaatatttatgggaaaatggggggggaaggtttaaaacggaaaacaaatgggggacccaagggaaaccgcgaggcaaaaaggaccccccataggacctggcggccgaaatggcattcccaggagtttttaaaaaccctgggggggcataggggaaaaatcggcatttagaagagaaaactagctcgctggggaataaaacccccgggggaccctcaaggtattatatcggaccgggcaaataaaaggaatttatatgtgaacggccgcgcgggggcgccccggaaattcc

SEQ ID NO: 120152 - DNA, 1952 bp, Glycine max
  Clone ID: PAT_MRT3847_79504C.1
acggctgcgagaagacgacaggcgggggggtgcgtagtgcgtaccccagcaggaaatggattacactaggatacagaagtaatctgttatcgttattccttccaccctgcccggtggaaccaaacgaagaagacgttccgttttccctctgcttttccaagttttcatcgactcaaccatgctattcttacataactagggttaggagttagggcgttcttatcgttttcgctccgttaattacaacaacggccaacatggttgttctttcgctttcacctcccagcctctctaccgctttcctcgcaaagaaactgtctccccaagaacacgcggtgaagctagcgacctttcgcaacaattcatttcgcattagatgcgcggtggatacgccctatggagggaatgttcaaaaattccctcgaaccaatgtttgggatccttaccgacgccttggtattagccctgatgcctctgaagaagaaatctggggatcaagaaattttctgttgcaacaatactctgggcatgagaggagtgaagaatcaatagaagcagcttttgaaaaaatattgatggcaagtttcgtacagagaaggaaaacaaaaattaatttgttaaacaagttgaaaagaagagtctccaccatgggtgaagaacttgatgagctttgttgaacttccaccaactgaagttattctcagaagattttatctctttggcttcatgtgtggctggagtattatgaattctgctgaaactggacctgcttttcaggtggcaatctctttggctgcttgcatatattttctcaacgaaaagacaaagagcatggctagagcattcatttattgggtttggtggctctagtgtttaggaatgggtctcaatttcctagctgttatcttatattccatctatgttgttgggactcttaacgtcattggtagtttatttgttcatgtttggtgtatgtatttttgttcagtgcttttgcgcctttttatttgaagttatagactattattagatcataggtgaccgtaaaatttttttaagtgatcaaactaatttttttttatctttttttgtgacgagcctagttttttagtgtcgtgttcatttatgaaattaatggtctgaaaagccaatattcagcatatatagttaataccgaaataaaactcccttgcgtggtttgtcactttgcagccgggacactcacctatccaagggcctggtgtccccttccgtgcccgtattctgctgttttgatttagaaataaacttgtgtaccaagcgtgcaatattttaaatgcaatttaatgaaagatggaaaacgaatgaagtagttgctaggattattaactagggttctggagcaacagttattgtattgaaagatttatttggtgtttcaactttcaaatgtttaaaaagcatttttagttttccaatatcaattttaagaacagggtatatatagtttaggtaattgaaagaccagcataacttgttggtggcatttcaattcttggacgaagttatctttaattcgttcagctttcacaatgtcctttataaaaaaaaaaaagttttcacaatgtcctttataaaaaaagttttcacaatgtccgatcaaatacttgagacagctgacgttctagttctttgtagtgtaacatgtcttggatgttcaaaatcgtacttctatttgggtgtgtatcatatttgattaaaaagctaagctgagagaaaataggagtaaaagttttgggtttagtaactaagctggttattataaaaattaataaaattttcaagcatatttactctaaagttttttaaaaattcaattaattttatatgatattttataagtgatttaatacaaaaatagggaaccaagaggatttagataaaccccgatatcatgtttaatttttacgtat

SEQ ID NO: 120153 - DNA, 1220 bp, Glycine max
  Clone ID: PAT_MRT3847_79505C.1
gtttgttgtagtttgcgcacgggtgcgtagtgcgtaccctagcaggaagtggattacaagtattctgttatcgttattcctcttcttcttcttattgctccaccctgcctggtggaaccaaacgaagaagacgttcggttttccctctgcttttcgaactttccatcgactccaccatgctattcaattagggttaggaattagggcttcttcttgttttcgctccgttaatttcaacaacggccaacatggttgttctctcgctttcatctcccagcctctccaccgctctcctcgcaaagaagctgcctccccgagaacacacggtgaagctagcgacctttcgcaacaattcatttcgctttagatgcgcggtggacacgccctatggagggaatgcccaaaaattccctcgaatcaatgtctggaatccttaccgacgccttggtattagccctgatgcctctgaagaagaaatctggggatcaagaaattttctgttgcaacaatattctgggcacgagaggagtgaagaatcaatagaagcagcttttgaaaaaatattgatggcaagtttcgtacagaggaggaaaacaaaaattaatttgaaaagcaagttgaaaaagaaagtagaagagtctccaccatgggtgaagaacttgctaagctttgttgaacttccaccaactgaagttatcctcagaagattgtttctctttggcttcatgggtggctggagtattatgaattctgctgaaactggacctgcttttcaggtggcaatctctttggctgcttgcatatattttctcaacgaaaagacaaagagcttggctagagcattcattattgggtttggagctctagtggctggatgggtctctggttcattgctggtacctaatattccatctatgttgctgcggccaacttggacacttgaactcttaacgtcattggtagtttatttgttcttgttcgttgcttgtacttttcttaagtgaagtggaaactattctttcaacgttatagtcggtgatgagtttataggtgatcaaacaatttttttgtttttgttgttgtagcgagccaaattgtttagtgtcgtctttttttatgaaaacaattgtttgagttgccaatattcagcagatatattattaccgagccttaactccttgcctaaatttccgttggttacggggcaagaagttcttcct

SEQ ID NO: 120154 - DNA, 550 bp, Glycine max
  Clone ID: PAT_MRT3847_79506C.1
cttcaatattacgcttttttccattcaggttcccttgcttcgcatctgaagatccaacttgctttcttgactttgtcaccgaatatttggcaacatctgttccatcattgaccctcgatttgttcgtattgccaatagattcagaagtcacacatttagacatggcattttctgtggtacctgattgcaagctagcacgctcttgttgaatctttctaaaagcctcaagagatgaagatagtatatctgccctatgcggtgaagttgtcatccttcggacctagaatcaataaagagcatctaaacctcttaagcaaaagaaaaccagatcgtacagatctctaacaagtaacactcataatctaatttgtgaagtttatgcaccaccatcttcaaaatcagaaatcaagcaagcaaacaggtatagaccataagtgattgcatgcttaaatgttatgtttcatttatatctttctccaagtccaagacacaaagataaaccaatgagcgttagtctaaactaaaatgatgcttaataatgccagatggt

SEQ ID NO: 120155 - DNA, 705 bp, Glycine max
  Clone ID: PAT_MRT3847_79507C.1
gggcatgagaggagtgaagaatcaatagaagcagcttttgaaaaaatattgatggcaagtttcgtacagaggaggaaaacaaaaattaatttgaaaagcaagttgaaaaagaaagtagaagatcttcacccatggtgaagaacttgctaagctttgttgaacttccaccgactgaagttatccttagaagattgtttctctttggcttcatgggtggctggagtattatgaattctgctgaaactgcacctgcttttcaggtggcaatctctttggctgcatgcatatattttcttaacgaaaagacaaagagcttggctagagcattcattattgggtttggagctctagtggctggatgggtctctggttcattgctggtacctaatattccatctatgttgctgcgcccaacttggacacttgaactcttaacgtcattggtagtttatttgttcttgttcgttgcctgtactttcctcaagtgaagtggagcctattctttcaacgttatagtcggtgatgagcttataggtgatcaaacaatttttttaagcgagccaaattgtttactgtcatctttttttatgaaaacaattgtttaagttggcaatgttcagctgagatattactgagccttaaaaacataaaaaaaaaaccgttggttacgaggtaataagttcttccaccgtggtttgtcacttt

SEQ ID NO: 120156 - DNA, 253 bp, Glycine max
  Clone ID: PAT_MRT3847_79508C.1
aaacataattatcacccccacaaggtcatatttatgtatgggtcccagtaatctcatgctttggtttttctttttttcattcttttagatgtcaatatgtgggatatgatgtttgtagcttgagttcaaagtgctctatttccaatggggtatcaattattatatttaatcacatgccaatggtgcaaaaaaagaacaggatcgaccaataacaacaaataaagtacgaatcggttacaagagagtaatacag

SEQ ID NO: 120157 - DNA, 253 bp, Glycine max
  Clone ID: PAT_MRT3847_79509C.1
ggcgtgttctatgtgaagaccgaagggacgtacgtctttattagatatgagtttgcgactaaagcttaaaataacgcttattgttcagggtgtgctagtgctaatgacgttgttatagatattagagaccgcatcggttgaactgtgttacatactcacagacggagcatgcttttataatcatggatcacaattgggactcccctgccttagatgctgaatggtcatgggaaagctgctcttgatctaatat

SEQ ID NO: 120158 - DNA, 205 bp, Glycine max
  Clone ID: PAT_MRT3847_7950C.1
gcgcaacaggttaccatgatgctaccatggacgctactgaaccatgtggaagctgactatgtttggttgcactgatgcttctcaagtgttgaaggatctgctcgaggttaagactgtattccccaacggcttcatgcgtgtcatcggattcctcatcgttggacaactgcattgcatcacctgcatcgcctacaagcccccaggc

SEQ ID NO: 120159 - DNA, 177 bp, Glycine max
  Clone ID: PAT_MRT3847_79510C.1
gaaccccgcaccctccatctgcaggcaactattctcaggaggaaccgaccgccgtctccccgggcagcgaccgattgggcataggctgtcgcctgctcgcaagtggcggctggctaacgaactatgcccagccccggcgaagaagacgccgaatatgaccgacaagcctgccgttct

SEQ ID NO: 120160 - DNA, 187 bp, Glycine max
  unsure (1)..(187): unsure at all n locations
  Clone ID: PAT_MRT3847_79511C.1
nnnnnggttttttttttttttttttttttttgtggagaaaggccaagattttcgtgtacccatgcactgaatttaccttctaaagtcggtagggatgcgcccaaccttttgatgaaaaacattcagctaccttgaaaagcaaggccagccatgatccaatttatgcactatgctacaaccaactgtt

SEQ ID NO: 120161 - DNA, 989 bp, Glycine max
  Clone ID: PAT_MRT3847_79512C.1
agcatagtcaagcttcgaattggtgaatgtggaaggaggagaaggagaaggagggtgttgcgccacgaacacatgaattagaaaagaagcagctgcagcaacttttcttgttcaatacccatcaaatgcaaatacaaagacactctcttttttaattactactgttttatgttcctttcttccttctgaatctgaccaaccagtaggactccttcaaagggattttgagtattgtttgaattgctggagacctgagagtgaaaactaactccacaatccatggataaagatgctagggtggaagagactgttgatttgcgaaccaatgtggagttggtgagatcagtctctgataagcatcatgatcttttaaggccatctgctcggaactattcaagaggacaatcaacagatacaactggccgtggaaagggaaagtatgccttaattagagacccagaggacttccaaatgggagtttatgataagccccttccatgttttggatgtggaatcggatggttctcatttctttttggatttctatgccctcctatgtggttctatgctacaattctctattttggaaatcactatcggaaggatcctagggagcgagcagggctgggagccgctgcaattgctgcattagtgtgttctgtaacgttggaaacaattggactaatgtatataagaacttcaatctatttctaattcacttgcatatatgaaaagtgaggagcaacagcataagaaaatctgttggccgggatataagtagaaagtagacatatgtatataagaccttcaaatagatgggaaaaggcttgcatatattgctggtgaagtaattcacagcatgaaatctgttgtctataccataagttgagagaagataatgcgtcatatcccttatttgtttattttctgagctgatgtatactcaaaaagaaaccttttgatgagtgtttatgaatttcccaaaatca

SEQ ID NO: 120162 - DNA, 277 bp, Glycine max
  unsure (1)..(277): unsure at all n locations
  Clone ID: PAT_MRT3847_79513C.1
atatttcttaaaccaatcctctcattaatttaatattttttcttccccatatattcattttttaaaacaaacatactatctcaattaatcatcaatatcatattaaataacttcttaataatgtatttcattaactctaaaaaatacttatacattccaacttaccttatcctgtttattangcaaacgaggatgataacattaattctttcttaactcatatcaaaaaaaataattttacttatcagccttctacancnacaactttcgtatacaa

SEQ ID NO: 120163 - DNA, 133 bp, Glycine max
  Clone ID: PAT_MRT3847_79514C.1
tatctattcgttcgtaaaaatatttttttatttaaaaacaacatggttcggaccctgtaatagaggcaagggtacctacaggtgcacgcagatttcatctattgtgagatagtgttacatattggcaaaacaa

SEQ ID NO: 120164 - DNA, 244 bp, Glycine max
  Clone ID: PAT_MRT3847_79515C.1
gggaaaccataattggagttatcttcactgacattttcctgggtggggatagtaaaacaacgtggttcatcacgaaacataggtatttttcctcctacaatggacataatttaagtttataaaacatcccaccttccccccaatttaaatttggtatatacaatggcccttagtcaacttgacagggcaaaggcgaagttccggggggcactttccacaattgcaaacttttagggcccttggg

SEQ ID NO: 120165 - DNA, 647 bp, Glycine max
  Clone ID: PAT_MRT3847_79516C.1
cccacgcgtccgcccacgcgtccgcgagcgaaaccccaaataccaatccaatcctctcccaactcacaaagccatgtctccaggtcccgttgtcgacgcttcccctgaggttgatgcagagcaacaacttccctccctcgatgacgccactcagaagaagataccccaaccacaggaggacgatgctccccttgtcgaggacttgaaggatgatgacaaagacgacgacgatgaagacgacgacgacgacgacgaagatgacaaggaagacgatgctcaaggtcctcttctctttcactgtgttttcctcttagcctaataaaatccttatttggtcctttttttatgtttttgttagtaaaccctatggttctaatcgattatttggtttccgcgtgcttgtgcatttttctagggtttgtgtggagttctgtatttatccgtgagacctaattcatgttggaagaattatgactcctatttgtgttaaacaaattggcatatagattggattttattcttattaatcatactggaacgatcttaacaaggtctctaatcatagagaaattttagttgtttgctagcagtaacagttaatgttcaacttcttcatccctttgctggtatttggatgcatttatttg

SEQ ID NO: 120166 - DNA, 1675 bp, Glycine max
  Clone ID: PAT_MRT3847_79517C.1
gaactacccagcaatagtaagtgcaaaaccgaaaacaaaaaaccaaacccaaacgaaaccgaccaaaatctcgccaacttcactttccgcttcatgtagtttctgcgttcccaactccttctcccgactctaccctgactcgcccgagtccacactcaaacccgcgctcatggcaaataacccttccgacgctcccgccgatgacttccttgaacaaatcctcggcctcccgaacttcgcttccgccgactccggcctttccgctgccgatgtcggcctcgccggtgcggccactcaggctccgatgatgctgcaactcaactccgccgacgccaacgctcacctcgccggcgccgccttccacgcgcccgtgtatcagctagggctgagcttggaccagggcaaaggtgggttcatgaagcccgaggaagcctccgctagcggaaagcgctttcgcgacgacgtcgttgataatagagctaagaatgtttttcatgggcaacccatgcctactactatgcctgctgctccacatcctccagcaatacgtcctagggtgcgggccagaagaggacaggctacagatccacacagcatagctgaacgattacgcagagaaagaatagcagaaagaatcagggcattgcaagaactggtcccaagtgtcaacaagacagatagagctgccatgttagatgaaattgtggattatgtcaagttcttaaggcttcaagtgaaggttttgagcatgagtagattgggtggagctggtgcagtggcaccactggtaactgatatcccattatcgtcagtcgaggaagaaggcggtgagggaagaaaccagccagcctgggagaagtggtcaaatgatggcacagaaagacaggtagccaagcttatggaagaaaatgtgggtgctgccatgcagtttcttcaatcaaaagcactctgcatcatgcccgtctcactagcttcagcaatataccagtcacaaccctcagacacttctagtatagttaagcctgaaactaatcctccttcataatcatagtcagaactctggcacagatgcaccatccagtggtcccatcaagggctcacctaacactgctaggacccacgtgtaatttgcctgtttcaaacccccttaaccttagtcattggttcgcatcaagttgcattcaaggttggatgccatagtctttcctttttgtcgttctttcaacttttttgtctagacagggtttgatgtcaatgcccttcaaaacacaagcaaaccccatcttgataaatttcatgtaaagggaaagaaattgtcgaagttcacttgatatgctcttcctttttgtatcaattagtgggggttagtggaacgtgatggaagcgcttttatagtggggcttggttttttgtagtgggcagtgggaccttctaaaaggttagggtggtgtgtatattttattagtgatgtaactcttagggaatttgaattgcagagctgaaatggataatgattgctttaacaatgctgggctttgctagtcctccagaaaatgatattgctttttgtttgtttatttcaggtgtgctctagttagttatttaaaaggtcttgcgacccccttgttctcatgcagggagagatggaaggagagtatggtgctattttaaacca

SEQ ID NO: 120167 - DNA, 784 bp, Glycine max
  Clone ID: PAT_MRT3847_79518C.1
ggctcgagccactaagtccgtgcaaaccgaagaaataaaaaaccaaacccaaaccgcttcatgtagattctgcgttcccaactcgttctcccgactcaaccctgactcgcccgattccaaactcaaactcgcgctcatggcgaataacccttccgacgctcccgccgacgacttcctcgaacaaattctcggcctcccgaccttcgcttccgccgactccggcctctccgccgccgatgtcggcctcgccggtgcggccactcagtctccgatgatgctgcagctcagctccgccgacgccaacgctcacctcgccggcgcatccttccacgcgccggtgtaccagctagggctgagcttggagcagggcaaaggaagattcatgaagcccgacgaagcctccgctagcggaaagcgctttcgcgacgacgtcgttgataatagagctaagcatgtttttcatgggcaacccatgcctactactatgcctgctgctcctcatcctccagcaatacgtcctagggtgcgggccagaagaggacaggctacagatccacacagcatagctgaacgattgcgcagagaaagaatagcagaaagaatcagggcattgcaagaactggttccaagtgtcaacaagacagatagagcagccatgttagatgaaattgtggattatgtcaagttcttaaggcttcaagtgaaggttttgagcatgagtagactggggtgggagccggtgcagtggcaccactgggtactgacattccattatcatcagtcg

SEQ ID NO: 120168 - DNA, 362 bp, Glycine max
  Clone ID: PAT_MRT3847_79519C.1
ggtgaaaaagagagaaaatattaagattggggggaatatttttctacttttttattccccctccctgataagaacccaccatgtatcccttctttcttttttacaccacagaggttggtggacggataatctacatatagaaaacaagtcactttgctttattgaacggcgtttatatgtccacagttttctccccacgggttttatgaaaaataggcctgccccctcttttttttttgaaagaaaagagttcgagttgtttttaaatgccttatgccggggccccttaatgatgaccagtcactctttttgggggggcaaaaaaagcaacgggggtccccgaagttggagatcagaaatca

SEQ ID NO: 120169 - DNA, 415 bp, Glycine max
  Clone ID: PAT_MRT3847_7951C.1
ctttcttctcttttttccccttttaacactttctcttccttgcatctctacgttcctcttaccacaaggtaaacaaagatggcagggtgcgataaggaagactatttctctgccccgaatgctgagcaaggtgctggagtgaatcaacaatctacagcaacagtggagacactgcgaccaaaactacagagaactccacatcagcagcttcctccaagacgacctgcatgcacatctggttgagataatttcgtgaattactataatgtggagagtagacttaataaacggaacaaggatttgctcagccaaatttactattacaaaactcatgatgttcctgatctgatgtatattacaatttacttcatgctttgtgttattagcagttcaataaaaattccatttcaattcc

SEQ ID NO: 120170 - DNA, 1738 bp, Glycine max
  Clone ID: PAT_MRT3847_79520C.1
gaagataataaggtttggtagaaaagagaagaggatggatctttttatttcctttccttaaccccctccctctctccctctcagtagaaaaccccagaccccaaacacatcatcatctttcattcattcctttctatttctccagttagaactcgtttccctaactcggccgagtccgcaccagcgagtcatcatggcgaatcacccctcccaagcctccaccgacgacttccttgaccaaatcctcggcctctcgaccttcgcctccgccgacgcctctccgatgatgcttcagctcaactccggcgacgccgccacccacctagcctccttccacgcgccgccctaccagctcggcctcagcctggaccaaggtaagggacccttcctcacgcctgaggacgcttctggaagcggcaagcgcttccgcgacgacgccgttgataccagacctaacaacgtttttgatgggcaacccatgcctacaactgttcctactgctccacatctaccagcagtgcgacctagagtgcgggctagaagaggacaggctacagatccacatagtatagctgaaaggttgcgcagagagagaatagcagaaagaatcagggctttgcaagaactggtccctagtgtcaacaagatagagctgccatgctggacgaaattgtggattatgtcaagttcttgaggcttcaagtgaaggttttgagcatgagtagaattggtggagctgatgcagtggcaccactggtaactgacatcccattatcatcagtcgaggaagaaggtggtgaaggtaagaaaccagccagcctgggacaagtggtcgaacgatggcacagaaaggacaggtagtaagcttatggaagaaaacgttggggctgccatgcagtttcttcaatcaaaggctctctgcatcatgcccatctcactggcatcggcaatataccagtcacaaccaccggacacttctagcatagtcaagcatgaaactagtcctccttcctaattctcatgttgcacaatctattattattggtcccatctcaggctcacctaatacttgctgggacccacacctaatgcgttatttgtctgttccaaatccccccataaaataagtcattggcaagcatcaagttgcaatcaaagtcagatgccataattcttcctttttttgcctttctttcagcttttgtcaatacagggttcgatgtcaatgccttggaaaatacaagcaaacccctataacttatctaccgaatttcaagtagagtagagggaggaagaaaattgtcaaaagtacaattgatatgctcttcttttcttgtcaaattgttggggatagtggaccatgatgtaagcgtttttatagtggggcttagtttttgtagtgggctgggggaccttctaaaagaaggttagagagtagtgtgtgtaatgtgtatacttttaatagtagtgaagctgaaatggacaatagttgctttaacaatgctttgggcgttgccgagtcctgcaaaaaattatggtgctttttgtttgtttagggcgtgcgtgagttgtttactcaaaagtaattggacgacttttccctattcttgtgaatcattaatagattttgattcatcggatggaaatggaagctcctttcacgcaatgacccaatccttgtcaatcagtaagctctaaccttattcaattcaagtgacaagaagtcttctctcagttg

SEQ ID NO: 120171 - DNA, 1512 bp, Glycine max
  Clone ID: PAT_MRT3847_79521C.1
attttataaaaaactggagcgttatttattttcttcttaaccccttcttcctcttgcgcatcgtctcaactcaactggcatttctgaacactctaaaaaaccagagccaaaccccaaacaaaattgtcttctcttctatttctccaattacaactcgtttccctaactcggccgagtcatcatggcgaatcacccttccgaagctcccaccgacgacttcctggagcaaatcctgggcctctcgaccttcgcctccgccgaccccgccgccgacgcctctccgatgatgcttcagctcaactccggcgacgccgccacccacctcgccgccacccacctcgccgccttccacgcgccgccctaccagctcggcctcagcttggaccaaggtaagggaccattcctcacgcccgaggacgcttctggaagcggcaagcgcttccgcgacgacgtcgttgataccagacctaaaaacttttttcatggacaacccatgcctactactgttcctactgctccacatccaccagcagtgcgacctagagtgcgggctagaagaggacaggctacagatccgcatagtatagctgaaaggttgcgcagagagagaatagcagaaagaatcagggctttgcaagaactggtccctagtgtcaacaagacagatagagctgccatgctggacgaaattgtggattatgtcaagttcttgaggcttcaagtgaaggttttgagcatgagtagattgggtggagctggtgcagtggcaccactggtaactgatatcccattatcgtcagtcgaggaagaaggcggtgagggaagaaaccagccagcctgggagaagtggtcaaatgatggcacagaaagacaggtagccaagcttatggaagaaaatgtgggtgctgccatgcagtttcttcaatcaaaagcactctgcatcatgcccgtctcactagcttcagcaatataccagtcacaaccctcaggcacttctagtatagttaagcctgaaactaatcctccttcataatcatagtcagaactctggcacagatgcaccatccagtggtcccatcaagggctcacctaacactgctaggacccacgtgtaatttgcctgtttcaaacccccttaaccttagtcattggttcgcatcaagttgcattcaaggttggatgccatagtctttcctttttgtcgttctttcaacttttttgtctagacagggtttgatgtcaatgcccttcaaaacacaagcaaaccccatcttgataaatttcatgtaaagggaaagaaattgtcgaagttcacttgatatgctcttcctttttgtatcaattagtgggggttagtggaacgtgatggaagcgcttttatagtggggcttggttttttgtagtgggcagtgggaccttctaaaaggttagggtggtgtgtatattttattagtgatgtaactcttagggaatttgaattgcagagctgaaatggataatgattgctttaac

SEQ ID NO: 120172 - DNA, 867 bp, Glycine max
  Clone ID: PAT_MRT3847_79522C.1
aattcatcaacatcaaatcaatcactacttcactatataattggtatttgtagcactaatggcaatgcaatacttcaagaattgtggaagaaaaatccccttctttttatacattaatcgtttccttcattgtctcaaatcttcaaatccattaacttgacatcacatcaataactcctttgtgagatattcatcgagctgagagcatagaaatggaagcagtagcattagatgtggaggaaccagttgaggtagaggtttctgcccgagtccttaagttagtttctacaaaaacaggcatagaaggccttatttgccccagtgagttcttgcttttgagaaaagctactatttcagacattgttggccttgcagcagctgatgcttgagtgcaaagcaaagcaatctctatgattttcttcacttcttctgcatcatagtcttcagggtccaacaatgtcttgtcaaccaactccaaatgcatatcttgcacatgtagtttccatgccctttgaaggaggaattcaccatcagcatctgccctcaattcactgctcttttggccacttacgatttcaaggactacaacaccaaagctgtatgcatcagccttctcagataactgaccatggatggcatactcaggtgctgtgtatcccaatgttcctgcaaatcttgtgctaagatgagattggtcctctggtagaagtcttgccaacccaaaatcagcaattcttggctgcatctcatcatccaagaggatattgctggtctttatatccctatgtatgatgcaaacgtggaaatcctcatgtagataggccaaaccctttgctgtgcctaaaattatatcatatctttgtttcc

SEQ ID NO: 120173 - DNA, 681 bp, Glycine max
  unsure (1)..(681): unsure at all n locations
  Clone ID: PAT_MRT3847_79523C.1
ttgggtacacctgcaggtatcggtccggattccgggtcgaccaagcgtccggcatttttgtactggcaacaaacatgtgtaagcttaggaagaaagcaaccttgttatatcttcattgagtaactcaatattcattcgagagacatggttgcctttgggaaaaagttgaaagaaagacaaattcaagaatggcaaggatattacataaactacaaactaatgaagaaacgagtaaaacagtatgctcaacaaattcaacttggaacactagatcggcgccatgtacttaaggatttctcaagaatgctggataatcagattgagaagactgtgcttttcctgttggaacaacaagggcttttggcaagtatgatagcgaagctcggacaggagcatgaacttattcagcatgagcctcatataagtagaatagctgaactacgacaagcttatntagcactgggacaagagctattgaagcttctcttctttgtagaactcaatgctgtttggtttgcgcaagatattgaaagaaatttgacaaacgctttggctataaatttactgattactatgtcaaaactcgcgcaaatcatccttactcccagctgaactaagtgttcaagcatgctggatttggaacctgttgtgcggagctttatctcgcaaccttcacgaact

SEQ ID NO: 120174 - DNA, 503 bp, Glycine max
  unsure (1)..(503): unsure at all n locations
  Clone ID: PAT_MRT3847_79524C.1
tgatgatctgtttgatcaggcatgttgctgccagtcttgtaaagagccagcagaggctcacgtcctatgttttactcaccagcaaggaaatcttacaatcaatgttcggtgccttccctctgtgaagttaccaggggaaagagatggcaagatttggatgtggcaccggtgtctgaggtgtccatttgaggatggagttccaccagcaactcagagagttgttatgtcgaatgctgcttggggattatcttttggaaagttcttggaacttagcttttcaaaccatgcaactgcaaatcgagttgcaacctgtggacattctttgcagagggattgcctccgtttctatgggtttgggagcatggttgctttcttccggtattcccctattgatattctttctgtccatctacctncatctgtgttggaatttggccacatccaagaggagtggattataaaggaggcaggagagctttttattaaagtggaaaccttgtatg

SEQ ID NO: 120175 - DNA, 447 bp, Glycine max
  Clone ID: PAT_MRT3847_79525C.1
gggaacggaccaatcaacattaatggcccccatttttcccccaaaaaaaatacttttttttccaaaaacttttaatcacgatcataatttttttaatgggaaaaaaagggggtccctcctgaaaaaattttattaggggtttccatgcaaggcaataatgaatcgggagggggcataaggggagacttagttttttttggccgaccccaacagttccacgttttttaaaacctttttttaccatttgcatgggttaagggaacacggagctttttatcagcatttaatttatgttttccacgctccaaagaacaaataaagggttatcgatctatcccacttttttactctttggttttttcaggaggggggggacataataattaataagggttttgacttattttccgttgacccaacagctccaggtttttaatttttttcaaa

SEQ ID NO: 120176 - DNA, 283 bp, Glycine max
  Clone ID: PAT_MRT3847_79526C.1
tacggctgcgagaagacgacagaaggggtgattccaagatcaatgaacgtgagtcgtttggttggactcaggtcactgttgagcacatagcaaagacagctcaccaagatctttaaacacaatcactgccagcatatgtcctaagcaaggtgaactaccactgtctgaaaggattaccaaccctcattaacttgcattaaggccattgattctcatgataattgttcaccccctcaatttgtacatttcagttgtggtgataataattgttggtttagtagat

SEQ ID NO: 120177 - DNA, 823 bp, Glycine max
  unsure (1)..(823): unsure at all n locations
  Clone ID: PAT_MRT3847_79527C.1
ctagcttgcatgcctgcagtgaaatgagggtttgaaaggagagactctgaagtttgaagtctcaacctatataatttttatttaaaaattaattttgtcttctatggactacccgcgagctcgcgggtaaaatccgttatgtccacgaacttaacagattgaactcaagtattgcttataatcataagggtttgtaaaaaaaagactcacaatccgcgagcttaacgggccgactcacggacttgaaccgtagacctacccctacttatactaacatttatattactttttatgttatagattttgagtataacacttgagttttatagtattatagtgttatatacaaaaaacttacacaatatgtacattttttagacgatttctttaaaatatgtgattttaaataaatgaaattttgatagatttataaaatgtttaacatattaataaattttatatatgatttatcaacaatttttttaatgtaatttaatttaaaagataaaaaaatataaatttaaataaaataatattttaataaaaactgtaaaaactaaactgaactaaatcacaaattattgaattagtctaaattttattttaaataaaaattaaaccaaattaaatcatatatattttttattttagttcacataactttttgataaaaaaatcaaatcaatgagtcacacgaaaattcctatatcacgaaatcctttttttttcttttacttcaatgggtgcatctttntcttttcttttcttccccgtaacttattntatattttcatggcttaattattttcctactctctcctta

SEQ ID NO: 120178 - DNA, 435 bp, Glycine max
  Clone ID: PAT_MRT3847_79528C.1
tttttttttttttttttttagggggaaaaagatttgttttcgtatcatgataagacttgttatttgcatagagtgaagaatgctgcagaaaaaaaaatagttaatattttttctcaaatgttttaaaaattagatcgataatagaatttatgttagtttgtgatttagaaagcatgttttttattcgtatcgtgagacattgtatcgtgggaaaacgttttaaggaacaaggaggaaagtagaaaacaccgcatgttattcacgactcagcacgcactaaatcagaatactgttgatttgttttcggaggttgttaagatatatacgctgatatggaattggaacggattcatgtaaatttaaatgataaaaaacaatcagcatagtaattattgccacagatcttatatagattctgcgcacctaactattaat

SEQ ID NO: 120179 - DNA, 151 bp, Glycine max
  Clone ID: PAT_MRT3847_79529C.1
ccaaatccaagtcgcttcatatcaatcaaatgcttcgaattttggtagggtagatatgctatacatacgagacgttcacacccctgttgacgacagtcgatatcgtccctacacagcaggtaaagtgttcaaataacttacttgctatacc

SEQ ID NO: 120180 - DNA, 456 bp, Glycine max
  Clone ID: PAT_MRT3847_7952C.1
cacagtaacaatcaatcaaggttttctttttcaaggcatgaggaatccataatccatagtgttttattcacatgcatgttatggtgtcagcctttaactaccatatctaacagtcttcctcaattgtgcataaagagacttgtatattgatttgtatgtcatttcatatttattttataccattgtcttttaggatgcgttatataaatttagtgttctcaacatgttactttttctgaattttttcgttcattttatttgtttctttttttaactttcttgtttttttttttatgtttattttttttacctttatttattattcttattatagataatctcttttttctttttttttttatattacttatttttcttataattttttatattttatttattttatttttttcatttttacttatttttttttcactttttatctatttctttttt

SEQ ID NO: 120181 - DNA, 389 bp, Glycine max
  Clone ID: PAT_MRT3847_79530C.1
aacattccaatttttcctctaaaggaatctttgggaaagagggaatttacccgtcttacacgtaacattaaacaaccaaagcagggggttaatagaatctttagaaacacacttaaaaaccgaatccaccaacaactttattatccattcccctggttaaggggttccgttccaaacgaccaatttttacaacccttacccaacaaattgccacgggccaattttcaaaccaggggtttgcatgtccaaacctgcgggtcccacattggtggcacaagggaccttgtttcattcgcaccatgcgcattggagctagccccggttggtttattcactaaaacccgacccggataacccgggttccaaccggttccgaaaacgcccgttca

SEQ ID NO: 120182 - DNA, 483 bp, Glycine max
  Clone ID: PAT_MRT3847_79531C.1
ttttctcgtccggtcactgaggggtaggcacttaatttgaccaacatcatccccaaccaaaccgttatattagttgatatgatcattacagttacaaagatcaaatgtaatgtaatgtaaattaacagtttgtttttttttttaaaaaaaaaaacatcacttctaaaatagtaaccataaagggcaaaaaggtcctttcagagtcacatcgtctctcccctaatttctgggaaccacaaatttattgggacgagcgtgcggtggaattcattctcgtgacactccaccacgtggctcaatgtggttggtccattcttctttacaatcacaaattcacaatatctcgtttttcttttctccgtttcaaaaaattcaattaactttcggttgcagaggagggtttaaattcgatacccaattttatcataaaaggaataatcttagggaggagtcggtgtgttcacacttccaacccaatcgggc

SEQ ID NO: 120183 - DNA, 112 bp, Glycine max
  Clone ID: PAT_MRT3847_79532C.1
ggacactatttttctctaataggactacgaggttattttagatatacactgttactctgccttcatctacctgctctattcatgtgttaaggccttacactagagacgatgc

SEQ ID NO: 120184 - DNA, 531 bp, Glycine max
  Clone ID: PAT_MRT3847_79533C.1
gaatgggggttattaaaaaaaaaaattaattaaaaatacctgggggctgagggccccaacaaaagggaaaaggaaaagatgcctgcctggaactttggaaagactgggttcagccatcaattatcaaaggggcggcactcaaaaatctctggattggccttgcagaaattttcgagcgggtcaaactggttttggttctccctggggggggtcgccgccgggctcaattcctccaccttgtcccaggccgccgggcattccggggaaccggcggcttccgagcacgccttctccgggctttttaagctctcctttaccttttccgaaattttttccgggggcccccgaacgggccgggtttttaccaaaccaggccacttttgaaagggccccgacagagctggaaacctcacggcctgggccttttgggctgagtctattcccttaacattaacaaaaaccctgctagggcttgaaagactcaccccacccgctattgggaccaatcttttcttctttttttcccccctt

SEQ ID NO: 120185 - DNA, 310 bp, Glycine max
  Clone ID: PAT_MRT3847_79534C.1
gagaagaccacagaaagggactggtttttgtttctcgtttaagccatcatatggaggaagggctcttctggttaaacaacgtcaataaatctagatcttagtcttaattagaagtaccatttgaaacatgaagtctttttagcttgaatatactaggttcttcatttggattacttggattctgtgaggtcgctaattagatgcactcagtgcaggttcagaactttattcgatcagcgatcacggatactaggaggctcgaattgcattggaacttttcctttttgattaataaaatttccagttttaa

SEQ ID NO: 120186 - DNA, 341 bp, Glycine max
  Clone ID: PAT_MRT3847_79535C.1
aggagatcatccactctttgaagaaattgatggactattggagaaattagaagtcacccctgcagtagtagcagagcaactgatgagaaatgaggatcctgatgatgctttggaaacatttgttacatttctcaaagaaatggacaaggatagtaattgccacttagagttaagagggactagtgagtagggacttttgctgtattcaactttcctgttaaagtaataagatgattcattgaaatgctgtttcctgtttctgttgataaggaacctgaattgtaaggaaaagttatttcaaggtgtatttaatatcggaatcttttgaattggtttttcag

SEQ ID NO: 120187 - DNA, 350 bp, Glycine max
  Clone ID: PAT_MRT3847_79536C.1
aacaagagaagaggggtccttatttttgaagagtaaaaggggaaatgactaggggggcccaaaacaaaaaaggaaccctcagggaattttcctcgttttttttaaaaaaagaaaaagaaaaagaaaagccccggggggggtccaaaatacccccttggacacaagcttgcttatttacaattggaggcatgcccccagggttttggcctttttttccaaacacccccaaaaactgtagttgatgaaaggaaaaaacaaaagagcctaaattggggaactggataaacagatcactacccctcctcaacataaaaattattatttttggggggaaacaccatgcatagccc

SEQ ID NO: 120188 - DNA, 360 bp, Glycine max
  Clone ID: PAT_MRT3847_79537C.1
gacaatggatccagcgtgacccattgtagcgctgacgcttgtctagggtgccatcatcaggttcctcatcttcaacaccgactgatgcaagcgccaatacgaaatacgatccatggccgagccaactgcaaatttaaattcgagtgccactctcgtgtctttcaaacccgctttcaagaagactgtttacgaaccccattgctaggactaggatcaaaacatgcgtcaccatgcgttggatttggataccttgaagggtgacggtgatgcacaggcaggggtatgcttctcccgcgatggacgagatttggcaactggttgcgctgatggaattgcgagagtattcaagacggatgatgc

SEQ ID NO: 120189 - DNA, 388 bp, Glycine max
  Clone ID: PAT_MRT3847_79538C.1
tccaacctctacgttattctcctgcatacagatctctttatagacttctttctctcttcctggttttcgtgaggagaatcctgaaaaccagctagttctaatcaaagaggtcctcaagattcgggcacccatatgtcgtatcactccgtctctgctctgcctccttagatagacgaccaagaaaagcatgcttttgagcatgcaatctgtcttctttagcccttgcgctagtcttaaacacacactcacaacatcccagctgctgaagctgaagcataacaactcacacatgatgcgagaggacacaaattaagccagctggcgtcatgagtgagacaatggaatcgagtagcattgagagcagcactgcgtgatcgatgactatgat

SEQ ID NO: 120190 - DNA, 387 bp, Glycine max
  Clone ID: PAT_MRT3847_79539C.1
tttagatgtctacagaagggatacagaggatgttaatggttaaaagagtgtggaataaagaaaattgtaaacttcctcaaaagagggtatctgctgacctgctctatgactagtactgataaatacttcataatctgagcaagctcgttcacagattctcacaacctataaaagcaaacgaggaagttctaagtccatctataacaccacatagggtcaaacaagtcattaataacagggcataaatccaacttttgctaacctgctggattactttttctctttctattgagaatgcttcactttttttcagctgggccatttgttgctcattaaatacctacatataattaatgtgatagcatcagcattcaactgacttatatc

SEQ ID NO: 120191 - DNA, 894 bp, Glycine max
  Clone ID: PAT_MRT3847_7953C.1
cccctcaaacctcttctatctcattgtctctacctctcttttctccccacttttttctcttttttccccttttaacactttctcttccttgcatctctacgttcctcttaccacaaggtaaacaaagatggcagggtgcgataaggaagactatttctctgccccgaatgctgagacaacatccgagggaaagtacggtaggcttgccccaaagaagaagcctttgatatcgaaagataatgaaagagcattctttgattcggcagactgggcattatgcaagcaaggtgctggagtgaatcaacaatctacagccacagtggagacactgcgaccaaaactacagagaactccacttcagcagcttactccaagacgacctgcatgcacatctggttgagaaaatttcgtgtattacaataatgtggagagtagacttaataaacggaacaaggatttgctcagccaaattttctattataaaactcatgatgttcctgatctgatgtatattacaatttacttcatgctttgtgttattagcagttcaataaaaagtgcatgacatcaaccaaccactattagcacatccataatttacttccttatatacaagtttcagttgtatctaatttaatttaatttatgctttaattttttttggggttaaaagaataatgaaagagcattctttgattcagcagactgggcattatgcaaggtatatttgaatttcaaatgctaaataaacacataaatgacttctgataatgtcccaaaatcattaaattaaaataaatagtatgtataacacaacatctaaattttttttaataatattttttttatatctagtctcaacagcaaggtgctggagtgaatcaacaatctaca

SEQ ID NO: 120192 - DNA, 297 bp, Glycine max
  Clone ID: PAT_MRT3847_79540C.1
cttctctctctctaaccccttccttcataaaagagaaaacacaaagaaagaaataaaagggtctcattcactctcacacacaacacaagacactcttttttctctcgtgtgattgcattctcaccaatgggtgctcgttgctctaaattctctctctgctggtggccttcccacctcaaatcaaaccttcacaacttgtctgataatgatgatgatgggaaaaggaatgagaaggatccttgtggagggttcaatggagtacagtttggatccgtaaaaattgcaaccttaagattt

SEQ ID NO: 120193 - DNA, 265 bp, Glycine max
  Clone ID: PAT_MRT3847_79541C.1
gacacttagaacatcccgttcatgcgtttgcatgatgataaaaacatcacattggtttgtgaacacagttattttttcaatcaaataaagacaccttccttctctagcccctcataacacaaacataatgttacccagaaaacaggaactgaaaatcaaacccacaaaagttttcatagatgcaatccattttaatatacattatccaaacacaaatcaccccatggcatacttttgggcccagctgaaagcattccaactccat

SEQ ID NO: 120194 - DNA, 738 bp, Glycine max
  Clone ID: PAT_MRT3847_79542C.1
gggacttgctcttcaggtatatttaactcgccagtattcaagcatttcacttctatacactaactacaattaaaaggaaaagtgtatttttatggttacatgcttctaactgcatgtttgggttctcccccctcattgatatgcatgtatattgctaggaatcaaaatagaactttaagttaagagaagcttcattaaataaaatgctcttcaaaaggccattttcatctttctgcaagacctcgatctttttacttcacctaaaagatttctttataccaaaagcactttgggctcttgtgaataaatctcattcaaacgtgcagtcataaataacttttcaagtattataatttttaatctaaactgaaacatggtatagcacttctatctcattcagtgctgtactcaagcatccctgtgctgcaatacttaggtaatgacctagcattagcacaattgaatcattaatccatgtcagaaaagattaaacttaattttaatttggctgtggatggtctaatatctttccccctcttttatttggatttggaacctctaatgtaaatttttggcaaaaaaagcatgacacgggcaagattatctcaaaagcttctacagattaaaaaaaagattgggataaaaccttctaaccattggaacagccatatgtacctgttccctttgttttttttgctaatcttaccaactctcttctcttcttcagaatacatttcc

SEQ ID NO: 120195 - DNA, 2409 bp, Glycine max
  Clone ID: PAT_MRT3847_79543C.1
ctgggaaagtttttttaacatgaaacaaaggttttaacataaatgacttagctatggtcaatttgtctggacgtggtctgaaggggttgctggcactctttataaaggtacgacattattgctctttatatcattaggctcctggcgagtatctctcacatccacatgcaaatgcaagaggtggttcccttaatgatccattgcttctgttaaagaatcctttggtttctctctctaccgacattatctccctttatatcagttgtcctaggcagagtttctaaagcaaaagaaaaaaaaaagaaagcaaagggtaggcattgacccctttgcacaaaggaaaagaggggtggtgttgtgttaaaaaaatattgaacttggttggttctaagtagaaacaaaaattgtcattttcccatttctgcatttttggtttgggagaggagaaaccaagaattaagaaatgggttgctccgtaagagtttgttgtgtcttatttttggtgttgttggtggcatgtgttagaggggaggacccttatagattctacacttggaatgtcacatatggagacatttatccacttggtgttaaacaacagggtattttgataaactggcaatttccagggccacaaattgaggctgtgaccaatgacaacttgattatcaatgtatacaacagcttggacgaacctttcctcttatcttggaatggagtgctgcagaggagaaactcgtggcaggatggagtgtatggtaccaattgtccaattctaccagggcataacttcacttatgttcttcaagtgaaggatcagataggtagctacttctactacccttcccttgcttttcacaaggcagcaggaggttatggtggattcaaaattgctagtcgccccgggattccagtgccttttcctactccagcaggagatttcaccatattggcaggagactggtacaagagaaatcacacagatttgagggcaattttggatggtggaagtgaccttcccttccctgatgggattatcatcaatggtcgtggttccaatgcttacacattcacagttgatcaaggcaagacatacagattcaggatatcaaatgtagggctcaccacttccatcaactttagaatccaagggcataaaatgacaattgttgaggtggaagggacccacactctccaaaacgtttatgactcacttgatgttcatctggggcagacttactctgtgttggttactgctgatcaaccaccccaagactacctcattgtcgtcacgacacgattcacctcccaagtgttgaatgctacctccatttttcgttacagtaactctggtggaggtgttactggccttttcccttgggggccaactattcaagttgattggtctttaaaccaagctcgctctcttaggaggaatttgacagcaagtgggccaagacctaatccacaaggatcataccattatggtttgataaacacaactcgtacaattagacttcaaaattctggtccagttatcaatggcaaacagagatatgctgtcaatagtgtgtccttcatacctgctgatacaccacttaaactggctgattactacaagatccaaggggtgttctcccttggaagtatccctgactaccccactggtagtggtggctaccttcaaacttctgtcatggaagccgatttccgaggctttatagaggttgtgtttgagaacactgaagacactgtggagtcatggcacgttgatggccacagcttctttgtagtaggaatggatggagggcaatggtcatcagcaagcaggctaaattacaatttaagagatacagtttctcgttccacagttcaggtgtatcccaagtcatggactgcaatttacatgcctttggataatgtgggaatgtggaatgtgaggtctgagaattgggttcatcagtatttgggccagcaattttatcttagagtgtattcccctgcaaattcatggagagatgagtacccaattccaagcaatgctattcggtgtggcaaggctgtgggacactactaatgccaccaccaaaccaacattgggatttttatttgaacagtgtcattcatttccattcatggcttaactcaagcctcttctcttgttctcttgtaccattattcatgttatgatgccatagattattatagagttattgatttctcctgtcctcttcctcctctcatcttcgtgttatgtccaaattcagctatatataagatcatctgtgtttggattatgatattcttcttatttaaactatatatttatttaaataggttcaagggacctgatgttcatgtgccatggaaataatgagattgttattattattgttgttttttaacccc

SEQ ID NO: 120196 - DNA, 358 bp, Glycine max
  Clone ID: PAT_MRT3847_79544C.1
aaagagatcaactaatcgtggttgatgacgtttctcatctagcatggctcctatcttcaggtgtgaatgcgcaagagggcgtgtttatatctgagattggctttgctatggccgtggatactcatatggccagggagaaattggttataggatttgcaagcagagaggctcttgaagaggtggtgggaatcaaatataagttcattttgtgacccacgggtgtcagatgaatctaacgtgatggtcccctgttaatacaacaatataaatcgctgttgtgaccaatctctgactctatttgaagaacgaactgaatgaggtttacattctgtttgaaactatatttgaatttgacaag

SEQ ID NO: 120197 - DNA, 390 bp, Glycine max
  Clone ID: PAT_MRT3847_79545C.1
gcgtggatcacgcgaccacccttcagaggaagagtaccgtggatcttgactcatcatgcgggctcgcggtggcaccaaccgccgggtcagcactccaccggcgcatccgactccagatgcttccaccaagctcagttacaaatgctccgtttgcaacaagaagcttgccctctgtaccaagcgctcggtggacacaaggccagtcaccatagactcgctgactccggcgaccaagaccaacccaccatgacctacttcggcggcagcttcatcaacaccgactccagaggtaggacccacgaatgctacatctgccacaagtcctttctcaccagacaggccctctgcggacacagacgacgtcactacgaaggtaacagtaatggaaat

SEQ ID NO: 120198 - DNA, 847 bp, Glycine max
  Clone ID: PAT_MRT3847_79546C.1
ctccttctcttaacaccagtccctgaaggtccctcgaaacgtcgctctctcgccaacgtccattctgtgcagtggagctcgcatagtgaggtcgcccctgccgtgacctgtctgccatctcgaagaagtgttatctgctgtgcgccttaggtcatcgtaccggaaaatgagtgacatgttaacaacatttacgaagaagaaagaggtggataccatcatcagagacacctttgataaagttgtggtcctccgctttggtcgtgcctctgaccttgtctgtctccagcaagatcacattctttctaaagcagcaagggatgtgtccaagtttgccactgtggcactggttgatgttgactctgaggagattcaagtctatctcaagtattttgacatcactttgataccatctacagtgttctttttcaatgctcatcacatgaaaatggattatgggactgctgatcatactaaatggattggtgctttttacgcaaagcaagacttcgtagatgttgtagaggcaatatttagaggagcgatgaagggaaagcttattgtgaattgtcctctcccgccagaaagtataccaaaatttcagatactatacaaggatgtctgaaaattgaactcaaccctttactgctttttttttttctttttcatagggatagtttgtaaatacaccaatggtcactgttctgttttcttgtctttctcctttttgcttagcatgcactgacccgtaagcttgtgtctattgaattttttctcgctgttgattcatgaaataaaagtcggttggttctctcctgtaaaaaaaaaaaaaaaaaaaaaaaaaggaaag

SEQ ID NO: 120199 - DNA, 572 bp, Glycine max
  Clone ID: PAT_MRT3847_79547C.1
cccaattctaattctcttaatttcctttccccaaaaaacaaaaacaaaaacaaaaacatggctctttctttcaattccctcacactctccccattattctcctcttcttccacttttgctcttcccaccaccgctgcttcaagagtacacgtgattctgcccccgaagcccttgaacggtgttcgattctccgcacccaaaaggaggactgacgcggtggtcgtctccgccgccgccgaggactcgatttcgccgccggttcctccggcggagagcgagaaagagaatgtttccgtggagaagcttccgttggagtcgaagttgaaggagagagaggagcagaagctgaggatgaagctggcgaagaagataaggttgagacggaaaaggcttcttcgtaaacgcaggttgagaaagaagggtagatggccaccttccaagatgaagaagttgaagaatgtatgaattgtcaatttcaatttttgcaggtttaagcttcattgttcattctctaattttattttccaattaatgtgtatggtgtattttgataattttgttgcgtttcaatc

SEQ ID NO: 120200 - DNA, 1605 bp, Glycine max
  Clone ID: PAT_MRT3847_79548C.1
tccatggttgggcccacgaaatcgcgcagcttccgtgcgactccgatggcgtctgcatgctctgcaaactcaaacccagtccctcccaaaccctctcctgtggaacgtgtgccactccctggcaccttccgtgtctcccttcgccccctctctccctctctgactcccattgggactgccccgactgttctgacaccttctgccatcaccccgtcgctcccaccgctcaccttgtctccgccattcacgccattcaggccgacacctctctcactgaccaacagaaggccataaaacgccaacaactcctcgctggctctgcccacccctcaaaggacaaaaccaaagccaaagacatttttgatggaagcttaaactgctccatatgcatgcaactacccgatagacccgtcacgacgccttgtgggcacaacttctgtttgagatgtttcgagaagtggatcggacagggaaagcgcacttgcgccaattgccgtgctcaaatcccgaccaagatggcgagccagccgagaatcaattctcagttggccatggccatccgattggcgaaggcagccaagtcggaaggttcttcgggcccacccaaggtctatcattgtccgcgcaatcaggaccgtcctgataccgcattcaccacagagcgagccaagaagactggaaaggcaaatgcttgcagtggtaagattttcgtgactgttcctcccgaccattttgggcctatcccggctgaaaacgaccccacccggaaccgtggtgttctggtcggggacacgtgggaggaccggatggagtgtcggcagtggggtgcccatttgcctcatgtcgccggcattgctggacagagtgcttatggttcccagtctgttgccctttctggtggctacgaggatgacgaggaccatggtgagtggttcctctacactggcagtggtggcagagatctcagtggcaacaaacgcaccaacaagctacaatcctttgaccaaagtttcatcaaaaatagggcatgtggaggtggacgcactttacgagcacagaaaaatgttatgaaatgcccatcttgttcaaatgacattgctgactttctccagaatccacaggttaatagagaaatgctggctgttatagaatcattacaacgccaggctgaagaaaattctgaagagttaagtgataaaaatgatgaaaatctgcatgatccaacagaggtttctaaacccagtgattctactgataaagtcttggaggaaattaaggacaatgagctgaatcagccacacaagcgaaggaaggagtgaaggatgactgcgaagttattttggtcgtttggattatggattttcattgaatagcaagggacggactgctgatgcaatttttttaagtgctagcatagattgctggatattgacttgtatggatttaaatatattttttagaggttcatgtgatagaaaattggtatctcctttatttgtgggtttcatgtctctagaaggagagaatgagtgcattttacactggaatggatatcttaatgcattatgtgcttttattgaagatgttattttaactactactatt

SEQ ID NO: 120201 - DNA, 269 bp, Glycine max
  Clone ID: PAT_MRT3847_79549C.1
tcttattctcaaagttatccatcgtactcaatccacactacaactcactcaccttatactgaactttttccatcatcataaccatcatatcattatcaatattaaatcaccactcacacaaatacacattctcaccctactctagtcttaaatacaaccaacacaatttctctataacctattttcatcttcatctttattctacttacttctttcttaaatttataccaccccttcttattacctctaatctatcttcattcaaatta

SEQ ID NO: 120202 - DNA, 758 bp, Glycine max
  Clone ID: PAT_MRT3847_7954C.1
gcggccgtagtgagctttgcttcgtttcctgaagatggagggtcctttgtccgtgttcggggaccgcagcactggggaggcggtccgctcccagaatgttatggctgcagcttctattgccaacattgttaaaagttcttttgggccagttggcttggataaaatgttggtggatgatattggtgatgtaaccattactaacgatggtgccaccatcctgaagttactggaggtagaacatcccgcagccaaagttctgtgtgagctggctgacctgcaagacaaagaagttggagatggaactacctcagtggtaatcattgcagcggagcttctgaaaaatgcagatgagctagtcaaacagaaaattcatccaacatcagttattagtggctatcgtcttgcctgcaaggaagcggtgcgttatatcaatgagaacctgattattaacacagacgaacttggaagagactgtctgatcaatgctgctaagacatccatgtcatccaaaattattggaataaatggtgattactttgctaatatggtagtagatgctgtgcttgctgttaaatacacagatgccagaggccagcctcgctatccagtcaattctgttaatattctgaaagcccatgggagaagtcagatagaaagcatgctgatcaatggctatgcgctcaattgtgtggttggatctcagggcatgcccaagagaatagttaatgcaaaaattgcttgtcttgacttcagcctgc

SEQ ID NO: 120203 - DNA, 541 bp, Glycine max
  Clone ID: PAT_MRT3847_79550C.1
ctctcgcgtccttccacgcgtccgcccacgcgtccggtcttctacttcatttagtaaagtaattttatacattttgctcagttgactgatggaaaatgctaggccaccaatatcttgttctaaaccaaaataaaacatgctggaaatctgttatagtggttttgtcacaagtgtatgcccaacaactgtcaaatacttatctttttcattcacactaatgagcacatgtctgtacgtgtggtgtagtggttggcaggacacagttgaagagcctttcaaatctatttgagaattaatttttggccaggatttaatggataactggattaataatatcatgcctttggatatccttggcttataatatatgccatttttaggttcaatataatccattcataaataaatgataaaacacacatgcacatgcaggcacacatacataacacagggagtacttatagtgaggagaagattttaaccattgatttatgtaaattgtcaaaataagaacataaatgcaaatgttatttttcacatg

SEQ ID NO: 120204 - DNA, 465 bp, Glycine max
  unsure (1)..(465): unsure at all n locations
  Clone ID: PAT_MRT3847_79551C.1
ggtccggaattcccggngtcgacccacgcgtccggtgatgcattgcctttaccttgcacgtggccgtgcaaggacacatggaggacacggagctctaaccttactcggacgccttgatgcggcccaccacaatgtgggctcttctacgaagacgacgcccagcaggatgggaagaaccctgacatgcggtaatcgatgttctggcggaaggagaaatactacatggtccacggtgctctgtctgctcaccgaatccctaggccgactgggtctggtatatcttactccacccacacctgctacagggcacgacggctcatccacccttactacaaatgatgctttgacatcacgcgctggcggacatgagtggaatggcaatcccgatctgtgcacacgcttcagatcggagaaagctgtaatataaccaagtaccggatatggaggaccagtactacccagtta

SEQ ID NO: 120205 - DNA, 342 bp, Glycine max
  Clone ID: PAT_MRT3847_79552C.1
gcagggggaggttactggcacatgccaaggctgttgaattttactgtaagcactttcactcatatcaggggggaaccattggcataggtggggttttcttcatgtatgacccacttagagatgaacaatgtgatatgcaagcagtgagtaggggcttggctttttacatagcctgctaagttgttaataaccaacaagctgcagttaacacctgcaacaaattcattggaaaaaaaaagtgaagagttttgcttatgacaatcatgcctacacaaactatttttattttttgaacatgcgtgaaaacaaaaatgacccatgcacatgtacggggtattctta

SEQ ID NO: 120206 - DNA, 307 bp, Glycine max
  Clone ID: PAT_MRT3847_79553C.1
aacaaatactatgaacaaacctttatacgagcaatatggtcgaagataacacatgatatgtgaatccaagttgataatgctaatagcggagctaataccttaaaggatgagagtgttatacatcatgattgattgattgtgtgctcaaggtcatattaattaatataaatagttgatatccaatgttgaagaacctgtgattaacttatctatctatttaagcgtagctgttgatgggctcattaaaagttgcttgatgagatagccgatgaacttaatgaacacatagtgaagattttgaaactga

SEQ ID NO: 120207 - DNA, 379 bp, Glycine max
  Clone ID: PAT_MRT3847_79554C.1
actgcaaatatttttttttttacaaaaaaaaagaagtataaccgatcacacctaatacatcttcaaaatcaaaggataaaaaaaatgctttttttaaagactaaaaagtaaacatttttatatttacataaaccaaatacatatttaactcaataaaatatcaacatgttaatggtacattagcaaaattctgaagcttattatgccttgtatttgtattagcatttaagtttcataattttatcaacattacataattatccaaaactatttctaataactatcctaagcatttttctgataggtaggacttaattatgtctacatcaatcatacgtactatgatataccccatgaaagaaaactcacccaaaaggga

SEQ ID NO: 120208 - DNA, 303 bp, Glycine max
  unsure (1)..(303): unsure at all n locations
  Clone ID: PAT_MRT3847_79555C.1
gacaatccaacgaattatccttanttacatgagctcatcaaaatcctcaaccaccgggcgtgaatattccgaagaggagcgagcgtcaaaaaaaggcctaaagaggcaactcacccctacactttcaatgctgctatttataatttcatctcaaccttcatcttttttttcaacccccaaatactcataacattttccatattaagcatctttcactatctacttttatcacctcttttttatctaattttttctttaaatcctccataatatttactctctttttttattctataattttta

SEQ ID NO: 120209 - DNA, 415 bp, Glycine max
  Clone ID: PAT_MRT3847_79556C.1
ctcagataggccgccacacgaccacagacggggatggcgggtttttgtgactatccatgccatttcttcaccaacacacactttctctctctatctctctctctctctctctggctgcctttcattttgctcattgttgccgatgatgtcacgcgccgccgtgttattacacgcgcaggaggaggaggaggaggagtgtagtacttccacgtcgtcgtcgatcgggaggaacagcgacccgtcgactgatagatcaatggaggaaggaagaaacgaggcggaaagtgcccaccaaggacctttgcctgccatggaaactttggaagaggccctttccatcaggagaggcatcctcgaactttcataatggccagtctaagcactccacaaccctggctgatgcaaccgcctcccc

SEQ ID NO: 120210 - DNA, 753 bp, Glycine max
  Clone ID: PAT_MRT3847_79557C.1
tacggctcgagaagacgacagaagggataccattctttcccaaattatattcctaactgtttctccaggttacttttaatctgccttattggggaaaaaaaaaggttggtttaaccaattttctaatatttcaggttaatgatatttgggctcttggatatgcttcttgagctaaacagatcttttcctttttgggtcctacttctgactgtagtttttttgttccacaagtttttctgcttctgattttctaaaatagacaaccttgaaataagaggctgtatggttatggtatatagcgctgctgtaatgtttagcttactatccaggtttcatttgctggctgaatttgatgatggtaagcgtagctgtcgtaaacgccttgcaggccacaatgagcgtcgaagaaagccacaagtgggtattcactctggaaaagctgggaggttgcttcagccatatgctggtaattacttatttctgaaattgtgttatgataaagcttctctcttaagttccatccttcttggcagtacatgaagatgcatctatttctttccttgattacttttccatcatatttgctgaagttaaaaactgattatggaattgctataacttactaatccttcacaactcttgtttaactgcttgattatgaaagatacagaaattgaagcatagcaaaatatattggttcgctttcatagttcatttccacctttgcaaagagtttctctattatatatgccc

SEQ ID NO: 120211 - DNA, 682 bp, Glycine max
  Clone ID: PAT_MRT3847_79558C.1
acaagcgtaaccatttattaatcacgattagtgagggagtgagaatccctcttccaaatctgacactacaaaatattcaccaattcccagttccgtggactgcagcacccttagatttcgttaccaaggagaaggagaagcgcccgaagcgcaataaaatggatatgtacattcgtgttaaacgtagtaagacaacctacttcatcaggtgcaagccatctgataaaattcttgacataaaacagaagttgcaagaacttgttgatcagccagctaataatcaacggttaattctacctgttactggagaagtattagaagactctaagactctggcagatcaaaaggttgaaaatgatgctgtcgttgcactgaccttgagaaaagatgataatgagtttgaggaggtcaacattgtccggccaaatgatttctaccaagctcgggatgcggatggtgccaattggtaaagccatactccaacaatggctggctcacaattaatggtggtatgatgaaatccatagtggctcagaaaacattttcaaacgattgatgaaatgacatgcttgtttgtataatactgaatttattgccttaagagaatatgacactttctttttctttggtaaaatgaagaattaaaggaggcaagttacatcactatcatagtgcccgtcca

SEQ ID NO: 120212 - DNA, 284 bp, Glycine max
  Clone ID: PAT_MRT3847_79559C.1
aagggaccataaaacaggaaccttaaagagataaaaacacaactgttagcagtggcccctaaaaagaaaatcccccataacgtacaaaaagatcaagggggcttgggcctgtacatgagccactgagacagggattggggctatgctaaatagcctattctccccttaaactaggccctcaactcacattggatgcaacctcgggaacttcttcatatgcgctaggctcctcattatatgaggaccattgccctgaggctggtgggcaaaaaagccctggtttt

SEQ ID NO: 120213 - DNA, 564 bp, Glycine max
  Clone ID: PAT_MRT3847_7955C.1
gtttgagagctctttgctatccacaaactgatgtatttttaatgtgttactccgtgatatctccaagttcatttgaaaacataaaaattcgatggtatcctgaattacagcaccattgtccaggaacaccctgcctgttagtaggaacaaaaatagatttgagagaagatgctgcagtgatagaaggtctacgaaatcatggattagcaccgatctccaaagagcaaggagaatccatgtgtcgagagattggagctgctggatatgtggaatgttctgctttgacgcaaaagggattgaagactgtctttgatgaagctgcaagaattgtagtggggacttcttctggaagtaaagacactggtaatggaggagatagcagatcatctgtcactaaaaagaagaagaaaacttgcattatcttataaaatagagaaacaaaggaaccaccttttctttttaatggaagacttgagacttggtattgcctatttattcaaaaggatgtgtacatagaagctctcaactgtattatcacataaacgtccatttttcttaaaaaaa

SEQ ID NO: 120214 - DNA, 251 bp, Glycine max
  unsure (1)..(251): unsure at all n locations
  Clone ID: PAT_MRT3847_79560C.1
gattattgttttttaattttttttttaaccncacaaaccccggggacaaacccggggagaaacacgggggttaacccggaaatccctcctgggaccggggggaaaacaaccttttctttataagagtgggaaaacaaccctggcccaaaaaagaaaatacccttttcccggggaaaaaatttttccgccgaaaaacccccaaaaaaaaaaggccccgggaataaaaaagcggaaaggtccggggggcccaa

SEQ ID NO: 120215 - DNA, 151 bp, Glycine max
  Clone ID: PAT_MRT3847_79561C.1
gccaggcgtacgaaaagaaccaccttaaataggtctaggtacaccatcgatcgggcggtctatgaggcttgtatcgaagtacgactgatgattcctatacaaaccctttataggctagtacatctacaccctacaataagggcccgttaca

SEQ ID NO: 120216 - DNA, 182 bp, Glycine max
  Clone ID: PAT_MRT3847_79562C.1
ccggctcgaggtctgaaccgattctctgatgtcattagtggtgcctcacctgtgcatcagaggggagctacttcaccacaatccagcacctgtgatattgtagaaggtggtctcttttttcattaatccaagaagagtaacctccctctccatttttatctatcattggtactcaccccctt

SEQ ID NO: 120217 - DNA, 673 bp, Glycine max
  Clone ID: PAT_MRT3847_79563C.1
acggctgcgaagacgacagaagggggagaagacaacagatttccttgaatttggaaagaaatctttatctggaaaagtggaacccttgctcctatctttatatttaaagctcacaccgaacgagtttaatggctttgaagaagtgcagagactgtatgatcaagaaggtggcataaagctgcctatatcgaccactatgggtactgaaaatgtccttaagtttccaacacctcatgtaatccaagctagcacatttgcatggatgactgacgaagaatttgcaagagagatgattgccggtgtaaacccaaatgtaattcgccttctaaaaagggaggatctcgcaccgcgaaggaggctagattgcaaatgtaatcatagtacaataacaaaagaaaaattggagattaacatgggtggggtcacagtagatgaggcattttgtaataagagattattcatattggattactatgatgcattcatgccatatttgaggaagataaacgagctagattctgcaaaggcttatgccacgaggacattcttgttcttgaaagatgatggaactttgaagccacttgctattgaattaagcaagccgcatcaatgtgtatatgtcctgccacatccaccacatatgcgttcatcttcatttctacattattatttt

SEQ ID NO: 120218 - DNA, 455 bp, Glycine max
  Clone ID: PAT_MRT3847_79564C.1
ggaaatcgctgagaagattgattcctttatggagaaggccacacagggatccttcatcccccatggacgtcaggatgttctcgccgctgctattggatgtccagatcaccctgaacatgtccgtgctgctggagccagtgtcaccatcaggcaacggctccacggacgtcctgcagcgcttcctccctgcctcttgacgaattgcagcagttcacccagcaaatcagggaccagctagaggagttcatcacagagaaagtgacgagacaggtcatggcatccttcagccacatgcagtcccagcttcagtcgcaaatgcaatcccagggacttgcagtgcctcctgaccctctggttggtccctccggtcctcgagtgagcacacaggggagttgtgttaatccctcaggaaacgatcctgagacgggtgactctgacaggtgcggcttgtacat

SEQ ID NO: 120219 - DNA, 745 bp, Glycine max
  Clone ID: PAT_MRT3847_79565C.1
ggctcgagccccaacagtattgatacctgttatagagattggaacatctagttgaacaggcgctggtcttgcaacgtgaggctggcctgtttcacaactcattggataaagagatgtcattatattcagatcatcactgtggaaaaactcagataccttctaggacatcacagatatcagaagcacacgatgatgaagtttggtatgtacaattttcgcataatgggaaatatttagcttcagcatcaaatgatcgatctgcaatcatttgggaggttgacatgaatggtgaactgtctatcaagcataaattgtctggtcaccagaaatctgtttcttctgtttcatggagtcctaatgaccacgggctcgtgggctgtggcgtgggggaggctgttaggcgttgggatgtctctaccggtacgtgcctgcaagtttatgaaaaaaacggtcctggcctcatctcctgtgcatggtttccaagtgggaaatatatactttctggcctcagtgacaagagcatttgcatgtgggatttagatgggaaagaagtggagtcttggaaaggacaaagaacccttaagatttctgatttggaaataacaggtgatggggaacacatgctgagtatttgtaaagacaattcaatactgtacttgaacaaagaaacgagggatgagagatatattgatgaggaccagacaataacttccttctctgtatcaaaggatagcagactcttggt

SEQ ID NO: 120220 - DNA, 187 bp, Glycine max
  Clone ID: PAT_MRT3847_79566C.1
gaatctcacgtgttagagaaaaaccataaccatgtctggaagatgaaagggaggcaagggtctcggaaagggaggagctaaacgacaccgtaaggttctgatggataacattcaaggcataacaaatcccacatttctccttctcacaacacataacagcattaatcatatcattagtctcatctac

SEQ ID NO: 120221 - DNA, 220 bp, Glycine max
  Clone ID: PAT_MRT3847_79567C.1
catgtccatgctccttcttcttcttgtccttcttcttctttttctcacccttgtcatggccatcaccatggatcttggccttgatcttatgcacaagtgcctacttgtgctccgcatggtgttgatgtccttagtgttcacctttgtgctcaccatggtgtagtacattggggaaaccattgtgctcaccatggagatctcctaagtgctgctgattatt

SEQ ID NO: 120222 - DNA, 473 bp, Glycine max
  unsure (1)..(473): unsure at all n locations
  Clone ID: PAT_MRT3847_79568C.1
attccgttccaggaaggtttcccgtcatcactgtatgacgtcctccttctttgggggggggggggggaagtgcttgcattgttggcgtaacggtgtggatggtggtaccgaatgcgctagcggcaacttccatgtcggaattactggtagtaagtaaagtgagactgggcgtccctaaaaagtcagtatgcgagagatgccgatcatagtgcgctactactgataacacttgtagtatgagacgtccaatggcgccgcaagggtagagtctgtgtgacagtttggtacgagggngagcctgggtagtgatcgggccatgtgcatatgggaatgccatgccaagatcgtgtgttaacantaccagtgggggtaagggcatggttgagatgtcgtgaacgggcgccatgttaagatatgcgacggtattgtgcgtaacactgcctgggacgagcggactactagtaaggcttttg

SEQ ID NO: 120223 - DNA, 193 bp, Glycine max
  Clone ID: PAT_MRT3847_79569C.1
acacgtcaactggtgtgagcctcacggagtccataccatgcgagccaacgtctttggaaccctaactctctccaacatgtgccgagaccacgggctcattctcatcatctacaccaccggttgcattctccagtacgactccaatcaccccttcggatccggtgtgggtctaaaagaaaccgactctcgcgat

SEQ ID NO: 120224 - DNA, 537 bp, Glycine max
  Clone ID: PAT_MRT3847_7956C.1
ttgcgttaaaatatattaattttttttcccgacacggacaattggggaattcggtgattgatgattgcagaacaacacgccccaaaccaccaaagagaagcaaaatggtgatcactgcacagggtgaataatggagaactatataacacagcaggagcaaacacaaaaaagaacgaaccatagtggaacaccgaaggcacccacaacatataccccctaaactcggaaacacctaccttgataacaaaaaaaaagcctgggggcatcaacaggccccccctcactcatcatcttccgctccaatcagctccaacctcctcatagtccttctcaagagcagcaagggcctcacgagcctcaaaaaactccccttctttcataccctgaccaacacaccagggaacaaaagccctcttggcatacatcagatcaaactcgtgggcaaggcgagagaacacctcaacaactgcggggccgccgatgaggatgcatacagcacgctgaaccctagccaggccccccaccaggaacaacaaa

SEQ ID NO: 120225 - DNA, 144 bp, Glycine max
  Clone ID: PAT_MRT3847_79570C.1
cggttcactccaacgagaaaatccacccactgtgatgcaactacatgctattggaccaatgatgcctcacaccgaatcgcccagtgcatacagtaaacagtgctcatctaatgacgatgccacactataccagctattctattg

SEQ ID NO: 120226 - DNA, 484 bp, Glycine max
  Clone ID: PAT_MRT3847_79571C.1
ggccaaagaaactgtatggagaagttgacaatcttatcatctgagccagttggaagaactatataggaacgatgtaatgcattcacatgtaagggaatgccaattggaactaatggccaattttttttgggcagaagttggcaacattgtgattacaacatcacttgcttctgaaacttcataaggggttttctttgtgggaactcccatttgagagaacatctcgagaacatcagagtttctgctaattttgaacaaactcaattaacaccaccacaaacaatctgtttaaatttaacaaaaaatgaaacaaccaatttatgttaacagtgccattaactcaaactctcaagccatgccccaaatatctaatctatatcatatgaaattgcacctacaaaagaaatgagaatatagtagcactatcacagggacgaacttaagaacaaaggcatgtttttttattttttattttttagcaaat

SEQ ID NO: 120227 - DNA, 950 bp, Glycine max
  Clone ID: PAT_MRT3847_79572C.1
cataagtgatcaagaacggcgtatgtattaccatatatttcatttcagttacagttgacaagatcagccagaaggtctatgttacgaacactcatatacacatgtttaacagaaaattaaaattataaacactagttacaaggcaaatccaagattacagatcattttattaggaaaaacaaggttttccaaacatatgcaacggataaacgacatacaaccacaagaaacataagttaacagagattttgtccaagcatcatttcagttgggggcaaaatatggagcaaaaccagaaccaaaaccccttctttttcttctttgatggcacaagttttgcatccctcttggtgacaaaatcagccatatactgcacaacttcctgagaacccaacttgaccaattctcttggtggcaaatcaaggggggtctcatcagccctaaaaactctcaactttgacaagaacctgaaagactctggtagagcttttatttgatcatcacttatgtccaactcctcaagcatttcaagatttccaattgatgctggcaaggctcttaggtccgcgaagttctttcccaagttcaatttcttcaaattagttgcaaaacacaggctctccggtacaaactcaagttcattaaagctaacatcaagttccttcaaattgcatagattatccattgtggaaggcaacctcttaactctattatagtgcaaagtgagaatctccaagcattcaagcttcccaattgcctcaggaagggccttgagctgattcaaatccaactttagcacggatagtgatgagcaattgccaattgtgtaaggcagttcctcaagctcgttcgtttcaacattcaatcgcttcaagctgctcaaattcccaattgtctctggtaaatctgtgaacccatttgagctcaaatcaagatcagtgaggtttgtc

SEQ ID NO: 120228 - DNA, 256 bp, Glycine max
  Clone ID: PAT_MRT3847_79573C.1
tatagtaactacttgcgcacttcatgcaactattaattttaaacactatccctatgggaatttaatcttaaaccgtccaactcttaataaacaatgcatgcctgataaaagtggtgctgagtattaaaaacttgaaaaaaatccccagaaaactgacgtagaaactattacaccaaagtgtcagacccttattaacctttctattataaaaatgttgtgggaacatacatctaatgagatggaccttaaggagaaa

SEQ ID NO: 120229 - DNA, 179 bp, Glycine max
  unsure (1)..(179): unsure at all n locations
  Clone ID: PAT_MRT3847_79574C.1
tgacgtttactgtagcattctactcaaactagtntatcctccaaacccccttcttcgaattttcacttttcccacttgacgcctttattcatattctttcattcttctccaaaacccaaggnncgaaagctctctctggatgggttgcaatcaatccaagatcgagaacgaggaagcgg

SEQ ID NO: 120230 - DNA, 307 bp, Glycine max
  Clone ID: PAT_MRT3847_79575C.1
tctaacactcgttcgttatattcaatttaacatcacatttggagctcaccgaaaaatttacattgtcaagcatacttctaacataaaacgaagccaagggtattcatacacgatactatccaaacatacatcctttacagttctaactgataacatctccataatcaccaatccctcgattcgaccactcaccatacattacttcgtcaagcttatcactgatattatctattaacaaactagcgaagttctcaagatcttactatagaaccacattcgcgacactttcacctacactgaacactct

SEQ ID NO: 120231 - DNA, 644 bp, Glycine max
  unsure (1)..(644): unsure at all n locations
  Clone ID: PAT_MRT3847_79576C.1
aannaaggttaataacacagtaggcacatttcagaacaaaacctcaggctgtgcaaaggaaattactcttagtattcatccttatcatctatgcaggtactgaaaatgagttattgaataatttattattatcatttatattaaagtaacctataccaaattattatagatctactaatagatagtggtttggggttgagcaattattttgtattttctgaccggcacttatactacatttatgctccagtgtatgtaatattggaagatgactgggaggacaaaatcttgcactgcatgaggaatggaagtgaattgtggctctgactgcattccatgctgccgacctgccatcgcttccaccaagttgtagttttaacaaataaaaaaatagaagaaaaaaaacttcttaggaaacattattttataatagatgctgcaatttatttaagtaaaacgggcatctacttaataatttaaaaaaagtatttaaaaaatataatgcaaaccaatgcataattaactttaataataataataataataataaacattttttgtataaaaatggattttattnnnnnnnnctcaattaataagcnnnanattannnnnttcnnnnnnattggatcccaatagatcta

SEQ ID NO: 120232 - DNA, 240 bp, Glycine max
  unsure (1)..(240): unsure at all n locations
  Clone ID: PAT_MRT3847_79577C.1
agcattattataattataattataacacatagtaataatatacatcattttatttgtagcaagaaacacaaatgcaaaagtggtcacggtgtactaggtactaacaacagacggtggtggttacctgattaatgaacaagagatcacaggttcacgtagtattcttgaccaagtggcttcactgcccanttgccacnctcgtccttccaagggccgcagcggccatctaaagtcaatttt

SEQ ID NO: 120233 - DNA, 239 bp, Glycine max
  Clone ID: PAT_MRT3847_79578C.1
cgggtatatacctttattttaaagaaataataacaaaatataacacacataatgaatctcatataatgctatatttctttcccctaataaattatgtaaacacgaagatgttttaactataaaatcatattatatcactcaactatttcatatgaaaggttaacccatatctaaattttatcatgaacattaaattgaatatgaatatcatctccacttgcatattcattcatactatt

SEQ ID NO: 120234 - DNA, 1660 bp, Glycine max
  Clone ID: PAT_MRT3847_79579C.1
tttgagttgtatttagcattctttcctttttactttttgccaaaaaatggctgaaactgaaccaattgtaccgccatttgtagtcccaagacgtgacgatgacctgttgcagtgttcgaacacaatttactacgtcaaagagttgatccaggacgaggaggagatacgggaagcagtgaacgcgttcggtgacggcgtacgccaaggcgatttcgagcgcattgtcgagcattttgaccatttctttgcgcttgtgcgcagtccgagttcttcggcgcccaacgacgtcgccaccgctgccgccccattcgacgcgcaactccgtacagaactcgccgaactgctcatcgacagcctcgagaatttgcgcctcactctccaaatgcatatttgcgacataaatgccgtcgccacggccgccgctgcttcggctaacacaacggcgacgatggtgggccaggaggaggcagttaccgccgacactgacggacacccgcgacaaaatgcggacgaacggcgcaacggacggaccacggcgttgaacagccgatacagcaactgtttgctgatgcacgtgtacctgttatccagcctgaccaaccattttgaacagcacttgaacaaacgaactcgttcggctgtcgccaccgcaacgcccggtggaacgcgaggcaaacgcaaagttatgcgctttgacaattccgaggatgacccaatcgtgcagttttgggatgtgcaggacaggcggtataagctgatcaaggcactgtacaatttaatctcgatgagtgttaccgcggaggacaacgatgcggccgttggcgacgaaccccctcggactcagtcgtccgccctccggtacctttggacaaatcggcaaattgcattctctcaattgtgtgtaaatttctggaaaacccggaagtgtgtaaagctggcggtcgtaccaacatgttcaacgtgttcacgctgctccgtctcatttgcatctgttgggacatgaacaaagcggttgccattgcgctgattgacctggcgccccgtctcgactactttcagtccgcccagcaggcgaccaccttccccttcgtggaagcgatcaaaagtgtgcagaccgacaacgagatggagccgttgctgcgtgagatgatagcctacggctctaagctcgacaccgccgcagcggagagcagcagcagcaccagcggaggtgcggggactagtgttggtggtggtggtggtggtggcacgggcggtcgtgcggcaaccgaaacggcgacccgtgccttcgcgctgttcatcagtgcgacggtcgagttgaacccacggctgatgcaacggaatttggcatttattatgccattcttgaaaagcgatcccccaatgttgcgcaactccgtcttgtttgtgttcactgagattctcctccattgcttcgactgtcagcagttggaccaaacgatgagtgatcagcgggacatgctttttgcccttttgctggatcacatggtggacaagtcggcactggtgcgtgcccgtgtgttgcatttgtgggccaagttggcgtcgaagaagggcgccattccgcccgtccaattccgtctcggattgctctgggaggcacgcggacgcctcaatgacgactcggagagcgtccgca

SEQ ID NO: 120235 - DNA, 549 bp, Glycine max
  Clone ID: PAT_MRT3847_7957C.1
atggttattcttagagaatttgacttccttatttctgatgggaagggatctcagaattatgatctttccttgtaccatacatgtttctacaatctccagtgtttttcccttagtttctggtgtttccttctgtaccaacttttttctaatgactcaaaggtgaaggcagaggagcaggtatcaaaaccaggggtgtttagtcaccaagagaatgagtcaaagggcaacatagatagtgagaattatcttgagagggatgagaaagtgaggaacttcaggagaagtatggttccaaggagctttcagaactgttttgaggagcaggagccaagtttggaggaggtgaagcaggattttgatgtttttgatgagaacaaagatggctttattgatgatgaggagttgcagagagttctttgcattttgggattgaaggaagcagcaaaacttgagaactgccacaagatgatcaggatctttgatacaaatcaggatggaagaatatatttcattgaatttgtaaaaattatggaaaattgcttccgctaa

SEQ ID NO: 120236 - DNA, 709 bp, Glycine max
  Clone ID: PAT_MRT3847_79580C.1
cggctcgagcggctcgagctcgtaaatatcaccatcaacaggcaacaccttttccggaatcaattgatgtcttgtccttctcctccctcagttcctcttcactccctttcattctccctcgcctcacacgcacacgcacacttgtcattctcaaaacacgcccaaattcgaatcaaattagggttagggtttccaactcccctcgaattatccctgtaatgcagtttaattcccgggtcctactaccatggagccatcagcaatgtacggacactcccagcccctgagcatgccctcgcagatcggcggcggcgaaagcgacgacggctccggaaacgagcacgccgtcgacggccaccaccaccacattcagtacgaaacgcacgcgctcgaggacggtgccgccgtcgtcgtcgaggatgttacctcggatgcggtctatgtctccggcggtggaggccccgtagagtccagccagcttacgctgtcgtttcgtggccaagtgtacgtcttcgatgccgttacgcctgataaggttcaagcggtgttgatactgttgggtggatgtgaactatcttcaggtggttcgccatgtgtggatccgggggctcaacataatcaaaggggttcaatggaatttcctaaatgtagtctaccacaccgagctgcctcattacataggttcaggcagaagaggaaagagcgatgc

SEQ ID NO: 120237 - DNA, 1397 bp, Glycine max
  Clone ID: PAT_MRT3847_79581C.1
tctccctttcattttccctcacactcatcattctcaaaaaacacgcccaaattctaatcaaattagggttagggttttcaactcccctcgaattatccctgtaatgcagtgcgattcccgggtcctaccatggagccatcagcaatgtacggaccctcccagcccctgaacatcccctcgcggatcggcgctggcgaaagagacgacggctccggcaacgagcccgccgtcgacggccaccaccaccacattcagtacgaaacgcacgcgctcgatgacggtgccgccggtggcgccgtggttgtcgaggatgttacgtcggacgcggtctatgtctccggcggtggaggccccgaggagtccagccagcttacgctgtcgtttcgtggccaagtttacgtcttcgatgccgttacgcctgataaggttcaagcggtgttgttacttttgggtggatgtgaactatcttcgggtggttcgccatgtgtggatcctggggctcaacagaatcaaaggggttcaatggaatttcctaaatgtagtctaccacaacgagctgcctcattagataggttcaggcagaagaggaaagagcgatgctttgataaaaaagtgagatatagcgtacggcaagaagttgcgctcaggatgcatcgtaacaagggtcagtttacttcatctaagaaacaagatggagctaatagttatggtactgaccaagattcaggacaggatgatagtcaatctgaaacctcatgtaaacattgtggcactagttcaaaatccaccccaatgatgcggcgagggccatctggtccaaggtcactttgcaatgcttgtgggcttttttgggcaaataggggtgctttgagagacctttctaagagaaatcaggaacactctcttccaccagttgaacaggttgatggaggtaatgacccagactgtcggactgccgctgccgaccctgcacaaaacaatcttgctgctttctcagagcctgttaatccagctttggtagctgatcgtaaggttttccaatctcagaaaatgttggagtagttgactctggcataagtaggtctatagttattccattcagattgaccaataggaatgtacagatataacaatactcccatcaatgcaagaactttgtttttatatggtaggatcagtggcattaactattgatctctggatgtatcacctgaaacttaaatgatgacttggtgatggtctcacccaataccttgaatttaattttacatgtatattgttggatctatggcattaaccattgatctctggatgtataacctgaaacttgaatgatgacttggtgatggtctcacccaataccttgaatttaattttacacgtagattttttgttca

SEQ ID NO: 120238 - DNA, 292 bp, Glycine max
  Clone ID: PAT_MRT3847_79582C.1
tctggctcgcccgcgcgtgatttctaccaggctgcacttggaagacggatgaacgctcaccgcctacaacatccagaaggagtccgcgctgcacctccccctccgcctatgtggcggcgccttgaagcgtctgacgaagacctacgccaagcccaagaatatcaagcacaagcacactaaggtcaagctctgcattcttcagttctacaagggcgaccaatcttgaaaagtccagaggctccgctaggagtgccccaacgccgagtgctgcgccggcaccttcagggccacc

SEQ ID NO: 120239 - DNA, 522 bp, Glycine max
  Clone ID: PAT_MRT3847_79583C.1
ccctattacctttacattcccttctggggcgcttacagggagggtcttggattaaatgaagacaataatgggttaaatttaggggaaaacgacaaacaataaccaaaaaaagagaaaaaaaataggctttaattggcaaggcaaaaccttccctttacatggcattcccttctcggggctgccccgccaaggcgctaggctccccccaccactcaaaaattactaaacaacaccggcacgcccccgggtaaaaaaacagggccattctcttgggttacaaggatataaaacccccccccgcccaaaacgaattgcatttgggtgggggcagcttccacaaaaattagcgcaccctcctgacaaaagaaagaaccccaccccccgcatcccccaggaaaaaaacaacatttccaaagaaaaaaaaaaaaacgtaccgaggcctccctgggggaaaaaaaaaacctcttgggggggccgaacccccccctttttgcccccaaccctaaaaaaaaaaaaagaaaa

SEQ ID NO: 120240 - DNA, 282 bp, Glycine max
  Clone ID: PAT_MRT3847_79584C.1
gtgtatatgagtcgagaggtaatttacgagggggcggaaacacaatctcaggcgtacatcacacgtgtgctgggcctattccaacataaaagcatgaggataacattggcccatggcgcaacacatgcgcgagctaacaatcataattttacatctaaacatacaaaatacaaagactttaagttaagcctgaaaaaaaaaagatagacagatcattggtgaaaagaaacctaatcccaggaacgctggaatgatctctttcgttgaaaaaaactcggttaa

SEQ ID NO: 120241 - DNA, 426 bp, Glycine max
  Clone ID: PAT_MRT3847_79585C.1
ctcgtccttttttttttttttttttttttttttttttttttttttttttttttttagggggaagggtttttttccttaacccggacgggcagacgcgggtgattggggtccacatgccttaaaaaaaaggggaaccggccccttttataaaaaaagttcctaccaaaagagcgccgtaagatcccatccacatacaaattttccaggctttcctccaatggtgccctccccccttttttttttaaacatccccggccacgagggccccgttggtgagttccctttaggcagggacgggccaactgaaacccctgaaaagcaagcgagaatcccaaggaacactcgggaggatcccctctctggggggaaagttttcattccttatctcaaagggggggctccgacccacccaggcgttccattccc

SEQ ID NO: 120242 - DNA, 331 bp, Glycine max
  unsure (1)..(331): unsure at all n locations
  Clone ID: PAT_MRT3847_79586C.1
gttttcgatgacaagctgggggcgctctgcatgcaatggttggaagacaaggtcttttcaatcagagatgctgccgctaacaacnngaagcgccttgcagaagagtttggtccagagtgggcaatgcagcatataatccctcaaggtgctggagaagtccacaaccccacactattatacggatgacgatctgcagnnatctccttgctantctgnaatgggtgcagagatccactgtcaaaagtgcttcaagcggcataattcttcgaaggcaaggttccaacancagtcatgtgcgaaagactacagnactgtacgncctnacnantgt

SEQ ID NO: 120243 - DNA, 2991 bp, Glycine max
  Clone ID: PAT_MRT3847_79587C.1
caaaagctgaatctgttggtctaaaaaattccatagattttcttggtgtgaattactacaccacttattatgcggaacatgctgaacctgtcagtgccaaccgaaccttctacacagacatactagccagtctcagtagtaagtacttatggcaaaaccaagtaaattttggtacagtaaattattattattacttttttacaattttttaacagtgaactgacaaacacaagttacaattttctcatgatcacagcggaaaggaatggtctacatgttggaaccccggtataataaattttctgccaaactaattaaacttatgctatttaatttttgttggttgatatatatatataccatttccttcatgccatacaagtagttttttctgtatctatgaaacaaattatctaaaattatttcaactcaattaattttgatcttataatcaattatgtctaattaaatatgtgaatattttaacggaattttaaataatcaaacgtggaactggacccaaacatatatttataatgtgtttgggttttaacctccaaaatcatgtgaaaaaattggaaagctgggacgaactgcgggccccggtccggagaccgagccacgcgtccggaccacgcgtccgttttcaaatgaatcacctgtcaccttgatcgtgacaaagtaccagctccctcactgaagatcactgcggagctcgtattcaacacacccctgcctgccaattttgcatcttgctcccccggtcgagccagccttttccgctcggggcctctcttcagttttgctttctgatccggctttctgtcgcgtccaactacagcggacctggtcttaagcaaggactaaccccacaccattcattgaagcccgctaggatagtataaggattagataccatgatggccatcttaatttccttcttcaagcgatcaagtaagagagtgaactggatttctctatctaaacatctttttcgtacttacttgcgtgtttatttctggacttactttgtttcctttctctttccgggaagttgttgagttgatgggctattttccttggtcatttccgcacagtttggattgaaatgctggtaacaaagtttttgaaactctcatatatgtccattaaattaggcgtccgaaaggctgcgagaagacgacagcaggggatcgaagcaaaaaatgaaaacccaaagtgcttctctcctctgtctttttctctctcttgctatccttttggctagtggcactgctgcaagtgcaactccaagaagcgcagtgccaagccaccatgtttcaacattcaacagaagcctttttccttccacttttctctttggaattggttcttctgcttaccaggcagaaggagcagcaagtgtagatgggagaggaccaagcatatgggacacctacactagacagcatactgaaaagatttgggatcatagcaccggtgacatgggagctgatttttatcatcgatacaagggtgacataaaaatagcgaaagaaattgggctggactctttcagattctctatctcatggtcaagaatattcccaaagggcaagggagcagttaacccccttggggttaaattctacaacaatgtcatcgatgagatcctagcaaatggtttaaaaccttttgtcactctttttcattgggactttccacaagctcttgaagatgagtatggaggattccgtagtcctaaagtagtggcggattttcgtggctacgcaaacttctgcttcaagacctttggagacagagtcaaatattgggtcactttgaatgaacccttatcatttagtctcaatggctacaatggtggcacctttgcaccaggtagatgttctaaatacgttgccaattgtagtgctggcgattcatccactgaaccctatatcgttggacactacttattacttgctcatgaatctgctgccacattatacaagacaaaatatcaggctcgtcaaaaaggacaaattgggatcactaatccaacacactactttttgccaaaatctcaaagtgctgcagattacaaggcagcaagtagagctctggacttcttctttggttggtattctgatccggttttctatggtgactatccggagagtatgaaatcttcagtaggttctaggctcccaaaattcacaaaagctgaatctgaaggtctaaaaaattccatagattttcttggtgtgaattactacaccacttattatgcggaacatgctgaacctgtcagtgccaaccgaaccttctacacagacatactagccagtctcagtacggaaaggaatggtctacatgttggaaccccgactgatttgaattggctctttatctttccaaagggaattcatcttcttatggcacacataaaggataaatacaagaatcttcctatttacatcactgaaaatggcatggctgaatcaaggaatgactcaataccagtcaatgaagcccgcaaggatagtataaggattagataccatgatggccatcttaaattccttcttcaagcgatcaaggaaggtgttaatttgaagggctattatgcatggtcattttcggacagttttgaatgggatgctggttacacagttcgattcgggctcatatatgtggattacaagaacaacttgaaaagataccccaagttctctgctttttggttgcaaaagttccttctcaagtgatctgaatttagtgttcctttgacatgtctagtgtttttcttgtttatttccctagatttcatcgtatatcacttgtgttggatgtaatcaagagatcattttatcaaataaataatgccaaatggcatgtcgaagtaaaataccaccggttcattatagtggccatgagttctagaggttcattttgaggaagaatgctaattaataataatcttatcactctttttacgttctcccccaaaaa

SEQ ID NO: 120244 - DNA, 455 bp, Glycine max
  Clone ID: PAT_MRT3847_79588C.1
aattaaaatacatatggtctcagccatgaaagccaatcaacaaagaaattacatagatccacagctaaactaaaaacgactgtggtcgccctattctgtggagcttacaactacatcatgggttgagttgattttggttgaggttatattatacactaaatctagggcccttgaaggggcattattgggcctgaagaacattaatattatttggttagtcaacgggaaatatctgactttgcggggttgactaactgttgctccatctcccaacttattttgggggcaacaccacagtgctgggggacatattcctcaagtttgcacatgatatcttgggcagtgtgggcagaaacaataatgagacgggcagctggtgatactaaaccttcgtccacagctttgaccatgaatgccatcaccgagttgtagtacgcatcctcgtttaacaaccc

SEQ ID NO: 120245 - DNA, 1055 bp, Glycine max
  Clone ID: PAT_MRT3847_79589C.1
ccacgcgtccggtgaaacgacttccaaccctgcgttcaatccggtagaacacgaagtctgtgtccgttgattttccctcttcttcttctacctcctcctccttcttcaacgaaacactcaccaaattgcgcattcgcagcgatggattattcagactacagctaccaacagcaaccgcaacaacattcctatggctacgacccttctcagatcccaatccaaccctacgatcaatcctatgctgcgtaccaacaatactacgcttacaatccccaatacgcgtattaccccaacgcacaccaaacccagtttcagttccaacccgaaaccgctccgcttcaccctcccggcgtcaaccccgccgctcccgaacccgccccgactgggccatctcaatacagaggtaggggtggcaggggtggtagaccatttagaggggctggtcgtggtcgaggccatggtaggggacatggaatggggggtggtagacacataccatctcattcttctggacctgctttttctaatgtgccagctcgagtgcaaccaccagtaccaccacgtaaagtgtgctgtgaaatttgtaaggttgagtgcaatagtccagaaatcttggagcaacacaaggttgggaggaaacatcagaagaatatgagggtgcatgaagaatcgcaaaggcgcaatgctataaatggacaacaaagtgggaaaattcctacctctcaattgaatttaacagtccaacctcaaggaagttcaggagtccgagaaaaatgaatgccccacagaaaatatgggctcgggggttataatcaatagtcacaaggaggaaatgcagctgcagaataatgtaggaaacatttctgaggttccagctgaagtgcccgagggaaaaaccgaggataactctgctgcaagaggccaaggattgaagcggaagaagaaaggaggaaaaggaggtaaatacatgagaactaatgatggttctaagccagtggaacctgcacaaactatgtcttttagatgtgagctgtgtgatgttaaatgtgagtcac

SEQ ID NO: 120246 - DNA, 792 bp, Glycine max
  Clone ID: PAT_MRT3847_79590C.1
ggctcgagcgtattcatgtgctgtagcttaaggcataacatacacactgacccataacataataaaccttttttttttctttctctctctcgaagccaaagacggtgcaaggccaagatcttcttcagctccttcataggtgcatgagtttcagattgaattggtttttgggcaccaaatagcaatggccacggtggagaggatcctgttggccctgcagaatgagggtgcaggaggagaatccttgttggggtcaataaaaattgctgtgatgcccatagttaaagtgttcaccatgtgttccttgggactccttatggcttccaagtatgttaacatcttgcctgcttctggaagaaagcttttgaatgggctggtctttacactcttgctaccttgcttgattttctcccaattgggacaagctgttactttggagaagatgcttgcttggtggtttattcctatgaatgttgtcctgagttccatagcaggctcactcattggttttgttgttgccacgatcgtccgtcccccataccctttctttaagtttacaattgtacagattggaatcgggaaatttgggaatgttccacttgttctgatttctgcttgtgcgtttagaccaatccaatcctttgagacatggaaaaatgcagtacagatggactgtctatgtatcatttggccagcgggtctttgctttcattctatattcatatgtatttcaaatgttagccccttctccataaggtacatttttcattgataatgaaagggttcccttta

SEQ ID NO: 120247 - DNA, 257 bp, Glycine max
  unsure (1)..(257): unsure at all n locations
  Clone ID: PAT_MRT3847_79591C.1
ctacacacacnnntnnctttaaagaaactttttaattcaacacgcacccccccctttttctaaggtcattacacacccatttcacatttcattctttttcaaaactattgcgaaaatccaacttccaacataacacaaaaatcatctccatcttaaaaccccccacaaatacacaacaccaaatacacagtttactccttctagattttttaatcatcgagggtccttccatcctctagctgttttccagcacaaat

SEQ ID NO: 120248 - DNA, 428 bp, Glycine max
  Clone ID: PAT_MRT3847_79592C.1
ctagaagcggccgcccaccccccccccccccccccccccccccccccccccccccccccccccccccccccccaaccccggaatggcgttaacctcatctaaaacttcacctatcaaaccataaaggttttgggtgtacaactgtttaaggggtacaaaattgactgttttaaaaactttttttcgaaaactgggatgctcaagcccacaataataactgctggaaattgacaaaaataaataaaggggataaccttcccaaaaaaaggccagcaaaaaataaagggcaaatttggtagggccccttaatacaaatcctttttcaagtttttgaaaaaaaatgttttttttaaaacctaaaatcctcaacaaggaaacccccttaaggggcccttaacccctcaattgttttttaaaaaaacttttcc

SEQ ID NO: 120249 - DNA, 509 bp, Glycine max
  Clone ID: PAT_MRT3847_79593C.1
cttgatcaaaaatcaaattctgagagagattatttttttatgaaatctctttaaataattttttctttcttgttttccctccactccttttcatattaaaagctatgcaatttactctttttcatcggcaattttcaatattccttcttacaaatgtataaactacattaaccaatttgtgaatgaatgttatatcataaaaaatgctttatagataatataactcaatataggtgaagaagagtgtgttggtgaacatatatatctttgaataatattattcttactcatttttcccacatccctattttacaatttttttttcttttttactttcatcacattggttatcttattctacactcctctatctgtctctctcacacacacacattcagttgtaaaatgtgtattataaagttgtcctatgaacaacatttttctagcaagtaggtatagacgtatagttaatgtataaaactatgggatgagaggtctttgcttctgac

SEQ ID NO: 120250 - DNA, 910 bp, Glycine max
  Clone ID: PAT_MRT3847_79594C.1
gctgcgagaagacgacagaaggggggagggaatgtgggagaacattcttggaaagcatcagcagtcgctgaaatccctattcctccgaagcaagccttcttcccccaacgccgacgccgccgatgactatgccaattcccccaaacccatccctcagctctctcctctcgccaactccgtcgtctctcgctgttccaagatccttggaatgtcgacacaggaattgcaacactgcttcgattcggaactccccatgggcgtcaaagagcttctcacctacgccagacacctcctcgagttctgttcctacaaagcgcttcacaaactcattcaaatctccgatttcttaaacgacaaggattttcatcgtttaaccttcgacatgatgctcgcttgggaggctcccagcgtccacaccctcccagataccccttcttcaagttcaagtaaagaggaaaccgctggggacgaggatgacgcctccttgttctattcgagttccaccaatatggcgcttcaggtcgatgacaagaagacggtgggtctagaggctttctcgcggattgctcctgtctgtgttcccattgccgatgttgtaactgtccacaatctcttccatgcactcactagtacctccgcgcaccgccttcattttcttgtttatgacaaatacctaagattccttgacaaggttatcaagaattctaagaatgtgatggccgcatctgctggaaatcttcagcttgccgaaggagagatcgtcctccatgttgacgggacaattccaactcaaccagttcttcaacatattggaatcactgcatggcctgggcggttgaccctcaccaattatgctctgtactttgagtcactgggagttggtgtatatgagaaagctgttcgatatgat

SEQ ID NO: 120251 - DNA, 254 bp, Glycine max
  Clone ID: PAT_MRT3847_79595C.1
ctctaacacagtgtccactcgtgcgctcttgatatcctcatcctagaggacggcacgggggttcttaaagcaagagatccatattgtctcttgctagtaccgcaaggcatttttaggactggtcgagttagcgtcaacggtttcaatactggagcgtcagattccacgtcacaccagtttctggccgcgagttccatgatccttgcatcgcagtccgccacaaccatggttacaggggtgagcgctcttacacc

SEQ ID NO: 120252 - DNA, 257 bp, Glycine max
  unsure (1)..(257): unsure at all n locations
  Clone ID: PAT_MRT3847_79596C.1
naattgttgtaagagtggnttgatggtttctggtggggtattatccgcttcccattgaaccagttgcctacctggttggttttgaacttgtaattgggtaagagtggttggtgtatctggtgggtaattattggacccctttttttagttatatctgtagaatggttttttttatccccatagctatgggctaaaaaatttggccctgcttgccttggtcttttcccaaaatggcaattattattattattattggt

SEQ ID NO: 120253 - DNA, 323 bp, Glycine max
  Clone ID: PAT_MRT3847_79597C.1
ggaaaaaatttaaatggatggttttttccaatttacaatttttttacaattttttgtttaatgaacataaccgggacgggggggggagaaaaatttttacatgaactttggttgctttaaaaaaataatagcgggggttgcaaaaaaggggtcctttgtaattaagggccaaacaaacctagggggggggaatttaccgaatgaaaaaattggaaaattgtaaaccctcagacccgaaaaaaattccccttaatagacaagggttttaatttccccatccctttgtttttcgcattggcatataattttttggtttccaaaaa

SEQ ID NO: 120254 - DNA, 739 bp, Glycine max
  Clone ID: PAT_MRT3847_79598C.1
cgggaagcacgataacacgcccacacacacatacactcaaaacaaaagcatcaacttccacagaaattagtttctcttgtactgtacgtacatgttattgagcatcatcaaatatggcaccacccactgacctcagagttatagcttcggaaggctttgatctgatagacaagttttgtggaccatcagcaccaagaaggcccaataatatgaatggggtatttcctgcaagacaaggacgttgggtggttcaagtgcccaatgatgagttggaagagcctatgagtgtcatcaatagcagagaggctgcagctcgctatggtgggattatgattgtgaattatcccaaaaagccaaaacttggtagatcattcaaaccttgatcattttggtttagatataatatatacttatagcttctataagactataatgggtctgtttctagtataggccatctcatatataaattatataatgtatatgatgatcagcatatatataaaatactatgtatataggaagcacctcaaagtattgcagtaagatcatttatagactgcaggtgcatgttgtattatgaatattgcagtgagatcttgtgctagatcaatatactaccacagaaacctccttttttagctagcgactgattatattagctagagcttttaattataaaaccgttaatgaaaggatatttctgtggttttgtttgagagatcactaactttccttt

SEQ ID NO: 120255 - DNA, 639 bp, Glycine max
  Clone ID: PAT_MRT3847_79599C.1
ccggtccggaatccccgggtcgacccacgcgtccggcttccgcctccgtggtggaacagagcgtgaagggtcacgacgaccaatttctctagccggccactgaactccatgaccacatacatgacgctataacgcaagagaaccttgcttttgctccctacgacccacgggggcggtttctccgcacaaataagctcagttcacatgttctctgttaaggccttggctgattctatacagctccgacacggaagaagtggaaagattgacacagcaatttagcaaggtcaggctctacagctgcgtaatttggggagattggcgaatgtatgtaccaccaacacattggcaagtagtatatgatatggacggcgtgcttttcaacgatagctgcagtatttgggatgcaaaagcagacgaatttaaatctatggctgaggaactcatggtgatgaatagagttcttaatattggcgacttcattcctatcttggatcgggtggaccttcaacgagtgaaatctaagacaaaaaaattactcaagaggtttgatacatttttgactagcattcttgaggaacacaaggatttgtaagactgaaaaacatcaagacttatatttgactacattggtgccac

SEQ ID NO: 120256 - DNA, 202 bp, Glycine max
  Clone ID: PAT_MRT3847_7959C.1
cccacgcgtccgcccacgcgttcgaagacgcgtgggcggacgcgtgggccaaggcttgcttcgaagagaggtgtgctgtatcataccatgggtcacgttgttgataagccttaagcttaggattggctgcaaaagctcataaagctgactacacttcgaactattgacgaaggagacagttacaagctatctgataacttgt

SEQ ID NO: 120257 - DNA, 740 bp, Glycine max
  Clone ID: PAT_MRT3847_795C.1
ttgcgaccttctgaagtggggaaagtccagaaatttcttaagttctctcatcaaaatatgttcttttttttctcattttgcctcaaatattgtttttaatattacaattttgcccccccatgacccgacccgacccgtaaaaggggttagggtttcgcgtttcccactatatacggcgaaacaagagctttgtcccgggacgttcacattcaggaatcgttttcttcagaaatttgccatcgttgagagaagcgtgagagccttagtcgttcaagatgagagctaagtggaagaagaagcgcatgaggaggttgaagaggaagcgccgaaagatgagacaaagatctaagtaggtgcttgagcaggagttgagatgagctttccatctgctaccagcctcatgacattttaggctgttatggctcttatgatcttgaggtctagtcgctaggggagcttcactcttgacttagtttgctttactggtcctggtcctggtccaagactattgagtgtgggttaagttgtgatgtttagtgttttgtggtatctaattatgtactggtttttatactttttggttgaatagctatatattagtatcgagacttccatgaaaatttgatcctattgtatgcttgaagtgacctctaatcgttagctcatatataatgctatgtatattatcacaactattttcatcaacaattttttatcatattttcacatagttagcgatc

SEQ ID NO: 120258 - DNA, 537 bp, Glycine max
  unsure (1)..(537): unsure at all n locations
  Clone ID: PAT_MRT3847_79600C.1
actcantatctgtttctctttcactctctcactcaaggttagactcttttgaagaaaaaaatggctctgtgtagaaggccttatgcttactcaaaggtggacaaggaggaccctgaagacataatccatagaagggcacagtttttgatccacaaagtgttggagcaagcagattcacgtagaaagccatcatgccttagaatcagaatctctaagatgaaggtgaagattggaaaaaggttaaggaggctcaggaggagaattatgtccggtgtgtctgctgctagacttggttttcatggacatgttatgagtcaaatcaaaacgtggaagagactctttagccgaggaagacaatctcaaaccctcataacccttcctcctcttatcaaatgatgatgtgtatctatgtgtaaacattttactaggaaactcatgttttatgcaatacaatgtcatgttaatttctgtcctttttctttttgtgttttcttcccagttttctttagtctatacaaagagtgaaaccataaaaaa

SEQ ID NO: 120259 - DNA, 795 bp, Glycine max
  Clone ID: PAT_MRT3847_79601C.1
gaaaaaaaaaggctagaaagaagaggaggacctatgaccgccatgatgatggtgatgacgagctactagattatgattctgcaagccagaagttggtttttccgtcaaatactagaagttggttgctttcaactgatgggtactcttcagcttggagcagtgtagatttacctgagtaccttcatagacattgcttgtctagatggatgacatggctttttgaaaaatgagattgtagtccggttctatgggtccaccaaagagatgtgtcatcatcatttccaaactgttgggatggcaagaccaatcatccatcgatttggtattttccactcggttcatgtaaagcatgctgtgactgttgaatcttgctgttggctattgccggtgatctgctcacctttgtccttcattttgaagatttttacaaacaaaaactggacttgctggggaaggaaatatctgaaaaataacttgaaatgccagcctaggaactccctcaaagtcattaaacctggagttcattgtgaagatcgggaagtgataaaagctttgctaatttactttgtagactgttaccatcatgattggcagcatgggttgtcatacatttgctctgaatttctctataacacatcagtgtagcttccaacggtgacatgatcattcagaattgctatggagcatgctcgggctagggtatagtactcaagcccttgctaattttctaacggcatattacatctaattgtatttatattgtgtaccacaatttatagcatcttatttgctgat

SEQ ID NO: 120260 - DNA, 522 bp, Glycine max
  unsure (1)..(522): unsure at all n locations
  Clone ID: PAT_MRT3847_79602C.1
attcctcttaaggttgctaccgacctgccacactgcataccttagaacttcctaattctaagatacattgtccgatggctaaggaaaaggctcagatccacattgaaggcggatggacatgggcaccctgctaatgcatccaccttcacgcgattgcaagaagcagtcgacataaaaataattccaaccgatgacctatgaggggatgcccgtacccactccgacctaaaccgaaaaataatgctaacaaaacaatgtgcaaccctatagtatcactggactcatcaaagcgtagcgtaacctaacttagttatcttgacgcacatccgcacatgacagcctttgatgaacagaaccattactgacgtatcccattcccctctgtaacgaacaatgcatgcttccttatctgtctgactganaaattgaaaaaagaaggactcctaggaacactcccgctctataactattgaatccccccatctgcttaaactctatatcgagatcatcaataccccctac

SEQ ID NO: 120261 - DNA, 597 bp, Glycine max
  Clone ID: PAT_MRT3847_79603C.1
aactccattctataccatcaaacaaacaaacgcataagaaacatcacaaaaaaacaattaagctaccaaaacacaagaaaaacaaaaattaagaagaaaagcaagcatttgcaacttgcaaagaagccaaactacacataccctcaactggttagtgacagtgtcttcttgattgtaaaaggtaattctctgaacaccgggcaaaggcggggcatcgacaatgctgaagaaattgtgggtcactatccacgtgtacttgttgaagggcaacccattaacaatggaagtgggaagtgtggcttggcctctggtgcagatgggttgcttcaagcccaaagcagggcaattgccacagaacagacctggcccacaatccgtagcggctgaacatgcttctagaatctgggaattgacgttggtgaaggagacggaacagaggagtgggacaaagaggaagatgatggtggcgggtgcaggagcactgcatttcgaacggtggtttggggaatgcgagcacatggcaggttcctttgcggggcgcggaacctaatagcggacgcgtgggtcgaggccgggttccggcctgcagcatgaccc

SEQ ID NO: 120262 - DNA, 621 bp, Glycine max
  unsure (1)..(621): unsure at all n locations
  Clone ID: PAT_MRT3847_79604C.1
gcaagacccaaagggtacacccacctggcaggctgtgacagtgctacacccacacagtgtatggccattcattttatccacaatatcaaaaacaccacctccatcactcctcatgtaaaaattaacagctataaagttgggcatcaaattccctgcagctttgtaacaggtattgaccatctcagcaagtggagctgaatgctctttgcaagagtcagcttcaactggatatgtcggaaagtaattcatcaggaaaagtgaatgacttttagaatttaatgcctttgattcttttctgtgcggacaagaaccctgttgcactccaggatctccagactcattttcaaccatgtgcttccactgataagctattccttcccctgcttcctttgaagcatcggaagtgaaaacaacaagtcggtgatttgcttgaaccatctccgtcacagtgggccaatcgtcaccctttttcggcatcttggacacaggaaaccaatacttatccagtccagcacttgtgaacacattagtcaacccctttggagtgtgcacatagtcttcaattatgatggtaacaatctcagttggattttccgtcaagaacgcgctncgaagccgaat

SEQ ID NO: 120263 - DNA, 373 bp, Glycine max
  Clone ID: PAT_MRT3847_79605C.1
cctttcgctgttgcgaagtgcctaggtaggaggccttccctccctctcccggtactcctcttcattcatagttgtggccggtgggggctagcctcttccgacggtcgggccttatggctttcctggtggcttggctttcagggacggagttgatgcatctggcgggagcggactggggatgggcgtctaccatcttgtcgtcgcgtactgtgctgatgtctttggtcgccgccctatctgcgtctccttgggctggtctccgccctgtgatgtctacgctggccgtccgactggcttggctttctgggcggtgactgctcttggtgttcttgcttgtggtgcgcttgttgcctacggcacacgtgcggtgggc

SEQ ID NO: 120264 - DNA, 613 bp, Glycine max
  Clone ID: PAT_MRT3847_79606C.1
tttaacataaatgaattaaatttcataaaactgagcatctaatcagggaacagtcagttgattcacaccaacaccttacgaacatcggtatctgtaaagtaattttgccaaccacaattattgcaaattggaaaacagaaataacacacctttgtgcaatgagaaaagaaaaaatgtgacgcatccagagttgcaatatctagaatttgatttgtacatccaagaatataagtataactataacatacctgaactacttatagctccagataaattcttggtctctcatgactaccaactcaaatgacttcacagatccttgaacataacctcagcaagaaacaagaatttctctatatctaatttttctaacctagtaacagttccatgatatttcacagcttgagacaatactgcagtgtacatgctaagatactagagatccttctttaaagactaccttacataagttataaaacagggcttaatagtcatcatagttccagcaagactttgcaggaagtaaaagacgacaagcaaacaatttggaagatggacagctgaagctgatttagagaactgaacagatccagtaaagcttccagcagtatta

SEQ ID NO: 120265 - DNA, 712 bp, Glycine max
  Clone ID: PAT_MRT3847_79607C.1
ggatattttattaataaagacaacaagtatagtcggaaagcagtaaataagcttttgacttgagtactcgaaagcagtaaataagcttttgacttgagtactcggaaagcagtagtaacagcttttttgtacacaactcaacttggatcattgtacagtcgaattctgttttcgctttgaagttcgaactttgttgtacccttctattaggttccgcgccccgcaaaggaacctgccatgtgctcgcattccccaaaccaccgttcgaaatgcagtgctcctgcacccgccaccatcatcttcctctttgtcccactcctctgttccgtctccttcaccaacgtcaattcccagattctagaagcatgttcagccgctacggattgtgggccaggtctgttctgtggcaattgccctgctttgggcttgaagcaacccatctgcaccagaggccaagccacacttcccacttccattgttaatgggttgcccttcaacaagtacacgtggatagtgacccacaattccttcagcatcgtggatgcaccgcctttgcccggtgttcagagaatgaccttttacaatcaagaagacaccgtcactaaccagttgaggaatggagtgaggggactcatgttggatatgtacgacttccagatgatatctggctctgtcattcatttcgcgggcaatgctacaacttcactgcatt

SEQ ID NO: 120266 - DNA, 619 bp, Glycine max
  Clone ID: PAT_MRT3847_79608C.1
ttcttcttcttcttcactccctcgctcgagtcggcatctgagaaagagaaaaaaaactcgccagattcaaccgtgtcaactcagttaacaacaatgctggagcggtgcctgggacctcggcgcgtccggcagatgcagcgcggttgccgccacagcacggtgacgttcctctgcctcttcctcacgttggtcgtcctccgcggcacaatcggcgccggcaagttcggcacgccggagcaggacttcaacgagatccgccaccacctctccgccgcccgcgcccggcgcgtcctcgaagaaaccaaacccgaatcatcctccgagtccaattccaattccaacaactacgccaccttcgatctctccaagatcctcgtcgacgagcccccctccgacgacgaaaaacctaaccctaacgcgccctacaccctcggccccaaaatctcaaattgggacgaacagcgcgcttcatggctatccaacaacccggattacccgaacttcatcggacccaacaaaccccgcgtcctcctcgtaaccggttcgtccccgaaaccgtgcgaaaacccggtcggagaccactacctcgtcaaatcgatcaagaacaagattgactact

SEQ ID NO: 120267 - DNA, 734 bp, Glycine max
  unsure (1)..(734): unsure at all n locations
  Clone ID: PAT_MRT3847_79609C.1
gctcaatctcacaaactatattntggacctgtaaagttgaaaatgccaaatgaaattggaagtcattatgatctgtcatgaaaaccctccccaaatgggccttggttttcaccttgttcataaagctttggttgtttgcaattgcaacaaaatttatgtatttgaaagccacaaagtggaaggcaggtgtttgagaagtactcatctaacccaaccctattggccatttatttggcttgcttgttttctaggaattatttgtttcccccttacaatggcaaaaagtacaacgagagagcatgattgtgaggccaatacctatgtagcttttgagtgaagttaattataccaacccacccatgcaaccctcacaagtcaacagaaaagttcaaaataagtcaaccccacacaaagggattactcaaaagggaaaaggcgttcaaaggtgaaaatactgagtgagttttgagtgtgctaaagggggagaacttgtcgcccaagggacaaaggtcctaatatatgaaggaaacaaaaagaggaaaaaaaaagtgtcttgtggttttgcaccatgagggctctcaagagaaagctaacccaattaagggggtcacataaacaggctaaggatatgaagttcataagcaaatagtttgtattttgtattaccaaaatactagaacatgctgtataaataaatacaattgttagatacaagtatacaaaaattgctaaaa

SEQ ID NO: 120268 - DNA, 590 bp, Glycine max
  Clone ID: PAT_MRT3847_7960C.1
cttaacaaatttcatttcacccccttaatatttgcacatatctgcagcaatggttattcttagagaaattggctaccttatttctgatgggaaggcatctcagaatgatggtgagggcagaggagcaggtatcaaaaccaggggagtttagtcaccaagagaatgagtcaaagggcagcatagatagtgagaattatcttgagagggatgaggtcaaaatggtgatggctaaacttggatttttttgcagctcagaaagtgaggaacttcaggagaagtatggttccaaggagctttctgaactgtttgaggagcaggagccaagtttggaggaggtgaagcaggcttttgatgtttttgatgagaacaaagatggctttattgatgctgaggagttgcagagagttctttgcattttgggattgaaggaagcagcaaaacttgagaactgccacaagatgatcaggatctttgatacaaatcaggatggaagaatagatttcattgaatttgtaaaaattatggaaaatcgcttccgctgatttgtctgttctcttgttcgatttatataatatatgggttagtttaat

SEQ ID NO: 120269 - DNA, 2042 bp, Glycine max
  Clone ID: PAT_MRT3847_79610C.1
agacgacagaagggaactccattctataccatcaaacaaacaaacgcataagaaacatcacaaaaaaacaattaagctaccaaaacacaagaaaaacaaaaattaagaagaaaagcaagcatttgcaacttgcaaagaagccaaactacacatacgcaatgtgaaaataaataatgatacatacccagagttgcaatatctagaatttgatttgtacatccaagaatataagtataacttacctgaactacttatagctccagataaattcttggtctctcatgactaccaactcaaatgacttcacagatccttgaacatagtctcagcaagaaacaagaatttctctatatctaatttttttaacctagcaacagttccatgataattcacagcttgagacaatactgcagtgtacatgccaagatacaagttataaaacagtgctaatagtcatcaccgctgcagcaagactttgcaggaagtaaaagacgacaagaagcaaaaagtttggaagatggacagatgaagctgatttagagaactgaacagatccagtaaagcttccagcagtattagtcactggacttgtactaggtacagaaatattcttgcaagacccaaagggtgcacccgcctggcaggctgtgacagtactacacccacacaatgtatggccattcattttatccacaatatcaaaaacaccacctccatcactcctcatgtaaaaattaacagctataaagttgggtagcaaattccctgctgctttgtaacaggtattgaccatctcagcaagtggagctgaatgctctttgcaagagtcaacttcaactggatatgttggaaagtaattcatcagaaaaagtgaatgcctttttccagactcagcctttgccatgtgcttccactgataagctattgttgcccctgcttcctttgaagcatcggaagtgaaaacaacaagtcggtgatttgcttgaaccatctccgtcacagtgggccattcgtagtaaaaacaagaagtcggtgattcacttgaccaatatttgtcacagtgggccaatcttcaccctttttaggcatctcagacacaggaaaccaatacttatctagtccagcacttgtgaatacattagtcaacccctttggagtatgcacataatcctcaattacaatggtgacaatctctgttgggttttgagtcaagaatgcctccacttctctcaaagtatttattgcaggttgaaatgcagtgaagttgaagcattgccctcgaaatgaatgacaaagccagatatcattctcgaagtcgtacatatccaacatcaatcctctcgctccattcctcaactggttagtgacagtgtcttcttgattgtaaaaggtgagtctctgaactcctggcaaaggtggcgcatccacgatgctgaacgaattatgggtcatgatccacgtgtacttgttgaagggcaaaccattcaccttcgaagtgggaagtgtggcttggcctctggtgcagatgggttgcttcaagcccaaagcagggcaattgccacagaacagacctggcccacaatccgtagcggcagagcatgcttctagaatctgggaattgacgttaatgaaggagagggaacagaggagtggtacaaggaggaagatgatggcattggcaggtgctggagctctgcatttcgaacggtggttcggggaatgcgacgagcacatggcaggttcgggttcctttgcggggtgcggaacctagaataagggtacaacaaggttcgaacttcaaagcgaaaacagaattcgactgtgtaatgaactaatgagccaagttgaattattgtttgtaggtacaaaagctttcttacttactctgcatgtctcaaaaaaaaaaaagagaaaaaagagagacagttaatgatgttgttaacaatgagacatgttatgtctcgagccctgcagcatgacccaaaaaaaaaaaaaaaaaaaaaaaaaaagcggcgctctaaggatcaagcttacgtacgcgt

SEQ ID NO: 120270 - DNA, 174 bp, Glycine max
  Clone ID: PAT_MRT3847_79611C.1
ctggggttcgccctagtctatctacatccctaggggaggtttccggcgataactgcaaccaagcaccccaagcgagaagggagcaaaaacaacgctgtccccatgcgtgccaataaacgctgtgcaaggtgagactggggagggcctagaaagaacaccaatacggagcaccct

SEQ ID NO: 120271 - DNA, 548 bp, Glycine max
  Clone ID: PAT_MRT3847_79612C.1
gcacgaggctcgagcacacttctctctctctctctcactgattccttctccacacacacctcatgatcaaaactctgtcgctttccttcaacctcattgtaagatttatgatttctttatgaatctggtgagacatagagaaaggttctccttttgtttccatttcaatgcaagcttgagacattcattcataggggactgagaagagatgggatgttcacattcaaggttggatgatgaagaggcagttcggccttgtaaagacagaaagaagttcatcagacaagctgttgaacaaagaactcaatttgccacgggacacatagcatacatagaatctcttaaaagggtttcagctgcacttcgcaattacattgaaggcgatgagcctcgcgagttctcattagacacagtcatcaccccacctttcacgcctgtgaagaggaaaactggctcaggattcattcccatatcagcaaaaccctttgctacaacaggagcaattgagtttgggatcggaccaaactctactttgaaagtgaattacc

SEQ ID NO: 120272 - DNA, 435 bp, Glycine max
  Clone ID: PAT_MRT3847_79613C.1
ttgttttcttcctccttgtgttttgaccgttgcctttttttttctcaacgtctttctctgttcacacacacttctctctctctctctcactgattccttctccacacacacctcatgatcaaaactctgtcgctttccttcaacctcattgtaaggtgtgcttctcccttctaaccttcacttttttttcttcttaacccaatgttaacatgtgtttgtcatttttttttttctttgtactggttattctccacttgtaaccaacatatacactttctttgggtgttagaagcatgaaattcaaaaagggtgtcattgaaaattttgtcttcctgaaaacggatttatgatttctttatgaatctggtgagacatagagaaaggttctccttttggttccatttcaatgcaagcttgagacattcattcataggg

SEQ ID NO: 120273 - DNA, 244 bp, Glycine max
  unsure (1)..(244): unsure at all n locations
  Clone ID: PAT_MRT3847_79614C.1
aagagagagacttngttggaagggaaatttgtcctttgatattagatctcgctctagatgcggaaaacgtttcgtctacgaaagctcactttgttagtggatcaaccttccaatatgatatagttcgtgctggggacattcttcagaagatttccctgacaaggaagatctggaagaacccaaaaagattggtgtcacattgagtcgaagaatggatcctccatgcaatgaggttcatggtcag

SEQ ID NO: 120274 - DNA, 165 bp, Glycine max
  unsure (1)..(165): unsure at all n locations
  Clone ID: PAT_MRT3847_79615C.1
tcctcagttatccctncnacanangatanaacatggnnctanttagcaagtgcangagacgnggaggcaaaggtggngcagacangncattgntgctgttgatttttcgaggtacananctgtggnacaagcatcaaaacactggnactgcatggcctagcctga

SEQ ID NO: 120275 - DNA, 428 bp, Glycine max
  Clone ID: PAT_MRT3847_79616C.1
atggtttataattttttattttgatttatttgttttgctctttaacatggattaatgcccaaacagaggaaggaaccaaatgctgtttccctgtacggaataaacgaccaccccgcttgggaaacataaatagatcaatcctgcacaattggaagagacagacttgaataaaagaactagcccagggggggaaacgagattgtaaaaaacaacaacctctggaatttaaatgatattgaaacaatcgccgccggaatggaatggtgtggagtgaaagactatcgtctacaaataacgaatgactaacgtctgaggttgcatagaagatccgtgaacaaccacctgctgggggtgcactccgacccgggcttgaacactaaaaaagccgatcacccgaaccgggtgggaacccaggtcatgcacattct

SEQ ID NO: 120276 - DNA, 263 bp, Glycine max
  Clone ID: PAT_MRT3847_79617C.1
atgtgacaaaaaatttgttttattgccatgttctgttgaatgagttcaaaagaactaacatttttaagggggggaaaaaggggatcttttccctcacaaaaaaaatgaacccaaataagaggaagtgggctaaggctttgtattaaaagacgtcagaaaatatacactaaaatgctttgcaaagccgaaaccttaatgctttaacacaataaatttgggcccgttttaacttcccccaaataaaattggaaaaaatacgggcc

SEQ ID NO: 120277 - DNA, 233 bp, Glycine max
  Clone ID: PAT_MRT3847_79618C.1
ctcgagccgtgctgtttctactttgaagcctccgttgttggagggtgggactctcttctctcaaaatggacacgcggagtgaacaaaaaaattctctgctgcatcagcatcgggcccacaccaagaagggcataagaaaaccaactcccgtttgccttccatatggtaattctaaggaacagaactaccagagttgcttattggagttttcaacctgggcttttcaagatatt

SEQ ID NO: 120278 - DNA, 446 bp, Glycine max
  Clone ID: PAT_MRT3847_79619C.1
gggaaaagaaattctctgtagtaatatgtagcttaaaattattcacctgtaagcttttattgctaactttgagggtggtttttgtatgaaggaatatttcagggaaaaagggcacatatcaagttagaattcatgtttattgtgagaaaatgagaactataaatttggctcatagtgtatccaaccatatatggatggtaagattagaagttagttaatgcttacatggtcacttaaagtcatgtgcatttattttcaatcttgagacttgaccattccaatataatctaatggtttatatttattcttttttcttacaaaaacaaaagttctcacttgatacgttaccttcaaaaaattatgttcatatggcaacaattgtttatatttgtgtaagggtgaagtgcataaatgtaaattggtatttctaatactttttatgctta

SEQ ID NO: 120279 - DNA, 1102 bp, Glycine max
  unsure (1)..(1102): unsure at all n locations
  Clone ID: PAT_MRT3847_7961C.1
gaacttgtcaagcaacttccttcatctttctaagctgaccctcctggctgcttcaattttccaaattcaaaaattgtataaaagaccctccaaatcccctcaaacaacaacatttctcatcttcataggctaaataacaataacaacttaacaaattttatttcacccccttaatatttgcacatatctgcagccatggttattcttagagaaattgacttccttatttctgaggggaaggcatcacagaatgatggtaactcaacttctcccttgttaggtttggtggacctttccttgtactatacatgtttctacaaactccagagttttttccttagtttctgggttttccttctgtaccaactttttcctaatgactcaaaggtgagggcagaggagcaggtatcaaaaccaggggagtttagtcaccaagagaatgagtcaaagggcagcatagatagtgagaattatcttgagagggatgaggtcaaaatggtgatggctaaacttggattttttttcagctcagaaagtgaggaacttcaggagaagtatggttccaaggagctttctgaactgtttgaggagcaggagccaagtttggaggaggtgaagcaggcttttgatgtttttgatgagaacaaagatggctttattgatgctgaggagttgcagagagttctttgcattttgggattgaaggaagcagcaaaacttgagaactgccacaagatgatcaggatctttgatacaaatcaggatggaagaatagatttcattgaatttgtaaaaattatggaaaatcgcttccgctgatttgtctgttctcttgttcgatttatataatatatgggttagtttaatatgttctctgggttcttgcttcttcatagttttatcatcaatattagaatctaacatattgaagaataagtacattggaaagttgtacctgttgnnnnnnntaaaaaactctgattgaaatgctttctatgagcttaaaatcgattaatagaacatagcaaagaaaaatatatataaagatgaagaaagttcggaagaaacattgaaaagacagtactgtgagatgaacaaattt

SEQ ID NO: 120280 - DNA, 104 bp, Glycine max
  Clone ID: PAT_MRT3847_79620C.1
tccacgcgttcgctctgatcgtgtctctacgtgttatcatatatccaattacatgggctctgtctcagttttcaggagctttaggctctgagaaagacttaccc

SEQ ID NO: 120281 - DNA, 485 bp, Glycine max
  Clone ID: PAT_MRT3847_79621C.1
gaaaaaaccgccctgggacaaaatcaaaccaatccgggcaaattaaccccgacaaaacaaaggggggggtaaccccccaaacggggggaaagggccccaaaaaaaggggggggaaaaatcccgggtttaaaccgaaccgggtcggaaaagggctaaacaatccggggcaaaaagggggtgggccccccttttttgggggggggcccccaacgggggacttctaggggccccccttttggggttcctttccaggttggggggccttttttaggggggccccaaaaggggggtgggggggggggtcaagccgaagctgggaaaaagctttaaaagccctcagggcatcgggaacccttacaaggtcaacgggggggttccccctcacaaaagggaaaaaagaacccggggctgggggggcattgggaagcccccggggaggaaaaacaccagccttaaccttgggggcccgggggggggacccaacc

SEQ ID NO: 120282 - DNA, 569 bp, Glycine max
  Clone ID: PAT_MRT3847_79622C.1
gggcaaaaaaggcttttccccttttcccccttttaaaaaacgggtaaaaaaccctgtttgttaagctgacaaaacccctttgtccaaatcctgtttttgccaaaaaaaaatccccctttcatggccccccagggccaaaaataaataaaaaattccccccccccccaaaaaaaaccaaacccctaaaaccaaaaaaggggccccccttttaaatcctaaaaaaacccagaaatttgtccccgggccccccttctgaaattttttcgggggaccaaaacctttttcaatttctggacccctttggggccccccccggggggccccaatttttggcccagggggggccaaaccgaaaaatgccccacctaaaaaaaaaccccttttggggggaaacaatctgagcccccagggcccggttttccccaataaaaacaggcccccccagggcccccatttttgtgggagaaaaaaaccccgcttgacccaccacggcccccaataacccaatcattgcccctgttttttccccttcaaaacccgttggtgccaaatctaaaacttttaccccc

SEQ ID NO: 120283 - DNA, 244 bp, Glycine max
  Clone ID: PAT_MRT3847_79623C.1
ggaaaacagagagtgatttcagtgagtgatcggtgttcacttgatctcatcataatcgtcagcgtcaggtgaagaagatgccgatgagaaacatcgccgtcggaaggcctgaagaggcgactcagcccgagacgttgaaggcggctttggctcggttcatctcgggcttgagcggcgggtgcgccggctcaggctccggcatcgcctagaacaagctcagcgacaacggcgctgccacccctgc

SEQ ID NO: 120284 - DNA, 321 bp, Glycine max
  unsure (1)..(321): unsure at all n locations
  Clone ID: PAT_MRT3847_79624C.1
gggcacttctggttccttcttctcttcgggcggttccacttctttctttccttcggtcacttccacttccttcttgtctcccggcacttcaacttnnttcttctcttgtactatcactgccgcttccgtcttctcttccggcacttcaacttccttcttctcttccggcacttcccgacctttttcttcttctttcacttcactttccttcttctcttccctcacttgtactgccactgctttcttttcttctgccacttctggtgccgtcttctctggagtcacttgcacttctttctttgcttcggggacttccacttc

SEQ ID NO: 120285 - DNA, 458 bp, Glycine max
  Clone ID: PAT_MRT3847_79625C.1
atagtcaacgttagttatttgcgctgtttgacgccgctatgcagattgtttctacccagggggaatatggattccacctatgaccacctatcttacaagactggatgaggtcactcacccatcttgaacggaattgcatgattctggaacgcttatatagaccttaggggatgagctgttaggaccactcttccctgcctaggtgccatacctcattattacttgaggatgataacgttgagctccatagaaggcattgagttctcatattactttcactgcagaacataagagctggcctagagctcatgcctggcatgctgcttttgccctcgactggagaggcttctaaaggcactattaccaacctctaatgcgagggtagacaagtctacgctgaaccatgggacctttggggtgctatactgggatcggtttcttattacacggcgttcact

SEQ ID NO: 120286 - DNA, 239 bp, Glycine max
  Clone ID: PAT_MRT3847_79626C.1
atagaagtggacgacgatgcaccgccgtcctaaggttcgaaattcggttcgggggaaaacaaattagtgatgtgtcataggcttaaatttgcagagctgcacaagttgtgcgtgccatgaaatccgtgaaacaacagctttcatggatcaattgtgggctgtggatggaaccaaggctcaggcacttgctatttgccactcacatacttttgaattgcagcatgaaatgctatagcaac

SEQ ID NO: 120287 - DNA, 317 bp, Glycine max
  Clone ID: PAT_MRT3847_79627C.1
gcattgataaacttaatatataaccactactatagtttatcaaaagagaggaaaattaaaatagcattgctgaagaaaaatgaaaacgctaaaatacccttttataataaagtaacttggccctttaaaccgacattattccatgttcacaccaaaccttatgcggattattaaagatcaaccacttgggaatttgggagttacaaggaacgaaaactattaactttatttttttattgagagaaaaaaaataatgggggttatttaaagctttgggaaactttgtggaaagggttggttcctgcatttttgcccaa

SEQ ID NO: 120288 - DNA, 1470 bp, Glycine max
  Clone ID: PAT_MRT3847_79628C.1
ctcctaaacgcacacacctctctccattctctcccaacacccacacacaaaaaattaattgcaaaattaaattaaattaaattcccattaaaaaaaaaacccaatccactgtcgttcaatttcattttccttttacgtatccaagaagtttctcataaacgattcctcatagaattcaaaacatttttcaactcgtttactgagtggagttctgctgcttcggctactactaggtccaatcgttctctactctatgtttctgtacttgaggtgcatgtggttgatactccatggaaactgtggttggaattgaggacaatgatgatggaaagtttgaagacagtggggttgatagaagcagttcagctttgtcttcaccgaagcaaattgccaacccaattgtatacaagcttgttcgggttgaaggtgatgggaggttagtgcctgcaacagatgatgaagtaatggaggtgggggattttcttgagtatgaaaacagtgaaatgcatgttgttgcaaacactggacagagtttggaatgcatatcaattgaaagatcatcttctgggaagcttcgattggagtgtaaggaaggcactgcagaggcagatttgggggaactgaatgcaaaattacagattttgcaaaaggtcaaagaggagaaacaacgcatatcatgtggatcacctgctcattctcatgtaaatatagacagccagtgttcagctgataaatttccagtcatggatgggaaggttcaatctgaaactcccttccaggaaattcctcctgaagcatcaagtttaaattatactcatagtaatcaatctgggagtattgatcagtgttccagaccttcagaaggagtaatagagagtggatcatctgcttctgctgtctattccaatttaaagtctgatctttcaatgtcagatggagaaatatgcttggacaagctatcaatcagagaactgcatgaactgtttaaggtaacgtttggtcgggaaactactgtgaaagacaaacagtggctgaaaaggaggattgccatgagtttaaccaactcatgtgatgtttcagctacaactttcattattaaagataacaaaatagttagaaaatttgaagaagacagttctggaaatatgaatgctggatctttaatctcttcggaaaatatgactgaagaagatgtcaactttaaggattcatctgctgtagatgcttgtggaattgatgataaccaagttgtttctgaaacaagatcagaaaatggattggaatatgagaattatcagacaggacaaagagctgcaaaaagaattcggagacctacgaagagatatattgaagagctctctgaaaatgaatctagagagcacaatccgaggttgtcaatttctaataaaccaatgggacttggacatgtttctccaattttgatgtcaggcctgctagaaatgctttttc

SEQ ID NO: 120289 - DNA, 292 bp, Glycine max
  Clone ID: PAT_MRT3847_79629C.1
gtgttattgaaacgaaaatttaaaccaccatctcatctaataaaacaaaagaacggccatcctcatcctacactccttgatgcttatctactgcaacatttatatggaattcatccaaatttttttaccacggggtttgccaccaaaaaacaaacatctgccgaaaaagagggaaaaaaagggttgtggggagggcaatcttgccaataaacatttgaggcagggctacaacaaatatatgaagaaccccgggggtaaccgtatcaatcggccataacggtatgcggggaaa

SEQ ID NO: 120290 - DNA, 282 bp, Glycine max
  unsure (1)..(282): unsure at all n locations
  Clone ID: PAT_MRT3847_7962C.1
ctcagcttctctcttccttcacttattctttcattttcctcaaatctttcaaacacccacttgccccattttcttctgcatcttcacaaatcacttcttcaaatcttcccaacaaaaaaaaaaanctcattttctancatacngtttngggatctatcactctatccanggttnctggaatgaaactttcctngttnggngttgtggtccttcatcttcatcangtttaacataccttcatctctttctgaaatcngtctcacccantttngcctngccatt

SEQ ID NO: 120291 - DNA, 661 bp, Glycine max
  unsure (1)..(661): unsure at all n locations
  Clone ID: PAT_MRT3847_79630C.1
aaaaaagcagacctaaacacacaccactctccatttcactcccaacacccacacacaaaaaaaatttaattgcaaaattaaatttaattaaattcccattaaaaataaaaaaaaaaacaaagaaacaaactttcgttcaatttcatttttcttttacgtatccaagaagtttctcataaacgattcctcagagagttgaaaacatttttcaactcgtttactgagtggggggttctgctgcttcagctgctactgggtccaatcgttctctactctatgtttgtgtacttgaggtgcatgtggttgatactccatggaaactgtggttggaattgaggacaatgacgatggaaggtttgaagacagtggggttgatagaagcagttcggctttgtcttcaccgaagcaaatttccaacccaattgtatacaagcttgttcgggttgaaggtgatgggaagttagtgcctgcaacggatgatgaagtaatggaggtgggggattttcttgagtatgaaaatagtgaaatgcatgttgtcacaaacactggacaaagttnggaatgcatatcaattgaaagatcatcttctgggaagcttcnattggagtgtttggaaggaactgcnagagcagatttggngaaactaaatgcaaaattacag

SEQ ID NO: 120292 - DNA, 301 bp, Glycine max
  Clone ID: PAT_MRT3847_79631C.1
tccacgcgtccgaccacgcgtccgaaaaaaaaacaactacaaaaaaaaaaaaaaacggggtaccggacaatctagacgatcgaatcttaggctcacatgctttcgacgtcataactactcaatctgattcctaaattcatttacctggccgtcattctacaagattaactctgcattaaacccttgcgtgacccaacagcatcgaattactgaaattgccatttacttcagctagcgttaaaacgaatacgccttaaccgatattccttgccaacagttacgcagtctcaattgcgaatga

SEQ ID NO: 120293 - DNA, 582 bp, Glycine max
  unsure (1)..(582): unsure at all n locations
  Clone ID: PAT_MRT3847_79632C.1
gntggcattgtgaaacacaatattgcagataataatttgcacagttgatgcatactaaaatttatatccacatccttggtagttatattgtcattatactggtataactaaacaacaaatcacaatcaccttaaaggacatgcccccattgattacacaaacagatgaagagtgtccaaaaataagtcttgaaaaatatctaacaatagttgattaccagatgggcaaagaagtgttaatcacaaaattaattggattcaaattatttcctaaatcctgatctttataatgtagaaattcaatactcataaactttatctaatgaagaatagagggagaaaaggtgctacctaacaatataggtgcaaaattaaaataaacacatactgtagaaatggagatgataaaatgatcaaattattacagagtgacttctaaatccttagttgaatcatgacacaattaagctcgagccaattagaatgtgtttttgtatactaaaattaaatagataataatgagattggtaaacaggtagataaaaaaactaaagaattatagctaggtatatacttttgatgc

SEQ ID NO: 120294 - DNA, 499 bp, Glycine max
  Clone ID: PAT_MRT3847_79633C.1
gtttccacttgcttgccacttgattaaggtccagaagaacctaataagggggcttaaccagaatggggggaacctaccaaggtccctgggccgggaaggaccagttgaaaaagaagggggcccacccccccttgcaatccggccccacccccctgaaaccatcctggaacccctccccgggccggcccaaggggaagtaattgaccaaccgttggaaaaccacacctggggctccaaaaccctccaaaggtcccctgcacctccccaaaaccatgaaaggccccccccaattccccctaaaccgaaaggaaggcctttaatgaataaaatgcttgcctttgcccctgagaagaaccggcccattgggtccaaaaaacaccaattggttaagaattccccccggcccccacctaattggaagaccggaaggatgaccttggaaagccaaccaccaaaaagaaggccaatgggaggaatggaaacattccgggccttacct

SEQ ID NO: 120295 - DNA, 261 bp, Glycine max
  Clone ID: PAT_MRT3847_79634C.1
agcaagatgccccgtcaacttttggctactcgctatgttgccatccctgaggatgtcaagcttgttctcgatggccgcaaggtgaccgtgagcggtaagcgcggcgagctgagacgcgacttccgtcacttgacgccgacatgcgtcgtgtaaacaaggagcagctccgcgtggacctgtggtttggcaaccgtaagcagctcgcctgcgtgcgtacgatctgctcgcttattgaaaacatgatcacgggtgtgcgtgtcg

SEQ ID NO: 120296 - DNA, 721 bp, Glycine max
  Clone ID: PAT_MRT3847_79635C.1
ctccttcttctaacattggaatcatatatttttttataaccacataattaggacctttgctcttccatgggatcatatatcctttaaatttgggagaagacgacagaaggggagactaattttacattggaatcttccttaaggtatgttgctgactgttctcaagctgtagttgtacacatgtaactctgtcaacattttcagaccaaatccaacgttgtttctggcaaaaatggatgcattccgtttatcacattcatttatgctcagcaccaacatccacagcccctcctctctctgcacccttcgttccctctccaccaatccccgcaacaggtggttcaaggtggaagccaccgccggcggcagccagaagaagaacaataacaaggccttcgacgcggcggcgttcgaggcggagcgacttgccctcgacgcagaggcccggcgaaccatggcggacgccgccgacccgaaggcctggaaatggataatccggaagagaatatgggatatgatggaagctcgcaactttgccaacaaccctcggcccgttcaccaccgcattcccaatttcgttggcgcctctgttgctgctgaaaagatgagggagctagatgtgtttcaggatgcacaatgtgtaaaggttaatccagactctcctcagaaacaagtcaggtttctcactctttcagatggcaagaaagtgttgactcctcaa

SEQ ID NO: 120297 - DNA, 1181 bp, Glycine max
  unsure (1)..(1181): unsure at all n locations
  Clone ID: PAT_MRT3847_79636C.1
atggcatgttcttctccccttttcatgtatttgatattttttaggacattggaggatgtgatatacagaaacaggaaatccgtgaggctgtggagctaccccttacacatcatgaactatacaaacaaattggtattgatcctccccgtggtgttttactgtatggaccccctggcactggcaaaacaatgcttgccaaagctgttgcgaatcataccactgctgctttcatcagggttgtgggatctgagtttgtgcagaagtatcttggtgagggtccacgaatggtccgtgatgtatttcgtcttgctaaagagaatgcccctgcaattatatttattgatgaggttgatgcaatagccactgctagatttgatgcccaaactggagctgatagagaagtacagcgtatccttatggaacttttgaatcagatggatggttttgaccaaacggtaaatgttaaagttataatggcaactaacagagcagacaccttggaccctgctctgttgcgtcctggaaggcttgatcgtaaaattgagttccctttgcctgatagacgccaaaagaggctcgtatttcaggtttgcacagccaaaatgaacttgagtgatgaggtagacctagaggattatgtttctcgtcctgacaaaatcagtgctgctgagatagcagccatttgtcaagaagctggaatgcatgctgttcgcaagaatagatatgtcatactgccgaaggacttcgagaagggttacaggacaaacgtgaagaagcctgatactgactttgaattttacaagtgatgatgttgtagctttgagattggtgtgtgtactcgcgaagttaaatatacagtgaagggggtacatttctagaggaatcacgatcatgagaaatgatgcaatgtttctgtttcttgttgacctttcatcttattttgtaatttagattatttaatttactaaatatattaattgtggaagcttaatgttgagttcgtactgcatgtctgattttcaaaactaatatgggtgacttgcttccgccttcaatttgccttgatgctcatctgattgcctgagcgcaaatggttctgataaaaacaagatggcttagatgtttttagtctataaaatgagtatgctttgattttggtccttaaaaaaaaaaaangggcg

SEQ ID NO: 120298 - DNA, 523 bp, Glycine max
  Clone ID: PAT_MRT3847_79637C.1
ttttcaggtttgcacagccaatatgcacttgagtgatgaggtagacctgaagaaatatgtttctcgtccccacaaaatcagtgctgctgagatatcagctatttgtcaagaagatgaaatgcatgctgttcgcaagaatagatatgtcatgctgcccaaggacttacagaagggttacaggacaaacgtgaagaagcctgatactgacttcgaattttacaagtgatgatgttgtagcttttagattggtgtgtgctcgcgaagttaatatacagtgcagggtacatttctagagggatcaccacgatcatgagaaatgaagcaatgtttctgtttcttgttggcctttcatcttttgtaatttagattatttaatttactaaatatattaattgtggcagcttaatgttgagtacgtactgcatgtctgatttcaaaagtaatatggatgacttgcttctgccttcattttgccttgatgctaaaaacaagatgacttaagtctataaaatgagtatgtttt

SEQ ID NO: 120299 - DNA, 1817 bp, Glycine max
  Clone ID: PAT_MRT3847_79638C.1
cggccgctcaggcggcgggcgggacccacgcggcggctcataaaaaaaaaaaaaactcacataatggccgcctcagccaacttcattccattcccaattcccactccaccaccaaaccctattcagcatttcccccaaatccccgtcacaccatgggctcctccgcgatggtgttggacccgaaaccctcatcggagcctccgccgttcctcccgtcgacgaaatcggactaccttcaaggcagcttcggcggcgacgccaccgcctccgacgaggacgacctctacagccgcctgaaatccctccagcgccagctggagttcatcgacatccaggaggagtacgtgaaggatgagcagaagaatctcaagcgcgagctgctccgagcgcaggaggaggtgaagcggatacagtcggtgccgctcgtcattggccagttcatggagatggtcgaccagaacaacggcatcgtcggatccaccaccggatccaactactacgtcaggatcctcagtaccatcaaccgcgagcttctcaagccctccgcctccgtcgcactccaccgccactccaacgcgctcgtcgacgttcttccgccggaggccgactccagcatctcgctcctcagccagtccgagaagcctgacgtcacttataatgacattggaggatgtgatatacagaaacaggaaatccgtgaggctgtggagctaccccttacacatcatgaactatacaaacaaattggtattgatcctccccgtggtgttttactgtatggaccccctggcactggcaaaacaatgcttgccaaagctgttgcgaatcataccactgctgctttcatcagggttgtgggatctgagtttgtgcagaagtatcttggtgagggtccacgaatggttcgtgatgtatttcgtcttgctaaagagaatgcccctgcaattatatttattgatgaggttgatgcaatagccactgctagatttgatgcccaaactggagctgatagagaagtacagcgtatccttatggaacttttgaatcagatggatggttttgaccaaacagtaaatgttaaagttataatggcaactaacagagcagacaccttggaccctgctctgttgcgtcctggaaggcttgatcgtaaaattgagttccctttgcctgatagacgccaaaagaggcttgtatttcaggtttgcacagccaagatgaacttgagtgatgaggtagacctagaggattatgtttctcgccctgacaaaatcagtgctgctgagatatcagctatttgtcaagaagctggaatgcatgctgttcgcaagaatagatatgtcatactgccgaaggacttcgagaagggttataggacaaacgtgaagaagcctgatactgacttcgaattttacaagtgaatttgtacgcatgttgataagttttcttaaatattacacacaatttattaagcttatacgctatacccaataaggaggttaaggaggttgagttgtgttttacgaaattttttgcgattttttttcgtaaatgaagttttgtcttatcatatggacgatttaacacaaaaggtttaataaaacactgttttatctctgtttcttgttgacctttcatcttattttgtaatttagattatttaatttactaaatatattaattgtggaagcttaatgttgagttcgtactgcatgtctgattttcaaaagtaatatgggtgacttgcttctgccttcattttgccttgatgctaaaaacaagatgacttatagtctataaaatggagtatgtttttt

SEQ ID NO: 120300 - DNA, 417 bp, Glycine max
  Clone ID: PAT_MRT3847_79639C.1
cccacgcgtccggacgacagaaggggattgtgtatattaatagagagacataaaaaataaacatatattgagaatggagggttgtgtgaagaagttgctatgccttgaaggttttgtggagctagttatttttttttatttaacattaacatttgcgcaaaaaactacacccttccaaccgacattgccaagttattacaatcacacttaccaattttgaccaagcttcatgctgtgtttttgttttttttgtttttttttttattatttaattttatttttttttttttttttattttatattttattatgtttttttttttgttatttttatttttttttattttttttgtatttcgttgatattttgtctttgggatttcaatgaaattgtattggttttggctatgtattttg

SEQ ID NO: 120301 - DNA, 1443 bp, Glycine max
  Clone ID: PAT_MRT3847_7963C.1
tccaaaaataaatgggtaaaattgtagcaatcacaacacaaccaaggctacgacttaaagcaaccgcaatctttgggccaaaagtcacacacacattactacacgcatctaaacactcctccgaactataatacagttttcttattttcattgttgaagctcacaagcaaaggctaaagtagattctattctcctcaagcaaaacctatagctcccccacactcctccagtacttgaataaaagctaaataaatattaaagcctttccttcatcaaggtactgtttgatctttgaatttcagtcctcaaagattggaacaacaggaacatgtgtactctcacaactgttcctgtgctcccttctaagcttaacaagccttcgctttctccgcaccacaattctctttttccctactgtggaagacgggtcgggaagaagaacaaagcaatggttcctgttgcaaggttgttcgggccagccatatttgaagcctcaaaactgaaggttttgttcttaggagtggacgaaaataaacacccaggaaatctcccaaggacttatacgctaacccatagtgatataaccgctaagctcaccttggcaatctctcaaaccataaataattctcagctgcaggggtggtacaacagatttcaaagggacgaagtggtggcacagtggaaaaaggtgaagggaaggatgtctctgcacgtacactgccacatcagtggtggtcattttctcttagatatattagcaaggttacgatacttcatcttctgcaaggagctaccagtggtgttgaaggcggtggttcacggcgacgaaaacctattcaacaactacccagaattgcaagatgccttggtttgggtttactttcactcaaacattccagaattcaacaaggtggaatgttggggcccactgaaggaagcgtcagcaccaataggtggggccaaggaagagagtgagcaagaaactcttctaagtaaggagggcttggcaattccacagccatgccaagaggaatgcgaatgttgctttccaccgctgacgttaagcccaattcagtggtctcaacaagttcccagccaccattacgaaccttgtgatgggattgagacccaacaaagtctataaacttccaaactatcatacacagaaaagaaaaaaaataaaatcacatcacagttacagggatgctggcaaattcatatgccatttccctgtatacatcattaggacaaatcaaatattcaaaacccatttcaatgtaaataaggaagctcgtatttgcaaaaaaaaaaaattaactttctttgttatgatttttctttcgtaagaaattaaattagttcatgtataatatttctgtgtgcatgattatatctaagaattaaacagaattttttttttaggaatggaagttctatttatat

SEQ ID NO: 120302 - DNA, 143 bp, Glycine max
  Clone ID: PAT_MRT3847_79640C.1
gagaaggcagactaatatctcgatcccttacacttggttcatatttctttttatccacatcttatcactcgatcctgatggttccatgcacgctgggagggggcaaaccgtcccctcagctccaaattctctcctttttcttg

SEQ ID NO: 120303 - DNA, 1375 bp, Glycine max
  Clone ID: PAT_MRT3847_79641C.1
ccccccccccctccccccacgaaggcaccaagtcacagacaatttcctcacccctttcccaatacttgtctctgtttctctcttaataaccacccttccatttcgaactaggatcgatgctacaggtggaatcactggtttcagcttgcgccggcggatccagcgatcggaaaatcgcctgcgagaccctgtccgacaacgtccaccccacggatccgccggagccccacccggattccccgccggagtcgttctggctctcgagagacgaggaatacgactggtgggaccgcaacgccgtttacgagcgcaaagaatccaccaaggccagtaataataattcaacaaacctaaaccctgccatcaactccaacaacaactcccagcgtttctctctcaatttcaagtccaaggcttccaccatcattggcttacctaagccgcagacaacctccttcgtcgacgccaagcgccgccgcaacaacaacaagcccagtagcatcttcctgatccccaaacgcagcgtttgaatctctaagtcagggttcggattaccggcttcgccctcggtctatggcacttgcatggtcagatccaaatctaatcgagatcgcaagctgagaagttcacgaaagtcttagcctgacacagacgccgaaagaaaaacacagcagaagcggaaacaaaacccggtttggtcgagaggtttgcgctctttctattttccggtccggtcgaaaagataaatcggaccggaaaaaaaccgatcttctggccacggactcaaatattgagacgaagagcggtgccattaactactcgtctagagcgcggcacagcacgtcgagcttgaacgaggtgtcgttggaggagccagtctcgcgaaacagcgtgtcggagagtgaaccgcccggtttgggtggcatgatgcggttcgcgtctgggagaaggtctgagtcgtggggagtgggtgattccgaaggccacgtggcacatagtattggaagaagctaaccgttccacgaagtggggcccttgcccttggatgcaagcaattgattaaaagattataagaatctcgcgactcgcgagtcttttggcgtgggacccaggcgtttgaagagtgcttccagggggtgacgtggcgccttgaacaaattttacttgttattactgtttgaaaagtaaatcctttttcgttttgtactgtgcttgatggaatccactgggttgactctattttatagtcacaaagttttgttttgtaaatatacccaagtcatgagtggtttttgtttctttgaattgagcagatatatgtatgtttcaataactctatgaattgtccaacggtgcatgcgttgctggttccacc

SEQ ID NO: 120304 - DNA, 120 bp, Glycine max
  Clone ID: PAT_MRT3847_79642C.1
agcttccgttttcatatacgagcatctcgatacattacgggatttactcggacatccgagtaaaaagttattgtcgttggatttttctcagagcttctgttctcaatttggagcgtctcg

SEQ ID NO: 120305 - DNA, 838 bp, Glycine max
  unsure (1)..(838): unsure at all n locations
  Clone ID: PAT_MRT3847_79643C.1
caatttcaagtccaaggcttccaccatcattggcttacctaagccgcagaaaacctccttcgtcgacgtcaagaaccgccgcaaccacaacaagcccagtaacatcaggctgttcccgaaacgcagcgtttcggtcggaaaatctgagtcaggactcgtcgaaccgtcttcgcccaaagtctcttgcatgggaagagtcagatccaagcgcgatcgaaatcgcaagttgagaagttcacgaaagtcttcccctgacacagacgccaaagaaaaacacagcagaagcggaaagaaacccggttttttcgagagttttcgctctttctattttccggtccggtcgaaaagataaatcggaccggaaaaaaaccgatcttctggccacggactcaaatattgagacgaagagcggtgccattaactactcgtctagagcgcggcacagcacgtcgagcttgaacgaggtgtcgttggaggagccagtctcgcgaaacagcgtgtcggagagtgaaccgcccggtttgggtggcatgatgcggttcgcgtctgggagaaggtctgagtcgtggggagtgggtgattccgaaggccacgtggcacatagtattggaagaagctaaccgttccacgaagtggggcccttgcccttggatgcaagcaattgattaaaagattataagaatctcgcgactcgcgagtcttttggcgtgggacccaggcgtttgaagagtgcttccagggggtgacgtggcgccttgaacaaattttacttgttattactgtttgaaaagtctactagagctgcgcccatgcacagttntgatgaattaaaagatca

SEQ ID NO: 120306 - DNA, 144 bp, Glycine max
  Clone ID: PAT_MRT3847_79644C.1
gagattcaaattgccttaactgcaaaaagtttccatgactaggggccctctgtttatggacaaactgacaggaactttctattattgggcctgaaaacttctttgagatgcatattgccttaactgcacaatgtttctcgaacc

SEQ ID NO: 120307 - DNA, 128 bp, Glycine max
  Clone ID: PAT_MRT3847_79645C.1
gagaagcggggccaaaacccccccttaatttttaggtttcatggggcaaatttttatcaaaccggttttaatttgccccctgataaccaaaaaggggaagctgggcccaaactcgccttttattttgg

SEQ ID NO: 120308 - DNA, 423 bp, Glycine max
  Clone ID: PAT_MRT3847_79646C.1
ggaaccataaaaaagggtttaatttacgggaaaaaaaaacgggaaatagcaatgaaagaaggggaatttttcataactccatacaacttaggggatcagttttaaaaaccagattttaggggcatgaacgcaacctttacgcttggacccgaaacaggactttgggcaattaaacctcaaaggggtttgggcatcgaaacctttaatttttcgcacatggggcctagcccttaaagaaatttaattaatcagttcccaaaaaacgggccaaataataacaataataagcggaaattttattttaaaccctggggagaaaaactttttaagaaaggtaagtttattatgggattttggaaacaaactaaagtgcttgcaaactaccaattcaaacattccatgttttaaaacaaccggggcctt

SEQ ID NO: 120309 - DNA, 431 bp, Glycine max
  Clone ID: PAT_MRT3847_79647C.1
cttgtttcttttcaagtgatcaattccggggttatgacgggtggtttgaaacttctaagaaaattctaggctatcgaggattttatcccgaaattggtatgaaggttcttgttgaaaaatcactcataagttatcatagggggaaaatttgtatgcatgacttgttgaaagagttgggcaagactattgttcgagaaaagacacccaaggaacctagaaagtggagtaggttatgggactacaaggatctccaaaaagttatgatagaaaataaggaagccaaaaatcttgaagcgatagttattgatattgaaaaatatcaagaagagtttctacaacgaacaatgacagtagatgctctatcaaaactgattcatcttaaattactcatgtttaagaatgtgaatttttcaggaatcctcaattatctt

SEQ ID NO: 120310 - DNA, 427 bp, Glycine max
  unsure (1)..(427): unsure at all n locations
  Clone ID: PAT_MRT3847_79648C.1
ctagcccggccgcccttnnnttttttttttctgcacatttaaaactcaaaancatttcataaggaatcacgaaggacgaaactatcgactctagctatcggccgtggagagcctagataagcttgctccatgaggcggattccagataataccctcaacatggctacaaaagatctggccaaacttgaggaatgcaccagcatctgcagctgcatcctgaatgactaccatactaaaatgcaggagccactgcacaaatttccaggatgacagagacagaggatgcttcatctgccgaaagaccccacaccctcatcctgtaggagcaagtacgcgcctgaaagcccagcgaatgtgccacagctctcatactaggaaaaaccactgaagctggctttcgagagaaaaagcggtgttggaacaccac

SEQ ID NO: 120311 - DNA, 838 bp, Glycine max
  Clone ID: PAT_MRT3847_79649C.1
agattaggctacaggacggcaaggactgaaaagggaaacagagctactgaggaagaatccattacgcaactttcctcaaaacagcctccctagataattcattgaacctttgatggaagccatggattgcagcagtgttgtgccataatttcttcaacagtttgccgctcagctttcccctggaaagcttgaccacatttaacatgtgctttctagttggtactggaatttcgggtttgtttaattggttgaaaacaatgtacgagtaatatggttgaaaataatgtacgagtaatatttggacagagaatttaagaaatttgtaatgtgaggctacatgtcattacctcaattcaattcgggtttgtttaattggttgaaaacaatgtacgagtaatatggttgaaaacaatgtacgagtaatatttggacagagaatttaagaaatttgtaatgtgaggctacatgtcattacctcaattccattctgttcatttacaaacgctctcagctttcccctggaaagcttgaccgcatttaacatgtgctttctagttggtgctggaatttcgggtttgtttgatttgattggttgaaaacaatgaacgagtaatatttggacagagaatttaagaaatttgtaatgtgggacaacattattacctcaattcaattcttttcatttgtaaaattgttagtctattttgcccaatagaagaaacccttggggcgtttggtacaaggaaaatactttctttcccaaggatatggggatgaaacattgtgggaaatgtaacccccccattttttttttggaaacattgttttatgagaaaaa

SEQ ID NO: 120312 - DNA, 1379 bp, Glycine max
  Clone ID: PAT_MRT3847_7964C.1
cggctcgagcacgcatctaaattctaaacactcctccgacctataatacccttttctattttcattgttgaagctcacaagcaaaggctaaagtagattagattctcctcaagcaaaacctagagctcccacactcctccactacttagaatattaaaagccccttccttcatcaaggtacactgtttcatcttccctcaagattggaacaacaacaggacatgggtactctaacaactgttctgtgctccctttccttcatcaaggtactgttttatcttcgaatttttctcctcaaagattggaacaacaggaacatgggtactctaacaactgttcctgtgctcccttctaagcttaacaagccttcgctttctccgcaccacaattctctttttccctactacggaagacgcgtcgggaagaagaacaaagcaatggttcctgttgctaggttgttcgggccagccatatttgaagcctcaaaactgaaggttttgttcttaggagtggacgaaaataaacacccaggaaatctcccaaggacttatacgctaacccatagtgatataaccgctaagctcaccttggcaatctctcaaaccataaataattctcagctgcaggggtggtacaacagatttcaaagggacgaagtggtggcacagtggaaaaaggtgaagggaaggatgtctctgcacgttcactgccacattagtggaggtcattttctcttggatatattagcaaggttaagatacttcatcttctgcaaggagctaccagtggtgttgaaggccgtcgttcacggcgatgaaaacctattcaacagctacccagaattgcaagatgccttggtttgggtctactttcactcaaacattccagaattcaacaaggtggaatgttggggcccactgaaggaagcgtcagcacccacaggtggggtccaggaggaggggttggcaattccacagccatgccaagaagaatgccaatgttgctttccaccgcttacgttgagccctattcagtggtctaaacaagttcccagccgccattacgaaccttgtgatgggattgggacccaacaaaatctataaacagccaaactactacaattcacagttacggggatgctgccaaattggcaaattccctgtatacaaattaaatattcgaaacccatttcaatgtaaataaggaagctcgtatttgcaattttttttttttttttttatatatttttctttactttctttgttatgatttttctttcgtaagaaattaaattagttcatgtataatatgtctgtatgcatggttatttcaaagaattaaacagatttttgtaaggagtggaatttcgtggttgtaat

SEQ ID NO: 120313 - DNA, 457 bp, Glycine max
  Clone ID: PAT_MRT3847_79650C.1
cttctccatcagatagtattgccatacttggctactaccaaattagtcatggatcttattcataagttcctgaacatagtagcttctataaccaccttctttttcctttgccttttcttgccaccgtattggaccttcaagttcttcctttacatcacaaattacatctttagtgaaaatgtagcaggtaaagtgatacacatcactggagcttcctctgttattggcgagcatttggcttacgagtatgctaagagaggtgcttgcttggcactttctgccaggagggagactgcagtactacgggaagtggctgatagaacacgtgattgtggatctcctgatgttattataatgcgtgcggatgtctctaaggttgaagattgcttccgattggtggacgaaactgtgaaccatttttgaagactgctgcaatcagctttgccaccttgtttga

SEQ ID NO: 120314 - DNA, 194 bp, Glycine max
  Clone ID: PAT_MRT3847_79651C.1
tcgtcacagtctgactagtacattcggcctccctatttttgtaagactgctgccgctattccgtaggcagtatcaatggcctcaaatactaaaacttcgacctttgaggaggtagctaacctcagcatcaaagaggattgctggattattatcaatggcaaggcatatgatattacagcctgtattgttttttt

SEQ ID NO: 120315 - DNA, 344 bp, Glycine max
  Clone ID: PAT_MRT3847_79652C.1
ttccccactggattccttatgtcagttttctccgaaggtgctaggcatgatggctaaggaatccgctcagatcaacatcctgttgcctagccttgtcgtccctgaagaggcagccaccgatcacgagctgcagaagcctgttgaggaggaagaatctctatggcgtgcacatatgatggcatgcatcttacggacgctgcgggtaaccactgacattctgtatacgaaaatatgctggaaccctggtgcgaaagactatcatcaccgtgtagttgatgcttgcttctctatggttactcactatgaaaggagagcattgtcgaccagtagcattcaaagcgatt

SEQ ID NO: 120316 - DNA, 358 bp, Glycine max
  Clone ID: PAT_MRT3847_79653C.1
ggctaaagatgttgaggctcaagagcaaggaggagagcactctgccaaagactaccaggaccctcctccagcacctttgatcgacccagaggagctcacacagtggtccttctatagagccctcatttttgttttcatagaaacccctctcttcctttatgtcactgtgctcaccattattggacaccaaaggcagaccgatacaacggtatgtgcccccgactgcgatggggatggaattttgggcatcgcttgggccaatggcggcatgatctacatacttgcatactgaaacgccggtatttccggaggacacctccccccggccgcgacattcgggatgcccctaggaagcaag

SEQ ID NO: 120317 - DNA, 345 bp, Glycine max
  Clone ID: PAT_MRT3847_79654C.1
tgatacagctgtgataagacgacggggagggaaaaaataatacttgagttaaaaaatagaaaaaaaataattacatggatatataaatccaaataactagaatggaaaggaaaaaaaaactgggcccttttaccggataaaagttaactgttgagtatttggaagatcataacttttcatttgtgttaactaagtccaatttactggcccagatttaataaagtacttattgggaaaatctgtcgagtccccattttaactaacttgtgagttatcacgctattaccggttggacacttatggaatttgcccagacccataaaccttccaaagaatcgccaactt

SEQ ID NO: 120318 - DNA, 282 bp, Glycine max
  unsure (1)..(282): unsure at all n locations
  Clone ID: PAT_MRT3847_79655C.1
gtggctggatcatccccagcntcttngatcatcaccagntccnccatcaanattatcacttccggtccggctttcatnttcntctccctcntcctncctnagcaanttactagtatcaaaattnctcccattaggaccctctngctatggccttacattctcctttgctgnagatagtantccattangcaacataacnacannaggngntaatangtgcanaatccattctnatcatncaaangnaataccaanctgataataagggggttctaatcaagg

SEQ ID NO: 120319 - DNA, 290 bp, Glycine max
  unsure (1)..(290): unsure at all n locations
  Clone ID: PAT_MRT3847_79656C.1
gantttnttcctcttgagactgtcattactcctcttgaagctgagattaagatgtataggaatgagattgcatcactacaagaagataagaaagctttggaacgactcacaaagtcaaaagaggcagcattgcttgaagcagagaagattttaagaagtggcactagagagagttttaatagttgaggaagttcaaaatgaaaattttgacttgaagagacagattgaaatctgccaggaagagaacaaaatcttagagaaaacacttcgccaaaagattttggaagttg

SEQ ID NO: 120320 - DNA, 2795 bp, Glycine max
  Clone ID: PAT_MRT3847_79657C.1
aattcggctcgagaaaaaagccaaactatctttctctttccatctctctctctttctctctcattgattacagccaccgttttctctttcttccaacttgctttggttcctctcctcaactaaagcctattcccttcttctcacccatgtccatttgtagcatgttttctcttgagcacttcaaagttcaaatctttcacacacactcattcatctccaacctccacacccacttgggtcacttctagaagatctatctgccaacccttttggctgaaaaaagaaaaaagaaagaaagaaaataatgggaagcaaatggaggaaattgaagctggctcttggtttggattcctgtgttcacattcccagagcctttgatgattcctccgccgccgcagcaaggttttccggcggcatctcacccaccgtcgtttcgccggccggtgacacctccggctaccgtccctccactcccacaccatcgtcttccggcctctggttacccaaatcgggaaccaaatcccctaaggggacctgtgcaatatgcctttatacaatgaaaccagggcagggccatgccatttttactgcagaatgttctcactctttccatttccattgcatcacttctaatgtgaaacatgggaaccagatttgtcctgtctgcagagcaaaatggaaagaagttccttttcagaatcctgcttcaaatatgccccatgatcaactcaaccaagtttctccccgagaagaaggctggacgactgtcttacggaggcttccttctcctcaaggtgacgctgctcggcagatttcatcactttatcatgtcactgagccagctatttttgatgatgatgaagccctggatcaacaaacttcagttacccatcctaaaaacgagattgataatgatgtaataaatacagtggagatcaaaacatatcccgaggtttcatccgttccaaaatctgcctctcgtgatgcctttgctgtattaattcatctcaaagctcctcattcagggagaaaacaaaatattgatgcaaacagtactgaatcatcacctctggttgaaaactctcgtgcctcagttgaccttgttacagttcttgatgtgagtggtagcatggctggtactaagctagcgttgctaaaacgagctatgggttttgtcattcagaatcttggtccatcagaccggctgtctgtcattgccttctcctccacagcacgccgcatctttcctctccggcagatgactgacactggacggcagcaggcattacaggctgtcaattccttggtttcaaatggtgggacaaacattgctgaaggcctgagaaaaggcaccaaggttttttctgacagacggtggaagaactcggttagcagcatcattttactctctgacgggcaggatacatatacagtcaatagcaggcctaatgtcggaacagattacctgtcacttgttccaaactccattcatcgtaataacggtacgggcatgcagataccagtgcatgcatttggctttggctctgaccatgatgctactttgatgcattcaatatctgagatatctgggggtacgttttctttcattgaagctgaggatgtcattcaggatgcatttgcacagtgtattgggggactcttgagtgtggtggtgcaagaattacaagtacaagttaggtgtgttcaccctcaattgcaacttagttcagtaaaagcaggaagttaccaaacaagcttgatggggaatgcaagactggctactatcagtgtaggagatttgtatgctgaagaggaaagagactttttggtgacagttaatgttccagttgatcaatcgagtgatgagacgtcgttgttgaccgtgagatgtctttaccgagatcctataacaaaagaaatggtggctggctcgagaaacagtgaagtaagaattctgagatctgatgtcggtggaggagaactggttgtgtcaatagaggtagatagacagcgaaacaggctgagagcagctgaggcaatggcggaggctagagttgcagccgaacgcggtgatttgtctactgcagtttcagtcctggatagctgtcacacggcattgtctgaaactgtttctgctaaagccggggatcggttatgtgttgctctttctgcagagttaaaggagatgcaagagaggatggcaaaccaacgcgtgtatgagcagtctggaagagcttatgttctgtcaggattgagttcacattcatggcaaagggcaacagcacgcggcgattccacagacagcaccagccttgtgcaagcataccaaacaccttccatggttgacatggtgacacgttcccaaactatggtttttggagcgccggtgccgcaaaataaacgtgtcctcaggcctgctaaatcatttccggagaggcagagaagacaataaaaatgagtttggaaaattctacttggcctatacatatacttgtggggaaaccttcaagtttcttatcttattttacccttttgtttttggtttttgtcaaggtggggtataatggaaaggaaggaattttaggaggacaaaattcctgattttgccaaaaatataaaaagtgtaaatgggctggtgcagagaatgaatggcgaaaaggaacaggttgaatatttcagtgtgattctgagtgatgtacataacctattgttttcgcttgaattgtgcgggtgaatttcatcatcgcttgattatatacatatggtataatatatttgcttctgattcttttcat

SEQ ID NO: 120321 - DNA, 1352 bp, Glycine max
  Clone ID: PAT_MRT3847_79658C.1
gatgatcgtttcacttcccgtgtcggtaggttgactatgacgtataaatatcttctggaagttacacccctccattaatgtgtctctgtgatcgtttcagcgaaggatgtttcgctctttttattggctcgcctagacagtagggcgttgggcaaagtagtggttgtttcattttggcattcttggaatgctgattttgtccatcaatagcactgatcaataccttactaatgtacttcttaaattcaattctaagcttggaggaataaattctctgtagacaatagagcattctgggcatcttctcctgattaaggataccccaacaatgattttggggatggatgtctctcacaattcgcctggtcaattagatagtccatcaatagcactgatcaataccttactaatgtacttcttaaaatcaattctaagcttggaggaataaattctctgttgacaatagagcattctgggcatcttcccctgattaaggatatcccaacaatgattttggggatggatgtctctcacaatttgcctggtcgattagatagtccatcaataacagctgttgttggatctcgacattggccactgatttgaaggtatagagcatctgtgagaactgagaatgcaggcatccaaggaggagatgattgatgctctatacaagccattggaaaatgagagtgatgatggtattatcaggcctatcaacatcttggtgaggttaatgttcccaagttcactgtgattgtggcacaataaaatcatcataccaagctgtttctgcctaatggcccagaaaatgttcctcctgggacggctgtggacacaacaatcacacatccaaaattatgatttttacatgtgtgctcatgcagggatgcttgaaccaaaggagcacaattgcaacctcagttgtggcacccatatgttatgctcaccatgctgcagctcagatgggacaacttttgaatttagatgatttaacagaaacaggtttaagtcctgcttcagagggaaacattcccatccctgagcttccaatgttgcataggaatgtcaggagttccatgttcttctgttgaggtgtgtagatgacaggtgctagtaaatacatttagattgatcaaaaagtgtaaatgtacatttagtatccctttaaacatatgaagcccaaattttgtttgatggggaggtggaatcgtgggcttgtgtacagtctacatactagtgatatgatttgtcattttgagacatcaatcatggtaattgagtcgcattggcttgcaagcttttttgcatatattccagctatgaaatatttctacccttcctttttttta

SEQ ID NO: 120322 - DNA, 324 bp, Glycine max
  Clone ID: PAT_MRT3847_79659C.1
ggaggagtaaaattgattcttggggttatgcgaacacattatgtgttcgacatacatagccatgaacactcttagtaagaacccattcaaagttgagcattcgtgcacaatacatcaaaagtcagatttttgaaacttatacaacgtttaacttacagcataattattaagttttataccataggaattttccttatcttgtatgaggaatatttggaatcaaagcatattatgttcaataattatggtgcttgagaagggaccaaacttcagcattattaactttgtaaaccaaaaaatgcatttgttggtcattcgctttgc

SEQ ID NO: 120323 - DNA, 426 bp, Glycine max
  unsure (1)..(426): unsure at all n locations
  Clone ID: PAT_MRT3847_7965C.1
tacccacgtcgttcgtccacgcgttcgcggcagaaaaaaaaccacatatggtgatcttcgcccttagcggagagagtatatcatcgccgatcataaatgaagagcgcgatgttttttgcaccctatgtctttagtgactacaccacactcattgngtacctatcagccagcgatagaggccatgctttttattgaaggaagctttttgaaaatggtgggacatatgacatctagcgggacgtaacaaaacacgacggaacgcgagcagccataacgggaaatgatagatgccctatcactgcggcgcaatctctcattgagctggagagagggaaagaaacaatcatatttgtcgaatatataatcagatttatcgtcgagggccaaccaacgagccgtaggttcgatgcattcacaaatataaag

SEQ ID NO: 120324 - DNA, 136 bp, Glycine max
  Clone ID: PAT_MRT3847_79660C.1
ctacgctacctcatatgtgcaattcttagctatagataataatgccgagaacgagctgaggtacttactcgcaggtctgatagacatcgtgataagtcagatatgtgcacaagctcatgtgcttgcatttgctggt

SEQ ID NO: 120325 - DNA, 364 bp, Glycine max
  Clone ID: PAT_MRT3847_79661C.1
ggggggggggtaaaaaaccaacagggtaacttcaaaaaaaataaacacaaaaaatgttttaaaaaatggtggccacatggcttgcacaaaagtttaggttctttccacacgcttcacttgatctgacccatgggtgaggatttcacccccaagaaaaaaatttgccgttacgcttctttgatgaaaagaaagcggggcttccttgagggtgagaaccccactggcaacaaaggacccttgcaaaatccaattctaccttgaaacaccgggggcagacccccgtttgggccttactgttggaaagtcctttcctggtgggcggtccaataaaaaacgcttccacctccgtttggcccgtttattt

SEQ ID NO: 120326 - DNA, 286 bp, Glycine max
  Clone ID: PAT_MRT3847_79662C.1
gctgattttcttatatatggtggtggtgacctgaatcgtgttggtcaggaagttggttctgtgtatgagagcgtgaagatacctatttttgtctcgtgtgggaaaaacatgtcttatactgatgcatcgggtttgtttgcctctggtgctagtggttttgttactagtttggaaaattttggtttgtttggtgatgagtttttgcacaaactgttttgcactgtgtatgcaagtgatgatggtgggaatatgagtggggataaactgaatgtagataatgggtttt

SEQ ID NO: 120327 - DNA, 301 bp, Glycine max
  Clone ID: PAT_MRT3847_79663C.1
gggtacgctgaatcctcgcaaggtgttgattacctcatcaaaaacaggcctatgtttcccaccctaatcatcttaaggtgggggggtacttcaccacctacactcacttccaaagattgaatgcataattgaacaggtccccaaacccctgttgcctcaaccgagctcgctttgggacccagattaaaacttgtaccgttcctagaacattttaccacctaatactgctaagtacaatccctcgtgttggggcaaatcttgctaattggaaccagggaccggaagccgacctcggccaact

SEQ ID NO: 120328 - DNA, 453 bp, Glycine max
  Clone ID: PAT_MRT3847_79664C.1
aattcggctcgaggaaccagaggtcagagcagacccatttaatggccttgtacgcataggtggaagtgccttttttatctacctatacactttctctagtctgtcctagaaaccttaagttttcactacttggcacgctgtgcagcattgcagctaattaagcaccaccatcactatcttataagggggggaaataacaacttgtgttgtgtctatatataataagtagtgagggggttaaggttggtgttctcatccatagttctcactggttttctctctaggtggatttgaggaactcttttatattgaactgtgtttcttgtttctgagtgctgattttggaggagaaatgagtagttatttgggtgtaggtgttagtcctgggaatgtcccagtttaccacagcacaaatgtgaaagtgttagataggaagatcaagataacagaatt

SEQ ID NO: 120329 - DNA, 687 bp, Glycine max
  Clone ID: PAT_MRT3847_79665C.1
gttatttattgcttgcagcacttcaattgtcaataacagatagtgcaaaggatcaatcaagccagtcagacatgagcaaattgttagctgatcaatcctttgtatcttctatccttgcatcgcttcctggggttgacccaaatgacccttctgtcaaggatttgctggcgtccatgcaaaatcagtctgaggttagtctttctatgaaaaagaatatattggatttgaaaggaatttcttttagaaaatttcagtgcaggccagtaaacgctaaccttgaacacctttgcccaaattgtgtaatgcatacattagaattttataaactggactacatgtaagaatctagatagattgctgaaaaaataaaacaaacataggaatatcacttggtcagcagtcttctatggctatgctttgcattttctctacgcaatttccatctttctttaatgtcacttgtgttagaaaccaggtccacattttcaccaggttttccctgaagctcctctgccttagacttttcagcctcatatcctcctctgattctagcagtttctgcaagcatatcatttataagcatctcagtcggatgagttgatgtatccaatagcatagcaagagggaaccattgcagttcttttcaccaaaaaaaaaaaagggcggccgctcgcgatctagaactag

SEQ ID NO: 120330 - DNA, 622 bp, Glycine max
  Clone ID: PAT_MRT3847_79666C.1
aaaagataaaggcaagatttaatatataaggggggtaattctcgtcctttgaactaacttttttggattaaggtgaacccaaacacattttttaagaaaaacatttgattaaccgaacaaagaaaataaacaaagacaaaggaagttaaactttcaataaaagcacattaatacagtttcactggcgggaaaagcagtaatatacatcagtcttttttttgacactaaaataccccagataacaaagtttcatcattatttcaagaccatcaaatagtttttgattcacacagctactttttttgcacaaaataaaggcaaatgttttaggcagttgctgggctagtttaaaagggggctgcttcaccttcccaaaagggagtcttcttcccagttttggaaacgggctgcaaaactgggtctggctggacatttcctttcactaccaccttttgttccttcaaatcaagggcatatgattccacaccatccaattttcctaaaacttttttcactggtccaacacatccttaacatgacataccaactttgaggacaacagtctgagacatggttacgggatggacgacaaaggaagaaactcgagccgattcggctcgag

SEQ ID NO: 120331 - DNA, 446 bp, Glycine max
  Clone ID: PAT_MRT3847_79667C.1
gcgattcattcctatagctatagctacaacatatcatactactactgttgttgttgctgctactgctgttgctgctgccgcgtatcaatcactcgcttaccataatgggtagggatagccatgaccccacttcctttcactcttccattgcccttctacaagagaggtttagacagcttcagagagtaaaagaaatgagggaggagagggagcttcagaagatgctcaatgaacctaaacaattcagttccaacaccaccacctctatgagtcgtacttatcacaattccaacaattctatcctctctcaccctgaattgattatgccatcaaagtcaccaccccatgtttctctctctctctggccaacatctcagggcaagcaagaggactatagaagtgctcaaaccccggtttcaatgaactatgcacattcacagtccatg

SEQ ID NO: 120332 - DNA, 873 bp, Glycine max
  Clone ID: PAT_MRT3847_79668C.1
gagttaaagtaaaactcatattgtatgatgatatcaaagtctattatagatttattaaatgggtcactaatagtttaatcatgtaccaaacccaaaagtattggacgtaaggaagtatattgagaaaaactcaaaatttcacatcggttaaagataaagtcaagatataatatataagtggagtaattctcgtcctttgaactaactcttttggattaagttgaacccaaacacatattctaagagaaacatttgattaaccgaacaaagaaaataaacaaagacaaaggaagttaaactctcaataaaagcacattaatacagtatcactgacgtgaaaagcagtaatatacatcagtcttttttttgacactaaaatacaccagataacaaagtttcatcattatttcaagaccatcaaatagtatttgattcacacagctacttcttctgcacagaatagaggcaaatgttttaggcagttgctgtgctagtttcagatgttgctgcttcaccttcccagaaggtagtcttcttcccagttttggaaacggtctgcagaactgtgtctggctggacatttcctttcactaccaccttttgttccttcaaatcaatgtcatatgattccacaccatccaattttcctagaactctcttcactgctccaacacatccttcacatgacataccaactttgaggacaacagtctgagacatggttacgggatggacgacaaaggaagaaatattgcttcatcatatgtgataatgatgataatccactgctcttaagtttcatccaaccacaggaaacaaaaaaaagtaattcgtataattgctgctgctattttattttaggaatgtatttta

SEQ ID NO: 120333 - DNA, 191 bp, Glycine max
  unsure (1)..(191): unsure at all n locations
  Clone ID: PAT_MRT3847_79669C.1
acccactcttccnaaaactancaattcattaactattataaacacgtatatatcacagcatcgctcattttatatacccttctctccttcatattcactcttctactctttcatcttctcatttcacatttctatcatttctttaacctttaattttttttatcttttttcttcatatcccttttcttttc

SEQ ID NO: 120334 - DNA, 317 bp, Glycine max
  Clone ID: PAT_MRT3847_7966C.1
gtaatagcacggcaatagaatcaccaaatttcaaaactctggctggcgtaaaacatgaaagagtaaggctataaacttaccaaaaaaagaaaacaccatgtatatgatcgatagcaaaactacttttattagtaaccatcacaatgctctctctctctctctctctctctctctatatatatatatatatatatatatatataatattccaaatttctttctaatcaatataatgttattttatttattaatgatttacaactattctattacaatatttaatattgattaaagatatttaaatatttattaatgat

SEQ ID NO: 120335 - DNA, 224 bp, Glycine max
  Clone ID: PAT_MRT3847_79670C.1
ctccctctcagtgttatacatttcttgtagagctgaactctatgaaaattaaatcaaccaagtcgtaatgcgggtctcttcgaggtagtcatttcctggcattatctgtgttcggggttggtcatgattgtgagtccagttgccaatgctcaagactcaccaacagattacgtcaatgcacacaacggctgcagctcagatgtgagcgttcacaacttggcttt

SEQ ID NO: 120336 - DNA, 217 bp, Glycine max
  Clone ID: PAT_MRT3847_79671C.1
tcctctagagcggccgcttttgggtttttttttttttttttttttttagatagtagaggagttgtcaaaataaccaccgcaacagacacatttcgaaaacattggagacagaaagcatcaacccaaagacattaattccatcagaagaatatttgaatctccacagtcccttctgtcgtcttctcgcagccgtacggacgcgtgggtcgacccggga

SEQ ID NO: 120337 - DNA, 255 bp, Glycine max
  Clone ID: PAT_MRT3847_79672C.1
ctagaatatgctctcacacattatggctccatgaagcacacgtccggatacgattcaatagaaagtctgaccctactggtagtggtagcacacgttctgtagctggtctaacttcgtaggtcgccgaaagatacctacaggagcattactccaaggaaggacatgcttcttcatgtttccttgtggtggatgcccgtacacggatttgtcgtgggtatgcttctgtaacaatggtctctgctgaagatgcggacg

SEQ ID NO: 120338 - DNA, 311 bp, Glycine max
  Clone ID: PAT_MRT3847_79673C.1
ttttataaaaatgggggtaaacatgtctgttgaaggcaaaggaagtccgagatgtgctatattgataccatatgttgcgccagctgagcaagctcaaagcgctgacacatactttgactcctttcctggggaggttcgatggcaaaagggagcgactgatatcgatgattggaaaagtgttgtctatgagccactgcatacaaaaactagattgatggaaactgccaaggcatgggaactgaatctaccttctgacaaaatatctgacgtcgctactacaactgatgagagattgcgaggcacagaacata

SEQ ID NO: 120339 - DNA, 578 bp, Glycine max
  Clone ID: PAT_MRT3847_79674C.1
aacaaaaataaactttaatattacgttacttatatatgccatctctactcacaaatattgtagattactgagaatactgtttggcttaatgcttgaatatattctagcgatactattcagtcaaaagaagcaaactttttttctttctaaatagagttatgttcaaatggtagtagtttataccattaaaacaatagtttgtttgatttggctaatcaggattttacaatatcaattgttacaaaaataaatgtgatgttaaccctgattaaagttggattttaagttaggagaaatcatgtttgatccttgcttacatttgtctaacacaggcagtttatatgctgcattctgctgctattttgaatttgtaagatatgaatgacattatagaaatacaaaccactttgttgatgattctggaagacatgtttcatggtgtgcattctagccccaggaattaattctagtagacaaaaaaggggttgaaaagtcggcttaattgcggtcactccaacttgcttttagttgtggcttctttggagggctgtcttaattacagcacccttgcctcaggg

SEQ ID NO: 120340 - DNA, 344 bp, Glycine max
  Clone ID: PAT_MRT3847_79675C.1
agctcgaattcggctcaggcctttttattatcagccttttttactacagaaaacgaactcaaacggggagggttatcaaagatttccacgactgatgccattacacagcccttccatatctctcaagtacacaaagatctggcccgcccttcacccattagtaacaaaatcgttacctcgccaccgtccataccaccctcactacttttgttcataccaggcggcaactttatgcagaactcatgtgcctctggataccattcatacttactgcgcttatatagctttggctagagaataattacgggcgctatacttggattcctgggatctgcatatggaac

SEQ ID NO: 120341 - DNA, 325 bp, Glycine max
  Clone ID: PAT_MRT3847_79676C.1
aactaattaaaatttctatagtatattattcacattgggttatccggaagaatttataaataaccctaaaacttcatatcatacacaaacccaaagacaaggttaattcactaaaataaaatttcacctcacacctaatttgttgatccaccactcctccattaattactataaatgggtactagacaacccaatccataattcacccacaaaaatacaacttaaatctcctcctaaatttttaattaaggccctcaaaatctacataccaattctatttttcaaataactaaaacatcaccatttttattgaatatttccaaat

SEQ ID NO: 120342 - DNA, 196 bp, Glycine max
  Clone ID: PAT_MRT3847_79677C.1
gggttttcgcccacaagaaccatgggtattggagaatgggaaaccaaggactttgaccaatgagagcaggcctggccgagctgcacacagaatgtccttcacctctatgagcaagaaatctagccgaactctggtcgcacaggttccatgtgccactgtcagaaactttctttcaaatttgcacgaggtaattctg

SEQ ID NO: 120343 - DNA, 819 bp, Glycine max
  unsure (1)..(819): unsure at all n locations
  Clone ID: PAT_MRT3847_79678C.1
gcatgcctgcagtattttttctacactaatcttttgcaatatctaaatgaccaaacatcttacattgaagaaaagcctgcatgtaagaagattatcttaaaagttttgaaagtgatatataggtatttgtcatcaacaattatgttaatgataatgacacaattagctggataactaaaacttaagctttatacataccaaacatatatcaattatgttagtgatactagttgcatttggttatatgtcatagatatattaattaactatctctaaaacaaacctattatacaaagtccacaaaggaataaaataattaaaatttaaacctttatatctacaacatttgttattaatttcttaaagtaagaaggtcacatatgttaacaaaaaaatctcatatatcattcttttcttttaacataaaaaagtgtttctcaattttttgttttaaatcttagtttatgttggatctactatcttcttaaaaaaaaaatccataactagaccaatgccattttaccctcatcattttttgtccctattttcacgagagaaaaaaaaaagatttctagagctttaaaatgataacttttaccctcatcattttttgtccctattttcacgagagaaaaaaaaagacttctagagctttaaaatgataacatttttactcatactgtagctcaaaataatcagtttaaagaaaacaagaagaaatgattaaggaattctttattctccagcaagcgataaggcattcttgactctncacatgaggtttaatttgcaggcatcttaagcatggtcatgtgtaaa

SEQ ID NO: 120344 - DNA, 277 bp, Glycine max
  Clone ID: PAT_MRT3847_79679C.1
tctttgatgggtatcagtggttttatgttttgccccttgttgtgtctactttagcttggtttaggctttttccttttgtttgtatgttaggggtagagaactactgggtggtggttgacctgaactcagcagtgattaagaattttgggttttggagttcccatttttattttttgacgaatgggtggagtggttcaagggtttttgaggtgtggtggatccagatcttttggtttgttgttttgctgggaattttgataaaggctgtgtatttgga

SEQ ID NO: 120345 - DNA, 193 bp, Glycine max
  unsure (1)..(193): unsure at all n locations
  Clone ID: PAT_MRT3847_7967C.1
gcaatttgcattgttcacaatgagactgcaactggggtcaccaatgacttggccaaagtgngacaaattctcgattcctaccagcatccagccctcctnattngttgatggagtntcttccatntgtgctcnnganttccggcatggatgaatcggganttgatgtggcaataactggctcccannaggcntt

SEQ ID NO: 120346 - DNA, 380 bp, Glycine max
  Clone ID: PAT_MRT3847_79680C.1
taataattgaatcttcctaagtaatcgcgttttgtttgttctcaaatttaacggttgactcatgatttctgcttttttgtttgtgattattgtttctgaccattccattaggcattcttaaggtttaatttgtttgatgtgattgtgtggtataaataatttgtttaatttgttgatgcatttttatttgagtttatggcaatccatgttttagatgctgacatggatatggaacagaaaaaggtcattgttgtgttcaaacaatgcatgccactcagcgatggttcagttttaagatttttctttttgtctaatgaaattgcaaatgcgtgtcaaagagttgcctttccttaacgcataaaattaacttttgggttaac

SEQ ID NO: 120347 - DNA, 477 bp, Glycine max
  unsure (1)..(477): unsure at all n locations
  Clone ID: PAT_MRT3847_79681C.1
cttacgcgtncgtttacgcgtgggcggacgcgtgggcgacaataacaaagcaaacaactaaacccagatgcctacagccgatacaaataaaaaagtgcttggctaaatgttgcattgctcttttgaactcagtacataaggctcatatatcacccatcagataaagagcccttgtgccatactgagcacatagaagatgacaacaacatcattaagtggcttgcaatgtgcaatggaaagaacatgcattccttcatcacaaaagatcgcagatgcaagggcagtggttcttggcggcaagtccaaaattgagtcgcggaataaacttgcaagggcatgacatattgcatcagagcaacacttcagacggagatgtactcaaacgtacataaaagcagtcaaaagagtgacaaaggctatgactgagtacagtgcacaaagtgcagcctcaaggagagcgaagaaatcggaaaagaa

SEQ ID NO: 120348 - DNA, 198 bp, Glycine max
  Clone ID: PAT_MRT3847_79682C.1
ggaggaccccagttgggggaaccatcctgcgaagggaccaatgggcaaatttttggccagagggcaatttaaaagcaggtgttattttgcacccccctaatcgattaaaaggaatgtttaaaatgggggcccaagttggttttcctgaaaatccaggattttaattgggcctgtgctattaaataagtcttttaaggg

SEQ ID NO: 120349 - DNA, 1264 bp, Glycine max
  unsure (1)..(1264): unsure at all n locations
  Clone ID: PAT_MRT3847_79683C.1
attaatatagtaaacttgccctgaaaatatgaaaatgtttttttttcttctttaaaagacaaactgtagccactagcaacatgtccattatgttctcttccaaagttactaatacactattctcgcatcacttcatcatttcacgtcagcctctcactagcacaaccaaaaccaacaacattatctctatgcctatataaattattagtcacaaaaattcggaaagatacaagtctaagcagcaactgaagggcttgaatcatttcagctcatcctagtttctcattcaactttccaatgataccatgcagctctaatcaagttgtgaagtgcttgaaccaactatgaagagaccaggtcccagaacttttgaatcatctctctttaacataaattagttgtcagcgcatgcataggcatgctagatggttggtgcagtatcatagtggttcatgatgaagggatagatggagatgcccacaacttcactttcttgtcagcactggctgtggctaaaaccaaaacttgttcatttcccattggaatgggtttaggagcccatgaaatgcatgaaatgtcactatcatgggctttttcagctgtatccagaacctttccagtctcaacacataaccactgcagtgtggagccatgggtcgcagccaaaatttttccatcaggggaaacactcaggcggtcatagtgcagtgtagtaccggaagaatcatgaagaggaattaggaacaccttcagcgtcttcggatcctcatcaagatgataacgaacattgatattccatagtctcattgaaccatccttggatgcagtgattatttgctcagagtttggcataaagcataaccaagtcacagcactcttatgccccttaagctgcataacatttaaaacttccttcacagatccatccttagcatatacaatctcccagatcttcacgtctgcagtaaatgctgctgctgcaataaaacgaccattgggtgatatagtagccatgttatttttcaattgatttgtatcaacatgcccaacactcttcccagtttttccatgccaaagaatgatgtcagtcccttctgaacatgaggcaacaattgtacttccatccgcagtgccataagttgcggaggctccaaacatagtaattattgatttccttatcnatgaactnttgtgatgctccacacttaatttcctgggaagaggaagcctttgtctgtggtttcatcttcagagagatttcggc

SEQ ID NO: 120350 - DNA, 474 bp, Glycine max
  unsure (1)..(474): unsure at all n locations
  Clone ID: PAT_MRT3847_79684C.1
gggaaaaaattgaccaaannnnnnaaaannnnnnnnnnnnnnnnnnnnnnnnnnttttttaaaaaaaaaaaaaaaaattttttaaaanaaaattatttnnnaaataaatttttattttttattttatttnnntnnntttaattaaaaaaaaaatnnaaaaggggtttnntccttttgagggagctattagtttttttagncatttttggacttcgcagggtttgtcacaaaattcgttggggttaaaacaactaccctgtcctggttgggagcgtgggcccatacagcttttacaatttgggggggctgaattcaccctatttttttcacagctgctttgggggggctttgggcgggtgcccattcaagaatcacagcagggttttgaatcctcctcgtccccatacctgggggacgggccactttggaagaatttccgtcccctgggtgcagttgaaacccccccagggaaaa

SEQ ID NO: 120351 - DNA, 117 bp, Glycine max
  Clone ID: PAT_MRT3847_79685C.1
ctataaaattacttcaaggccaacaacactagactatctaactgataggggaatgtaataaaatacgctgctctctaaaacccacaaagttgttgcccgaaatgcaccataataaac

SEQ ID NO: 120352 - DNA, 355 bp, Glycine max
  unsure (1)..(355): unsure at all n locations
  Clone ID: PAT_MRT3847_79686C.1
gcccaaaaaccgtgatctatatgttcattgctttaaagagggtgattttatcacaacgcctactggtgttgcatggtggatgttcatcaatgaaaacactactgctgttaccattcttattattgtcatctactggtcgtagaaccatctacaccaaatgcctacgagattctatattggtgtgaaccatgatcactagtctctaaaatatgatcatgatcatcgaggagggtcccatagccagaatggaaagcaacaagaagaagaagacgatggaactgacatattgagtggctacgcatttgattgatttaaagaagcgtacggcgtgaacatgctgatanttgagaaactt

SEQ ID NO: 120353 - DNA, 923 bp, Glycine max
  Clone ID: PAT_MRT3847_79687C.1
ctcggaattcggctcgtgctcgagccgaatcggctcgaggtttttttttccccttcttatttctctctccctctgccaaattttccacctaagagcgagaaagcaaaaatctgtgatgaaagacaaagcaagagagaatttcaataacttgcaacttgcctacaccatatttttttttgttcacaatttaatatatggtatctagcctgtggtgtggccataacaagaagggagagaaaacaaaataatttaaggttgagatgaggaagtgtgagctctgtaacagtcccgcgaagttgttctgcgaatcagatcaagccagcctctgttggaaatgcgatgctaaggttcacagtgcaaacttcctcgtcaccaaacatcccaggattcttctctgccatgtttgtcaatcactaacagcgtggcacggcacaggacccaagtttgtacccaccatgtcagtttgcaacacttgtgtcaacaacaatagtactgagacctgcagccaacagaatcatgaagacgatgatgatgatggtacgggagaggatcatgcagaaaacgacgatggtggtgtggctgaagatgatgatgatgatgatgatgaagaaaatcaagtggttccatggacatctacaccaccacccccagcttccacttcttcaaatagtgttacaactagttctaccaggttctctgatgttgaagaaggtggctccgattaataattccaatatcgtgatggataaaacttcgatacagttttttaggtgttgttcctgctgttttctaatcagaattagagttttatttcgagaatttatgtaataaaagtttgccttaaagaattatataaaacttaaattctcgactaagaacagtgtaaacaacacataggaaataatatataagttctattgtac

SEQ ID NO: 120354 - DNA, 509 bp, Glycine max
  Clone ID: PAT_MRT3847_79688C.1
ttaccgtgctacatgtgagcacgtcctccttcttgggggggggggggggccgagaagaggagataggcagagggacgcgttagccggtgtataaggatcacggatagacaatgggtatcaaaaaaaaaacccaaggatacaaaagtaataaacttggaaattggaggataatatcatggaggataatattatagccgcataaggggcgcaagggtaaaaagctttggggcatcaaaagagaagggagtacctaaattgcagggagtgaaaacaacagtatagacgggaataagccatgggttataaagtctgaacataacaggtatagctggggagaaagaataatgacaacagaagtcgcctggaaggaaaagtgtaacgccacgactgggacgtggcctgaagttaaaccgggtacgtagagtaagaccgggagggcagccagggaacaagcaaaaacaagcaaaaacatgcctaacaagtaaagcaattagggcaacctgaaacca

SEQ ID NO: 120355 - DNA, 379 bp, Glycine max
  unsure (1)..(379): unsure at all n locations
  Clone ID: PAT_MRT3847_79689C.1
gtctaatgtagacccanaaccaatcataaaccatgccttgcagacacgatggggacccactgtcgcaaatgcctacaccataaatggacttgccagccctttgcattattgcgcttctgaagcatacatacacagtcaaagtgatagccaggccagacatatcttgctaatactaattaatgctgcactcaacgaagagcttctcttcacattagaccacctcacccttactgaggttgaagcacatgccatattcaccaacccatttgacacatacacactgctactagcccctggccaaaccacaaacgcagcttctgaaaaccaagccatataatgccgaagccacatttcatatgtctgctacgccttatttcac

SEQ ID NO: 120356 - DNA, 480 bp, Glycine max
  unsure (1)..(480): unsure at all n locations
  Clone ID: PAT_MRT3847_7968C.1
cccacgcgtccgagggggggaaatgatactacaagccactaggcatggtatgatgctaaattaaattgtgcctgcaccccaggatatttcatgtgggattcatcatttattgaggaaaactctccaaattgaatcgtgcatttatattttttttccatttctagatttcttgaaggcttatggtataggcacctacaattatcagcacttctctctattgataaacaattggctgtaataccacagtagagaacgatcacaacattttgtgctggttactttttgttttatgggcatgatttcactctctctaatctgtcacttccctccattcattttgtacttctcatatttttcacttcctggntgaaaattgtagttctcttggtacatactagtattagacattcagcaacaacaactgaactgaacttctttatactttgacacagggtctagcaaaggaaacaataatgggag

SEQ ID NO: 120357 - DNA, 473 bp, Glycine max
  Clone ID: PAT_MRT3847_79690C.1
cacttgtcccgccacaagcccttctgtaccaatcgattttgctaactccccaatcgcgcaaaccacgcgtgacgccgacacgccctccgtggacagcgccacgtgctcaaacgcgaaggcgagaactgccacgtcctcgtcgtagaccttgtggttggtcggctttccgtggtagaggtcgtcgttgtccatatagggcaggttgtcgtggatgagcgccatggtgccgttgacgagctcgcatgtggtgatgcagagcacggggcggatcctcttgccctcccaaccctatctttccacaaccctttttcggtgtgccgccgacgtcgattccgacaacaaagagcaacccttcaacaaagaccttctgacggtgattttggttctggttccggtggagggtttgatatctgatggtgggttttgtggttagcctccaccattctttgttgtagtttgtggggttggtcggg

SEQ ID NO: 120358 - DNA, 370 bp, Glycine max
  Clone ID: PAT_MRT3847_79691C.1
agggagtgggaagaaaaccgggcggaaaggtttggtcgggaaactgaagccgaaggggggtcgagtcactaataccccggagggggaggaaacggtggccgatttgcgaggatctgaactgtataattattttactcggattctagaggaggatttgaaggctatcaacaagcctcgcgatgaagacctttttttttttgaagagaaggggaacgaggaggaggcggcgttttccacccacgacagagagaagaaggaggagctccgtgcagatcatggagcagagcgagccaaagagcggaaggctggagaactgacaggaggcgagctccagaggattgcccttgcggatgaggcgacgcggaaagct

SEQ ID NO: 120359 - DNA, 832 bp, Glycine max
  unsure (1)..(832): unsure at all n locations
  Clone ID: PAT_MRT3847_79692C.1
cccacgcgtccgcccacgcgtccgcccacgcgtccgggctgcgagaagacgacagacggggatattgaaaaggcgcccaagcaagtttgttctttcgccgccgtcgctcacaactcgcaaaccacaatgcctaagcagatccacgagattaaggatttccttctgacggcacggaggaaggatgcgaggtcggtgaaaatcaagaggagcagggatgtcgttaagtttaaggttcgatgctccaagtatttgtacacgctttgtgtctttgatcctgagaaagccgataaattgaagcaatctcttcctcccggtttgagtgttcaagacctgtagaggtgctgagtgcggcagcgtgcgtttgtttatctttttgttgcctcatgctctagattttgtggcttgcttttatattttggtaattgttatgaggatatgcttgttttttatttgctatgaaaatgcgaaagttttattttgagcacaattgaaatgaattgcccatagtggtttattttatttattatgatttagtactgtggttaaccgtttgcctagaatagaacaagagggtttcaaattggcaatttagcctaanngnannnnagaaggaannangaannnannnnnnnnnaannnaggaannnnnnannnnnaannaaaagganaganannannaaaagnnnnannnannnnnaaanaannaanaaggnnnnnaaannnnnnnnaannannnnaannnnnagangnannaannnnnagnnnngagnngnnnannannanngaanannnaaanaagannanannnaaaagnnanaannaaagangggaa

SEQ ID NO: 120360 - DNA, 361 bp, Glycine max
  Clone ID: PAT_MRT3847_79693C.1
attttgtaactctggcttcaagtttgatgcaattattaatggtaatgcaagtagatgaatgcctcatttagaacatgattgatgatagttctaaataacagtggcgtggtttataaagttgatatactttggctaagatttcaaaatctttctttttgcaatagtggtctttgcacagttttttggtttagtaactagtgataacatgctaatttaagtctaagtatactagatgtaatcttttgttatgtttgaaatggaatgatatatttgctattttctgcttgaagctaattatgtttaaacaaaaccaacacaagtagcaaggagcttggttaaagcaaggttttggttttgagtt

SEQ ID NO: 120361 - DNA, 600 bp, Glycine max
  Clone ID: PAT_MRT3847_79694C.1
acggaaatctttattaacttcttacttgggtaatattgaacgcaaggttccggaaaaagtttgagtagctaatcaggtctcccaaaagggttagcattataaaaaaccacaggatcttatccttaggaaagaaatgttaaaaagagtgacgggcaacaaaatcattttttcaaaaatttccatgccggggaacctgattctggggtaaatagaaattactacgctggtttgtattgcatgggcaacagttctggccctaaccttaacgcgactctgcttgtgccgcttgctaatttgacccaaaagggacttcaattcagcttgaactggtttgttaggatgaccctcactggaggaaacaagcttggggtagcgtccggttctaatactctctaaattgccgcctgaggattaagctcattatacagggccttaagttgaccaacatgttgtggatctgccttaccagagtgctcgtgcaaaacttactttggttgttcattactaaattccaaggctttcacaactaaccaagagcactggaaagcttcaatttctggacctatatttccatttgtttgaggatcaccgaaacaatcc

SEQ ID NO: 120362 - DNA, 548 bp, Glycine max
  Clone ID: PAT_MRT3847_79695C.1
aagtctaaaaccattcattggccctaaaaggaaagcccttaccttaaccccctaaaaagctattcatggtaaaacgatccagggaatttttttttttacccaaaaaacgggggggaaaatttaagggtcccccaataaatggaaaaaaaaaaaaggaaaccccaacctgccttcccaaacaaaagggtttttccaccccgggggaaccggggaaaatcttggaaccgaaaaaattttcccacaggcttcaagacccctgccaatggggaaaggaaaaaggaaaccaaccttggatttgggggaacaaggggaagggaaaacttggcctttgggggaggggcctttgccgctgggggggaaaaaaaaaggtttaaaaaccctccaaccccacccgaaaaaaagattgaaaaaatccccccaggggttttgaaaacccgaacccaacccccgaaagggggggatttggcccggacccctggccctcgaaacaggggaagggaaataagggggggccgtccctgggggaccaaacaaaattggaaaatccc

SEQ ID NO: 120363 - DNA, 202 bp, Glycine max
  unsure (1)..(202): unsure at all n locations
  Clone ID: PAT_MRT3847_79696C.1
cgcaccagtttcaccgcacgaatancttgttgtttggngcgatccgagaaaaactctgtaaacatgttggnttaccaggaccnccttacaggtgatgagcttctctctgactccttccgttacaaggaaattgagnatggatngctttgggnaagttgaggggaaggggttntnaanggcggcgtcganntagncattgggg

SEQ ID NO: 120364 - DNA, 357 bp, Glycine max
  Clone ID: PAT_MRT3847_79697C.1
gcctcagccgctgccgccgccactgctgctgcaggatccgccgcagccaccagttctcgcgcgtcgtcgctccctccttggacagtaattttatgaataagcatcagaagccggtactaacaggccagcggttcaaaacccggaaaagggatgaaaaagagaaattcgaacccacagtcttcagggatacacttgtccaggggcttaatgaagctggtgatgaccttgaagctgtagccaaattcttggactctactggctcacgactagattatcgtcgctatgcagacacactctttgatatcctagtggctgacagcatgcttgcccctggaggaacacgcatagatgatggtg

SEQ ID NO: 120365 - DNA, 518 bp, Glycine max
  Clone ID: PAT_MRT3847_79698C.1
tttacgcttacgatcatactggggcctcaatgtgtacaatgccaatacgaatcccattttctcctgacacttgtacaccgtccaaggtcaaaaatacaacatacctaaaattgtagacgaccatattgagcttaatgttgcagagtatgaaaatgcaaggaataattcatctcagagtgttattcgatctgacttacagctttggatttgccaccataacatccaccctcacacatgctgtctgcttttatggaaaggagattatggagcggtatcgtgcttcttccagaggcatagaatatatgcacacactattgtttataagatacgacgacataccttgacggtggtatcattcattgctgctcgagacacttctggttactgtcgcactatgtatgtttataaaggaccaagttcagatgccctggtgcggacttctatatgctggagtgctagcttttggatgtacacttcccattagcttgatcactgccaccacataccagacaccagga

SEQ ID NO: 120366 - DNA, 695 bp, Glycine max
  unsure (1)..(695): unsure at all n locations
  Clone ID: PAT_MRT3847_79699C.1
ctctaaacttttttaatgttctatattattccctaataacaaatttgaccaatcataatctctaaattatttttaattaacattttttgtcattaccatcaagtatcaccattaagtgataacttcatgaagtctaatgtagcatctacatataattgtttttggtaaactaatttttaagtgcatcatccttttacatgcattcacctttagtgtttcaacatttaccaatttaagttcctcaattatgttaaacattgttttttagtctcttctatcaaatataaccgttaaacaataatgacaattagatgactttttatttggactactagtttgacataacaatcacatgataaactattgttggttcaagatatttctatcaattttagggtgttataaatttttttgtaatgtataactactagaataaaggtttgaatatttgaagaattcatgagaataaattagggagatgccggaagcaaaatcaacatatcataatacataaattaacaaaataagttaaaaattattgtgacatcggaacttgtcattctttcctcactatttttccacctttaccaccnttgtggcgtactttgtgcatcgtgttacccatgaagcaagagggttcatggaaagcagattaaaaatggagggtttagcatatgtttgaaaaatggggtagg

SEQ ID NO: 120367 - DNA, 358 bp, Glycine max
  Clone ID: PAT_MRT3847_7969C.1
aattcccgggtcgacccacgcgtccgaagaaaggctcactggactccagtctgtcttactgctgaagaacttgtactggccccttccagcccgtggctctggagggacagcagtggaagtgaaccatacctcgagccttgctggctgtttataggaagcaggaagcaagcatgagacccagtggggtggggtcagatgggcaggtcccaaagcctctacctgcatgtgctgtgccggacgtgaagtcctcttccctagcagtgtaactgtctggttaccacagttacgtggggtgagggtccctgtagcctttggcgtcctaggttcaacccctgtctcccatttgtgtggaattggc

SEQ ID NO: 120368 - DNA, 175 bp, Glycine max
  unsure (1)..(175): unsure at all n locations
  Clone ID: PAT_MRT3847_796C.1
acctactagctcnaatcgctcagagaaacatatgattcatttgaaagagggttgaaggcttgtctgctatacgttggaactgctaatttttatttctacatggtcaaagcaagatgcggttgtttaaatcataatagttgttaactttgtgggagtcaccttttttccaggtttg

SEQ ID NO: 120369 - DNA, 642 bp, Glycine max
  Clone ID: PAT_MRT3847_79700C.1
ggcaacggcgccaaatttgatcgaggccgtacccgaatcaaataaacattaaaatgtagtaactaggaagtgatcctaggtcgtttcccaacgagcagtgacaagccaaatgttcataatatacttgcagtaacagtaacagtaacgatggggggggggggttgtttgcttttgtaaattaaacagagaatatatgtgaattagaaaatatcagaattaaaacacgttgcttccccttgattcacaagcaagtctcttatcctaggttacgagagtttatcctttatcaatttaaccacttaatccaaccctaaattaaattactaagcgaaattcaacataaggcattcattatgtgattaagcatcacatacaccaattactcataaacgatcattaagcatgaacgtaaattaagcgcagagacaattaatcaagcactaagcatgcatgaattaaaagcaacaaattcaaagtaattagtgaagaggaaaaactaaacagaatttaacagtaataatagaacctcaaagagaactgcgcttgatcctcaagggaaaacaacgctgctgacttagccttccattaatcaaatagagaatgaaattttattgataaaactaaaagtctgaactggaattg

SEQ ID NO: 120370 - DNA, 340 bp, Glycine max
  Clone ID: PAT_MRT3847_79701C.1
caaactcagggcccatatgttgggttgaaccatgtagattatgtgttgaataacacaccttaattgcagggggaatagtctaaatactgattatacgtgagtattattgttttactaaaacaactacacctaaatttatgctaacatattgtactttgttgtcattggagaaggcgcggtgggaaaacccgaagcaggacagtacgttggacatacacggttattgcgtattaataagggggagacatcaactgtagttggatcgtgaatacagaatgggtatggagatgcagatgaagactttttaatgagtaatgaacaatacctgatattcgaacat

SEQ ID NO: 120371 - DNA, 169 bp, Glycine max
  Clone ID: PAT_MRT3847_79702C.1
tcgcccacgcgtccgtagacatggaatttatggaaaatttatgttgcgttattcgtggagtatgatgtgtttatttattcatctgtcacaaattacattaataaacacatcatactccacatcaaatcgttgactgtctaaaaaaaaaaaattcataaaaaattaaaaa

SEQ ID NO: 120372 - DNA, 337 bp, Glycine max
  unsure (1)..(337): unsure at all n locations
  Clone ID: PAT_MRT3847_79703C.1
gggtgcctacaagtatgtttcagagctatggcgcaagaagcagtctgatgtcatgcgcttcttgcancgggtgaagtgctgggaatataggcagcaacctttcattggtcgtttgacaggtctacccgcccctgacaagctcgtccgctggggcttcaggcttaaccagggcttttgattttccctggttcggttaagaaaggttggccaaaagaaacaattcccaaaggtttttttttggggaacccccccccccggggatttccccattttaattttccccaaacaaagggtttttttcccagaaaaccatttgccaaaaaagggggggaattta

SEQ ID NO: 120373 - DNA, 378 bp, Glycine max
  Clone ID: PAT_MRT3847_79704C.1
ttaacagcattgaaataaatttttatataaaatatttttttgtaaaattataaaactcataaaattaaaataaataatccacttaaacaaccacatactcttatacattcacacgagaacatgcgctagattctatgaaaacaacatgtcctgcctccgcttattattcaggcttccgacatgtaatgatgctaaacttaatcagatccttcttgtatccttttatcatcaatggcatagccaaagctccctttatggttttaagtccactgcgcaagagtgaagtgaggccattccaggtcagggcggtgcgtatcactggtggccaaaatggagcaacaaagggagaccaatctgttgattaaatgcctggaggga

SEQ ID NO: 120374 - DNA, 307 bp, Glycine max
  Clone ID: PAT_MRT3847_79705C.1
agaaaattcaatgctgaaacatggcttcggctactctctctgtagccaaaccaaccctttaagccaatgggaaaaggttcttttaattcttttgccttccaaacttatcaagcttccttcccttttctagaaaatcttcaaaggatttccattctggcattgccttccaaacctattccagtggaaaccagggaagattccaaaaaggtgggacagaagcaaaactgaagggtgccataaaccggtttggaaagaatggaaagaacttcttgaggggcttgcaccggcgcaaagacttcccttttga

SEQ ID NO: 120375 - DNA, 1596 bp, Glycine max
  unsure (1)..(1596): unsure at all n locations
  Clone ID: PAT_MRT3847_79706C.1
acaaactggtaaaacaagaatattgaaatgaaccatgaaaaatcaataaaacaaaaaaacattaatttaaaaatgcaacatctaactcaactacaaaatattgaaagatttttcaaatcttaattgtaaaatataacaaatacagtacataattattttttagtatgtgtgggtacagggtgggttgcctacaataatatcataacccagaccctaaaatcttttaggagtaattaccttggcctttgttcattggaggtaatttttatgagtatcaattgggtttaggttgagggcgagccctggtgcaacggtaaagttgtgccttggtgacttgttggtcatgggttcgaatccggaaacagcctctttgcatatgcaagggtaaggctgcgtacaacatccctcccccataccttcgcatagcgaagagcctctgggcaatggggtacgaagttttttgtacaattgaactggtattgtgttttctctaatacatgaacaaagacatgttattaacccccagtactgtttattttttctgtattatgacttcattttttcctgcactatttttatggtttttaggcttatgcatgctgttctgcaataagtaatcatcataatttcagttttgtccctaagaattctcgttctaaagtgattgttgaccatgagatgcatattcatggtaattaaccagtagtttgttaagtaacatgggtacttcttaaccaatatttaaacattaaccaaacgagtgatgaatagttcttaaactgaaatatgtttctttctatggtgttttcatacttctgtttcattcttcaaccttgcagttgattgagattgcttgcctttttgtcagctcttttgtctcctatacattagtccttattttaccttcatctgatttgtctgtctaatgtattgataattaattgtacaatgatttatgattgactcgtcattatctagatcagctctttaactccacgcggatacatgttcaaaagtaacatttccgngtaattattataatgttatttctatttgtggttatttcagttttttttttcatttatttctcaggtgatcctcttgttgacttgataccaatttatttagatgtgtttagaggtgattcttatctccttaagaagtttttagaaagctacaaacttccttttgctagtaacatatcaagatatgagtcaacagagggtgatcaaaagttcggccgactttcatatgttgccatgtaagtaactaactgtctccataattctcttaattaatctcttatcaactagtatttcaattttcttagttttattccattttatccttttttttttttaattaatcccatattttttctattacatttcattctacctatcacataagcattatgttagacgagacaactttttgtgccagcacaaataaatatgttttgctttgtgcctgggctttataaatntagcaaattgttgagtagctcgntgggatctattcattttcttttgaaattgtaggtgctattgtatcttgcatgatgacaatgtcttgggagctcttttagcatatggg

SEQ ID NO: 120376 - DNA, 370 bp, Glycine max
  Clone ID: PAT_MRT3847_79707C.1
gaaggcgtctttataaacgcctttcttctccgttttcgtttcctcattagaattcgctttttgatctgcgaaaatgagagagtgcatctcgatccacattggtcaggctggtatccaggtcggaaatgcttgctgggagctctactgcctcgagcacggcatcgggcccgatgggcgaatgccaagcgacacgacagctggcggtggcgacgacgcttcaaagacgtagttgaggaagaccggggcgagaacgcacggaccctcactgatggtgccttagcagaagccttgtgatctagacgaggagccatacctttcccaccatgggttgctctggctgttcgtccatgacctggtgtgtgggaaatcc

SEQ ID NO: 120377 - DNA, 609 bp, Glycine max
  Clone ID: PAT_MRT3847_79708C.1
ggtaaccaagcactgcttcaactatccatgggccaatgcaaccactagaacacagcttctctacacattaacacagactggaatcgttgccactttatatattgcgcagcaacgtaagaaaagtcaagggcgtcactacgtcacaactactggcatatccaccatatatccaaaaagacattgataaacaattaacctaactttggtttgacgaaaaagtctgaatgaaatacaccgtatacaaacttaaagaaaaattaatacttttgctttcgtaccatacagccactaaaaccttccatgtgctaaaaataaaaggctatttcattgtccttattacatccaagcctccacatgtcattaccacagatacaaaccttcaatgtatggaagtccgactaaacatattgctaccctgggctatgttcatcaagatggcaaccctcatggtaatactgggagcctctaacaggatgatattgaaatgacatatgtttggatctacacaaggctttgctctacgtaatgaaccacgtgaggatgttacaccaccttctcaccctctttttggggatgtagtgtattcgcgagtactcaggctctttgtgg

SEQ ID NO: 120378 - DNA, 518 bp, Glycine max
  Clone ID: PAT_MRT3847_79709C.1
caataattgaaatttttaatttatataaaaaatgaaaatataaataatcatgaaacaaatgtatgatgtctatatgatgcaatagatatgaaagttaaattacattttcatggtgtttaatagttttgtagggtaggacagtagcatacttgattgatggtctatcatattctcttgtccaatatttttcaaagtctaacaacataacttgcatgtgcatcatttgaagaaatttgaactgctagtctgtataaggagatcttgatactccctttgttttttttttatctgtccttttagtagatttatttatttatttatttatctgttcttttaaaattccaaaataacattaattactatcctatcaatcatggctttgttttcacctaatttttaaatattttacacatttaccatatatgagagaataatggaggtagttttagagaaataaatgatagagaaattaattaattacagagatggcaaatataagagattaagcataataaaaa

SEQ ID NO: 120379 - DNA, 420 bp, Glycine max
  Clone ID: PAT_MRT3847_7970C.1
attatgagtttgtgagattcctgattatgtcaacaatacctaaagaattaagagtgtttgtggcaatttcatagaagtacacgaactgtgttttgatgtgaagagaggtgtggattttttggtttaaaaacaactcataagagtttgacacgtgacattgttggcaaggcaatgcatagacttataattttttttttatttgaaatttttggagaggtgggggtgggatacacgtcacatattttacttgtctgtactcattctaagaccttttttcggtgatagttgaccttgatgctttatttttaaacatccctttttcttcacttctatgatcttcaatttttagattgtttattgttttaagctttaagtcttaatgtattttcttaaagcttggagagtatgctcttaaatatt

SEQ ID NO: 120380 - DNA, 155 bp, Glycine max
  Clone ID: PAT_MRT3847_79710C.1
ctcttttctatgacttttccgaaatctgtgccgccaccaacaacttcctcgccaaacgccactcctcctccaccccttgctggcgctgcaccctccgcggcgccgatgtcattgtctttcagcgcaaagttcctgccgtatgctccaaaactcca

SEQ ID NO: 120381 - DNA, 397 bp, Glycine max
  Clone ID: PAT_MRT3847_79711C.1
ccacccgcccggggcaaggacttgctctcgtccctcaggatgtttctactctaccgcctgaggaggagcgcagcgctatgacaatcctaagaataagattactgccgttcctgctaatgatgaggaaatctgtggagcgactttaaaggcggaatggccaccagccggcgtacccgaacatagattttcctttctgctggtgagatgccatatcatgattaacggaggagactgtcaaaggccttcatgatggccccagtgattctaaggggtggagagggatcactggacttgggatctatgaggggtgcaacttcgtctagataagagagaacttgttgctctatcaaatggcaaggacccgtgctaatcgcagaaagattgtgtgtggattctc

SEQ ID NO: 120382 - DNA, 392 bp, Glycine max
  Clone ID: PAT_MRT3847_79712C.1
catgtgtagagaattgtgaaggttttggagcttgcaggaggagtcatggatgagcttgcaagccctgttggtcctaggaaggatgtggtccaaaaccactgccttgagttcatgcaattaatcaaggtccttgtctcccagaaatcaatttattcttttgtctattcatgtatataaaagaaggtggcattatgggtgcaagtcccaaaaagagcacacactaccaaaactgcactagtcttatttaagtggtctcatttaaataattaacgttatataaaattaacagcaggaattatgtaagaatattttatttactttacattaatcgtttgttaggtactggttcagaaattagcaaaataatgaaagaaaagataggattttattga

SEQ ID NO: 120383 - DNA, 395 bp, Glycine max
  Clone ID: PAT_MRT3847_79713C.1
aattcggctcgaggcaaagctcaattgatgagggacgatccatttcctttcctccttctctatattgaccggcgcagctgatgccaagccatatagcatatatttcacaacaagaaaaagaaaaacctcagctgagtgaaatagtgaatggctatctctttttctgatactcttttggtaattgtttaattcatttgtaggtcaattgattgcaagcactttgactttggggaagggaactgcccttttggaactagttgtttctacaagcatgcatatcgagatggccgtctggagcaggtagttttgcgacatctaggggctgcagatggtgataccgtaattgcaaaagacatcaggttgtcggattttctttctaacatgcatttaagatg

SEQ ID NO: 120384 - DNA, 669 bp, Glycine max
  unsure (1)..(669): unsure at all n locations
  Clone ID: PAT_MRT3847_79714C.1
cttcacttacctccatattgatttcaattattcttcatcacaattgttttgttacttttttgtttactcactcctttggttttgattgttgataagttaattaatctttgagaaatttgatgtttaaattgctagtttggtttagagagttcaattatagctgcggtttgtttgatcgttaatggttctgggaaacatgttatccaatctttcatgctagaaattggtgagttcggagtctgttgctatcattgtaactgtgatatattgatgatatttagaagaccgtggttgtgttgtgtcaagtaaaatctgaattgaatcacccaagccaagtgaagcccccttttaaggtttagcctgcatatttatagaagagcatagatcacactgttgtagtcataggttcataactgaaaaatagtattattattattatcaaagttgcagagttgcttttttctgtttatttctgtgttaatttcatgaacttgaatgtgggtttattggagtgtgaagactggagaatgaggacatgagatttttacctgaattttcattcatacaggcatgcagcactttgttttgcctaaatattttataaatagagtaaaatattacttgactgctattgccattctactgtncttcgtgggacttttgcttatc

SEQ ID NO: 120385 - DNA, 255 bp, Glycine max
  Clone ID: PAT_MRT3847_79715C.1
catattcaaatggaaacaattccagtgaaatatagtagaatgcaccctattttatttttgaatattctaagatacaatgtagcattgccgccacaaaggatactaccatgtaggcttaaattataagagatacagatactttatctcagttgatgctcaacattctcttgggatttcatgattcggttaactcatgttctattgtttggtaagtaattgtctatatgtgcatattgtgatagattatccatgtgg

SEQ ID NO: 120386 - DNA, 489 bp, Glycine max
  Clone ID: PAT_MRT3847_79716C.1
aaaaaccaggggtaaaaaaacttttttttttttccaaaaaaataaatgggggttccccccccaaaaatatggccgttgccaaaattaaaatatttaaaaggaaaggccaaacccatttttacgggacatttttttacaaaaaaacaaaccctggaggaagcaacccgttaatggcagggggtttattttgggcctttgggggaaaaaaaaaccaatttttgtttcggaaggaaaacccttttaaaaaaattggccctggatcaaggggaaaaattgaaacaactgcaggtgggataacacttggtaaaacccaatgtttttgttttgggcttttgctaaggcgggttccctgccaaaaaattttctaccactacctgaaaaggatttggagccaccaaaaaaccagtttttccaccacttaaaaaaggttaataaggggttgccaaaaaaccctcatgccaccggatttgtttggggttcccccgtttt

SEQ ID NO: 120387 - DNA, 2771 bp, Glycine max
  Clone ID: PAT_MRT3847_79717C.1
cctggtttgtggtgcttcagagactgcagaccttccgtctaactttgtaaaacttgctaaagatgcatatacgccggacattattgcggcatctgactgtatgcttggaaaaattggatatggcactgttagcgaggccttggcatacaagtgtccttttgtctttgtacgtagagactatttcaatgaagaaccttttttgagaaatatgcttgagttttatcaaggtggtgttgaaatgattagaagggatttactgactggtcactggagaccttatcttgaacgtgcaataagtttgaaaccctgctatgaagcaggcattaatggtggtgaggtggcagcccacatcctgcaggagacggcttttggaaaaagttatgcatcagataagcttagtggagcaagaagattgcgtgatgccatagttcttgggtatcaactccaaagggcccctggtcgagatattacaatcccagaatggtatgcaactgctgaaaaccaacttggccgctcaacacctggttcccctatggatgatggaagatctgcgtttagcttggacattgaaaactttgacattcttcatggagatattcaaggacttccagatactgtggcattcttacagaacctatctgaattacaggacaagcacactaggcgggagcgtaaggctgcggctaatctcttcaactgggaggaagaaatatttgtaacaagagctcctggaaggttggacgtcatgggtggtattgctgactattctggaagtcttgtcctgcagatgccaattaaagaagcctgtcatgttgctttacaaagaaaccatccaagtaaacataggctgtggaaacatgctgaggctcgacagaatgacaaagggggaaatccaactgctgtcctgcaaatcgtatcatatggctcagaattgagcaatcgtggcccaacatttgacatggatttatctgattttatggatgaagaagacaaaccaatctcatatgaaaaagcaaagaaatactttgctcaagatccttcccaaaagtgggcagcatatgttgcaggggcagttttggtcttaatgactgaaatgggtgttcaatttgaagacagtatcagcatgctggtttcatctgcagtcccagaaggaaaaggcgtatcatcttctgcatctgtggaggttgctagtatgtatgctattgcagctgctcatggattaaatatcagcccaagggatctggccatactctgccagaaggtggaaaaccacattgtaggcgctccatgcggtgtcatggaccagatggcttcttcatgtggtgaagccaacaaacttcttgctatgatttgccagcctgcagagattgttggccttgttgacattcccagccatatccgtttctggggaattgattctggaataagacacagtgttggaggtgcagactatggttctgttagaattggcgcctttatgggtatgaagatgataaaggccaaggcatctgaggaattgtctgagagttgggctgctaatgggttgaactatgatgaagtggaacaagatgacatagaactacttaaacaagaaacctccttagattacttatgtaatttgccacctcatagatttgtgactctttacgctaagacaattcctgagtccattgtcggtgagacatttttggagcaatatcaaaatcataatgatcctgtcactactattgatccgaagcgtacttacggagttagagctcccacaatgcatcccatatttgaaaatttccgagtcgtgaccttgaaagcacttttaacatctgcagcttcaacctatcagcttacagccttaggagaattgctatatcagtgccaccacagctacggtacttgtggacttggctctgatggaacagataggcttgtaaacttagtgcaagagttgcagcacagtgcagcatctaaagctgaaggtgggacattatatggagccaagataactggtggtggttctggtggaacagtttgtgtagttggcagaaactgtctcaagagcagtgaacacatttttgaggttcaacataggtacaagaaagctactggttatttgcccttcatttttgaaggttcatcacccggtgctggaaaatttgggtacctaaaaatacgtcgtcgagctaccccaaaaaaggctaacgccatcaaggatgatggtgcactcacctcagaaaaggctaacgctagcaaggatgatggtgcagtcacgatgaagaataatagttaatcatggcttatatttaaccactttaagagttctacctttgttgtctttccccagaacatgtatagtatggttaaattttgaaccatttcaacaattattaacatttttaaagcactttattttattactttttattacaatttatgttggatggaactttattatgtgagtgagttgagaataaatgaaaaatgaaggtagaacctaattatttaccaaaaaaagaagttgtggtggagaataagagttgatcatggcttgcatttaagcaccttaggaattcttacctatgtgatctttccccagaaatgtatagtatggttaaattttgtagccctttattttatgatttatttagtacaatttatggccaggatggaacttgctggcatgttagaatatctaaaatgtgaataaatagtgaaacaacaaatcgttatgcacgaataaatggatatgtgatattctaaatttgaacttttcttct

SEQ ID NO: 120388 - DNA, 2761 bp, Glycine max
  Clone ID: PAT_MRT3847_79718C.1
ttttcgcgtgggttcgactatgttaaaagtctaagttgataggtgggaggcttgtaattttatatctctaaaaataacagagatgtacagtcctaaacattgacatatgtttctatgcaattggtctagtctgaaaatgttacagaactgacaaggttattcatgaaatttttaagcaagtactcactttggcctttttcttctctttcctttcactcttctttagatgccaattaaagaagcctgtcatgttgctttacaaagaaaccatccaagtaaacataggctgtggaaacatgctgaggctcgacagaatgacaaagggggaaatccaactgctgtcctgcaaatcgtatgttggagaacacgtgaatttctatattctatcagttaacattgacaagtatggcttggagtttgtgtaacaatgaagcatgagaagtgaataatgttgatgataaaaatttaacattatttggatatctctgtatccttcagttttagcgataataagactttcttactgtgtattttcaatgaatctggatcatttcaggtatcatatggctcagaattgagcaatcgtggcccaacatttgacatggatttatctgattttatggatgaagaagacaaaccaatctcatatgaaaaagcaaagaaatactttgctcaagatccttcccaaaagtgggcagcatatgttgcaggggcagttttggtcttaatgactgaaatgggtgttcaatttgaagacagtatcagcatgctggtttcatctgcagtcccagaaggaaaaggcgtatcatcttctgcatctgtggaggttgctagtatgtatgctattgcagctgctcatggattaaatatcagcccaagggatctggccatactctgccagaaggtggaaaaccacattgtaggcgctccatgcggtgtcatggaccagatggcttcttcatgtggtgaagccaacaaacttcttgctatgatttgccagcctgcagagattgttggccttgttgacattcccagccatatccgtttctggggaattgattctggaataagacacagtgttggaggtgcagactatggttctgttagaattggcgcctttatgggtatgaagatgataaaggccaaggcatctgaggaattgtctgagagttgggctgctaatgggttgaactatgatgaagtggaacaagatgacatagaactacttaaacaagaaacctccttagattacttatgtaatttgccacctcatagatttgtgactctttacgctaagacaattcctgagtccattgtcggtgagacatttttggagcaatatcaaaatcataatgatcctgtcactactattgatccgaagcgtacttacggagttagagctcccacaatgcatcccatatttgaaaatttccgagtcgtgaccttgaaagcacttttaacatctgcagcttcaacctatcagcttacagccttaggagaattgctatatcagtgccaccacagctacggtacttgtggacttggctctgatggaacagataggcttgtaaacttagtgcaagagttgcagcacagtgcagcatctaaagctgaaggtgggacattatatggagccaagataactggtggtggttctggtggaacagtttgtgtagttggcagaaactgtctcaagagcagtgaacacatttttgaggttttttttattattataaatttaacacattgattattataactaagaatacttcatacccttttggatggcaggtaaggaaattttttttagggttaaatatatttgtaacccttgcaaatagggaaatgttcatttagtccacgtaaaaaatcgtttccttttggttcttcatttttggaaatgtgtcatgcatgctccccagttgcaaaaatgggagacagaaacaagtcaagtttttgttaaggcaaggactacacctaacatttcaaaaaatgagggattaaaaggagacaattttgtagggattaaaagtgaacatttccctatttataagaactaaaaacatatgtaactcaactttttatcaaaatgagaggggatgttatttctatggcaaaagtttatttttatataaatttttaccattttaattgaattaatgtagaaaagtttgttgcatgcaaaaatatcatggggaaagaaacatttttttccactatgtttttttccttcccttccttctcattcgtataaaacttattcaaaacaaagccttattaagtgagacttcatgaaatactaatagtctaaatcttacatcaaattttgatgcaggttcaacataggtacaagaaagctactggttatttgcccttcatttttgaaggttcatcacccggtgctggaaaatttgggtacctaaaaatacgtcgtcgagctaccccaaaaaaggctaacgccatcaaggatgatggtgcactcacctcagaaaaggctaacgctagcaaggatgatggtgcagtcacgatgaagaataatagttaatcatggcttatatttaaccactttaagagttctacctttgttgtctttccccagaacatgtatagtatggttaaattttgaaccatttcaacaattattaacatttttaaagcactttattttattactttttattacaatttatgttggatggaactttattatgtgagtgagttgagaataaatgaaaaatgaaggtagaacctaattatttac

SEQ ID NO: 120389 - DNA, 501 bp, Glycine max
  Clone ID: PAT_MRT3847_79719C.1
acacagaggaaaggaagaatgtctagttttgttttcctatctctgttatttcttcttctccaacgtcctctcccatccctctcaaactctgaaggagacgctctttatgccttcaaaacaagactttctgaccccaacaacgtactggacagctgggacccatctctcgtcactccttgtacctggtttcatgttacctgcgactccaacaattacgtcactcgcttagacttgggccgatataacttgggcggaactttggccccagaacttgcccacctaccctatctccaatacctggagctctatgggaataacataactggaaacattcctcaggaacttggtaacttgatcaaccttattagtatggatttgtcttataaccgattccaagggaacatcccgaagtcatttggcaacttgaagtctcttaaattcctatggctcaacaacaaccagctgacaagatctatcccaatagttgtcagcactcttaat

SEQ ID NO: 120390 - DNA, 505 bp, Glycine max
  Clone ID: PAT_MRT3847_7971C.1
attgggtaccgccctcgaggtcgtcggctcggaattcggctcgagctcaaacaagaagaggatcaggatctggacgaaggtgcatggaatattgcaatggcaggtggtacatgccttggttcagttgcccgtactgttggtgatgatatcgtgccgctggtgatgcccttcattgaggagtatatcacaaaagcagactggcggctacgggaagcagactggtatgcttttagaaaaataccgaaaaaaaaaaacacaattgagtaagagggccggtgcccatgcctagattgcatgggctgattcggctcatgcccttacttgcggcaatggccctgttcaaaagtggtggcaccccttttaacgaaacgggtgccttcttccccttgtggggcttgaccacttcccatgtgagagtaggggcatttcttccaaagtgtccatttgcaccattcttcaagaacctggcatttccacccctcttgaagaccagggtgatggggat

SEQ ID NO: 120391 - DNA, 294 bp, Glycine max
  Clone ID: PAT_MRT3847_79720C.1
ggtatgttgattcattcttttgttgtggggcttttaaatgacattgttttttggcgggtgtaaaaaaaagtgtttttattttccctacaaaaacaagggatggtttttttttgagatcagcaactcatgcctttcatgtgaatctctgtaaaagaaaaaaaggtgcttttttaggaaaaagaatacctgaattcccttcaagaacacaatatccttgaagggctcattggggtcatgaaacaagaagggagttttcttcattggggagaaaccgagcacaggaattcctttctg

SEQ ID NO: 120392 - DNA, 494 bp, Glycine max
  Clone ID: PAT_MRT3847_79721C.1
aaacgcaaaaacattggaaggccctttatgaagaattaaaggaagggaaggcaagagttttgttaaaaacattaccccctaaaggggaaacaattttttttttttggggtttggaaagcttacagaggaacaagaggggaaccaaacccccacttattttgggccatatttggaccttttcaccaggcagggccaggagggggcacaaaacccaaaaagaacttgctggcaaaggggggaacaaaaaaaaccttcctagttcaggcgggggaggggcattttctagggggtttaagcacaaacaggaacaaacaccccgggtctccactaattttcatggccgagtacaagaggccttaaaatcattgggggcaacacgagcaatccagctactaaggggttttttaacatcagaggggttaacataccccaacttatacatactacacaaattggcaacaagcgtcttattgagagccacagggggaactttt

SEQ ID NO: 120393 - DNA, 285 bp, Glycine max
  Clone ID: PAT_MRT3847_79722C.1
cttgaacgtatggaccatatatctggggctcacaatgcacactggattactcctattcgtgccgggtacaatattcagctagtttcttttttccgagactttgaaggatcaacttttgtcgttggcaaatgcaaaccatatcactgcaatgcaaaaatcgcctgaatttggccctgattttgctcttcaggcaaccttttatgattgccctataagaatcttcctcaaaggtttcaaaattagctgattctaatgattgatcagtggcgtttgaaccatttgatc

SEQ ID NO: 120394 - DNA, 603 bp, Glycine max
  unsure (1)..(603): unsure at all n locations
  Clone ID: PAT_MRT3847_79723C.1
agnacccaaaatcatgtgaatctcaattgtagaaccaacattttccttcccaaatgggaaaatttcaaaagtgtactaagtcaagccagaaagggtataactcgcaacaccccaacactgctatttttgcattggatatttgtaactatgctttttccaaataagaaaatgaagaatcgcgtatacctttcaagagtcttcagtgaatattctaaatatgaaatcacgaaaacgccttgaatattgtataggatcaaccgctgatattgaggtcggatcatattgaatggatttgtaggcatgctcaagcttcttgctaatgtcatagtcttgaagtatgtcaatgataccaaaagtcaacacaccattatagaactctccaattggttcttctacaagctgtaattcgcaaccgcttcttcttattgttctttcaacctttgctggcatattcatacccaatatgatactggaaggatcataatgagattgatctgtatcttcacttgaagtatggggagttccttcattttccgaatcaccagtaggagtatgagattgtaaagagtataatttccccatctggcgatatatctttgaaac

SEQ ID NO: 120395 - DNA, 244 bp, Glycine max
  Clone ID: PAT_MRT3847_79724C.1
ttctacctctagtcacaatatgaaataaaatagtcgactctgatagagagattataggacacatctacgtggaagctgcttctttattaccaaaatagatcactttttagatcctgttatatgtttaatctactttcctttacatgtgtagagtgtttatatcttttagaagaattgtagctgtcggatggaatagacacagaaataaatgtgatctcctactaaaaaaaaaaaaaaagggcgg

SEQ ID NO: 120396 - DNA, 197 bp, Glycine max
  Clone ID: PAT_MRT3847_79725C.1
attcggatcgagcttgttcttgacaagtctgtatgggtaatgggacatagccttctaaaaccttctgcatgaattttcaaatgcaccgaattagcatatattgggtcatagctataaccccaatatataccaaaaagacattgaacgggctgctgttatagactacactggggacatgaaaccgtggctggagataa

SEQ ID NO: 120397 - DNA, 260 bp, Glycine max
  Clone ID: PAT_MRT3847_79726C.1
aataccatgtaaacaaccttacccagttagaaaaggtttggttgtttgtccaataacattgttacgcaaattattgtattttgaaattgaggggtttaactggaaaattgttgctcatttgaaagtgaacaaattacttaaagggttttttaaatttaggaattctttttttgataaaaagtatttcaaatttttttgaagtgcacaacccttcttttttcaccctaattaataaagtatttatatgtatagtttaaaga

SEQ ID NO: 120398 - DNA, 444 bp, Glycine max
  Clone ID: PAT_MRT3847_79727C.1
gcactctactatacaggaccttaattggggcaaactctctaacatgagcccatcaccactaaattctaaagccgtctctctaaatatagagtgaacgagtaggagggtcgtctaccctagaatacgttgccccggcgtaaataaaagataaaggaaagagagaaactgtcctacaaaactactacataggtgtggttccgtcacgtaccacataatcatgactcagatcaagtgaagtaaagtaaagtaaaacacacacaaattaaggacacgcaataatactatacgaaactgttacaagcttttttttcaaatactataaactccatcaaaatgaattttgccaaaaatttaaaccaaacatggcttacttgggaagatcgcaaccgtgaggttgccacctccaatgctggtaatccttgtcgggtcgtccatgttcttgac

SEQ ID NO: 120399 - DNA, 194 bp, Glycine max
  Clone ID: PAT_MRT3847_79728C.1
gacacaacactgctccatttcagtcccaagacccacacacaaccgaaatttaattgcaagattgaatttgattaaattcccatttaagatcatgagaaaacggagtaacaaactttcgttcaatttcatttttcttttacgtatccaagaagtttctcataaacgattcctcagagagttgaaaacattttcaa

SEQ ID NO: 120400 - DNA, 760 bp, Glycine max
  Clone ID: PAT_MRT3847_79729C.1
cagttagggaagtaatggaaatgttagaagagtacaaacgtcttgcaaagatatggagcaaaatgaaagggcttaaaatacctaagaagggtgaaatgagcgccttatcccgaaatatgaatgctcaacacatgagcaaagtcctccctcctcagatgctaaagcaaattggaggcatgggtgggttacaaagcttgatgaagcagatggggtctgctaaagatatgatgggaatgtttggcggtggtggtgattagtagattggctgtggcatatgagctgaggattgtttttgatctgtactacaaactctaatacttcacaagaactcatcgttgtgaaattatgctgttcacatggaattcggatgtattgttttgtcaatcaacctgcagcatctcaatggtggaaatagttcctttcaattttaccttaagatcctttcttctgtaaaactaagcccccttattttcctttttctgtatatttttgtctttaggtgaagtcaaagcaattttatagcgaattggaaattttcttgtagttgtaacattataaataagttatatattgctcctctctgaatatattgaataaggtgaagttaattctgacagttggtttgtgtttgcagttcatgagagtgaaatgcggttaatcacattagccccaaccagacattaacccagtttaatattacattttcctttgatttagctaaaaaaaaaaaaaaaaaaaaaaaaaaaaaaaaaaaataccc

SEQ ID NO: 120401 - DNA, 1089 bp, Glycine max
  Clone ID: PAT_MRT3847_7972C.1
cccacgcgtccgtacggctgcgagaagacgacagaagggggaagcagaaccaccgcaatagaagttcgttttggtcctcttccgaaaaacccagaggcagaggcagaggcaagcgaagcagcagctccgatctgaagacgatgatgaagaagaaggtgcaatggttctggacttgggttcttggttccgtcgttttgaggctcattctcctcttcttccccaaaaatctcaacctctcttctcgccccgaagtctccacccccctcaccagcctccgtcgtctggccgagggttactggctgaagcagtcatcgctgtcaccctatgctggatcaatgtaccatggttcccctttgttattgacgcttctcggcccgctcacagttagaagaattgaaggacaacccgatcatcttttatgcagcttggtttttgtgattgcatatgtggtcagtgcaatgcttatttgtgctgctggtgaaaaactcaaggtggcatacatttcaagtttgcaatcccttggccttcataatttgacagagaattcagagtttcttccttcaggagattttgctgctcttgtatacttatggaatcctttcacaatagttgcatgcgttggtctatccacatctgcaattgagaacttgatggttgtgttatcactttatggagcatgttcacgactagctccactggcagcttttgggtgggtcatggctacacacttgtctctgtaccctgcaatccttattatcccagtgatattgctattgggatatggtcctgatgctcctcctaggaaattattctgtcaaagaaaaaatcttgaaggtggcaattctatccctagtgatagttgttcagaagaggaagccaaaaatcagctaaaggtgttaaatgtattctcatggaggccagttgtcctttttttgccagagtttgctgtggtcatcctacgtcttggtcctttgtggcatttatgtcccacagtatggtggtctacaggagttgttccaaaggttttgtttaaatactattaccggtattcatttttgaaaaaaaaaaaaaaaaaaacaagccccccaa

SEQ ID NO: 120402 - DNA, 135 bp, Glycine max
  Clone ID: PAT_MRT3847_79730C.1
gctcggccttctgctcgagctcgagccgctgtgcttatcctctgcgctgagagcagatcagagcgagagcagagcaagcatatatctctacttgcaacgacgccgttctgcacttcgaactttacagttgatgtt

SEQ ID NO: 120403 - DNA, 358 bp, Glycine max
  unsure (1)..(358): unsure at all n locations
  Clone ID: PAT_MRT3847_79731C.1
gcagatcttggtcgagaccctcaccggaaagaccatcacccttgaagtggaaagctctgacaccatggacaacgtcaaagccaaaatccaggacgaggaaggaattgccccngatcagcaacggctcatcttcgccggaaagcagctcgaggacagccgtaccctcggcgactacaacatgcanaaagagtcaacccttcaccttagccttcgtctccatagtggcatacagatcttggtcaagactctcactgacaaaaccataaccctagaagtcgaaagctctgacaccattgacaacgtcgaggccaagatgcaggacaaagaaggaatgccgccagaccancaacatctgatc

SEQ ID NO: 120404 - DNA, 350 bp, Glycine max
  Clone ID: PAT_MRT3847_79732C.1
ccttttcttttttttacttatgcttttcctacatatccggcaaaagaatgacaatacagcacgtctaatgtcttggctgacgaaaaacaacaccgttaacacccactccatggctcggcagaacaagctacgaaaactatacaggaaagaaaggactgatccacaacgggaccgggaacacgtggagcagaactcttctttcctctctccaaataattacaagatctacacacacagcattgcaaagccaaacttggatgaccacaatgttaatctaatgtttctcccttttccttcccaaatttcgcttacccctcaattttttatttattttggagtcccacaattaa

SEQ ID NO: 120405 - DNA, 280 bp, Glycine max
  Clone ID: PAT_MRT3847_79733C.1
cccacgcgtccgcccacgcgtccgctggtcatcgttgggatctccatacgccggatctgctagaatacgcttgatccatatgggccttctcgaccacttgtgggacgacaccgtcgcctgcccaaggccgtaaaacggtctcggcaaggctcttgaaaaccccaaaccttacttttcgacctaacttccggcaagggtcccccttgactcgttaatcatactcatataattcaccaacgattttcgttaactacatagtcacaactacaatcgttaaaaa

SEQ ID NO: 120406 - DNA, 320 bp, Glycine max
  Clone ID: PAT_MRT3847_79734C.1
ggaggaccccccattttgaagagggaataatttaccattcaatgccaggggcgcacacccatgaaacggaaaagagaataaccctaagacccccttttaatttaatcaaagaataaatgaaaaacccctattacaaggtaacaaggggtgagcccccaccccttagtttatataacctctacacacccgaaaaataaaacttccatccgaaaattttgcaactttgtgaaacaggatgggaaacaatcttcaacatgaaaggagggaacctgaaaaaaaacaaaccttcttcttcagcttttctttattcaagactcgtc

SEQ ID NO: 120407 - DNA, 459 bp, Glycine max
  Clone ID: PAT_MRT3847_79735C.1
acgtagttctagatcgcgagcgtttatctcgcgatctagaactgacctgctctatcgaggcacgctgagaagcatggagttcaagtgataggaaatttgaagaaggggctgaatccaccttaggtgaccgattccgggtttgtgtcgacttatatgggcactgccgtatacactgtacttgtctctggcattatcgcacttgcgtgaggaatagcaccggtaagaagctttgcagtgtttaaaaattatcatattgatggcaacaaagagatgattgctatcgtaaccatgaatattttcggatacgccacctcttgctatctcaccacaggaccattttttcgttcagcagtgaactacaatgctgggtgcaagactgctgcatcaaacattctaatggcgatagcagcgatgctgtcattgttattcttaacagccttattccatttcactcccctg

SEQ ID NO: 120408 - DNA, 280 bp, Glycine max
  Clone ID: PAT_MRT3847_79736C.1
tacggctgcgagaagacgacagaagggatgccaggaacagctttgttgtagtttagctggctgccaaaataatttttcagaatgatatctataaatggagcgtatgtaataaatcgtaagtttgtctagagaatgaaacaaaatcctagtttgagtcactgtgtttgtaggtatactttcagaataaattaccactgaagtgtaggtctttctaaacattggttcaagaactaccttcttgtgccagagtgttttctaaaacatttactgcaaatactag

SEQ ID NO: 120409 - DNA, 229 bp, Glycine max
  unsure (1)..(229): unsure at all n locations
  Clone ID: PAT_MRT3847_79737C.1
caatcaaattcatccatctcagctaatactagtagcatctcctcactccaacttcaatgtggagtgganctcacttaaacctatgttctctgcggacatcataggcccttctgtgggaatttgggagatcgcatcagggggcggaattacagtagctgcttgtgggacgatctcattagcgcctccagtacggacggccatgagtggttgtgtacgccacgatgtgcgg

SEQ ID NO: 120410 - DNA, 840 bp, Glycine max
  Clone ID: PAT_MRT3847_79738C.1
tgcaaacaaggcacagcaacgctcaactgcgccgtgagtggggttccgaggacgggagagagagccaacgccgccggttttgacggcgttgggagtgggattcttctcatcacattcagttgcgcgaagcaccatcaggtgtgatcagttgctctgttttatgcaactctgtttttttggttccgcctaggtaggtgttcatgtcttgtgttttggactttcggtactaagagtaggcactaagcattactgcagtattttaagttgttttgtttcctttttttgtcatttatgaattctgaatgtggtttgtttagtcaatgactttgttatgcacttatgcttatgaatttaagcttaattaagtatatgatatgtggtgtaagtgtttttttttaatcatatttttaccatgctaaatggatatatcagaatttaatagcatatattttaattttataaatcttgtagaatcttacgtttcagagttacggtttcacagtttacgattctgtgacccctttcgggatagaattgtagaatctcgagtttgactaccatggtagttggccatgtttatctgcatttgaactgaatagtttactattttctagtatttgattttctattgtttctttctttatctgtctctcctttggggttgggggtttttaggctctgcaaatgccaatggtggatttggagggcacagaaggttacataccttccacagagtatgtggaagacagcaacgaaacactcattaacttgactgactcaactgagcttttgtttcttaagttgccttcttccaatgtaagttttgtctttatgcatatg

SEQ ID NO: 120411 - DNA, 511 bp, Glycine max
  Clone ID: PAT_MRT3847_79739C.1
aatatgatgaggaaacatatgattagacacagatgcttctctgaagaataaatacagccttttgcatcaaccaattaattagcgttacgtaagaagagatagagcacaccatggtgactgaattggaagggcatgaaaccaaagcatttcatacatattacgactagtattctaactaacattaaaacatatatgggagacgttaaaccacaccatatatgcgtatatacatttatttatatatgaaaacacatagatatataatcttctttgactctttgggatgaggccagaacacatggagagatattaagacgcatattctggcagagaaataacctccacttgaaagatattaacaccttaccaccttggaaagggagttccacaaggggtatcaactctccttgcattaggagagaaccacacttcttgagaagggcgttcttgaaatatcgacaaaggcatgggatgagtgccttgaacgtgaaacaggataggttttatgggg

SEQ ID NO: 120412 - DNA, 497 bp, Glycine max
  Clone ID: PAT_MRT3847_7973C.1
ttacgtgttccccggttacattttccaaatgctaacctccctctcttggatttgctggttatatcccaacaatgttctggcccaacaacttgggtcgggcctaaacgggcttggcataggagcaattgggcttgactggtccaccatttcgtcctacctcggaagcccactcgcaagcccatggtttgccactgccaatgtcgcggtgggtttcgtgtttgtgatgtacgttctgactccgctgtgctattggctcgacttgtacaacgccaaaaccttccccattttctcggacgaactcttcacggagaaaggtcaagtttataacatcacagccataatagactccaatttccacctagaccttgcggcttatgagagacaaggtagattgtacatcagcactttctttgccatgacctatggtgttggctttgctgcactcaccgccaccattatgcatgttgctctctttcacggaagagaaatatgggagc

SEQ ID NO: 120413 - DNA, 702 bp, Glycine max
  Clone ID: PAT_MRT3847_79741C.1
ccacgcgtccgcccaaacggtaaaaccctctatgcgatgctgaaagggggttttgcgttataattcacccttttctctctcactccttcagtagagttgagttcccaacgcaacgcaggctcaaacaatgccttcgaattcaaagcagaaaaagaagcaatccaagcttttgcagcagtcatcattgtcctccaatgccgccaccacgccttccaaaacgctccaaccttctgaacttgcctccttgtgcgaagaagcttctcgaaagttcccttctctcatcgctaaatccgcgttcatcgccgaactcgcccaggtcgacgacactgttcccgtttctaacagaatttggctctccgcaccttccatgctctccctctctctcccccccggttccacagtctcggtgtctattccatcttcgggggagaaaatttcgcaattgcatagctttcctctcgcatcgttagctaatgaatgtgaaaaactctatggattggaaagtagcaaggcgttggatgattatgcgggaaactacttggtacttgcaaccgtgtttccttctagtaaggttttgaagaatggagtacgcctgtcttcaaacctttatcatgccatgggatgtcctgctttgggcacaagtgtgtttgttcatccaatatctagtgctgcaaatgggatcaatgaacaacattctacagg

SEQ ID NO: 120414 - DNA, 608 bp, Glycine max
  Clone ID: PAT_MRT3847_79742C.1
accggctcgaccccaaccaataatagtctcttaattctatttggcaaatactaatctcttaattctctttggccatttctttagtaacattaagataatgtattctgtggaaatggcaccttatggtagattcattgctaacattttgatagctgtgatgtttgtttgcttgttttttgtgaccaacattgtggcacaggattcagagattgctcctacaggtcaattggaggctggaactgggtttgatttgcctgtttctaaggtgatgatgtgttcttcagtgttggcatctcttttggcattcatgttgcagtgaattggaagacagtgggtttcaaatttgaacttgttggggataatcttactttgtatgtgggttaaaattcatatgtttatatatatactatatactatatgtttggttgttgaaaatggtactgtatttttgggcattttgtaagattagctttatgatgagctacagttacaagtatgtaatttctactcagctattattggtgtgagctgatatattaatataattgttaagttccttgtaattgatgagttttgctgtttcactttatcaacaattcttcgaaaaa

SEQ ID NO: 120415 - DNA, 118 bp, Glycine max
  Clone ID: PAT_MRT3847_79743C.1
acacgtgcgtaaatatgctgatgcaggtataatgaccctacgacttgccttttgcgaactcgatgaagaacactacacggagtttgatgataaattttctgaggtaaaaaatgcagtt

SEQ ID NO: 120416 - DNA, 434 bp, Glycine max
  Clone ID: PAT_MRT3847_79744C.1
ttgggggggggggggggggttacgaagacgagggaagaggagaactacacaggtagaaggcacaggacttcaatgggagatacaactcattaaggattaaaaaaaaaaaaaaaaaacaaaaaaaacaaaaaacaaaaaaaaaaaaatgaaaaaaaaccgcctcacttcaagtcaacaagtggaaacatctgaaactatcgaagaattcgactgagatgcgatcatcgactagcataaacgataagactatgtcgagacccaaattgaaaggcaagttaggccatcaagggaaataatcgccgaaagcccaaaatttgccccggattaaatggaagccttggccactaaagtttttgggacctacagcctccaagactcaaaacctttcaatccagactttggataaaaacggcaatacttgcaagcctcaagcc

SEQ ID NO: 120417 - DNA, 463 bp, Glycine max
  unsure (1)..(463): unsure at all n locations
  Clone ID: PAT_MRT3847_79745C.1
acgaggaaatcaacagttaaggatttttgccttactactcttacctccctcagtgaagttgctaaatccttgattttttgtttttttatgttggaggcaatttgttgagctctattttggttttaggggaaggtcagaaaataaatgaagatattcaatcgaatttagttgtagtcttaaacgataggataagatgaatttaagcttttaaagattgattgtataaggattctgtcagatttagttttagccttaagccttatattcagatgctccaaccaggaaatgtgaaaacatacaacattaatggcataggaaaaggaagaggttgaggatattctttgtccatatgagaaggtaaaacatggttaaaaaagcttgtttgacagtgatatctaagatatgattgaatcactctagatactctggtgcaggaatctgtatagttnagaataattaatct

SEQ ID NO: 120418 - DNA, 652 bp, Glycine max
  Clone ID: PAT_MRT3847_79746C.1
ccaaacctgaaagtcaaccttaaactatcagtattgagttccatgaaaatttagaacccacagctcccccaagaggcgtgtaactaactgcaacaacaatcatggcattggagacagcatggtatgaccttgtgtgttatggcataattggcatggccttactaggtgccttgtgggtgctggaaatgaacgaaggagcttcccgaagagattttgagaccacctttgcgagccttttgttgtctcgacctgaagatgaagtggtcgtgagtgtgttgcacagaggccacgtcagcaccccacagctatggacaagttgttggcgaggacttcaccccttttgcctccttgttacccgtttcctttcctttgtgatcatgcttttgttcttactctgggatgttctcgcatacgatgcaagcatctttttttactacactgagtggactatcatattggttaccatatattttgcgttggggaccattgtatctgctcatggatgttggcggtgctttaataaacccctcattcacaatggagcaaaggctgagtttctgagaagggatgtagaagagacaatgtctacaaacttaatcgcttccaacaagttggaaagccatatgttgaagaggactttcaacaaagagca

SEQ ID NO: 120419 - DNA, 495 bp, Glycine max
  unsure (1)..(495): unsure at all n locations
  Clone ID: PAT_MRT3847_79747C.1
tntnnnnnnnnnnnnnnnnnntttttttttattggtgaaaaatggtatagctagtacttgagacacatcaaaatatacctgaaaccacacttaatcatagtccaaataccacactttttaacacgggaaacaactacttcagcttgcgacttgctaccttattatacctggacagcactaaaaaaaagtttaataatgtaaaggattacaatagttcgtatcagaagacaaagaaacaaacagtctgatgaaaactctgcaacgttaacttgacagagaaaattcacacataacttgaattgggacatggaggaattgctatatcagggattccttcgaacatcaacaccacactcttcattgttgggcgaaaaaaaggttcaatttggatgcaccaaagtgccaccttaactatattttccacggaagttttattatccacggattcccaaagaaaaagcttattaagttgtccagaaacaaaacatttataag

SEQ ID NO: 120420 - DNA, 423 bp, Glycine max
  Clone ID: PAT_MRT3847_79748C.1
attcctttctcagaatccacatattcacagcatctttttgagccgaatgttatttgtttctatggccgaatttatttgtatctatcttctatcttcttcctcaccgtcaagttgtctctacacaaaaagtactcatggccagttctcttcaaaagcctagacattgaattaaccactcaataaatatggatacattttcacaaaaagtacccaacattattaccagactttatacgatatcacacaatgaaagaagatgaattcctatgttgtcagcttggtttctgggtgtttctgattatatgtctggtgcttgtgtcactggcaggcattgcatcaggcctagctctaggactactgtccttcagccaagtggatcttgaggtactcattaaggccggtcgaccaaaagacacaaaacat

SEQ ID NO: 120421 - DNA, 376 bp, Glycine max
  Clone ID: PAT_MRT3847_79749C.1
gatttcagaattcataaaaagaaaaggatttttattaaatgaacactttaatctcaccgccgtgtacacaccgttaccttggtggggtaccttactctttcctctctccgcttataaacatcaccaccaaccttaaattttcaaggattactttcacggtatgctaccagcttagtgacacactcttcagtgctagccacactcttgcggacgtgccactctctgatgaattcgtcactcaatcactggttgatgaacttagcataggaccaataaagtggaaagataacaccatcgaggacaacacatgcactattccttctcctacgaaaagcaactcaaacatgcagatgagaagaatgctggtgcctttgga

SEQ ID NO: 120422 - DNA, 220 bp, Glycine max
  unsure (1)..(220): unsure at all n locations
  Clone ID: PAT_MRT3847_7974C.1
gnnnnttgttttttttttttttttttttttggcccaaattaaccccggcatttttttttaatgaaaatggaatattctgggattttgggcccacaaccccttccaatttttacttggaaaaccaaccttttgaaattaaattcccaagccttttttggttacgggctattttgtggactggggaaaccatttggaaacattccccttacccatttttttt

SEQ ID NO: 120423 - DNA, 334 bp, Glycine max
  unsure (1)..(334): unsure at all n locations
  Clone ID: PAT_MRT3847_79750C.1
ggacttgtgccttgaccgacacttccacatcctatgtgtgagagtgaagtgggaaaaaacatattagattcaccccacaatattattttatcttcctaggttcccagacaatattttgtggacattattctttggatctgggatggccccaacttctataaatggtactggttttcaacctggtctttattaacaatatattcacacttccaaaggggttaaagaattaaaccccttttggaaaccttggccgcacaaccaggaacaaaggacctttacaggggggggaaaaagctagncatattttaccgggattggtttttttttttttttt

SEQ ID NO: 120424 - DNA, 347 bp, Glycine max
  Clone ID: PAT_MRT3847_79751C.1
cagtaaggtagatagtaatgtaacatctattgctcaaggttacaacaaggtctatggcaattccgtgttaactaaccccttattcaagcagggaaatgatgtgccatttgtttcacattcctataataatggaggagagcactatcatatcctttggtggctgtgacgatgatacaactccctctgacttattcatttctgactatgatctgttgatgtgtgaagcactttcacataagtcagaagctgtgaatgtgaaagagttggctagatctagttcaaaattacttccaagtacagcttagacatttgcacctgaaactgaaaatgttcccaagtcaaagggg

SEQ ID NO: 120425 - DNA, 1108 bp, Glycine max
  Clone ID: PAT_MRT3847_79752C.1
ccacgcgtccgcgattccatccaggagagccttctctcaacaagaagctcacaactatattcttagtctgtgtccattttaaatccttccgtgtccctctcctttcctccacccaaaacgccaccgtttcgccctgcggctccctcgatcggccactgtccccgcgaccggcgcgtgagcaagcgccactgccaagtcctcttcgacgcttccctccgcaagctctacatcctcaacggcgttcttccgcacggccacggcgactccaccgccacgtgtcgcctcgtccacgagttcagaaaaagggcgatgatttcatttcatggcaatggcgacgacggcgacggcgttgcgcttcttcgagaagcctccaacggggttctagtgaacggcgtcgagattcaaaagggaaaggcggtgtagttttcggttggagatagggtttcactggcttgtgggaacgagaagggttcgtgtggggttgggaacgaaattgagtttgttgttgagagaattgacttcgaagagtgtggtggtgaaattgatgggttaaaaacattcgcgggacactcgcagagtgggaaggggaataagagggtttttgctgtgacggctaatgatccgaggtatgagggtgttgttgggagagcaaggtttcttcaagataggtgcagagatatattgcttagtaacgatcccgtgtcgcgcattctgcgcgatgaatcgaagtgtgcccctggcaatgctgaagtgcaatcaaatttggaattgattggtgaaagtaaagtgaagaatttggatcccaaagcggttgctgacgaggttcctaatacggtgagagtgttagattctgtagggaaggataattgtaatcctccttctgttggtggtgattggtggcagggaacaattggtggtggcggctgcaattatccgccgcctggcaagaagttttatctgaatcgccttgaatttatggaccacaactcctcggtgtgtcatctgtcgatatctctccttgaacttattcatcccgtggaaagtgtttcgaggatgtttattgcaacgtttaccagcgacattaaatggcgtgactgccccaaaattt

SEQ ID NO: 120426 - DNA, 622 bp, Glycine max
  Clone ID: PAT_MRT3847_79753C.1
cttaattcatcaaaatcttgtctttttacccactccattgatgaagatgagccatgatagcaaggccttcctaccattccaagccccttctttctaactatagcatgccagacatctgactcacttgggggaggatttccttgcgcaaatgcacttttggtcaattgttccaatgttcgggcaaattcctcctgtatatccacccatgtgttgtctgaaagttgatgcttgaaacgaaacaagtccaatggagtaggaagggtgccagtctctttactctaaaacagaacaaagaatacaagttaagaacttgtaggttttaaagaaaaacataattacactaaatcatgcaaggtaaacaatacaataaattgtattaaatgacaacttaaccatattagctggggggctcttcttttttaattcttcagatttccaatgctcacataatctctcccaaacatcgtctttgacccaatttggtttattcatgtgtggttcgagcctcatttagaatatttttcatcattgctgcaccttgtatttcaaaattcttttttgcccaattgtaatccggtggacaaatagaaaactttctcaaaaactctccgagccacaagtc

SEQ ID NO: 120427 - DNA, 284 bp, Glycine max
  Clone ID: PAT_MRT3847_79754C.1
atcctgtatagcggccgcgacccactcgtccggtagatcatggtgtttattgcacatattcaaatgataactttcaatgcttaaacaggggcagggtttgatgaaaccagcactagcacattggtttagtcaatcctcacgcacgagcgctatccacacctgacttgccctcgtgtcctcagtactccactaacccatgaccaggactcgttcacataaatcctgttctctataattactgcagagatcttatttttatggtagctacttccacttaaatctgc

SEQ ID NO: 120428 - DNA, 467 bp, Glycine max
  Clone ID: PAT_MRT3847_79755C.1
tacggctgcgagaagacgacagaaggggacccatatcacgagtatttactgcaaaacgtttcgattcaccggttcacgtcgtttcgggtggctgcaagtagtgttagtatttaatacctcttaccttttccctgtgctgagcagagggttattctttcctcgctgggtttctcattcaagctcgcaacatacttttccacaaatgatggagtggccagcatgtaccgatgagtacgagaaactcgtaattcgcatgagcacccccagggttgtcatagacaatgccgtgtgctccactgcgacaatagtcaaggttgatagcgccagaaagcatgggatccttattgatgccgtacaagttctctctgatcttaacctttcaattaagaaggcttacatttcttctgatggcaggtggttcatggatgttttccatgtcacgggtcaaaacggaaacaagctcacag

SEQ ID NO: 120429 - DNA, 2000 bp, Glycine max
  Clone ID: PAT_MRT3847_79756C.1
cctctgtccggttccgctcgtgttcagggaggggccagcaaatcaggccattagcctgtgagcaaacgtccccgtaaatccttagagcgaagaaattggcgtctgacattctccctcactctcttttcagttagggtttgcagaacggtggtgaggttgtggattcccaaattttgaaggtaatttctcagaagcagaagaagtagttggcacttgatatggctcgaaggaagagtattgctagcagaaaattaactaagcgtcagatggtactggcagagaaagatcacaataaaggaaaagcttctaatagtcatccaatgaaacaacatactagacatctaggacagacgacttctgaaattccaccttgtgcttcatcacatgcaatatctcgtcccactgatccatttgctaggacatctgacgtgatacctcccccttcaatacaagggatacactcaccacatacttcacaacctacaaatcctgatgcaggacataccattgatattctcccaaagatgagcagtgctattggcagaaagtttgttaggcagcagatggcactggcagagaaatatcggaataaaggaaatgattctaagggtcatccaatgaaacaatgtactacacgtccagtgccgatgacttcacaaattccaccatgcgcttcatcacatgctatatctcgtcccaccgatccatttgctaggacatctgatgtgagagatccaccttctatacagggagtgcactcaccatgtacttcacaaccaacaaatttagatgcaggacatacccttagatcatttgttgcattagagacacaaaacaacgatggcaagccaattatataccttagtggacaaggattcttaccttcacgccctgttgctaatgagattggggatatcctcaagagtcattatactgatccctggtcatcatggaagaagataccaattatcacaagagacttgtggctcggagagtttttgagaaagttttctatttgtccaccggattacaattgggcaaaaaaagaattttgaaatacaaggtgcagcaatgatgaaaaatattctaaatgaggctcgaaccacaatgaataaaccaaattgggtcaaagacgatgtttgggagagattatgtgagcattggaaatctgaagaattaaaaaagaagagcacccaagctaatatgagtaaagagactggcacccttcctactccattggacttgtttcgtctcaagcatcaactttcagacaacacatgggtggatatacaggtgggtatagggttggccgcccagggatggttcgttgaacccacagaccaaacggttcaggaactccaaaactgtcagtccatttaaacattagcttattttgcctgatccatttaacctgttataaacagatacttttttgaatatatttatattttatagtttattagtgtatttgaataattattacttggtatttgattagtatacgttgatttctttcttagtatttcaatatttatagtttattgatgtaaaaaattagagatatttcaaatttttttatcatttttcaaaaagttgactagtgttttcaattttcaatttttttttattattgggccagcaaatcagtccattagcctgtgagataagtgggctggatgcagtctaggtaaaaatgtggtccatttaatgtgggtcagcttggtgtagttcatttaattgaagaccaaaatggaccgaactgacccatatactcagctataggtggataggagatcacaacatgtcaatgaggaatttgcacgaacattggaacaattgaccaaaagtgcatttgcgcaaggaaatcctccaccaagtgagtcagatgtctggcatgctatagttagaaagaaggggcttggaatggtaggaaggccttgctatcatggctcatcttcatcaatggagtgggtaaaaagacaagattttgatgaattaag

SEQ ID NO: 120430 - DNA, 418 bp, Glycine max
  Clone ID: PAT_MRT3847_79757C.1
cgcccacgcatgcgctgacacgtgggaatatatggggaagggcggggtttttaaaccggagacagggagaagaaaaatagcatccccagcgacgaatgaatgggcaattgcgggagcctagaggaatctggcggatttcccaaggctcaaggtgtgcatcagcttcaccatgccacatcaatgggcgccagtgccaggacccacacgaagcactctcacaggcacaatctcaacgaggcccttcggatctcagcgagtcctggtccacaccgagcgggaacaatagcagcaacacgctggtctacacgcacgtcatcgttctcacgctgtacgagttggctaccatgaccaagagctttctggcctgctacatccttggcgagggaggcttccgcaccttgtacaaaggctacattga

SEQ ID NO: 120431 - DNA, 733 bp, Glycine max
  Clone ID: PAT_MRT3847_79758C.1
ctcggaattcggctcgagcgctcctaagtcctaatacctgtttcatgctaatgtcattgtgttagtggctttcgggtttgattagcaatcttaggtttccacaggaaaaggccatcattttctgtgacaatctgagtgcaatctgtttagccaaggatcaagtccatcatgagaggactaagcacattgacattagataccacttcatccattttgagaaaagggtcaaagtccagaaagttgatacgagggagaatccaacagatatgttcacgaagccggttctaagaaacaagttcatgcattatctggatctacttactgtagattgctggaaatgaactgagttagttgtaattcagaaatattattgaatcaaggtggagattgatgattgttggacaatacatgatagacatagaatggacaacaatgatcgtctggtccagtacttttatcttttatataggtcatccaatcctatgtcacctggtggagcatccagtcacgtacgagggaccgtccaacatggtgattcactaacataagttgtgttgtaactgtaactattttctatttttttccgtttgtaaccattttcggttagatagatagtagttgtctcctttacaaggagctctgtattttgggtttagagagtttgagagtattttgaaccccttcattgtaaattttgttattcgtaataaacttaacaattttgcacaataag

SEQ ID NO: 120432 - DNA, 220 bp, Glycine max
  Clone ID: PAT_MRT3847_79759C.1
gggcgctggtgactactaccaaatactgcaggagaagcatgatgcctctgatcaaaaagtgaaaaacgcttataagaaattgacgctgaaaaggcacccagatcacaaccttgaaaactctctcaggaatcaagagtttgatgccaagcttaaacgagttcctgaggcctatgatgtgcttatggacccaactaatcgccatatctattacttgtacgga

SEQ ID NO: 120433 - DNA, 615 bp, Glycine max
  unsure (1)..(615): unsure at all n locations
  Clone ID: PAT_MRT3847_7975C.1
gcgccgccgacgatgatgtgctttaagtggtttaanaataggattgccgtgctcgcnntcgttacgaggacgtacgacgtgtgaagttgtgtatactctagagtgatgcgagtacgcgaaagctttaaatagctaaatcgcaaaagcgaaacttgcttcaaaatannagtgagttgtgcagggagcttcaatgtgaactctcttgtgagaaggatangaaaccaganttgtgacgacgagaagattgattcangatattcgtggtacctccagaagcaatgcanngagagagccttncagagcttggctccaaggggatttaaatttttggagcgacacaaggaagaacgtcgccgttaaaaactactctcgannaattccgaaaagccctgggtagtggtnncgttgatnttaaagtgcctggaaggcatcnnttgttccaatgcactnncgatttggttttcacacaatgtgttaaacaagattgttgggtggccaaagggtttgannaattttcaatgggtgagaggaagcgatctcacttgtatttatgtttgtactanagaagaaagcttctttgttaagttttggntaaatctttttaagctagtgcat

SEQ ID NO: 120434 - DNA, 156 bp, Glycine max
  unsure (1)..(156): unsure at all n locations
  Clone ID: PAT_MRT3847_79760C.1
cactctagaagagctctcncattccccccgtccttaagctcggattccgcctcaagctcaaacgtattaaattcttttggctttccttctgggccccttgcccgagttaattattcctccctttctcaaaaccaaaaaaatgttcctcgggaagtt

SEQ ID NO: 120435 - DNA, 231 bp, Glycine max
  Clone ID: PAT_MRT3847_79761C.1
tctagctatctcgatcgaactgtccaaggtcctgtcaccaaaaatgtaatataatatttttgtgttatttgtgggggtgggaagcctgtagtggactgaggaagtggagagatagagagagaaacatagacagaagacgtagagacagagaagcagggtcggagaggggttggctagcccgtgcggaacagcgtgtctatcggtgtatacgctcctaataatccttataat

SEQ ID NO: 120436 - DNA, 291 bp, Glycine max
  unsure (1)..(291): unsure at all n locations
  Clone ID: PAT_MRT3847_79762C.1
acgtcgcangcacgcgtacgtaagctcggaattcggctcgagntccntnncnnngtangcnggcancacttgcantangccnntcanngncantcaattntntnctcntncannactttnnangncattacagctcanngnanagacctatgntggagcttgatggcagcactgngnatcgnnaacctcctaggnangtnnagncnnngttnngagnttcttctgcaantccagtttctntaggatnntcanntcgtgtanatgnannatctatgatgnntggtnctggat

SEQ ID NO: 120437 - DNA, 505 bp, Glycine max
  Clone ID: PAT_MRT3847_79763C.1
aaaaatcccttggaagtttgtttttagaaaagggaaggggaaaaaaaaaaacaaaaccgtaaaaaaaaaagggccgggaacacctttttttgtcctgaacccaagggggaacaaaacccccagggggaacaaaaaggggggggggagaaaaaaaaaggggccccaaaaaaaagggagcgcaccagggatttacacccccaaagggaccaaccccttggtaacaaaaaaagaatttgttttcccaaaaaaagataaaacctccccgggacttaaaaaaaaaaatggtttgccgaagggggtcaaaaaaagcggggggcattacaaaagaactaccaggtgggggggggccctaatgggcccaaccgggggagggacccctcctttgttttcggaaaaacattaagagcccttaatttttaaggaccctggggccccccaggaaataccgacccgggtcttgcaggggaaccaccttcccctaccggggggaaaaaaaaacctggcc

SEQ ID NO: 120438 - DNA, 271 bp, Glycine max
  Clone ID: PAT_MRT3847_79764C.1
tacggctgcgagaagacgacagaaggggagtgaagaaaatgaaagtccttgttttctttgttgctatagttctagcagcatggcattgccatggctcagaccatgaccatgaccatggccacacctaccaaattttccctctgagaattgaaactggccatggtgggcactacaattcggaaggaaccagccaaaatttggaggcttgttttggaaccacacacggtaattgcctggaaaacggttcctcaagattccgagggatatattg

SEQ ID NO: 120439 - DNA, 151 bp, Glycine max
  Clone ID: PAT_MRT3847_79765C.1
agagagagagagagagagagacggttatattcgcgcctcggcttctttcaaattcccactacgacaccaccgtatgattctctactttcgattccttatctgtccgatctacatcttgcattctcttcctatgcctgaattctccaaatcc

SEQ ID NO: 120440 - DNA, 318 bp, Glycine max
  Clone ID: PAT_MRT3847_79766C.1
tttaaattaggcattgtcatttcataaatacagctccaacgggtatagtgaaaccactagtgcttatggtcttcactcataacgctcaagcagtgaggctcaccaatctatcctagacatagactaaaagtggacaaagatagagaatgtattgtgcattctgagctatggtaattatgtactgctaataaatagaaagctcaggctgcccaaactagaatgactagatgttcaaatgacttaatcacatttcaatttcttaacacattattatcatctgcacccaagaacgtagatgtcagtaatggggatggtggt

SEQ ID NO: 120441 - DNA, 1014 bp, Glycine max
  Clone ID: PAT_MRT3847_79767C.1
aaaaaagtatccatacattctattttttttttctctcttcatttcttattatatcatttgtgttacatttaatatcctttctttttctctgtctttctctttcttgattctttccaccttgtgctaactttctccctttctcataatttgaaattgggaaagtatggagtcctaaaacaaatcatggagggggtacaccggtggatcttcttgacacttgtcagcatagccgtttgatttttcaccgaaaataaagtatagccgtttgaagcctgttgtgtgaagggaccacaacatgacctgtctagtgtgtgagagggtcctacaccaaccattaaaatgattcaaagcacatagacgttgccgtctaaactcaaattatgtgatagttgattaactttaaatattaatttttttttcaagtggtgccttacggctgcgagaagacgacagaaggggagacacaaaagtagcaaagcaattcactcaccctcttcaccacctctttaagctcaagctatctaagaattgttattacttctttctttgcaagtttacatctttttgtgtgtgagaaaaatggcatgcattagcaagagcagagcaatgttcttcttcatggctttctttgtggggcttctatttgctgcaggggtgagtgctcagaccagtgagttccctcaagcgccagcaccagcaccaacaatggacgctggagctggatttttggtgacttactctggagcatttgtttgctcctcactgctcctctctcttattgcccttctatgccattaattcttcatgctgcaaggagtgaaacctatctactctattcaatttatttttttcttccccagattctgttctcttatatcttcattctactaaatgtgagtgcttttgttgatggcattattattgttgtgttatcttattaattgagctcctctactaagaaaatgagataaatattatatattgtttgaattctgattttctgtcgcaaaaaaa

SEQ ID NO: 120442 - DNA, 321 bp, Glycine max
  Clone ID: PAT_MRT3847_79768C.1
ccgaccaagggaaaaaggtttgattgattattcccaaaaagggaataccaccctcttcattttgaaggtaaaaaatgcatgccccgtttaatgttgaaaatggaggtttccttgaaaatttccacagtaatttagaagctccaaagcctaacccaaattttcccctccccataagccacaacacggttcccctaggccttaaaaatatgggctttttgaccccttgtccacccattccaaaaattgggggtaaatatttggctggcccaatccatcacattttgaccaaaaacagcggccttcccccacaattgaaggctt

SEQ ID NO: 120443 - DNA, 310 bp, Glycine max
  Clone ID: PAT_MRT3847_79769C.1
tatgtttaaaagcctatttttgctttcccacaaaaaccccgtcatctgaacgcttttatgaaccaaatctttgaaaccgggacgatcgaacttacatcgtgagggaacaaaaggttgggcccttctctggaaaccgcaaggtataataaaccactgggatattggagcattgaatattatattaacctctggatatggtgtaaaaagaataaaaactcaataaacctattggaaaatatcttcttgaccataatcaagggtaaatggccaaaaacctgacaccaaactctagggcgggggatttatttgc

SEQ ID NO: 120444 - DNA, 670 bp, Glycine max
  Clone ID: PAT_MRT3847_7976C.1
ctgagagagtaggtgacttgaatatcaacgtcttgaaagatgtttctgttgcaagctataagattgatactaaaattgacagagttgaagctactggagtaaatcaaaaggatctactagagcgaaatatactgaaaggaatcactgctgatgaaaatactgctgcccatgatattaccactttaggtgtaattaatgtaagatattgtggttatgtggtcacagtgaaagttgagcgaggagttaatgaaaatgttgactctccatctcaacaaaatattgaattgtttgatcagccagagggtggtgccaacgcgctcaatattaacagtctgagattacttcttcacaatacaactccaccagaaaacaataaaccaatgtctcagatacaaacatttgagagtgaagagtttggtgcttcccatgcttttctggagaagctgattaaagaaagtcttgctaagcttgaggaagaagaaccaggtattgactattttgtaagatgggaacttggagcttgctggatacaacatttgcaagaccaaaataatacagaaaaagataagaaactatctttggagaaggctaagaatgaaatgaaggttgagggtcttgggaaaccccttaaagcccctaaagagaagggaaggggggggggggggggagg

SEQ ID NO: 120445 - DNA, 355 bp, Glycine max
  Clone ID: PAT_MRT3847_79770C.1
taccaataattcaattgatatatatagactatatgtaaagctttgtacattgaacattggatatttatttatgcagattaacaacaaataaaagaatcttttggggggatagagtatccctaacattgaaactaagcacccgagggttagagttacggcaaaatagaacaagcttaagtggttgggtaaaagagagacgggaacaaatatttgccgtgattgacggccatagcatttgagctcgcggcggaagtggggttcagccagaaatccctagcaaagccagggtgagggcccttgccgtacagccctgtacaaaccgaagcggtttataaaggagcctttttgggttctt

SEQ ID NO: 120446 - DNA, 476 bp, Glycine max
  unsure (1)..(476): unsure at all n locations
  Clone ID: PAT_MRT3847_79771C.1
ccacgcccgtccgcatctacactttgtactctactcggatcgcgcgcacttggatgcactgctcatcgcgttagctaacatctgacagcgcctactggagatgatgcacgccctaccacattggcctcttcaggatccgcaggatggagtcctctgagaccatatagaccaacaacgtaaccctctcccncatgagacgcctcctgcgtcaccgcctactacgtgacatacttgtactagtatgtacctgcgcacgagcagcggatgtattttgaggttagggtgaacgacttgcaggaccatgctcttctgtgagaacgaggtcaccgagttcggctagatgcaccccgacgagagacgatggggtgagactgacactgagtttcgttgaggagtacactggcgatctcactgacatggacaaggtcgctgctcacctcaagggtggtgctaagaacgtcgtgatctctgctccc

SEQ ID NO: 120447 - DNA, 453 bp, Glycine max
  Clone ID: PAT_MRT3847_79772C.1
cagacatataaacactcatcatcatccgtttgtgaaaaatcccacttgtcacatcgtaaataaccacttcggaccaaactgttagttgatactcagatgaaattctttattgagctggccttaatgtaactgtatactgttgcgttcccatatgttttgcactacctaattgcatgtaattgttcgaaatattgaaacatctcagatttggcttatgccttttagtgttacatttgacttaatttacttgacatactcgataattgatattaaattttaactcaaatatatatgatgagaatgatttttcttggaaaatgcttttcaaatttaacctggcttttgttgattagatttatttgtaaacaaattaaatactgagcaatcatgtgaaacatttatttgatagaatctatcagattatattgtctatttctcgatcacattttgaat

SEQ ID NO: 120448 - DNA, 1215 bp, Glycine max
  Clone ID: PAT_MRT3847_79773C.1
aattcggctctaggcaaggaccactctcccctccagtcattcaacacctcactcactgattctcagaacacaaaagatggtgatgatgatgaagaaacaccttctcttctcactttcacttctcctaatggttctcttcacttcagctcaaaccaccccagcaccatcaccttcctcagccccaacagacatcatcagaatcctcaaaaaagccggaggattcaccacccttatccgtctcctcaccacaacacaagtctcaacccaaatcaacgcccagcttttgaactcaaacaacggattaacagtgtttgcaccaaacgacaatgccttccaaagcctcaaacccggcttcctcaactccctcaacgatcaacagaagaatgaacttatccaattccacgtgctaccaacatttgtttcaatctcaaacttcgacactcttagcaacccggttagaacgcaagccggtgatgaccctgataggttggcattgaacataacaagctcagggaaccaagtgaacttgacaacaggtgttgttaacaccacagttggtggaagtgtttactccgatcaccagctcgcgattttatcaagtggtacaaatggcttcttcttgccgagggcattgtgatcgttcccaagcctcctccaccagctccttcacctgctaaggctaaggctcgttctgcaaagaaatctacatagggtccttctgctgcggataatgactctgctgctatcagcttgaaacacatgaatagaatgtgggtgatgacccttgcagtggctactattgcagcagtgttttcgttgtgtcaattatgatagcttgaacgagttactggtacatgaagtatgctacttggggtccgatgttgttgtgctttgttaaaattttctacatgctttttttggggggattggttggattaaaggggaatcatgaactttttctagcactttttaattattcttttgcttctttttgtattgattaattcagtctgtggtgaaatatgtattggattttgaaggtttttctttactcgttcgcatcttatattgagaattttgtgtattgttagttgccaaacgaagaattttttccacaagtttcaatagaaaatgggtcacaagtttcttttaaattcagaagttttgttttaaaaaaaaaaaaaaaaagggcgccgctcgcgatctagaactagt

SEQ ID NO: 120449 - DNA, 295 bp, Glycine max
  Clone ID: PAT_MRT3847_79774C.1
caccccttcaaaacccttttcctcttttcctcactccttcatcccgatcgtctcaatcttcaatttttgctcgccccgtgatttggttcaccagctttctgtgtgttataagatacccctttgtctcaaaaccttcttttgatgacattgcttccgaatcaatgcgtagtttcttgcagcaggacggtcctcacttgtctgattcagcattggcacccatttgggtgtctaaggctttggtgaagctgaaaggggaccctaaatcagccctgaagttcttcaaggaggcaggggc

SEQ ID NO: 120450 - DNA, 434 bp, Glycine max
  Clone ID: PAT_MRT3847_79775C.1
tcttgtagttattcaacatagtaagttatgtattatgattatgtgaaattgttggcagtttaaacacaaaaagatgtaaatgaagtgattgctttaatgtgggtgtttagttttcctttgactctaacggctgcagagtctcgctaatgggagtgaaaccacatgcttatgaattattgatagatattgttcaataaggcatcacatacatgaaaacaactactcttgcgaccttttttttttcttttagtcttgaaaaaaattgttgaaaacaaattaatgaaatgcgacctatgtgaaattttgatcaagttatgtgtgcaactgtgtatggttgtggatcttttattcttttattctcaagcgtcaatattgagttggttcaaatggcaaagttgattccttctttagcttgttttaaatggatttatgat

SEQ ID NO: 120451 - DNA, 1304 bp, Glycine max
  Clone ID: PAT_MRT3847_79776C.1
tttcaggtaagcgcttgcaaaatccatgtatatcgatgtcaagctccgaaaaaatggacaacacatatggttcgccaccatatggtttgtgaaatagacaaatcataagccaattagagacgaaaaaagtacacatcaattacaccgtggcccgtggggatagaatagaatatggttcgccaccatctaccataaattgagcacattagcgcgccttaacgaaaaaaggtagtaatggtcatcaaaccgagtccaagactaagctaaaccacccttaatataatactatatatcttcccattatgccatcttgggttacatagatccaatgtcgtgcaagaactaataaagttgaagaaccatataatatgaatggggactggcatatatagtagtagtacccatcaacataaaggaggtatgacaataaaataaggctagctaaggtaagtagagagagtagaaagtgatggatggatgagctagcggcgatgggggcagaaggtgaccaaatagttagctttggtgcaagtagcgatgctggtggggtcatcataggcataggagtaggccttggggcatgcggtcttgaagatcttggaatagacggtgggcttgcaggcctgtgggcttccataggagcccgtgcagcagtacctgggggagttgaaagcggagcaagcgctcttgcaggccaccacgcgcttgttgtcgcgtgagcgcacttggaggccaacggggcacatggtgttgaggtcgctcacgcacccggcgtagctgcattttccggatcccttgaagggggtgatggagatgggtaggttgtacccgtccaccaggctcacgtcgtagaagtcctgctcgttgcccagggtgaactccgccagggtcgccggtgggcttccgccgatgccgttgcagaacagggacccgccgcagtccccggtggcgcagcgcccccggccgccggcgtcgaaggaacagccgtggcggccccagaagcgcccggaccatagagcggggagctggagggagtaggcccggtttggggcgagcttgaagcctccgcgggccagaacgggctttcctgcgctgggctggatcccgggccacactgggtgctggcacttgttgtagaaaatcactgaggatgatgctgaaaccttgagcactgtgagtgtgagaaagaagatggtggtgagaaagggtctaagactgagcagcattgagcccatcatggtgttcaacaatgctagctagggctgagctcgccttttatagacgcaatgggggagggatagaat

SEQ ID NO: 120452 - DNA, 277 bp, Glycine max
  Clone ID: PAT_MRT3847_79777C.1
agcacacgtcccgtgttgcatctatgcaatgtagaactataatgcacataaagaggatcatggcgatcatatatcttgtccaagtgaactactttctgggatatggtgagataagagcaagagtggtcgacagagacgtgagcagaactcttgtcgagcccctgatgtgataagacaaagaaatgtaccaggatgtcagtaaggatatcagattgacattctgagggtcttaagaaaataacctgtctaaacatcgggatgacgaccgcagaccaag

SEQ ID NO: 120453 - DNA, 818 bp, Glycine max
  Clone ID: PAT_MRT3847_79778C.1
tgtacggctgcgagaagacgacagaaggggagagagaaattgaaattgaaactgaaacgaaacagcgtcttcgctttgctgctgcttctgctgagtcgtgcgtggatctacctttgaaccctaaacttattgctgattgctgatctcagttagaaatctgtggatatggcgacggggaagtcatctcgctccagaagcgcagtgtccagtgccaaggacaacggtcctaagctcgaagaaggtctcaatcccttcaagtctgataaattcgatgccgagtcctatgtccagtccaattgctccctcaacgataaggaaattaagcaattgtgcacatatttggtggacttgaagaaagcgtctgctgaggagatgcgtcgaagtgtctatgctaactatgcagctttcatacgaacatctaaggagatatcagatttagagggggagctttcatctattagaaacctgctctccacacaagctgccttgatacatggtttggctgaaggagttcacatcgattcattatcaatctcaaattctgatggtttttctgtaaatgctacatcagattctgaagataaggagatatcagacctagacaaatggttggtggagtttcctgatctcttggatgttctcttggctgaaaggcgagtggaagaagctttggctgctcttgatgaaggagaaacgtgtagtttctgaggcaaaagatttgaaatctatcaacccatctgcacttttgtctctacagaattccattgctgaacgtagacaaaagttaggctgatcaacttgctgaagctgcttgtcag

SEQ ID NO: 120454 - DNA, 664 bp, Glycine max
  unsure (1)..(664): unsure at all n locations
  Clone ID: PAT_MRT3847_79779C.1
ccacgcgtccggattttttgtgggagatgagtttgagaaaagggaggactgccagcagtataggcagaagtgtcagggtttaaaatccaagatgctttgtactcaacatctgataaatttacactcgagtttcaatcttttttctcgaagtctagcacctgagatggaggcacattttttgggaaaaccatgcaaaaatgtagcattgaccttgaatatgtcccgtgcatttacggtgggagcattgtggtctattagcatggcaaccccttccacgatcatgttcttgccctccatgataaccaaaatttgctacaaagacaatagagtcagtttgagtgtcagtcttggaggattttggaactcggagaaaacgatttataagttctacagttcgacgtttgtaatcaaatcagagatagggttttgagagagggagaaaactgaaaaaggagtttctgaaaatgataaaaggattcattacttgaaacataaatgtacgggaatttatagacttcttagctaacagctaactagtgttttaaaattcgaagtgagggcactgggtcattggggtaatggttgaacaagtgagtaatggttgaaccacataaactggtgtgtntttntntntatatatatcagcaaatgttaattgttagtt

SEQ ID NO: 120455 - DNA, 372 bp, Glycine max
  Clone ID: PAT_MRT3847_7977C.1
ggctcgaggcgcacaacatgtgaccaccaccccgcgggggggacaggagcctgagcagcctcacaatcaggggactcttcgttgctccctctactctttcgggtggagcccatggacatcgttgggaaggccaaggaagacgcttctcttcctaaagcgacaatgacaaaaattattaaagagatgttgccccggggggggcgtgtcgacagagatgcacaggatttatagaacgagtgatgtgtcgaggttataaaccttgactggtcagagggcaatgaagtctgtcgcaaagaagaaagacggacaattgctccagaacacctgttaaaggcttcacgggcactggaatttggcgagtacatcagggaa

SEQ ID NO: 120456 - DNA, 452 bp, Glycine max
  Clone ID: PAT_MRT3847_79780C.1
tctcgagccgaatcggctcgagacggctgcgagaagacgacagaagggcatgtaccaatgaattgttgttctgagtaatcacatcttggtctctttcaataagttctcaaaaaaaatatgattgaaattttttttttattaaaaatattattttcaaacaaaaattaatcatcgacaaaaactaataaatacttcaacttaatatcttgatgaaaaaaaaatataccagatttgagatggtttgagcataacaagataagtttgaatgccttaagtaaaaaaatttcaaaatttttagataaaaataatgtaattcgaagaaaaattatttactaaaaaagatcattcaagtttcaccagaaattaataaagtgatattgagtgaatattttacacgaatgatataataaaaagaaacttgttggcctttgaggcagggcacgttggtgtgg

SEQ ID NO: 120457 - DNA, 585 bp, Glycine max
  Clone ID: PAT_MRT3847_79781C.1
ccacgcgtccgaacgcgcgcgtgtcggtatacctcttacagcacaaaagaccgtattcgggtagttcgatggactatggccgagttgtgagtcatgcctgaaagtacaaagaacgtctcttaaaacccacttggtaccgctgaagcgtaaggtgaggacccgcatgttgggaagcgagatcggaaacttgtgcgagggctagcacgacatgaagaccttcgagcgctaagatagaaaggatgtaggagttaacagatgacgacatgaaggagcatactatatacagaggcttggctgtgcgtgacaaagatggtggtgaaccatggataaagatgatcgcagctgatgaggacatcttacttgccgcgtcctagaagatgaaacaggaggctgcgataactattctttaggtacaataagaaggagcacgggaagagttctatgaagaatatctgacggtctgaggctgaatcgatgactacgaggaagatgaggaggatggagattatgatcacaacaaccgatgagggtgatgctagatgaatcgtatgaagcagtgagaaaagaaaacgttttgtatatgag

SEQ ID NO: 120458 - DNA, 697 bp, Glycine max
  Clone ID: PAT_MRT3847_79782C.1
gtgaagggtggtagcagaaaaaaatggactcacatctccccgaccacttcaagtgtccaatttccctcgaaataatgtcggaccctgtcattctctcttcgggtcacaccttcgaccgttcctccatccaacgttggctcgacgcgggtcaccgaacatgtccaattaccaaactacccctccccgaccaccccgccctcatccccaaccacgcgctgcgaagcttaatctccaactacgcattcctctcacctctccaccataccgtttcccaacccgaagccctaatttcaaccctcgcctccaattcttcgtcttccgattccaaaattgaggctcttaagcacctcacgcgcttatccaagcgcgactcggcgttccggcggaggctggcggagtccggcgccgtccccgccgtgatcgccgccgtggacgacccgagcctccaggagagggcgctcccgctcctcctcaacctcaccctcgacgacgactccaaggtcggcctcgtcgccgaaggcgtggtcgcgcgcgtggtggaggtgctcctccacgcgccgacgccggactgccgcgccgttgcggccaccatcgtcacgagcctcgcggtcgtcgaggtgaataaagccaccatcggcgcgtttccggcggcgatcgcggcgctcgtggcgatcctccgcgacggcaaggggccggg

SEQ ID NO: 120459 - DNA, 466 bp, Glycine max
  Clone ID: PAT_MRT3847_79783C.1
gcgaaaaaaaacttttttcttaattattattccagatgccaatgaacaattgtaaatccacaaaaaaaaaaaaaaaacagatggggggggggaggatgacctgtttacatttaaactatgcattcaaaaaaagcgagccaaaaaaaaggattggggggggggggaagggtttcgccctacctaaataaccttatttacaaacacctaactttccgcactttgcctaaaagctgggaggctacaaaactgaggggattgcattgggaactttgttttcaacagaaaaactggtttaataagctcatcaaattcctccaactgaaaatccaaggagccattgtcacaaaaagaaggtggctgcaaatgattgatcaaccgcctaaaaaactttttgtttcaccttattcaggctgatgtaggcgaaagagttccttttaaagggccccactttgtttatggccctttg

SEQ ID NO: 120460 - DNA, 312 bp, Glycine max
  unsure (1)..(312): unsure at all n locations
  Clone ID: PAT_MRT3847_79784C.1
tacataatnctattcaacaactattaaatttttatatacactggaattagttctaaaaatgatttcccctaccacaaccaatantcattaaacaatatttccccaccccattaatactacatattccacaacagcttttacatgctcttattacttcaactatttcatactcctttttattcaaactcaactcttttttcaaataatcccacccaataatcaatcactttttactctatttccttcccacaataccatgttccttacaataactttcactacttctaattcactcaaattctacttaaaccc

SEQ ID NO: 120461 - DNA, 276 bp, Glycine max
  Clone ID: PAT_MRT3847_79785C.1
ccagcatgaaagtctctgccgcccttctgtgcctgctgctcatagcagccaccttcattccccaagggctcgctcagccagatgcaatcaatgccccagtcacctgctgttataacttcaccaataggaagatctcagtgcagaggctcgcgagctatagaagaatcaccagcagcaagtgtcccaaagaagctgtgatcttcaagaccattgtggccaaggagatctgtgctgaccccaagcagaagtgggttcaggattccatggaccacctgg

SEQ ID NO: 120462 - DNA, 222 bp, Glycine max
  Clone ID: PAT_MRT3847_79786C.1
ggagcaggatctggacgccaaaccagggaaccacagccgattcaacgccacaaatggcttgagcttcctctgacaaggagcagaactgagctccgttacacaacaacaaccagactgtatgcgaaggctggtgtacgacattaccatgtacccttccatagatgacccttttcaccacgaaggcaatgttatacgcctagcctcaaatcaatgcatctttga

SEQ ID NO: 120463 - DNA, 297 bp, Glycine max
  unsure (1)..(297): unsure at all n locations
  Clone ID: PAT_MRT3847_79787C.1
ctccattgtctttgaacactcatcanncatggccaagcttgtnctttccctttgtttccntnttttcagtngctgcttgcgntactggagagagcaggcacagcaaaatgagtgccagntccaaaagctgaatgncctcaaaccggataaccgtatagagtcggaagtgggttcatngagacctggaaccctaagaacaagccattncagtgtgccggtgttgccctctctntctgcacccttaancgcaatgcccttcgganaccttccnacaccaacggtccccaggaaatctac

SEQ ID NO: 120464 - DNA, 750 bp, Glycine max
  unsure (1)..(750): unsure at all n locations
  Clone ID: PAT_MRT3847_79788C.1
cgaattcgacctcgttacccggggatcctctagagtcgacctgcagatcgctttttgtgtgtgactggatcagctcaagcaaaggtagtgtgtggcatcattatctgctagtttttttttttgtgtgtgctccagtgattttccattaactgtaacattcgtcctattcccacagatttatgatcgtgatgggcttactttgggagagtttgtgaaaggagacatgtatattcgtgatctaaagaataccaagggccacatatctggattgacatgtggagagtggcatccaaaaactaaagagaccattttaacatcatcagaggatggctcactgcgcatatgggatgtcaatgacttcaaaagtcagaagcaggtttggaaaatttaccttagtcttcttccatggtaaatattttcttttgattagttccatgcattgtgattttgtttttatttataatctttatatgaaaataaagagcctttcaaacagatatttgggggtacttggattttcttaaaataaaactttaggctttatacagaaaagtggctgaaagcatctcttgcttctaacattgcttgtacaattattggcttctacattgcatgtggttgtgtgacattgtctttataaaatcccctcttactccgttttattacttaatgggaaaaaattattggcaggttttaataaatttatgctctaatntatattntacaattttctgatgttatggaagtttt

SEQ ID NO: 120465 - DNA, 464 bp, Glycine max
  Clone ID: PAT_MRT3847_79789C.1
ttccaccctccacagtgtggcttcccctgtttgtaatatccggctcctagtataaagtgaaagagtgccctttagtctttagaggatagaattcactttatctgttgattaaaaaaatcaacagtagcgattgtaatagaaatgaagtacatgtataaagttagttacaatctcaaccattaattttttaatcaaccgttattggtgcattttatcctccattgtgtactttcctcattttataggagcaaaatcctggggatggtaaagtaaaaggtaaaatttgtgaatgcacccttagttgcattataataatctataaaatgaacaactctgaaagtttgctgttttttcaggtgtagcaaaatattatgcatatttaagatgaatttcaggaggaatttgaaaagttaatgctatttaatgttggaaaatggaatttgaggatgaaaaataataaagca

SEQ ID NO: 120466 - DNA, 412 bp, Glycine max
  Clone ID: PAT_MRT3847_7978C.1
gcacgagaggtgttgaaattttgtttcttcatcaaccttaaaacttatgaaaggtggaaagctgtgaggcaaactggtaccaaaaaaaaaaaaaaaaaaaaaaaaaaaaaaaaaaaaaaaaaaaaaaaaaaaaaaaaaaaaaaaaaaaaaaaaaaaaaaaaaaaaaaaaaaaaaaaacccaaaaaaaaaaaaaaaaaccttggggggggccccggcccccaatttccccttttggggggtgttttaaccccccctcctggcccgtgttttaacacggtgggaatgggaaaaccctgggggtacccaaattaattcccttggaaaaaattccccttttccccggttgggtaataagaaaaaggccccccccggttcccctttccaaaaattggccaaccttaatgggaaatgg

SEQ ID NO: 120467 - DNA, 472 bp, Glycine max
  Clone ID: PAT_MRT3847_79790C.1
acggctgcgagaagacgacagaagggtagccatatattcacttggaaaaatactttttaaagtcaaagttgaacaacaaaaagttactccatgtaattttgagctgtatttttatatatgcataaaaataaataagataaaattaattatggccgaaataatttcttgatgtcaaatttttaacatactagaaactgcattcacatagctgtttgaccagcaatcgtgcaacgcaaaaggcaagttgaagatgactctctctgagtcggttttttattaattttctcgctataaaaatatccttacgcgtccaagctagagtgacatactcttcaaccactcttagacgattttcttgaattctttttccctttccatataatgtcatttgttacgcgcaatggtgatatcttcttttatcatcccgatttttctttttcacaagatttagcttctaccatgagaaaaatta

SEQ ID NO: 120468 - DNA, 843 bp, Glycine max
  unsure (1)..(843): unsure at all n locations
  Clone ID: PAT_MRT3847_79791C.1
aaaaaaagttagtgagaggagaaagaagaaaagataagaacgaagttacgacgaagcataaaccctagttcgaaaatatcgcgataaatcgaaaaagttattcaaatctgcgatctccgtttatctctccgtcgggattgaccaatctctcactccccgttttcatatacttatattatccggtggctacgttactgcatcctaaatggttcgagaaaaagatgtctgttgggaatatgctgagaaattagatggaaacaaggtaaggtgtaaattttgccaaagagttctgaatggtggcataagtaggttgaagcatcatttatctcgattcccaagtaaaggggtaaatccttgtagcaaggtcagagatgatgttacagatagagtaaggggtataatagcatcaaaggaagaggtcaaagaaacttctagtgcgaagaagcaaaaaatagcagaagtcaagtctcccagtaatctttcagcaagtaaagctcttgtatctttggatgcagcatcccctgtcatgaagattttccctactggccatcctatgaccccttcctctacaaataaccaagagattgcagagaggagtattgctctattcttttttgagaataagctagacttcagtgttgcacggtcttcatcctatcagttgatgattgatgccattgctaagtgtggtcctggatttactggtccatcagcagaaaccctaaaacaatatggttggaaaggatgaaatcagaagtgggattacagacanaagatgttgagaaagagtgggccaccacaggttgcaccattctagcagcacatggacagattataaatcag

SEQ ID NO: 120469 - DNA, 272 bp, Glycine max
  unsure (1)..(272): unsure at all n locations
  Clone ID: PAT_MRT3847_79792C.1
cagaaaagccaacctatcaagtgattcaaccaatcaacggtgatcccttcattggaagccttgaaaccccagttacatccagccccttgattgcatggtacttatcgaacctccccgcatacagggaccgcantgagcccatactaagagggatcgangtgggcctgggccatgggntacttcnggtnggcccntcntngagggcngggcttttgnggacaacnagnnggcngggaancaaggttttttngcggttgttggntnttgttanc

SEQ ID NO: 120470 - DNA, 608 bp, Glycine max
  unsure (1)..(608): unsure at all n locations
  Clone ID: PAT_MRT3847_79793C.1
ccacgcgtccggtggcgccgtgcacggcccagaactcgccgcaggactacgtggacccgcacaacgcggcgcgcgccgacgtgggcgtcgggccggtgtcctgggacgacaccgtcgccgcgtacgcgcagagctacgcggcgcagcgccagggcgactgccagctgatccactccggcgggccctacggcgagaacctcttctggggctccgccggcgccgactggtcggcgtccgacgccgtgggctcctgggtgtccgagaagcagtactacgaccacgacaccaacagctgcgcggaggggcaggtgtgcggccactacacgcaggtggtgtggcgcgactccaccgccatcggctgtgcccgcgtcgtctgcgacaacaacgccggcgtcttcatcatctgcagctacaacccgccgggcaacgtcgtcggcgagagcccctactagactgtcatgcatactacaattatatatatatacgcttaatattaacttcagcatgcatgcatattataaatagtggntgtcaactctgtatatcattatattacgatgattatattggttgatgaacattaatagtcaatanaaccatgcaggcga

SEQ ID NO: 120471 - DNA, 278 bp, Glycine max
  unsure (1)..(278): unsure at all n locations
  Clone ID: PAT_MRT3847_79794C.1
tccagtagtttatcctctattaaattttttaaaattaatccaatcattcttttttatattagcatcccaaccaattttttgcttacccaattctcgccataaggtaaatctcacaaccaattattcttntttactagtacaacaactcaatcctttattttctaaacattcatcaataatcaccaaattaacaacttacctcattttaaaatactatccacacttaataaatttcaacctcacaaaaaaaaaaatcatttctcaactttcatcccctt

SEQ ID NO: 120472 - DNA, 174 bp, Glycine max
  Clone ID: PAT_MRT3847_79795C.1
caaacattatatgggatatgttataaaaaaaaggcaaccattaccttaacacacccatcacaagtccaaaacacttgaacttgctcaagggcaagaaatggccactttattctaagggtgtttgtttagacacaaaacgccatggttgcaacataatacatacgtcatagtttt

SEQ ID NO: 120473 - DNA, 748 bp, Glycine max
  unsure (1)..(748): unsure at all n locations
  Clone ID: PAT_MRT3847_79796C.1
gggggaggacgcgtacgccaatggagtgcgcgttgggtcgctagggctgatggtaaacgccgtcgttttgggcttcatgtcgctggcggtggagccgttggggaagatggttgggggagtgaagaggctgtgggcgattgtgaactttattctggcaattgggttcggaatgacggtggtgatcaccaaggtggcggagcaccagcgcaagatgaatcccgccgccgtgggtcacccctccgaaggggtggtggttgggtccatggttttctttggggttctcggagttcctcttgcggtaatgttcttctctcttctctctcgacaactacgcctaaatcactgcgtttttttaagtaacatttaacaaataataacaaattttaacttttccttttaaaaattatttcaaatcattacaccatcattagggtgatttaaattttattagaggatcagaattaattctcacagtgatactgaatttgatgttttaaataaaattttgagattgaaccttagataaaaacaatgattaaagataagaataattgaatgcgcaataagaaatttgagatatgaaaaaaattaatcagagagtgtgtggttgcttttcggagttgtgtacttcacgttnttgttttatttttcttcgtacttggtcggaaatgattctggacgggtattctagtgggtgttggtatacagtagggcccttgcccagntntattatttacatattttttta

SEQ ID NO: 120474 - DNA, 106 bp, Glycine max
  Clone ID: PAT_MRT3847_79797C.1
cacgctaaaccccgtctccaaaaatataaagtcgcatcgcggcgaccgggattgtaggtatcgcggttactttatcggcgtccgataacaccacaagcctttgacg

SEQ ID NO: 120475 - DNA, 375 bp, Glycine max
  Clone ID: PAT_MRT3847_79798C.1
tgaagtcacagtctctagagttgtacatccaatgttggattggaattttactgggtgcctttgttggcatctttcgtggtgctttatttgattgaaagagttctgggaattattatgcattgtggaaaccttcatgctgagaatgcttttacaggaagctccagtgcttgggaagccaacaatttttaccagtgatagtgtgggtgaaaagatccagtgggctcaatgtgaagattgtttcaagtggcgcaaattgccagcaagtgcgcttcttccatcaaaatggacgtgttctgataattcatgggatccagaaagattttcttgttcagctgcgcaagagctgacagcagagcaacttgagaatttgctacc

SEQ ID NO: 120476 - DNA, 425 bp, Glycine max
  unsure (1)..(425): unsure at all n locations
  Clone ID: PAT_MRT3847_79799C.1
cccccccccccccccccnccncccccccccccnnnnnccccccaacttgggcgccctggagggaccggggccgggaatatcccggggtctgacccacgcgctccgctgtactcggtgatgacaggtgcactccctctatggatcatctactaacatcatagtccctgatgaggctaggncttaactattagcccaagacaatgagctgacagtacaggaagctgacaagaacattgggatctggaggatccatagatcgaccacgggtctggaagctgtcggaggagaaggcaccggcatgatttgtatgataatgcgtccaggcgaggacagttcccggggcactaagatgctgggagatgaatggggaactgccttcagacatagagcgtagagagaaccgacaggctgcgatgggagccatg

SEQ ID NO: 120477 - DNA, 969 bp, Glycine max
  Clone ID: PAT_MRT3847_7979C.1
cacggctgccacaagccgacacaacgggggagtctctaaatttctaatgtctttgtcctgtccttccttttccttgcaaagtagaaaacgaaagcatctccctctctcctaagcaagcaattgcccttaaccctcaaaatcttcctctttctctcacagccattgattctccatggacgaatcggagcaatacccgaaggagtattaccctaacgatcaaacaatcaccagaagagtctcctcgtcctcttcgacgaccagcgtccacgtgacagccctagacggcctggtgaacgtcaactccctcttcacaatcgcagtgttcgtgggcctctccctgaccaccccgggccagcgcagcctcgagaaccgctcctcctgcgacgccggtgtcgacgtggccaagaagcttctcgtcttcgaagtcgtctccttcagcttcttccttttctcgtcgctggtggcccaggggctgaagctggcgctgaacctgctcaacagcaaggacgccgacgaggccttccgggcccacatcaacctgaaagccctaaggctcggcatgctgggctccgccattggctccgtcatgggctgcctcttcctcgtcctgtccatggttaatgtcatcgagatccgattgggaatgctgtcgtgcgggagcaaggccgccgcgcacgctgtggccaccatggtcgttttggtctcctccgctctcgtgctttatatttccactgctatctatgcttttactcgctgaaacttaacaaacaaacaaaacagataaattcgttatttgtattttatgtgaagctttgttatggttttgggttttatgtttgatttgttctcgaatggccgttggagcgaccaggtggagagactagagaggcgcaatttagctgttgctctcttgtttggtttcttttattgatagaaaaataaaaatgagttatttgcggaaaaaaaaaa

SEQ ID NO: 120478 - DNA, 710 bp, Glycine max
  Clone ID: PAT_MRT3847_797C.1
cccgcgtccgaaaacacctctgttgttgccttgtccgtttattttctctccaaaccagagagcgaccgccggcgagtctcacctcgccggaaattcgctcttcctcgccggaacctccatttttccctttcctattgcgcttgctttttcttcccaccggctccttcaagaggagccgtttccgtgcaatagttttgttgcttcttttttttttttcgttttctgagcgcctgagattgcaatgcagagggaaggaggttcctgtcgcggcaagaagcgtgggatctctcgtttctgaaattcctatgatgtggagcgtttgagagattcgtttttttcttcttcttttttttgtctctttctctttgttctcgagtttctggatgaggagcgcgctgaattttgtggaggagaagtttttgtgctagcgagggcgtgttgaaattcagaagatgtcgcacatagagcttgacgaaaactaacaaggaaggaggttttcaggatgccttctgaaataatggagaagaggggtgtttctgcctcatctcgctttttggatgacatttcctatgtttctgagaagatacaggattacggaagccaaaatttattcatgaccattttctacaagggaagagtgaaatggctgcatcacctggcatcatttttaatacttcgtcaccccatgaaaccaatgcaaaaacaggctt

SEQ ID NO: 120479 - DNA, 1270 bp, Glycine max
  Clone ID: PAT_MRT3847_79800C.1
acttcaatagaaaagtaaagaagtaatattgggaaatttaatagaaaagttgaaggtaaccagtaaccattctaaaactaaaacagtttcatcccgaatcataggggagaaaaaaaaaattcaaaaatagcctgttcattcaaatgaaaatcttctaggtgtatctccccattttgaaaatatcaagacatccagattcctgaacctgtcagttcacgatctgaagcagaacctgggttagctagcttctgaatacgggaagaaaattcttcggccttttcatctatccacatcaaagaagttagttgattatttagaattcgaacaactgcatctaatggagtcattccatcaagggtatcatgctctccaccctggttcgaattaagggattggataattgatttgatttgttcagtcatctgctcaagttccctttcaatcaattcagattgttcatacattgcatctcttgtagatgcagcttcatcatcaaggagtaatccacgctcatccttgtaaatacactccgcttcttcctccatactttgtaaagccttatcaactttttcagcctgctcttgctacaaggcccttggttatccgtgcattttgtgaggctgactgggtatcggatgtggatgacaggcattccacctcaggggctgcaatatttcttggtccaaacctactatcttggtggtcctgcaaacaaaaagtcacagctagatccagcactaaagctgaatattgcagtttagctcaaacttccattgagttaacatggattcatgctcttttaacagaattacaagtaccattcactactcctgtccttttctatgaccaccaaagtgttgtgtccattgctcacaaccctgtgttccacagtcgtacaaagcacatggaagttgatgtcttcttcgttagagaaaaagctttggccaaacagctttcaattgtacatattctagccttagaccagtgggctaatgtgctgaccaagcctctttcttcagcaagatttgagatactcaacgactgggacagtccttactctgctcatgaggtccattcctgatcagccgagcaatatgtactctgcgatcaccttctcggtggcatcgaagaggtaaaggctaattagatctgacagcagagacatctccaaaatcaagcaaagacccttctttcttcaaagagcagaaacagatctcttttagagaattctgagattcctcgagccgaatcggctcgagcggctagagcg

SEQ ID NO: 120480 - DNA, 829 bp, Glycine max
  Clone ID: PAT_MRT3847_79801C.1
catggtggaaggtggctatttaaaaattggtatttcattctttaccattaagtcttacaatatttcatttcataacgaggtttttacttcaatggaaaagtattgaagtaatattgggaaatttaatagaaaactttaaggtaacccgtaaccattctaaaactaaaacagttcatcccgaatctaaatacaaaaatagcctcttcatacaaatgaaaatcttctaggtgtatcatcccattttgaaagggttgatatactgtacaatttgaaatatcaggacatccagattcctagacccgtcagttcacgatctgtagcagaacctgggttagctagcttctgaatacgggaagaaaattcttcagccttttcatcaatccacatcagagaagttagttgattatttagaattcgaactactgcatctaatggagtcattccatcaagggtatcatgttctccaccctggtttgaattaagggattggataactgatttgatttgttcagtcatctgctcaagttccctttcaatcaattcagattgttcatacattgcatctcttgtagatgcagtttcatcatcaaggagtaatccacgctcatccttgtaaatacattctgcttcttcctccatactttgtaaagccttatcaacctcctgttgatgagtctctatcaactccaactgccgctccaaatttgactgtgtctcaactacttttgccacttcaatctcaagtctcaataaaacatcacgattgttcaaaatcctccgatcccattcagctattgcatttgcttgttttttaaattttccagttcgc

SEQ ID NO: 120481 - DNA, 512 bp, Glycine max
  unsure (1)..(512): unsure at all n locations
  Clone ID: PAT_MRT3847_79802C.1
cagacttatgcaacgttatacgaaacacacattaagatcatttccattcctgttaaacattatgaataaagcgaaaataaacaacaaactgatccggggtctccacaagtaaaagcttatgtttagattatattattccaggccgaaataattattgggaagaactttgtaggcgtgccttgatccacgactcgagatacagcagctcctcattgtttatcgtgtggcctagaccaggataagcctgccatcacaacaaatgtcaatgtggatgatggccacaaggggggttattggacaaataaccaaattgtttaaaacttagaattcaccttaaactcgcatcccacaccaattttttcaaggaacgggggacctgcttgtccggcctcaaacattaccgttctatcaaccagcccatgggaccatagtaatgggtgtctggatatttatttatatataantataatagatcaataaaaatagaacagaagacaactgcataccgcaaa

SEQ ID NO: 120482 - DNA, 358 bp, Glycine max
  Clone ID: PAT_MRT3847_79803C.1
caggggccgccagaaagttccctatctgaggcaaaggatacccaccttgtttatctttttgaactgaccaagacacgaaacccctatcataaatcaaggtcgggggccaagggggaacaagttcgtgccacattttaaaacaaacgggacaaaattacgcatacataaacatgcgccttaaagagaccattgagcagagggatatgccctgggctgatttagaaccatgtaatgactcctgtcttgaaaggacaggtccaactcaccgtgaaagtggctactgagagggtgcgaaatctgacctggacctatatcagcgaccctctcaggcgaacagaggccagaataaatgcgctcg

SEQ ID NO: 120483 - DNA, 1074 bp, Glycine max
  Clone ID: PAT_MRT3847_79804C.1
aattaacaaagagaagggtggtactggacacgggttgaagggtagggatgaaatgagagcgagaggagatgaagctgataaagggcagtgttgtgttaacaatcacaatcacattaagtagcgccattctgttgctactattgttcccacaaaaccaaaagccatcttcttcttccatgtcgagggcgcgaagctttgttctgtggcttcacggcctgggtgactctggtcccgccaacgaacccatcaaaaccttattcacttcttcccaattcagagacaccaaatggtccttcccttctgccccttccgcccctgtcacttgcaactatggttctgtaatgccttcatggtttgacattcttgagattcccgtggcagctgattctccaaatgacgagagtagtttacttaaagctgttcgaaatgtgcatgctactatagacaaggaaatagctgctggcataaaccctaacaacatatttatctgtggattcagtcaaggaggtgccttgaccttggctagtgttctactgtaccctaaaactttaggtggaggtgcagtctttagtggttgggttccattcaattcatctattatagaacaaattacaccagaggcaaagcagacacccatactatggtcccatgggctggttgatagaacggtaatgtttgaggccggacaagcaggtcccccgttccttgaaaaaattggtgtgggatgcgagtttaaggcttatcctggtctaggccacacgataaacaatgaggagctgctgtatctcgagtcgtggatcaaggcacgcctacaaagttcttcccaataattatttcggcctggaataatataatctaaacataagcttttacttgtggagaccccggatcagtttgttgtttattttcgctttattcataatgtttaacaggaatggaaatgatcttaatgtgtgtttcgtataacgttgcataagtctgaaaattttcacgtcaatttgcgaaggcgcgcagaggggaaataatcttcactaatagtatgtgtgcgaccttaatatttaggtctcgggggtc

SEQ ID NO: 120484 - DNA, 948 bp, Glycine max
  Clone ID: PAT_MRT3847_79805C.1
cagatgcgaggattggcaaatattcggaagataaaagttctttgactcgggcagctgatccatagaacaaatcaaaatgatcctcgaaatcacatgagcagaagtggagccaagaccaacatggaggaacaggtgtcagtatctggaagttcaaatcagaaaaacctcggttttggaaaccccctgctagaaagtgatgatgtgtcattccctgaaaacagtaaatcaggatcactgtccactgattcagacatccatcattattatgaaactaaagtggcttccttaatgagaaaatttggcattctggagggacaattggcagcggcattagcaagcagagaagctgctgagaaaagcttagcatctgccttcaaaagcaggcaggagatggagagaaaattggctgacacactgaaggagatggaattactgagagagaagctggtcaatgcagagttagctcaagaagaagctaacaacctatccaacatggtccatgctgacaatgtaaggcttgagcatgatgtggcattcctcaaggctgttttagatgatactcacaaggaattgcactcaaccagaggggttcttgcggcagaaagaaccagggcactccatattacaggttgaagttttccatctcaaacagagacttcaatcaatggaaaatcgagtccctactcccaggaaaccttttcaagtgtagtgttttgaaatgtcaaataatgtcatgccaatgaatttcagcataaatgatgaaacaatactcctatattatgaggacgcagtctattaaggaaagggcaacttgagggtggcgaagaagacttggatgggccaactccaaagaaaaagaagcacaattaatgaaacagcccttcggcggctaacaaaaatggatctgtacatatgtaatgtgtactaataatgaattaccatttcctc

SEQ ID NO: 120485 - DNA, 260 bp, Glycine max
  unsure (1)..(260): unsure at all n locations
  Clone ID: PAT_MRT3847_79806C.1
gctacttcctactccaaccgcactncctgctccgcaattatcatgggcaaggtcaagatcggaatcaacggatttggaagaattggccgtttggtagccagagtggctctgcagagagacgangttgaactcgtngccgtnaacgaccctttcatcaccaccgattacangacatacatgttnaaatacgacagtgntcatggacactggaagcancacgangtcaccgttaaggacgagangacccntctnctcgggga

SEQ ID NO: 120486 - DNA, 358 bp, Glycine max
  Clone ID: PAT_MRT3847_79807C.1
ttttctttttttttaagccaattataaaagtcccaattttattgaagggagcccatcctggtttttttatgcctctcataacaaaccccattcacttactttatgaaccccaacccacccaccccattaaaccgaaattgaaaatgtttttttaaggggttccaaaagaaaaccctaaccccacaaacccctaaaccaccaccccggaaagaaaagaagaaaaaaaaaaggccaaaaccacccccaaagaaattaccccgattccaaaaataaagcccgcggtcaaccgccgctaaaaaaattgacccgaatttgccaataccaccggcctggaaggccctgccgaacctgaacccaa

SEQ ID NO: 120487 - DNA, 403 bp, Glycine max
  Clone ID: PAT_MRT3847_79808C.1
aggggatagttcgagccgatttattgttattgacctatattgagattactacgggtgagccaaataaagacggattctagagaaacatgctttttgtggaaaacaacatgtttaggatcgtgattgattttgactttgacaacgaccattgtcttatagccacagtgactactgggacatcgacaaatttgatttaaccgattggatctaccagcttcttgctaccatgccttggaactttatcatgggcaggatgatgatggagctttattaataaggtgagaccctataggacatctgagatgttttgggtaagactaatttgcatcaaaaaggaatacacgctattcacgttgcttatgctttcgggagcgatttgacgattgtgagagattcatacatg

SEQ ID NO: 120488 - DNA, 534 bp, Glycine max
  Clone ID: PAT_MRT3847_79809C.1
ccacgccgtccgcacttcactgaagcatgccgcgttctcacttcctggaacgccactccgaaaaatgtcacctcggaattcaattgcacttatctttaagggctgggtgacgcttgcatagcgccaatctaagagttcacacctataccttatccatgctatggtaagaagcccttgataatccgaagcacacttgaagcacctagttggttacatcattcaacatataatgcataatgtgctgaggcttaaagctctacactgctccatgaataactcactcttaatagtattatttccttatcatataatatggaggacggtatagcatactttaacattgcatgacaagatttgatcccatacatccaaatgagaatgcatgaaaccatactgctgccaaaagccttgcggcctgctcatagaagtgattgatagacacctggctttagctgacttaagccttgacgagcataacgttgttgatgctgcatgatgctgtcccaccgatggcgtagccttgcatataaagca

SEQ ID NO: 120489 - DNA, 645 bp, Glycine max
  Clone ID: PAT_MRT3847_7980C.1
cggggatccaaacacactttaaatagacctaaaatcctctactcgcgtctaactctagcaaacccccctctccttgcctttctatattccatagccatgttagattctgtgattgagtacatcactcaagcagcctctagctatgcttttattttctgcttctgcaatttgatcatagtcatcatcctagtggacttgaagcctaagcttagttttgatcaagagagtgaagaaatccctttgtccatgcccacaaacataggtatacaagaagcaaattccaagagtttagccaacaaaaacacattttctccacaagcaatagaagtgtcacaacatgccaaggaagaagtcgtggtggacaaagttgaaaatgaaggtagtgataattgcaattgcaacagtactgaggaagatgatgatgagctgaagagaagagtggaagagtttatagagagagttaatgaaggatggaaagcagaacatttgagcacatcaagtctgctgtggggtgagaataaggaacttttggagtagaattgtgatctattttggaggtggttgggctgttcccctcaacggttggttgtgattcgagactgatttttatggtccggtcctatcattggagaaaatgtctaagaa

SEQ ID NO: 120490 - DNA, 329 bp, Glycine max
  unsure (1)..(329): unsure at all n locations
  Clone ID: PAT_MRT3847_79810C.1
tgagccacgcgncgnaagcncggagtccngcannnacnngnanggnnggangcgagngncggnanccnnncnnggagancncnggagcaancannannnganccaagangnncnnggancnnnnagngnnagngnnagncgnaagcnnagaaccnangcnnnnagcgnatgngngcncgaggcacgagagacaannannncnnaacaccacgaangncncaaagcnaacnanaananngagcagtcnccnncgaangntcgnanncgtananagaagaacannagccagnnncnancanncnngnnangaccgcaagancgcaggacaa

SEQ ID NO: 120491 - DNA, 255 bp, Glycine max
  Clone ID: PAT_MRT3847_79811C.1
gggtggtggaaacaaggagggaaaaaaggacctggttacagtcgtttttttttacggggcaagtcagaactatccagagcagagtgacaagcaagtccaaggggaaacttataaagctagagtccatgcttgacccaaaaggagctaaacaaaaacatactagaactatgaggggatctctttggaacaggactagcaaaattatgcttatttgcaaacccgtgagttggatagtggagaggaattccgggctta

SEQ ID NO: 120492 - DNA, 2199 bp, Glycine max
  unsure (1)..(2199): unsure at all n locations
  Clone ID: PAT_MRT3847_79812C.1
aaatgatatcacaatgaaatcatttgtgtcactggatggactgccaccccaatgcaggatgttcaggttacaattgattggntttttctttttccttttccttttctgactgtaacactcattttccttcccctgtctcactactcctataaatttatatactatataatataatatatatatatatatatctatccatctatcttatgcattgttatttatcacaaaatttaataatatcacaccttccaacaacccctgccactgtaatcttgggctccagaggaagaagaagatgaacgtggatctggaatcattggcagaggcaacttccggggccataggatcactgatcagcaccactattctctacccccttgacacctgcaagaccaagtaccaggctgaggcacgttcctcaggtcgaacaaaatacaggaatctcactgatgtattattggaggcaatatctaaccgtcaggtgctttcactttaccagggccttggaacaaagaatcttcaatccttcatttcacaatttgtctacttctacggatacagctattttaaaagactgtatctagaaaaaagtggttataaatccattggaacaaaagcaaacttggttattgctgctgctgctggggcttgcacagccattgcgactcagcctctggatacagcctcttcaaggatgcagacaagtgaatttggaaagtctaaagggctactgaagacccttacagaaggaaactggagtgatgcatttgatggcctcagtatttccttgctgctgacatcaaaccctgcaattcagtatacggagtttagatcagcttaaacaacgagcactgaagaataaacaagacaatgctgataaaggaacatctccagcgtccctttctgcatttatggcctttcttttaggtgcaatttcaaagagcattgctacctgtctaacatatccagctatcaggtgcaaagttatcattcaagctgcagactcggctgaaccaacctccaaaacaaagataaaatcacagaaaacagtgtttagtgttctctatggaatatggaaaagggagggcatactgggatattttaaaggattgcatgctcagatcttaaaaactgttttgagctcagcactgctcttaatgatcaaggaaaagatctctgcttctacctgggtgcttatccttgcacttaaaaggtacctattacttccaaggggtaggattaagaacttgtaatttatagtagcagttactggaggaagaagcttcaattccttgcggataacgaatgtggttggagtgccaagtgagcattttaaccgatacatgcatctcttcaaagttgagacgagattgttttggtggcttctcttcggtcctcttcccgtggcttattgatatatagaacaattagtccaggaatttatgcaaaagactgatagagcaaggcaaagtagagagtcttaacaataaatggttttttttttataaatatttcttgtttctaataaaggcttgcatcacttatttattttttgtagttagttcttttatataaataagcatcctctttaatgtatgtagtcacttcagttgcagatacaaaatatttttgttgtttttatgtcgaatttgcgtcttagaggagttgatactgatgtactagtctctgcatatgagcccattgttataaaccctttgagtgaaagtgcagacacagttggtgctggtgtagctgttccagctgctcaagccggatgcatgcccatggatgaggtctttaaacttgctgttacaagcttcagggttcatgactggggtcttttttgatgcaaagaccatgctaggagcaagttaatgctcaactatgtggagttcaggcttaaaattttttatttgagtaacatttggaaaagtaggggaaatcccattttgatcactgtatattcctcgtgttttctttcttggtccataagtactcttttatttttggcatttggtcatatttcatctagttattaacttactaggattgtcagtgacttgagaataatgtgtttggaaatgtcagtgacttttttccttctacaaggtgctggattgctgtttttaataatagttcacttttgaagttgctttataaaaaaaaaaaaaaaaaaaaaaaaaaaaaaaaaaaaaaaaa

SEQ ID NO: 120493 - DNA, 230 bp, Glycine max
  Clone ID: PAT_MRT3847_79813C.1
ggtggcctaaaaaactacctgaaaatctcactgagtcgaggcggttgctccattaggcacacgaacttatgatgtcacaaacaaagcaactaaacacttccgaatacagtgcggaaacgagggggccccactcctgaagatgttattatactgaccataattcccttggcaccatgctaatcctgtatggcaatttttttatttacaagaaaggaaaacaaaaaagaaaa

SEQ ID NO: 120494 - DNA, 422 bp, Glycine max
  Clone ID: PAT_MRT3847_79814C.1
gtcgtattgtcgggaaacgctccaataatgaaaggagcttcttggcatattctcgcgacagcctttgtgatgatgaggcaagattgaggcgtgagaggtcccaccgcttggtgtgatcgtttagaaggatgggaatctctatgaaacatagttgaacagtggagtgatgaagaccatctggcttggcaaacacagtattgtgctaatgcataaaaaatgagaggcgtcagtagagatggtagagaaagaagagctgcaccaggctaaagctccaagcttgttctgacaatccttcaaaaattttagatatgggagagagtatggaagagattacttaatcagtgttcatgaatatgacaccccttactagaagtggacctaagttgaaaagctgactagctggtcttattatcaccattact

SEQ ID NO: 120495 - DNA, 150 bp, Glycine max
  Clone ID: PAT_MRT3847_79815C.1
caatggtactgctgcaacaagacaacaggagggtacagcagcataaagaccatagaatggtacggctgagattaacactactgaacggtaccgtcgtcatcagaccacagcatggtccagctgttagacgactacatatgggtcaggctg

SEQ ID NO: 120496 - DNA, 554 bp, Glycine max
  Clone ID: PAT_MRT3847_79816C.1
gcaccaggaaaaatgttttttttatcaatatatttgaataaatattaaatatttaatagtattaaatatttgtataaatattgttttgaagtttaaaaaatataaaaattaatatctttgttcatttattaatatttaaaaatattaaaatagttatttataaaataataaagttgttatttattagaaatattaaaaaaattactttgatcttgattatatattttagtttgttagaattattgatttcaactaaaaaagttttaaaaatgaatttctaccttgatttatgaatatataaaaataataaaataattatttataatataattaaaaatgaattttactattacttgctttattgttgtacaatgggtaacattttgctccttcaatgccacaattctttgatttgattattaactttatcatatcaccaataataatcttctcatttatagtcagtcgatcaacatatggatgtctaactaataacttagctaatgcatgattatgactctcacgtattaacttcttcatccatccttcacctc

SEQ ID NO: 120497 - DNA, 174 bp, Glycine max
  Clone ID: PAT_MRT3847_79817C.1
atcatttatcatactcacgcattgcatttgcctaagtcatcgcattatcatacatcttcatctaacatgtttttgttttgccaattgcatacattctattttcatcgttcatatgtgatgttcactaatgcttgatcctgacacatagttgctcatgccttgcattttcctcac

SEQ ID NO: 120498 - DNA, 499 bp, Glycine max
  Clone ID: PAT_MRT3847_79818C.1
cacaagttttgttctttcctagcaattcggcgcaatcgtcttctgcttcaaggtttttttctccctccctctctctctctgattgtgcttttaagcattaccaaatactgactaaacttctaataatttgtctccactcttgatcgtggtaaatcttttatttttattttttattcttgaggtttacgttgaaagatttttagggtttttatttggaaggcattggttgttgcagcttgctactgttggagatttggtgatttcccaatttaattttagtatatgtcaatgctgcagtcgcaaagttgcaactttcgtcgtatcttttaaaaaaaatgaagcctttgcatgaatgtctgaatgctgattcatagcacaagatctgattccctgtgttattttgtttgtgcaggaaggagagcttgttattctctatcaacaaggaaaatgtcagggtatgattggttttctctcgtgagtgattgtatagtataatgat

SEQ ID NO: 120499 - DNA, 360 bp, Glycine max
  Clone ID: PAT_MRT3847_79819C.1
actacggacggcgggagggggcagcatatatttccatcatcggagtgatactttcccttcctgcagataatattatttaccgttgcatacacatgcctgcccatggaaagaatgtggatgacatttatctcaagtccaacacagacgtcgtctggctgtccctcacaaattctactgaaatactcttttacgccgtaccacataactacacatcctttttaattcttgtacgcatacggcacgtctgctggttcaatccatcacataagacctggtgaaggttcaccacttgcgacattaacttatgcgaaaattcaggctgctttttgagtaaaagaatgtagtaccgcaccactaaaa

SEQ ID NO: 120500 - DNA, 390 bp, Glycine max
  Clone ID: PAT_MRT3847_7981C.1
gcgatctataactagcgggggtttttttcggacgtgcgttccggcacctgcgagtgcacgagctttacctacagagagatgtattcgtactagacttcaatgtagtgatagctataacttgtggctaattgtaattgacaaacaatttcatgcaccaaacaaatacgagccggaaattgtaaatacaaagcaaggctggggcgatagagtgcgcacactaacggagatggtctttcagtgagttaacacttaagaaaacgtgtaaacccagcggcatctatgtttttgacaacaccagcgggggggctgaataaatatgggttgacaccgcctttgttgtttaacataatgagacggagaccagttgctcttaatgagcctcatggggct

SEQ ID NO: 120501 - DNA, 779 bp, Glycine max
  Clone ID: PAT_MRT3847_79820C.1
ctctaacataagcatatttatcttcaaatgttgaaccaaccaacggggacacttcactcgatcttaaccacatggttcctactaaatacacacatgggtaacatatataatagttgcgttatctaagttgtttgaacaagaggttgattagcttatgaagtgggtgtatgagttattgcctactttctaatatttatatataaatatattttgaacagctattaataaaaaaacttaaatcttcatgcctttctaacaccggcgagtttcattgatgcaggatggagttttggtggaagagttgcgtcgtctaagttgtgagaacaagaggttgaccgggatgttgacccacttgtgtgagaactacaaggctctgcaaaagcaactgagccaattgatcaacacgaattttgagcaattagacccaattgaatcacgcaagagaaaagccgagagtgatcaatggtgtaccaacaaatttattggtgttaataatgctgaatgcagctccatcaccgaggattcattcagaaagtacaaggacttcaactcctcccctaaggtttccaaagttcttgtcaagactgaagcatcaaataatagcttagtaagttcctaaaatttattgttgtttcctagtaacttgtattatagttttgtgtctatattgtgaggcttaattaactccaagtactaactgggaatcctgaatttgtttttttttttgggtataattaaagtatgtgatggacggatatcaatggaggaaatatggtcag

SEQ ID NO: 120502 - DNA, 330 bp, Glycine max
  Clone ID: PAT_MRT3847_79821C.1
tcgcttcgggcttggttctaacaggggggccttaaattaactcaacccaatgtttttgttgaaggggcaaaccttttcgccatgcaactagccagggcctaagacctccttatggttttaaaataagttctgggcctggatctgttggaaataatacccaaggttgcccctggggtaaacctttccccttccgacattgtttttgggttcccaacacacaaccctgatgcacccgttatgttggaccgaatattgcgcctctgggctggctacaatatcttttttttttcttttcgaactctccttcatggcagggttgaaaggctctat

SEQ ID NO: 120503 - DNA, 536 bp, Glycine max
  Clone ID: PAT_MRT3847_79822C.1
gcttctagtaactgaactaattatgtgctctacaacattagacagattgaatggaaggggttattgtgttattgagattccattccataggaatcatctcccctatatttcaaccctatgaaatgaattgaaatattggtgcacaatttcccagaattctttgataaccatggtgaaatgtatatatcttgatgaaatccaacaaatccacctgcaatctacacatagtgctgatagaaagaagcaaatagttggccatcttctaagactatttctgataattttgataaatcctgctatttactctgatgtatgtttacaatttccaaccatataatctaagataatttggtggtttatctgtccaatttctggataatgttgtgcttgagctgtcagccagaggaataatcatcctttacaggggagatgatgcaaccctgcaagtggattgagcacttgaattcagtattctccttccagttttccgttccacacatgctgtgatgttatcacccatgcgcttttttattctt

SEQ ID NO: 120504 - DNA, 317 bp, Glycine max
  Clone ID: PAT_MRT3847_79823C.1
tgcgtacggatggctcagacaagagaacgaatgggacctcagaccctagacgcgctactcgctttcatatctatgcaaacaattatgatggcgttctagaataaggtcatgaatgaatctttgcaggttactgctgaaatcacacatacccgtggtgcttgcatgctcaatagcatccgatgcatgccttctagcgagctcttcatatggaggctcggtcatcatggctctgaaggccatatctctaaaggatccataatctggctttgcagatgtgacctgtgccaccgttatgactgatatagacagggaaagat

SEQ ID NO: 120505 - DNA, 378 bp, Glycine max
  Clone ID: PAT_MRT3847_79824C.1
cgcgccataattgccgggacgaaccacgcggccgatcatgcgtccgactttatctatagggactgggagggttctgaaaggaaagtgctggacttgagaccttgtgcattaaggatcagacacttacaaatgaaatggcacagaacataatcggttggtctgtaagccaccacctaatgcaaaatttataagctaagcctgattcaaagcttggattgtcctgagagagcatgccgtatggaattgggatcttgcagaatatccagaatgaatccaagagcctgaataaatcactgaaggatgttgcgaccgaccatgaatccgaaaagaggcttttggctgatgttattccacctagtgacagtgaaggtactttat

SEQ ID NO: 120506 - DNA, 1244 bp, Glycine max
  unsure (1)..(1244): unsure at all n locations
  Clone ID: PAT_MRT3847_79825C.1
attcatagagatctcaaagcaagtaatgttttacttgatgaaaagttcaatcctaaaatatcagattttggaacagcaaaagcttttggaggagaccaaatcgaaggaaacacaaaaagagtagttgggacttatggatacatggccccagaatatgctgttgctggactattttcaatcaaatcagacgttttcagctttggtattttactgttggagattgtatgtggaataaaaaataaagctctttgtgatggaaaccagattcatagccttgcatggacactttggaaagagaaaaatgctttacagttgattgactcaagcataaaggactcatgtgttatctcagaagtactgcgatgcatccatgttagtctcttgtgcttgcaacaatacccgggagataggccaaccatgacatcagtaattcaaatgttagggagtgagatggaactggttgagccagaagagcatagttttttatcaaagcagaatttaggagtgaaggattatttaagctttgatccaaaactaatgacttcggaagttgaatgaaccaattcttcattaatcggcatttgaaagttattgatccagcttagcatactccaatgacgtaatattctacttgaagaaatgattgagccaaacataccagaataaggtttgacaagagctttagggggatgccacaatgacggaaacttgaatagactagttgagactgctggaaagccggccccgaagtatgcagttgatagatatttgacaatgaagtctgaggttttcagcatgggtataattttgttggagaacttatgttgagaagaagataaatctctttgtcacgaaaaccaaactcttaaccttgtaggttacgcatgggcactttggttagtataaataggataaatttttattgtcagaaagtacagcgccagagtttggttatctgatttttctcaactagtttttagttttctttgttgttcttagagttttcaattttcactctccgccatcagtggctaaactctgtaatcaatctttggattttaatatcgtttgtttgctgacttgggtttcttcccaaggaggattttgaaagaaggaaatctaaaggaaatgacttccaatgatgaattaaccattagcttatttagtggtcggtgaaaatgtagaaaatatctttaatagcattatatatatatatatnnntatatatatatatatatatatat

SEQ ID NO: 120507 - DNA, 278 bp, Glycine max
  Clone ID: PAT_MRT3847_79826C.1
aacaattcattcattgagcctcagtttcctgtacctcctctgaagtcaaccttcaacttgaccttgaattttgccaagcaggagctgattcttcctccactaataggcaaatattttcaagaatcatttgttagagttttaagaggagaatttaaaagtatgagataaaaataactttacctttttctctaaatgtgatatttctctttcatcatctagttagatgaataaaaacagtgtcttgaagggaaaagtgaaggtaagcacaaaactttaat

SEQ ID NO: 120508 - DNA, 428 bp, Glycine max
  Clone ID: PAT_MRT3847_79827C.1
ctggggaacagaatgaactgtctatgttaaagctgagatgctaaaactaagaggttactagttactggtataatttatgttattaatttaattgatttgaatttaaaaaaaaaaaaataaaaaaaaaaaaataaaaaaaaaaaaaaaaaaaataaaaaaaaataaataaaaaataaaaaaaaaatatataatacaaacttatagatcttaaaaaaaaaaaaaaatggggtgcctcctttttaaatgactttgactcaataaaaatatattgggaccgattttaaagggaaaaaaaaatttctttagggggctaattaattattggacaaaaaaatgaattttggacatctatttgaaaaaggtagcatctatgaatatccccaaacatattagagctgggagtaataaagagaaaagttgggggcttt

SEQ ID NO: 120509 - DNA, 947 bp, Glycine max
  Clone ID: PAT_MRT3847_79828C.1
atagttattttactgtgtgagagagaaaattaaacatgggaagaggaagggttgttctggaaagaatagagaacaagatcaaccgtcaagtaacattctcaaaacgcagaagtgggttgctgaagaaggcctttgagctttctgtgctatgtgatgctgaagttggccttatcatcttttctagccgtggcaagctttttcagtacagcagcactgatattaccaaaatcattgagaggtatcgccaatgtcgttacagcaagtcacacactggtgattcattggaacacgattcacagagcgcataccatgaattcttgaaattaagagcgaaatatgaatctcttgagcggacacaaaggcattttcaaggagaagaccttgagccacttagctttaaagatttgcagagcctggagaagcaactagacataacgctcgcactaactcgacagcaccaaacgaagaaactcatggcacgagcggatgaattacgcgaaaaggaaaaagatgaattctcgagtctcatccttgacaataacaattacattcaaatgcatgctacacaagttgatcaatttgagtctgagacagcactaaacacatgtaggtttcaacatcaagaagttgtttctaaggaaaaagcaattgataccaggacagagcatagtcaaagcagtcacaacaaaaacaatggatggctgtaatgaatattcatttaatttacatgctaaaaaaatacctatcacaataactaatgggataatgcccattattggtattcacacaaatagtttatataaagtaaatgttatttctactaaacacacattattcctaataagaaattatgtattttatgcatcagaaaaggggatgaattgtgtatttcatctatcattgtataagttgtcattttaaaaaaatttcttaaatattgatatttt

SEQ ID NO: 120510 - DNA, 483 bp, Glycine max
  unsure (1)..(483): unsure at all n locations
  Clone ID: PAT_MRT3847_79829C.1
gttttaaccgcacagttacaaagatgcgtgaacacatccgagacttcctcgtccagatcagggaagaagccggcgacgacactgcggaccttttcttggaagagaaagaggctgagatccagcgcattcaatcgttaaaacaagcgattcccggggttagaaatccgaacgaattgttggaggaggacatggtctgacaatgcgtccgtcgggtgggctcgtccctgccttccccgtttttgttttttccatttgtccatcctgacattaaacgatcgttcgtattttttctctgcgcccatttgaattcctttcgtctgtttttgctctccttttcatgttntgtgtccgttctgctgagctttcccctgcttcttctaatggagtttgtttctttgcttctgattgtctctactcgtctgtttggtgagagatttgatggtttctgagtgtgtttcttcatcccgtttggtttatgaattc

SEQ ID NO: 120511 - DNA, 627 bp, Glycine max
  Clone ID: PAT_MRT3847_7982C.1
cccacgcgtccgacggctagacgacagaaggggccggtttcccgaacgatttgatggtttggaatgcatttcccaagcaacgagtcttcggttcgaaaccagcagagagagagactgagagagaaaggggggaaatggggtatgtgatgagagtgagattggcgtcgttcttcaccggggctgcagtggcgtcgtttctggggctctacaccctccacaaggattacaaggtcgcgcaccaatcctttactcaacagatgaatgacctccacaaatcgctggaaggtcgaatttcttccttggaaaaaatgaaacaaacggaaacgtctgaacaggttgaagcaactgaataagagttcagaccgaagcatccattgtggaaaaaaaattgattcaatgtacttactatgaaaagtaactttttggtttgttttcctgatgaataagttcaatttgactcattttatggcacctcatctgactgaactttttcgtctaaaagagtacagatcagttgtgtcaccaaatgtagtttggattattattttggccaagagattttagctttcaccgcagttatacacggtaattaatgaatatttgagtgacatttttttccctttttaa

SEQ ID NO: 120512 - DNA, 689 bp, Glycine max
  Clone ID: PAT_MRT3847_79830C.1
gtgagtatttaaaattaaacatgggaagaggaagggttgttctggaaagaatagagaacaagatcaaccgtcaagtaacattctcaaaacgcagaagtgggttgctgaagaaggcctttgagctttctgtgctatgtgatgctgaagttggccttatcatcttttctagccgtggcaagctttttcagtacagcagcactgatattaccaaaatcattgagaggtatcgccaatgtcgttacagcaagtcacactggtgattcattggaacacgattcacaggcattttcaaggagaagaccttgagccacttagctttaaagatttgcagagcctggagaagcaactagacataacgctcgcactaactcgacagcaccaaacgaagaaactcatggcacgagcggatgaattacgcgaaaaggtaagttgttaaatgctaattaacttgtttgattttactccgtgtgaagtttttctgtgaatttctctctatgtttatgttttttcttgtttacaactcggggctgcagaagttattggctatttgtttttttttttttaaaaaagttattgtttatcttattatagagagaaaattgatatactttttaaagaagtggggctagacgtccaagtctctatcatccattataaaattggtctctttcataattagattttaacat

SEQ ID NO: 120513 - DNA, 416 bp, Glycine max
  Clone ID: PAT_MRT3847_79831C.1
tgcagtaccgtccggaatcccgggcaaaattctggttcaaactgcaagcaagtttgtggtgtatatggctctctaaagtgagagagatgcgttgcggataaaagggtattgcaaccattgattagaaaaccaataattaaaattggtacaacttctaagtttgacgtacttgaattatgtcatattctcaaccgttgattttctaatcaatggttataactgcacctactgtactgtagaggagctatatttgtgatccttaatacaccaaatcaattttctttaatacaatgttcacatgcttatattgtgatgacagatatgttgttgacagaatggatggtgatttgtgcgctaaaggtcttgatcctgataatgaatatacaaggcaacttattgatcatgttgtatctact

SEQ ID NO: 120514 - DNA, 728 bp, Glycine max
  Clone ID: PAT_MRT3847_79832C.1
ggaagaggaagggttgttctggaaagaatagagaacaagatcaaccgtcaagtaacattctcaaaacgcagaagtgggttgctgaagaaggcctttgagctttctgtgctatgtgatgctgaagttggccttatcatcttttctagccgtggcaagctttttcagtacagcagcactgatattaccaaaatcattgagaggtatggccaatgtcgttacagcaagtcacacactggtgattcattggaacacgattcacagagcgcataccatgaattcttgaaattaagagcgaaatatgaatctcttgagcggacacaaaggcattttcaaggagaagaccttgagccacttagctttaaagatttgcagagcctggagaagcaactagacataacgctcgcactaactcgacagcaccaaacgaagaaactcatggcacgagcggatgaattacgcgaaaaggtaagttgttaaatgctaattaacttgtttgattttactccgtgtgaagtttttctgtgaatttctctctattgttatgttttttcttgtttacaactcggggctgcagaagttattggctatttgttttttttttttttaaaaaaagttattgtttatcttattatagagagaaaattgatatactttttaaagaagtggggctagacgtccaagtctctatcatccattataatttggtctctttcataattagattttaa

SEQ ID NO: 120515 - DNA, 1212 bp, Glycine max
  Clone ID: PAT_MRT3847_79833C.1
gggggaaaagcgtagtcatcagtttgccgatagaagtagaaaatggaatcttgatcgtattatctttgttgctcatccattactccttctgcagtagaataatatataaagagagaagagtgcaatctagaaccacatagttattttactgtgtgagagagagagagaaaattaaacatgggaagaggaagggttgttctggaaagaatagagaacaagatcaaccgtcaagtaacattctcaaaacgcagaagtgggttgctgaagaaggcctttgagctttctgtgctatgtgatgctgaagttggccttatcatcttttctagccgtggcaagctttttcagtacagcagcactgatattaccaaaatcattgagaggtatcgccaatgtcgttacagcaagtcacacactggtgattcattggaacacgattcacagagcgcataccatgaattcttgaaattaagagcgaaatatgaatctcttgagcggacacaaaggcattttcaaggagaagaccttgagccacttagctttaaagatttgcagagcctggagaagcaactagacataacgctcgcactaactcgacagcaccaaacgaagaaactcatggcacgagcggatgaattacgcgaaaaggtgcataagttggaggatcttaacaaacaattggagtccaaggttttctctttaaataaccatgaaaaagatgaattctcgagtctcatccttgacaataacaattacattcaaatgcatgctacacaagttgatcaatttgagtctgagacagcactaaacacatggtttcaacatcaagaagttgtttctaaggaaaaagcaattgataccaggacagagcatagtcaaagcagtcacaacaaaaacaatggatggctgtaatgaatattcatttaatttacatgctaaaaaaatacctatcacaataactaatgggataatgcccattattggtattcacacaaatagtttatataaagtaaatgttatttctactaaacacacattattcctaataagaaattatgtattttatgcatcagaaaaggggatgaattgtgtatttcatctatcattgtataagttgtcattttaaaaaaatttcttaaatattgatattttacctattggcgtcatcattgtaatcagtttctagtagtagagagaaataattttatcctaaaa

SEQ ID NO: 120516 - DNA, 222 bp, Glycine max
  Clone ID: PAT_MRT3847_79834C.1
gctcccactcgtcctcccacgcgtccggtttttttctttgttatactaactctatgtcattaaccgtgaatgttgtattgcccttgggagtttacatgtcatttgtttgtaatattaaccagtagcctactttcttttttttttttggtccttaaattgttgtgggggggatgtcttttttatatatcctgttgtttttttattattttggttttgtttttt

SEQ ID NO: 120517 - DNA, 477 bp, Glycine max
  Clone ID: PAT_MRT3847_79835C.1
gggatcctctagagcggccgctgtgtttttttttttttttttttttttttggggacaataataacttttaattgggtatttctatgtttatacactaacagcatttacgagtattgaaattttccatgaagcttacaaataaacatagggcttaaaagttaaaagcctctagcatatgcatatgatctgtgccatggaaaaggatcaactaagagtgagttcattactagagagattatgaaataagttacatcttagacattctcggacaatggtcgatctgaagacttagcattatcaggttcaggggatccctctaatttgcgtttcttttcagggtataacagataatgttggcacatgaagaggatgtcaaagaatagagacaccagggatagcaatagttttcctatgtttccatagaagttcacccatgaattttgatcgattgattgcacagacatttttgcatagtta

SEQ ID NO: 120518 - DNA, 1123 bp, Glycine max
  Clone ID: PAT_MRT3847_79836C.1
gggggaaaagcgtagtcatcagtttgccgatagaagtagaaaatggaatcttgatcgtattatctttgttgctcatccattactccttctgcagtagaataatatataaagagagaagagtgcaatctagaaccacatagttattttactgtgtgagtgagagagagaaaattaacatgggaagaggaagggttgttctggagagaatagagaacaagatcaaccgtcaagtaacattctcaaaacgcagaagtgggttgctgaagaaggcctttgagctttctgtgctatgtgacgctgaagttgcccttatcatcttttctagccgtggcaagctttttcagtacagcagcactgatattaacaaaatcattgagaggtatcgccaatgtcgttacagcaagtcgcagactgacgattcattggaacacgattcacagagttcataccatgaattcttgaaattaagagcgaaatatgaatcacttgagctgacacaaaggcattttcagggagaagaacttgagccacttagctttaaagatttgcagagccttgagaaacaactagacataacgctcgcactaactcgacagcatcaaacgaagaaactcttggcacgagcagatgaattacgcgaaaaggttcacaagttggaggatcttaacaaacaattagagtccaaggaaaaagatgaattctcaagcctcatccttgacaataacaattacattcaagtgcatgctacacaaggtgatcaatttgagtctgggacaacactaaacacatgtaggtttcaacgccaagattcaaaggaaaaagcaattgataccaagacagacggtagtcaaagcagtcacaacaaaaacaaaggatggctattgtgaatattcatttaatttacatgttgaaaaaaaatatctatcaataactcaggggtgcccatgtattggtataattcacaaaatagtttatataaagtattatttctactaaacacacacattgttcctaaaataagatattgtactttatgcaacagtaaagaggaaaaattatgtatttcaactatcattgtataaattgtcattagaagatgttctgaaatattgatattttagct

SEQ ID NO: 120519 - DNA, 329 bp, Glycine max
  Clone ID: PAT_MRT3847_79837C.1
aattgcagttctgaaaacgaaggttttgtttgtcataaaaaaattcaacactttgcgccgcatcaacaacagcaacagaatcaggaacgaatccatgtcgctgcgggctctgaaggaatctctgcgaccttgctcaaccctaaaaccctcttcctcttcctcaattactcaaacacagccttattcaattctccgcgaaagcgattccctttttccaatccatagaaagccccctaaatcctccctttcccaccagcttcgccgcctcgacgattcactaacccaaacccactccaaaaccctacaacagcaacaacaacagcaagaag

SEQ ID NO: 120520 - DNA, 1255 bp, Glycine max
  Clone ID: PAT_MRT3847_79838C.1
ggcatataacaagatggcttcttttcatatccttgtgctcgtggttgctatggtcacattgatgatccctacgaatgcaaacctctctccccatttctatgataaagtatgccctcaggcattgccagtcataaagtcagtggttcaacgagcaattatccgtgagcgacgcatcggagcatctcttctgcgcttgcatttccatgattgtttcgtaaatgggtgtgatggatcaatattgctagatgacacccgaaacttcactggcgagaagacagcattgccaaatcttaattcagtcagaggattttcggtggttgatgaaatcaaagaagcggtggacaaagcctgcaaacgccctgtggtctcatgtgcagatatcttggccattgcagctcgtgattctgtagccatatatgggggtccacactattggtaccaagtattgttgggcagaagagatgcaagaactgcaagcaaagctgctgcaaattccaatcttcctcctccatctttcagcttctcacaacttgtttccaacttcaaatcccacggcttaaacgtgagggaccttgtggccctctctggaggccacaccctagggtttgcaaggtgcagcaccttcagaaacagaatctacaacgcaagcaacaacaacataatagacccaaaatttgcagcatctgcgaggaagacatgtccgcgaagcggaggagacaacaacttgcatccatttgatgctactcctgcgagagttgacactgcatattacacgaatttgctgcacaaaaagggtcttctccattctgatcaagagctgttcaagggaaaaggcacagaaagtgacaaattggtgcaactgtatagtagaagccctttggtttttgctagagattttaaagcttccatgatcaagatggggaacatgaagcctctcactgggaagaagggagagatcagatgcaattgcagaagggtcaattaattaattagaattgcaaattgcaaggtctggattacaatagtggtacatacagtggaaagaataagaaatcgtattatattataagcttagtcatgccaattttactttttttttatgagcagatattagtttgttatttttattaaaaatatcaattgagagatttccaacttatcatttctcttcttttttcttttttcatccttttccaataactggatcaaccttatattttctatcaattttaatgtgatatgtgtatatttaaat

SEQ ID NO: 120521 - DNA, 326 bp, Glycine max
  Clone ID: PAT_MRT3847_79839C.1
tcttgtcttcctcccaattacgattctctcactcacattttcttttccttagtaccttctctctcactggctggattccattcaaataacgtgtgtccttgtcacttatagcccattctctagtttcttacacacaaactctcttttcctgtttctctaccactattcattcctcctctccttgctcagtatactccaccttctcttcattctcatatttctgtccttttgcccatatgtaccctatctcttcccgattttaccttatctctaattctattatctttcattttatgtgccatttatatatctaacttatttatatt

SEQ ID NO: 120522 - DNA, 121 bp, Glycine max
  Clone ID: PAT_MRT3847_7983C.1
cttgagcccttgagttgtgctgaaggcacccttatttattgtttgaggacaaatacagttgtctattattttgcatattaaattatgttatatcctcctttagtaaaagttaattcacaca

SEQ ID NO: 120523 - DNA, 1356 bp, Glycine max
  Clone ID: PAT_MRT3847_79840C.1
gggcttagaagttaacgatgtaataaccatttgagttcaattcacgatacatatgaagttgcttagtacttgaaaagagtaattccttttggattgaaaccaacacatacaacataaaaatacaattgaatcttaacatagaaactcagcatctcaacccaacggcttaaactttttcggaatccaactcacttaaactcattgagtcttgataagtttccgaatccaacccacttaaacttttttatagcaaaaataaaaactgacatgactaaccttataaaacaatacagtttcttattctttccactgtatatgccattattgtaatccagaccttgcaatccaactagttgacccttctgcaattgcatctgatctctccctgcctcccagtgagaggcttcatgttccccatcttgatcattgaagctttaaaatctctagcaaaagccaaagggattctactatatagttgcaccaatttgtcactttctgtgccttttcccttgaacagctcttgatcagaatggagaagaccctttttgtgcagcaaatccgtgtagtatgtggtgtcaactcttgtgggtgtagcatcaagtggatgcaagttgttgtctcctccgcttttcggacatgtcttcctcacagatgctgcaaacgtggggtctattatgttgttgcttacgttgtagattctgtttctgaaggtggtgcaccttgcaaaccctatggtgtggcctccagagagggccacaaggtccctcacgtttaagccgtgagatttgaagttggaaacaagctgtgagaagctgaatgttggaggaggaagattggagtttgcagcagctttgcttgcagttcttgcatctcttctgcccaacaatacttggtaccagtagtgtggacccccatatatggctatagaatcacgggctgcaatggccaagatatctgcacatgagaccacatggcgtttgcaggctttgtccaccgcagctttgatttcatcaaccacagaaaaacctctgactgaattaagatttggcaatgcagtcttctcgccagtgaagtttcgggtgtcatctagcaatattgatccatcacacccatttacgaaacaatcatggaaatgcaagcgcagaagagatgctccgatgcgtcgctcacggataattgctcgttgaaccactgactttataactggcaatgcctgagggcaaactttatcatagaaatggggagagagggttgcattggtagggttcatcaatgtgatcaccatagcaagcacaagcacaaggaatgaatattggatatgaaaagaagccatcttgttatacctcgtgatttgct

SEQ ID NO: 120524 - DNA, 235 bp, Glycine max
  unsure (1)..(235): unsure at all n locations
  Clone ID: PAT_MRT3847_79841C.1
gtgtgggcatatattctgggaacaccacactacacaaggngggaagctgctattanggaaagatagagggacaacatctggcgggacaagtaccggttccttaacgactgacacaagacgtggaagagttctattcactggctgtaaacctagataaatactttcccatctgtgttactggggcagcttaactaataaaaagaggggggtttcatttctttccaaaaaaaatgag

SEQ ID NO: 120525 - DNA, 449 bp, Glycine max
  Clone ID: PAT_MRT3847_79842C.1
acttacagcaccaagcgtcgttgaatgactcggaacgtctacctgaaactaattatacactgtatagataaagatattgagggagaaaccgaacatttgaagatgagtaaccaagagcataatgatcatgaaaagaaaagaacataagatgacatcctaaacataactgccacattgtgactcacacacatacagaagggtattcaatgctagaccccgctactgggcctttattggcagagtattgactgcacattggccaccattaacaccgaatgtgcttaaaatgaccaaacatgcatctaagaagtatggcgattataatactagaggatgatctaaatctagagtcaccaatcctactgtatggttctgaatcatgcgtctctccagccttaggaaccttcaatttcaattgcatggcctagctcttaatatcatgcgatgag

SEQ ID NO: 120526 - DNA, 414 bp, Glycine max
  Clone ID: PAT_MRT3847_79843C.1
atgatattgtgccatgcatcaagaggaacaatgactgacagttaagaatcgagcttggatgtcgactaccggtgaggcattggtcgaggaaagagacgaatacgggtaggggataggtaagctgtgctgctgaagacttgacatcctttcacactctgactgccaagcctgtatcttacttggataatgtcacagagaaagatgaccaatgaaaaaagaacatgtttctgcccaataataatgcatgggtccaagaacacagagatgagactattattactttcaactgtgccttgaaaaggaatcttgcatatatgacacctgactatgctgatacacattgtgaggagaacaaaacacatagtgctcttaccaaaatgactgagactggatcttcagctattaatctcattt

SEQ ID NO: 120527 - DNA, 352 bp, Glycine max
  Clone ID: PAT_MRT3847_79844C.1
ttttcccccctatagtaatccccccccctcctggccatagagagcgccattttatcattctatctcaacaccacgcaataagaaaatctagtgctgattcgaacacgagcgcgcggggttaaaagagaaaagagcttcagaaatctatttacaagtcatccacacccctctttcttttattcacatcaatggaatctcgttgggtgtttcccgctaacgtccataaaaacaccatccctttttaaaaggacctgaacagctcctgtcggatgagcgcctcggtgggggaattattcaattacaggaatatttaaatcggtttgattctttattggaacaaaagaaacccccc

SEQ ID NO: 120528 - DNA, 199 bp, Glycine max
  Clone ID: PAT_MRT3847_79845C.1
gactggcaacccagcacatttgactccttgacttccagaaatgaatagatgttctgtaccttcgagtgcttgtttcttgaagctcaaagagcaatagtcatgcttttgtggctacctcaaaaaccctggcttgaagcagtatgtgtactctactaatgccaagaaaaccggtagttcttgtggtatagtctgtccatca

SEQ ID NO: 120529 - DNA, 404 bp, Glycine max
  Clone ID: PAT_MRT3847_79846C.1
gcttaaacgaaaccttcctttttcattgggtcatatcattacttttcctatctagggggaaaaaaaaaacccccaaaaaaaaccggggaaatgaaacacgcccccccaaattttgttaaaaaaaaaaccccaaaaaatcgcttaccggctgggcccccggaaaaacaacccgttttgccaattccccaaaaaaggggaaccgccgggggccccggaaaaaccgggggggggcggcgggccccggggggccccaaacccaacgcggggctttctcctcaagggggtagaagggggcctttttggaaaaagacaaaaaacccatgggccgggggggaattccaaaaaaagggtggacctgcttgggggccttagccccgggggcccggggggaacccacccggggg

SEQ ID NO: 120530 - DNA, 544 bp, Glycine max
  Clone ID: PAT_MRT3847_79847C.1
gagctcactatgtcggtggccgcccttttttttttttttttggttgtttttttttttttttgttttttttttttttttttcctttttctttttttttttaaccggaaaaccctgtccaactttgggtgcatgggcaaaaaaaaccgtttcttggaaaatcccagagcccgaggggtgtttattaaggggccctggaacccaaaaaaaagcggggtgttgcccatgagaaaatggatttgcccattccctttgtttttggaaggggggaacctcaaccccgtttccaagggtcctgggagaggtggtggaccctaagggggggcccctttcccaagataaagggcggaaggcgccccaataacccaggtttttcctttcccatctttttttcccggagatggcctttttttctaaatgggcaaaaatggggcctccagaatgcccccatttttgggaagccaccccccggtattccccctttgggggggggggggcccccccctcagggcactttcaaatgcccccttttggggaatttgccctt

SEQ ID NO: 120531 - DNA, 764 bp, Glycine max
  unsure (1)..(764): unsure at all n locations
  Clone ID: PAT_MRT3847_79848C.1
gtcccccctctgcaggctctttttatgccttacgatctaaaaattaacaccagatggattgcctatgcaacggatgagatcattgcttgaagaagtaaaccaacttcattgccaagagcgctgcatgattgggtctggaggcggttctgtagggtcagttgatttttatttaaatctgatgtggatgatgcaaattttcaaaaggccaagtcccaagtgtttatattttataaatgttcctgttatctatcttggttgccaaaagaaaaaaacactgttgtgtctaaaattggttcagcagggttagtttgatttctggtcgtagtggaatgagtaatggctgcaaacatgtttctcgggttttatattttcttctgccatctatccctagctcacaagtgacgtccatttagtggactttatgaccagacgagaaaaattgaccattgcagttgtgtcaacttttgattttgttttgaatgcatcataacatatatggaacaaaaccaaagtgggcgtaatatggagagatacccttgctcaaaacactgtcaacctataatgaccttaactcattgatttgcaagctgtacgcaaaatatctgaattgacatttaaaggtctcaaatattctacgacttttgatattntgnaagtnntgtagtgggtagcctagcaccatgttttaggggcccgaagtttaaaaatganaactgtaaattttgaaactacanaatacacaatcttactgtgccccaattttc

SEQ ID NO: 120532 - DNA, 258 bp, Glycine max
  unsure (1)..(258): unsure at all n locations
  Clone ID: PAT_MRT3847_79849C.1
gttgcctaatatgaaataaaaatttatttattatgatttttttttaatctttctaccaatgatcttaagnagtatttattcattatgcacatttttttttattaaattctactactaataaattacatattctaaattaaataaaaaataatatattttacctccagacgtcactgtaggctcaatatttgttggcaataaatgntgtctttaacttttcatttcttttcttcgacaaaaagacgtggacattggtgg

SEQ ID NO: 120533 - DNA, 434 bp, Glycine max
  Clone ID: PAT_MRT3847_7984C.1
aacccaggaaaagggccacctgttaaaaaaaggaaacccggggaaaaaaaaaacaaacaagccatgctccttcctacagaaaaatgttttatggggcttttcctcctggaaaggaaaaaattccctgggagccagggcccccaaaaaggccctttttttttctaaaccccagaaaaatgctcaaagtttttaatccttcccaatcacgcaggtcctcaaagtttgcaagtaaaaaaaaggattctagtctgtcaacattgtttttttaaaaaattggacccttgccatccaatttacctttggcagcattggtatttttttccattggcaacttacttttaaaatttttgtttggattggggcccccttttttaaaaaaaatacagggggcattttttggaaaaaaataaagggttaccttttttccctttggg

SEQ ID NO: 120534 - DNA, 721 bp, Glycine max
  unsure (1)..(721): unsure at all n locations
  Clone ID: PAT_MRT3847_79850C.1
ccggggatcctctagcagtcacctgcagaattgtgttgttttctctcctttgggggtcaaacaagcggttctcttcatggtaatcaatcttatccttcttctttcatgcattatattcattcattcactgttcttctcttcccaactctgtctgtgtttttctcttttacttaaaaaaatatttggtgagaaattattgcgtatgatctgaaaccactgcatgttcgtaagttcagccaatattcatatcacacataatagaattgtattctctctcttttttttagtaaattcaaaaacttgttcacatgttaagagaagattgaccgacatgaaaacgtgataatcaatgaattaatcgctagacttagtaattagcttctaccgtgtgacataacagttttttcttcttatatatgttatttgttgaatttgtttaattttgagtttatatttgtttggttttttatttataaactttaatggggttgttttgttgttgtggttgttgtttgtttcctttttctcccacaaaatttagtgacatactgaatttggtttgatatgatatgattttgattttgctgagtctctgattggtactgntgcatgtgatagatgccaagtgttaaccctgaccaagattccgagccatttgttgagaccgatccaaccggtcgctatggtagatacagtgagttgctcggatgtggtgctgtga

SEQ ID NO: 120535 - DNA, 560 bp, Glycine max
  Clone ID: PAT_MRT3847_79851C.1
aaaaaaaacataaaaaaattgcagaaaaaatagaataataaaccacagtgggagttaaaaactatggcaaattgtaggaaaaaaatttgcaaagagcccctttctcccaaacccataagagccacagggccaccatcaaaaccaccaaacaccaccctagcgccaccatcaaaccaccaaacacaaaacgttgatgtgcgagtgcgtgtaagatcctcgtcgtctagggcctggttcaccgatgatgtgcgagtgccagaacttcaccagcggtgaagtgcagcgcctgcgcgaagtacgcgtccacgatctccgggaggagctcgttggcgaagtcgagattatccatggcgacacactccgtacattggaggagaagagcgaggagtttgagaccggacgactcgccgccgtgaggttcgggatcgaaggcttgctcctccgcggtttccgcggcggttattttgccggagaagttggttggcttgaaggaaggctcggcagagggttctggcttccgcggtgggagatctaaaagcgcgttagggtgggaaggagag

SEQ ID NO: 120536 - DNA, 572 bp, Glycine max
  Clone ID: PAT_MRT3847_79852C.1
tacggctgcgagaagacgacagaagggggcggagcaaatcatgtaattatagaagatagagaaatcgcaacacattaattgcaatttcaactcccatatatcattctcgttaatttcttaacccatcttccaagcattcttatccgacaaggattcctttctctctctcttgatccaatcttttcgtccattaaaattaggattttaaattctcaattttcaattttcaactccaatccctccggcgagctttccaggaagctcgcttctctccgaccatggccggaatcaccaaaacctctcacttttccgtcgttttgatcgccgtcgtcgccctctgcgtcttcccggcagcgacatccgataacgtggcctcggcggtcctcgggttgccgtcccatgtcgctggcgaaggaaagaacttgtgcagcgcggcagcgccgtcgtcgtgtcccgtgaagtgtttccgaaccgacccggtttgcagcgtggacggcgtgacgtactggtgcgggtgcagcgaagccgcgtacgccagcgcacagattgcgaaattggggttctgtgaggtg

SEQ ID NO: 120537 - DNA, 342 bp, Glycine max
  Clone ID: PAT_MRT3847_79853C.1
atttattaaggaatatatacttcaaatataacactattttccaaggaaacaagagaggaatacaacacctagaaagcataataatttcccaaccaatctgtagatacagaagggcaaaaacaaaactatattttatgccctctcaagtacacatgcaaatattaaactatatcaatttcttaaccatttcttagccacacagacatacacaaatgcaaaataaaaacttatatacgcattaagattctacaacttctcgttgattgtcttgctctctctttctctttaacttccattcactttcttacaatctgttctgatttctccttgagttccaatcaa

SEQ ID NO: 120538 - DNA, 701 bp, Glycine max
  Clone ID: PAT_MRT3847_79854C.1
tacacaaaatctgcatgtggggcgtcgttgcttaccgcgtcccacactcctctttctttaattctgaaatttataataaaagaagagagagagactctgcagtatcctaggccttttcttttgtttccttttcaactttttcagttactatttctattcattcaaaatatatccattaatttattatttccaccccactataaatatgcatccttgcacaccaagcactgccacactactccgattcttgcctgcgtcttcctcgcaatcacaacacacccagttcatcctctgaatctgatccatccttttaatcttgttctgtgcaattgcgtgcaaatgcggtgaagaacaacggttcggtgtttattttaacaggatatggccattgaagcacagttgtttcccaacaatgctcctccgtttccgttttatgggtcaaagaatttaatggcagacaattctcaagcagcatatggtcataggcaacaaccagtagaacaacatcatgcctggcagatgaatcagaacatgtctcttgttgatcccaacttttcttgtttttctaattccaatgtccaccactacgccctccataagaacgttattcaacctttagcctcatatcctcaaagcttggctattgtgtttgatcaacagagggagattgatcactgtatcagatcacagaatgaaaaatt

SEQ ID NO: 120539 - DNA, 185 bp, Glycine max
  Clone ID: PAT_MRT3847_79855C.1
agagagtacccgagacttagatgggggaaaagagaagaaagtagcctatttgcgggtgatggaaaacccaagccgttaaaaagttgccacattttactgtgtaagtgcaagtgtcaaaagaattttcttgtggaatgaatggcgacctcgtaaagaagaatttacggaatgattaaaagatatgg

SEQ ID NO: 120540 - DNA, 172 bp, Glycine max
  unsure (1)..(172): unsure at all n locations
  Clone ID: PAT_MRT3847_79856C.1
ttcactttttattgtcttcaattcagtaaaccacaccgcgtccgattgcagagtcgcggcggctccanaacctacaatcccaaccggcgaacaagatctgcgttgactgttcccagaaaaaccctcaatgggcctcggattcctacggcgtctccatgtgccttgagtgctc

SEQ ID NO: 120541 - DNA, 332 bp, Glycine max
  Clone ID: PAT_MRT3847_79857C.1
gacgaagctaggaattcttctcgaggagaacacatgaacatgagcccaccgcacagcgaaaaacagacgggggctttgtacagacaccatgcttgtacataccatgcgacatggaaaagtgcgagatgggaacgacagcatagaatagtggagaaggccaagggagagaaaagcttgaacccacggatgcagcaaatgagagaagaaaggggtagacagggcgatcggtctagacagggaggcgactgacgcgacacttaagaaaattccttggcaacactgggtgatccaggaagcaagtgggctaagaccgccggcgccactaaggggcc

SEQ ID NO: 120542 - DNA, 418 bp, Glycine max
  Clone ID: PAT_MRT3847_79858C.1
ccacgcgtccggacaaggagggcatcccacccgaccagcagcgcctcatcttcgccggcaagcagctggaggatggccgcaccctggcggattacaacatccagaaggagagcactctccacctggtgctccgcctcaggggtggcatgcagatttttgtgaagacattgactggcaagaccatcaccttggaggtggagagctctgacaccattgacaatgtgaaggccaagatccaggacaaggagggcattcccccagaccagcagcgtctgatctttgcgggcaagcagctggaggatggccgcactctcgcggactacaacatccagaaggagagcacccttcaccttgttctccgcctcagaggtggtatgcagatctttgtaaagaccctgactggaaaaaccataaccct

SEQ ID NO: 120543 - DNA, 353 bp, Glycine max
  Clone ID: PAT_MRT3847_79859C.1
tggcttggaacctttgggctgatttatgtgcttgcatagacgatagtagtagtagaacgagatccagcccatggctcactcatacgagtcggaagcatactacggcggcgtcacacgattaagtagcgtgcgccaactcgggaatcgccatattcgcatctacgtcatatcgtcctccaagctgcgatcagcatcaacgctacgaatacgaccatcgcatacgattacatccggacgtccacacgcgtatatatctaaggtacctgctaagtacgcgcgaagacaccaggtcgaacctacgttatctagatcgctcgaatcactcgcgtctatatctatacgtacgtatagcg

SEQ ID NO: 120544 - DNA, 303 bp, Glycine max
  Clone ID: PAT_MRT3847_7985C.1
cgtttttgaattagggattccggttgttacttatcacgggagagtatcaaaggcaggagttgtggactgggtgaactgtgctcaacctaatagtctgtactgaacaagcattcgaagacaagggcgagaacaatgcctgccttgtctactaggatgacattgccctcttcacatcctatggaggggggcctgattccgcatgcataatgaggagtcgatgatgaaaggaaaacacgtgagcaacgcaggccaaggctttataggagctgactgaggatgagactgatgtaactagagccagcc

SEQ ID NO: 120545 - DNA, 312 bp, Glycine max
  unsure (1)..(312): unsure at all n locations
  Clone ID: PAT_MRT3847_79860C.1
ttttactttanaacaactatgtttcaacatcccccaatgcttcttttctcctctcatacaaaacaaactttacacaagtaattttttttgtgacatatttataaggaaaaaaatatatattttgacatagacaattgaaaaagatatgtaactacactttttgttgagatcaggaagcatcttttttgccaattgtgatcatcatctacaaatatggtcttgcatgaaagagaaatgattaagtctctttacaacatgtctatgtaaaatgtttttaaaataaacttatgttatctaggccataacgtttct

SEQ ID NO: 120546 - DNA, 356 bp, Glycine max
  unsure (1)..(356): unsure at all n locations
  Clone ID: PAT_MRT3847_79861C.1
ggggggaaaaaantgacaaaaccaaattttttttccctataattaaccccccccaaccaaaccacnactttgctgttttttaaaaacgcagggagcgcccaaccaaaagcaaacctccatccatccataaacataatcccacaacctccttctacattagaataacataataatattgaccaacacaaccaaaataacactccaaaaggttcatgagacgtacctttgaaacttaaacattgacttccactgaaatacccaaacccaaccatcacagcattagttcctacatcctagatagtcaaaataaaatgcataatcctgttcatacttaacaagctacagcacctcctgaa

SEQ ID NO: 120547 - DNA, 513 bp, Glycine max
  Clone ID: PAT_MRT3847_79862C.1
acgagccgaggtgggtcattgcacacagccttacccttatatatgtaaaaaaactgtttctggattcaaacatataactaacctgtcatcgaggcgcccacaattaaacccatatgacaagaaattaagaatgtaaaatcaattaagcttctcctaatgctgattttaacttattggaagaagcttaattcattttagcttgttattttcttcttctataattgcatattgagaagtttatccaagtattttaacttaatttacctttccttgtgttgttgtgagtattatatgttgggatctgatactggcataacaattgaactctagacagaagtctcactttacctccttctagttagaatgtaaagctactagagatccccttgcagcttgtcttggatagactgatacagtatttttctctcgctcctgtggatctcaactcatacactgttctgggagagctcttttccccaccttcaccgatatcaggagagctctaacaactct

SEQ ID NO: 120548 - DNA, 583 bp, Glycine max
  Clone ID: PAT_MRT3847_79863C.1
tggcataagggtctaaaataagaaacttcttggcctctctctgccttctaatgtctagaggtctacaatagggttggattatagtattatacaccattgagtctatgttcaaattaagcaccctttaagatgaaaagggcaagtatggctacattttctccaaaacattctagcaagtatggtgttagatccattagtttgccaacaagatcacatccaagcacagttagagttgaagaggagctgagcaagcttaaatcattggaggcatcatcatcatcatcatctacaccaaaggtggaaacaatttgctgtggtctatctggccttgcagaattgtacaaatgcattgaagatcttttgaaattgccattgacccaacaagcaataggccagcaccaaaatgagaaatgggtcaatgagttgttggattgcccagtaggattcttggacctattaggcaaaacaagggattccattctgttgatgaaaggaagtgttggagagcttcagagtgcacttagaaggaaaagggttggagatttatacatggagagttatctccctacatattggaggctca

SEQ ID NO: 120549 - DNA, 2574 bp, Glycine max
  Clone ID: PAT_MRT3847_79864C.1
cggacgcgtgcgaagtgctaacaaaactccaccctttctcctcctgtcactgtttcttcgtctctacttcttctcaaaccagaacagacagcaccctcccaaccacctttgatctaggttgttatttttttctctctgaatttaaatgaaatggctcagagaaaagacccccaaatagcagggggtactacgttaagatgaaactccttcacaaacatggcagacctcatcatcatcatcagcagcagcaagaaaaaaactgcctctacagatactacaaatgggttctctggctttctctttccctctatttcttcacctcctacctcatcagcaacaacaacaacaacaccaccacaccaaacaaccatctcacgtctccagagcactcatcgaatcaaaccacaccacaactcctcaacatgctcttaactctccaggatctttgaagaagttgaaggtgtttgtatatgaccttcctccgaagtacaacacggattggttgacgaacgagaggtgcagcaaacatttgtttgcgtcggaggttgcaattcacagggctttgttgaccagcgaggttcgcacgtttgacccatacgacgctgactttttcttcgtccccgtttacgtgtcttgcaacttcagcaccgtgaatggcttccccgcgattggccacgcgcgctccctcatcgcgtccgcggtaaacctcatctcctcggagtaccccttctggaaccgaagcagaggctccgaccacgtcttcgtcgcgtcgcacgatttcggctcgtgtttccacaccctggaggacgtggcgatggctgatggcgtgccagagattgtgaggaactcgatcgtgttgcagacgtttggcgttgtgttcgatcacccgtgccagaaggtcgagcacgtagtgataccaccttacgtttcgccggaaagtgtaagggacacgatggagaattttccggtggacggacggcgagatatttgggctttcttccgagggaaaatggaagtccatcccaagaacgttagtggacgattttacagcaagaaagtgcggacggtgatatggaggaagttcaacggtgaccggaggttttacctgcagaggcataggtttgccggttaccagtcagagattgcacgttcggtgttttgtttatgtcctctggggtgggccccatggagtccgaggctggtcgagtccgtcgccttgggttgcgtgccagttgtcatagcggacggtattcggttgccgtttgtctccgcggtgaagtggtcggagatatcggtgacggtggcggagaaagacgtggggaggctggctgagatactggagcgcgtggcggcgacaaacctgagcacaattcaaaggaacctgtgggacccagcaacgaggagggccctacttttcaacagccaggtccaggtaggggatgccacgtggcaggtcctgagggctttgagtgaaaagcttgatagatccttcagaagctcgagggtttcacgccaattggattttgacacgtaagagggtttaaagttaaactcgacgacaagttgtgtttatttcttcactcacccgtggtaatgaagatgacatttcaaaaacacacgctgcatggacaataataaaaataaagaaatagtgatgataatattaatatttggtggatgacagctggaatttcttgagagatggaatttaatgactcatgttggggcccaaagtagcagcttcaagactttcttcgagtatattaatggtgacgtggttgtggtgatgatgacatggcaagaattcattcgttggttttgcggcttggactgaaaaatatctgtggagttaaatcatttttgcttgtgaataaaaatataagaagaatacacaaattttcatttttgtttgttattttattgtttgtgttgtgtagtgtcaggttggtgacaaaagggttgggaaaacgaaggttgaagagattttggtgtttgtgagtgaaatgattaatgagaatggagatttggatggaggaagatgagggtgtggggtgcgagtgtgtcagaaatgtcataacttttatagtgctagtttaaattttatgcaagttaatgggggttgtcagtggtcacggatgagttaaagggttgtcaaaatcaacgcaagcatggagaaaaatcagagagaatcgacccatgagatgcgaggggcagcagcacagcacttaatttgtcaagactctgaacaataattccccgtattagttttacttgttaagttataatctaattaacacgatatcaagggactattcaatcttacaaattttatattctaaaaactcgagagagagagagagagagagagagagagagagagagagagagagagagagaaagaaagttgtttcaagtttatacaggatctaatagaatatagtcaaaagtagactttaatgcctttttttaataggctcattagttgaagagccatcttaaacttacaatagttcatcaaggatgtgtttggataacagttcacttaaatgtaacctacatttttttaatatgtca

SEQ ID NO: 120550 - DNA, 131 bp, Glycine max
  Clone ID: PAT_MRT3847_79865C.1
aacaaactgtaacaactaatgtttgctttctttctagattaaataataaattaaagttggtttcacaaagagagacgttcaaggaaaagaattgtttcttgcgggcgcgagcatgcaacaaaataactctt

SEQ ID NO: 120551 - DNA, 319 bp, Glycine max
  Clone ID: PAT_MRT3847_79866C.1
ccctacttcgcgtccgcccacgcgtccgcagagaggggaggctttcaacaagctatttgctgaactcgcgaaaagcggtcctacatgggccggcattgaatgacccaaggatgagaaacttcctcgtcgcaaaattcttgacagaccccagacgcactgcttcactagtcctgccctagcggagtgtcaaatcttgctaggtccgcccagaagtgttgtaagaatttgagagggacatcatgaagaaaagggacaagcttagacgacaagctggaatcaacccatactccatggaatggactggttaggccaatagatt

SEQ ID NO: 120552 - DNA, 237 bp, Glycine max
  Clone ID: PAT_MRT3847_79867C.1
cagaaaccgtctttttcttcttcctcctggttgcggcacaacaatggagcctggtcggtgacaagagttgcagcggaagagtcggtttccttcacagtgtattctgtgttgcttccttccttcctttgtgtatcagttgacgccaccatgccgtcagtgcaacgcggaagcttctccaatcgccaaacccaattctccgagcggaggcagaagattatacaacagaggaagtctctt

SEQ ID NO: 120553 - DNA, 625 bp, Glycine max
  Clone ID: PAT_MRT3847_79868C.1
ccacgcgtccgcggacgcgtggggcaacttagaagcatttggaagaaatattgatttaaataaataaatacacatacggcatgagaataagggtactttacaaggtttattgtatcagctgattctgaagagttctgctgcaggagtcttccagtcaattatgtcagattggatcaagatatcctctcacctcttgcggggaagaagcagttgtacatttatgaaaccaatgacttttgggaacaaatcaaaactccggggtaagcctgagtaatatgttacatattttcatcatttccttcatgagcaattatcttcatgtgttgacttaatgcttgtaggatgtccataaaatgttccggcttgtatcttgcccaatttcgttacacatccccccatttattagcaaatggagatggtattaagaaagccagcatcactggtgatgtttatattcacccatcagcgaaagtgcatccatctgctaagattggtccaagtgtatcaatatctgcaaatgctcgtataggagctggtgcaaggctcaaacattgtatcatccttgatgacgttgaaatcaagaaaatgctcttgttggtcatgcaattgttggatggaaatcatc

SEQ ID NO: 120554 - DNA, 1984 bp, Glycine max
  unsure (1)..(1984): unsure at all n locations
  Clone ID: PAT_MRT3847_79869C.1
agcaagagaccaagaattgcgtagttagtaatttaactntgccttntcatacttctcccgcacaccacacttaatacttgatatactttcatttctttattaaaatagcaacattgatgtgtgtactacaatgaatattttgctccaaaaacagtcaattttgggacaaaatcgattatacccactgtttttgggtttccaaactagatactaaaacaaaagtcgctgcaaatacaatcacaaggaaaatataaaggcaacaatgggagctttggaggttctataaaagaatctcatcttgaacacccaaatttagggtcttatgtggcaaaacaatgctattcaaaaccactacctcatcctcaacggtcacagattcaccaagtattgttaccccgagctttgcattgtaatctccactagcctcaacacatgcccatcgaccaatagatgatttccatccaacaattgcatgaccaacaagagcattttccttgatttcaacgtcatcaaggatgatacaatgtttgagccttgtaccagctcctatacgagcatttgcagatattgatacacttggaccaatcttagcagatggatgcactttcgctgatgggtgaatataaacatcaccagtgatgctggctttcttaataccatctccatttgctaataaatggggggatgtgtaacgaaattgggcaagatacaagccggaacattttatggacatccccggagttttgatttgttcccaaaagtcattggtttcataaatgtacaactgcttcttccccgcaagaggtgagaggatatcttgatccaatctgacataattgactggaagactccttgtgtctggctgcattgcttcaaagctggagacacgtcttagattagctctgtctttccgttgagtagaaacaccctcaatggctgtaaagatatcgggtgtaaatatgtacacaccgcagtttattcgatcacttacaaaagtttccggtttctctgtgtaatgcaatagttcattagtggttggatcagctactaattccccgaacccctcgctcaccctccagttcctgcgtgcctaacgctcctccctttccctcacatccccctctcccagccctccgacgagcgccctcttgccgtactcggatcctctacctcctttctgctcttcgcccccgtgtgttactggtcggggcacccgcctctcgctccggctgccggtctggttcctgctagtgagcgggtcgtcgctgtggtcccggctcgtggcccctcgctgggctctggtgtccgcccctggtctcccctcccacccatgccgcctgctcccagaagctcgaccgccctgcggctcatcctcctcgtctctgcttgtccagggattcctagtttgtctcagttatggctgcctgatccacccaaggaacacgacttcgccctgaacctctctcccgtatctacttactgtactcctcttcctgcataacctttagccccaataacccatatttcagtcctcagtctggcctatttttcgtttctaaccccagtttctgctaccacacgcatacctgttccggccaaccttgttcggctcagttattcaataccctagactccctccgcggccactctattttgttcaacggttacgggcctcctagttctgctcgcttacccccaatgttatttacgctcgtctcgctcgtcgctgtctgttcagggcatcctagtttctctcagttagccaaatggtagctgcaaaaaacagaactcttcagaatcagctgatacaataaaccttgtaaagtacccttattctcatgccgtatgtgtatttatttatttaaatcaatatttcttccaaatgcttctaagttgcaccaaaagcacacaatatatatgcaaggtataattataaatggctttgaaataagaagaaagacaattcttcagatgcaggaaaagc

SEQ ID NO: 120555 - DNA, 2199 bp, Glycine max
  Clone ID: PAT_MRT3847_7986C.1
cccacgcgtccgcggacgcgtgggtttgtcttccacacacacaccccactgaccacactcttataagtgcttccgtcgtccaaacacttttttaaaaactttctccaatatctcaaaatcagtatattcccttttgttcaattactcttcttccttccttaaacccaatcaaagagaaacaaaatgttcttccacaatccagcacataccaactgaaaagaaaacccagtttgtgggtttattatactttgattgattgattaattaattattagttagttagttaatcaatggaagagtgtcacacggtgttcggaaagtacgagatggggaggcttctggggaagggcacgtttgccaaagtgtattacgggaagcaaataagcacgggcgagagcgtggcaatcaaagtaatcaacaaagagcaagtgagaaaagaaggaatgatggaacaaatcaaacgcgaaatttccgtgatgcgtttggtgcgacacccaaacgtggtggaaatcaaggaagtgatggccacaaagacaaaaatcttcttcgtcatggaatacgtgcgtggcggggaactcttcgccaaaatctccaaaggcaaactcaaagaagatctcgcccgcaagtattttcagcagttaatcagtgccgttgattactgccacagcagaggagtatcccaccgtgatctcaaaccagagaatcttctcctcgacgaagacgaaaaccttaaaatctccgattttcggtctctctgcgctgccggaacagcttcgttacgatgggctcctccacacacagtgcggcacccctgcctacgtggcacccggagtgttaagaaaaaaaggctacgacgggtcaaaagcagatatctggtcatgcggcgtcgttttgtacgttcttctcgctggatttcttcctttccaacacgagaatctcatgacaatgtattacaaagttctcagagccgagtttgagtttccaccgtggttttcgcctgagtcaaagaggctaatctccaagattctagtggcggatcccgcgaagagaaccaccatttccgccataactcgcgtgccgtggttccggaagggcttttcttcgttttccgcgccggacttgtgccagttggagaaacaagaggcggttacggaggaagaaaataattccaaggtccccaagttcttcaacgcgttcgagtttatttcgtcgatgtcttccgggttcgatctctcggggctgttcgagaccaagcggaagacagcggcggtgttcacgtcgaagtgttccgcggcggcgattgtggcgaagattgcggcggcggcgcgggggctgagtttccgcgtggcggaggtcaaggacttcaagatccggctgcagggtgcggcggaggggaggaaggggaggctggcggtcacggcggaggtgtttgaggtggcgccggaggtcgccgttgtggagttttcgaagtccgccggcgacacgttggaatacgccaagttctgtgaggaggacgtgaggcccgcgctgaaggacattgtttggacgtggcaaggggatgccacgtgtgctgctaacttccccgcctgtcacggtgaggagtgtcaaaagcaggttgttgttagtactatataattagttaattaactattaattataattagtgtgagggtccactgagagggttctagaaacggtagcgttctaacgacttttcttttgctttgggttttgtcgctttcgtctttattccctgcctgatttttggaaagatagggttttgcaccttttgaaggtgaggctgtacataaactgtaattaatatattgtattttgctgcccttacattcggaatggaagtcatttctgtgtccgccaattaaatatattgtgctgctgctacattcggaatggaacttatttctgtgtccaaaattactttggtataaaattgtgaatgcaaatattattttaaagagttatgtatgatggtgaactcaatcaatataaaaatattattggttggcatttttaaataagttaattataatgacatcagtaacactgtttatgataagttagaaaacatctatgaagtaacagtagtgactacttctgaaaattaacttgactctgatttaagaataatttacaaatttatcttacctttattctataatgttacatgagtttaatttc

SEQ ID NO: 120556 - DNA, 304 bp, Glycine max
  Clone ID: PAT_MRT3847_79870C.1
acataaaaatggtattgttttttactttgttggtatgttgacttgttcacctttcacaaccaaaagggggtagggttgggttcagaaatgcttccatacacttgggcccctgagaaagcatgctcttatgaacacctcactgtgtggttccatatgaaaacagactattgctgtgctatgacaatgacactctcctcaggctgatgaagccgcaaataaacagccgacgctctccataggggatggaccccgatcttgaacttattcacaggccgccggatactaatacttccagcatcaaaaa

SEQ ID NO: 120557 - DNA, 403 bp, Glycine max
  Clone ID: PAT_MRT3847_79871C.1
tggtttgtcatctgcattaatttccaagcatctaaacaaaaaagtaacaattagttactttctaacatacataaaattaagattggacttaacctaattaagtaactatatacacaactcaaattcaaatttacataactttggcaaatctgaacctaaatctttgaaaacatcaaaacatccaatcagcagaattcgctgaagacaaaatttagattgagattcttgaagagttttcgggcttaaaatcaataatcaatcggaaccatttagacactgatgagctagcaactcttaggcagcacccactgaagtattgtcctgcacaatctgagagatatattctttaatcctgtcattcatgggtccatctaaagctctctcagcaagctcataatataca

SEQ ID NO: 120558 - DNA, 186 bp, Glycine max
  unsure (1)..(186): unsure at all n locations
  Clone ID: PAT_MRT3847_79872C.1
ctattnntataaaatatagtnntaatcatgcattgactgtnnatggggagttagtattattaagnactagagagcaagtcatgtggttaattnnnganaagggaacattatcgtttagntncagagatctgatttngaatcaaagcactccctcctctcccctctctgnctatctggatgtatata

SEQ ID NO: 120559 - DNA, 393 bp, Glycine max
  Clone ID: PAT_MRT3847_79873C.1
acgaaataatgataatggtgcggggaaataagaactcaaaagattccaatttcccccccattttataatgtataagacatggtacttcttatgaatttggggccctatttgtttaatcaggaatgacagggtacgtaggagacaaaaaaaaatctaggagggttacctaaaagcgtaattagaaaccctcttgcattgaaaaactcacaaaattctaaatggcaaaagcttgttaagcctttgatacaagaaattgattgtatatctcacaaaacttttgtacaatgtttatactctgggcgctttttgtttgcacaacacaccaaagtactgctgccgttcaattacaatttggaccgtttctagagaattagctacaagtgcgagattttt

SEQ ID NO: 120560 - DNA, 166 bp, Glycine max
  unsure (1)..(166): unsure at all n locations
  Clone ID: PAT_MRT3847_79874C.1
agaatngnaactatgactggtgtgagcctttcatgccccagggttttcttcaacgcatcagcctcacngcaaaacgcgcatnctgtaaanttctcacttccacacaacatannanantnanannttantatanagttnggtcatgtnatgangattcgaacctttc

SEQ ID NO: 120561 - DNA, 305 bp, Glycine max
  unsure (1)..(305): unsure at all n locations
  Clone ID: PAT_MRT3847_79875C.1
gatgctcgcaattcgggtcgagaaagaaaatcctcacccattttcttcgcaccctttctctgtgaacaactcagttatggcgtcgcaagcggctgtggatgagcacctactgggtgacctactgtgtgaccacctaactcaccccgttatcatccgccaagactggngcgttagggctcagagcgccaacttacctcagatcaaacctgaggaaatcactgccatcaatacatgactttaatgagcctggatcacttgctccaactggatttgatactggaggcaccatatacatggccatccac

SEQ ID NO: 120562 - DNA, 239 bp, Glycine max
  Clone ID: PAT_MRT3847_79876C.1
cacccctgcttttttttttttttttttttttatgtaaaaaaaaaaaggttcttttttggaccccaaatacacagttcattatgaaccgaatttgcaaattaatccatagtcccctttaaaatccagtaccccagcgcccatattaccaaaccctgggggtcaaaatttaggggcttccaaaacatttaaaaaacgcacgccccttttgcaattcattgattgatcggccccctgtttca

SEQ ID NO: 120563 - DNA, 410 bp, Glycine max
  Clone ID: PAT_MRT3847_79877C.1
caggaaagtatgaactcgcagccacttctccctttcttctgcgctccatcagtctcagccacgctcgttctcttatgttgcagacggggagaggtttgacagttgcatccaccccactggcgttgttcattccaatgccgtcattggccagggtgtttcgattggtcctttttgttctgttagctcctctgcaaagctggggaatggttgtcaactacatcctggaagccatgtttttggaagtacagagttaggggacaattgcatgttgatgactggtgctgttgttggtgatgattatcctggatgtactgtcattggaagcaataacacgataggatatcatgctgtgattggtgtcaaatgtcaagacatgaaatacaagccagaggatgaatgtttcctggaag

SEQ ID NO: 120564 - DNA, 278 bp, Glycine max
  Clone ID: PAT_MRT3847_79878C.1
gccaagaagaatctcaacggcgtctgtcgtcgaggctcctatgttgtcgtttcctattatgcccttctctggctcgtaacgcttttcaacctcgcatggtcttttcttcagccatggcagtgctctcctgcaaaggaggttgcatggaatctcctgtcattatttacagcatctggtatgttgtgtctagagataagcttgatggctttcttgctgaaggataactacatgagtggcatggaagctctagcacactcttccatgcatcaggaattatt

SEQ ID NO: 120565 - DNA, 528 bp, Glycine max
  Clone ID: PAT_MRT3847_79879C.1
cccacgcgtcagggaactcgcagccacttctccctttcttctgcgctccatcagtctcagccacgctccttctcttatgttgcagacggggagaggtttgacagttgcatccaccccactgccgttgttcatcccaatgccgtcattggccagggtgtttcgattggtcctttttgttctgttagctcctctgcaaagctggggaatggttgtcaactacatcctggaagccatgtttttggaagtacagagttaggggacaattgcatgttgatgacgtgagttctgagttcagacttaagatcacttctcataagtctgctctgctgaattgtattttttgaaagtggtgctgctggtggtgatgattatcctggatgtactgtcattggaagcaataacacgataggatatcatgctgtgattggtgtcaaatgtcaagacatgaaatacaagccagaggatgaatgttacctggaagttggacacaataatgatattagggaacatacttcaatccaccgatct

SEQ ID NO: 120566 - DNA, 375 bp, Glycine max
  unsure (1)..(375): unsure at all n locations
  Clone ID: PAT_MRT3847_7987C.1
caaatgaatataccnacaaacccgcaacattttaaaaaaacaaaaacccccacacaaaccataaaaacccaatctctttctgattacaaacagcaaaataaagcaactgttacacttcaatatctattgaaaactaaattttcaaggaaagaacacaaaaagcttcttatttcttcaagggaaactttttcacttaatgaatcaaatgacaagtttcacaaacttgtttatgatcttacatctataataaatatctaaaagcacatgaggacgtatctttaacaaactaaatgtcaatatattgcaaaatttcaaaatgctttacaacatattaaagctcatttagaataaacccatgctgcaattatacattaa

SEQ ID NO: 120567 - DNA, 426 bp, Glycine max
  Clone ID: PAT_MRT3847_79880C.1
ttttcaactctcattgaaagcattgttaaggcacaaatgctaaacattcactttttctgacaaaagtataaatgggcttcggaattgcatccacactcatgtatcagaggatccttaaaagttcccgcgacattgtttaagtggattaatcttatgacccagtacaagccaaaggtaaatatatgcctatcacaaggcaatcccatttcgaataggattaacccagagcataattgatggacccgttaaaggtatctatcttggaacttattgtgatttgacctgctgtgcaccgccattgtagggtccatgctaataaaacaaatgcttctcaaccacataggaacgacctgtatccttactggtttttgctttagaataaatcgtgacatatccagccactttttcatggacatttggcctccc

SEQ ID NO: 120568 - DNA, 245 bp, Glycine max
  Clone ID: PAT_MRT3847_79881C.1
ttttttttttaaaatcaaaactagtaataagataagttttccgtcgaaaagaacaacaacaacaacaacaacaacaacatagtagtggttatttttggggtgaaaggaggctttatttgaaattaaaaggagggggtttatttaatattaaaaaggccgaaaggcgaaccaaatggttggggggggtactccgggaaagggaaaaccgggaccagaaggggggaattggggaaaacagcccgggg

SEQ ID NO: 120569 - DNA, 676 bp, Glycine max
  unsure (1)..(676): unsure at all n locations
  Clone ID: PAT_MRT3847_79882C.1
gcccgnagncgagnaaagaaaacctagccctcacgcggttaaaaaaacagaagaaaaaaaaataatccgacaaactaaaaaatagaaattattgggaatttcaatttcagggcttctattagggtttcaaatcggctagagattctcaaagcctaatccgtcaattcgcgctcgtgatcttcgatgtctgtgggatgaatcaattgttcggtggcatgtcggttgagatccaagaaaatgtccatatatgtatgatggcatgtgaaaattaggggaattttggtgtgggcgtttgttatgttgattttccatggaaggcatagcagagaactccaatgacactacaattcccaagaagtcaagatcattggatcttaaaagtctgtataaatcaaaattgacagaaaacactgcaaagaagaacttaaagaggattggcaatagtagtggtggtggtggtgagaagaggaagaaaaaaaagactagaatggaagtctctttaagtagcttacaaatggtgatggtagtagagagttgacgttaggggtgagtcagagattgagtagtagtagtagtagtagtatgctaaatagagtttcatttagtgttgggggtgatgatgctcaaattcccaagaggaagaagagagtttgtggggaggaagaaaacagaacgt

SEQ ID NO: 120570 - DNA, 465 bp, Glycine max
  unsure (1)..(465): unsure at all n locations
  Clone ID: PAT_MRT3847_79883C.1
gcctgcaaaagacagacaaacgcgcaatatcgtttattatgagcaagatactaagcgccacgactagaagagaatacctcagggcatattattaattataggccagaccaaatataaatggccgaggggggggggaaccacattttgtgttttttaaccgccacaggagcccaaacaaaagagggccaaccacacagaggggggagcaaaaccgggaacaacagcgcccggggaccaaaggngggaaaaccgccaccctttaaaggcatgatgccggtaaccttcaaaaaaaaaaaagtattagatgccgtaaaacggaccgaaatgggaaggaacacagaagaaacagctaggggaacaacaaactgcaaagacccactgcaaaaggaaacatcagtcagaaagacacaccactgggaaacggaattcctaaaaaaatacaaaacattccgcagcaatctgcct

SEQ ID NO: 120571 - DNA, 528 bp, Glycine max
  Clone ID: PAT_MRT3847_79884C.1
tgcctaacccaccatactcttcataattgtaatggttaattccgtgggtttaactcatagtggtgttgcaaatcaactaaattgattttcaagagaaaaactattattatttttttgtaaaataaaataaaaatagtatgaaatcatatatatatatatataaagaaaaagacaaaaaacaaattattataatttcagaaagaatactaatacaagtacgacacatggtctaataattccataaataataaaaaaataacatataagcaaacatttgatttcgatatgattaaattgggttttaaagttaaggttaaattactcattggtccctataattttatgattcgtaatttttagtttttatagtttgaaagtaatttttttagtcctatagtttatattttaattttcttttagtccctatagttgaaaagtggtttttttaatgcttatgatttgggtttgaattgtgttttgggctctgtggggggaaggtggtgctgggggggctgtgtgatgggtgtt

SEQ ID NO: 120572 - DNA, 448 bp, Glycine max
  unsure (1)..(448): unsure at all n locations
  Clone ID: PAT_MRT3847_79885C.1
ttttcagtgttntttcattttaatatttttttaataatttgtttattattttatcatttttatttttaaggtcttttaagcatgtgtttattaattaattcatattgttcttaatttttttctctgaataagtctataatttcaagcaattatcacattttattaaaagacacaaacattaacatattgtttctattcattgttagtgatatgttccttaatgacccaccaatattttttttttacaactactgagaaactcttatttatttacataacagaaagacttttactaaactcgacaatttttatcacaaagtcattctattgtattgtgaagtattgagtgtgattttctatgcatatgatcctatcatggaatgaggtcattaaaagatctattggttagtcaaaccagattgtgtgttttattattgggataacaaca

SEQ ID NO: 120573 - DNA, 495 bp, Glycine max
  Clone ID: PAT_MRT3847_79886C.1
tatattcccattcttatttttgaacaaggactaaccgagccttttttcttaatttaaataggataaacagatcatctttcacactagacttctatcatgaacacttattttcacataaatgcatactaaggacctatagtgcactacttaaaactataagcataaaacttaaggattccatataagctttaaggtaaaccattgaaattttgacccaagaatgatggctgtgcactaatacttgacttgaactttatctacttaatgatcatgattgatcctaggctgctttgccctcttaatagagttactgaagagctgataatcctttcagatatttacataaacagaaatagaggcttcacataatgagagggccgaataccttgattgaatattgaggcagatctctcccatactacttgaaattattaataccggagtttacccactatgattattgactgatattgggtgactaactgaatcataaaa

SEQ ID NO: 120574 - DNA, 365 bp, Glycine max
  Clone ID: PAT_MRT3847_79887C.1
tcggaatgcggccccagattgggcaggtgggcgaattcacagatctttgaacacctcctactttattaccttttaccaacacctacctcttctgtctctttctccctcctcacacactcgccctaggtgggattttcccttccttctcccaatactcctccatcattatataacactctatctctagatactggccctgttctctgcccagctacctgcttgtgtaacaactaatacgccagctgaagagcgcgggatctgaatgactcccccgatcagagaaaggactaccaggctgggggctgttcttcttctctggataatgataaacgcaagagggagggatatgttttcaattccagccc

SEQ ID NO: 120575 - DNA, 455 bp, Glycine max
  Clone ID: PAT_MRT3847_79888C.1
tttttaggtggagatgcttactgagctttatgtctctcctttggaaactgtggttttaggagaaagtgattaacttcacctttggataatggatcaaaacaaaaggggatggtccagaggaagccaggtcgtggtgatacaaccctgtcagttagttgctctgacaagatagctcgttggaatgatggtggtggtcaaggagctatgctttcctactttcttcaacctgtatatcggtcttcaattactggtggactgaccctaaacatccctgagaattatcggttggaggataacttgaaaagagctttgaatgaacgtattccacccttagcgaatgaactgacatctccgcttctagggaaccaggcgatatttgacgctggaccacgacccccaaaggactttcagcaatctgagagtgctgctaactctttagcatgcggatattctat

SEQ ID NO: 120576 - DNA, 484 bp, Glycine max
  unsure (1)..(484): unsure at all n locations
  Clone ID: PAT_MRT3847_79889C.1
ccgggcggacccacgcgtccgatccatcatgtccaagggcttgacatcactanatttgcttcagcaatgtttcaagntcgctntctatttttattggtcaagcaatgtaacactgcatcttgctagcactcctcataatattaatataattcacttatagacttcaagtattttaatcctattatttcatttgcatgtcttaaaacagatttaggatgacactatctttgttgcttgtctattaattattgaaaggccttctccttaataaatattatattttttatttttttatttattttatcttatttaatttactattattgttattattttatattactatttttctttaatattattacttttatttttttattttttttctatttttttattttattatataattaatattattttgtccttttttttaataatatctcatttttttcttttcttttttaattattatttatttttt

SEQ ID NO: 120577 - DNA, 1079 bp, Glycine max
  Clone ID: PAT_MRT3847_7988C.1
ccacgcgtccgcttcttctctcagaatacacaacacaaagtcaatataattatagtatatccctatgagtaggagttcggcgatgcatggaattacaagcacaaacaacaagttgaagggagttcggcgtcgaaaatggggcaaatgggtgtcggagattcgtgttccgggcacgcaagagcgtttgtggttgggaacctacgccacgccggaggctgccgcggtggctcacgacgttgccgtctactgtctaagtaggccttcttcgttggacaaacttaacttccccgaaaccttgtcttcgtacagtgttcagctcagggacatgtctccgaggtctgtgcagaaggtggcttccgatgttggcatggatgttgatgcaagaaacattgttgcgggcaaaacttcaacggtgggggcagaaactaattgcgagagtgatgagaggactagtactgcgtctgtgtgtaatgttgttggagaaggtggtgctgatcattcggatgtgttttggtgggatgatgatggtgggtcttggcatggaagtggtggagattctacggaaagggatgccttgagcatttccattgaagattatctttagctgttctaggtttcaactttagttatctttttttttttttttttgagttatgatcgatgcgcatagttagtagttacagataattactgctagtgttggtgtttaaacggtcagagatgatgatatataatttgatgtgcgctagctgccttttgaagaaactaaaaaaaggtaaaacaagaaagattgtacccccaaaatgaacttggtcaatttcacactttcacgccatttgcattttgtgcacgttgttagttttcaaattgttaattcccttgctaaacccactcaaacttgagtgcgttcaccttttattaccacgtagtaactgagagttaacgaaaatatttctttataaaaattatttaccatttagtgtctttcgtttacttgtaattattcaacttgtcaataagatgaaagttctaattttagatataataaaattcagctagtatttgtgaattactcactt

SEQ ID NO: 120578 - DNA, 795 bp, Glycine max
  Clone ID: PAT_MRT3847_79890C.1
ctgtgtttgagaggactaaagttaacagatgggtgacaacaacataggcaaagtcttagagagagaaggctttaagtacaacttcacggcagctgcaagtgacacctctgcacaagatgaggtgattaaagagcaagatcggttgcttccaatagcaaatgtggggcgcatcatgaagcaaatccttcctcctaacgccaagatctcaaaggaagctaaagaaaccatgcaagaatgtgtgtccgagttcattagctttgtcactggggaagcttctgacaagtgtcacaaggagaagcgcaagaccgtgaatggcgacgatatttgctgggcccttgctaccctagggtttgatgactactctgagccacttaaaaggtacttgcataagtatagggagttcgaaggggagagagcaaatcaaaataagggtaacaacaacacttatgaaaacaacattgcaaacatataaattaattatgtggaaggtgaactctttctccaattcccatgatcaatgtgattgatagttgttaatctgatcttctagttttctcctgaatttgagatactcaaggggcttgtatccttatgtgatatatatatgacgtgagtcatgtatgcatactcacgtgttttagacctgatattttcatcaagggttgaaattaccctagatgaacacatggtagcttgagaatcatgtgagttacaactaatctttgtatttgtctatccaatgataagcttggatcctttccagaaaaaaaaaaaaaaaaaaaaaaaaaaaaaaaa

SEQ ID NO: 120579 - DNA, 248 bp, Glycine max
  Clone ID: PAT_MRT3847_79891C.1
attaaatttaaagatcaaacagcagaaccaagtggttataaatgccttttgtgcaagagggatctctcctacgcaccagaagggcctatttcccagccacctgttccgcctgctactgctgttctaccatgtggccacacctttcatgattactgtttggagcgaataacccctgatgaccaatccaaatatcctccatgcattccttgtgctcttctcgagtagtgaatttaggcttacattttgaa

SEQ ID NO: 120580 - DNA, 1213 bp, Glycine max
  Clone ID: PAT_MRT3847_79892C.1
cagactaccacatagctcatcatattgtgagagttcatcaaaagcgtgaaggtgctctggctccagcattcactacagcagaactgcgaggttatatagcttatgcaaaaactcttaaaccaaagctctcgcccgatgccagaaaactattggtagactcttatgttgctctccgtagaggtgatacaaatcctgggagtagggttgcataccgtatgacagttaggcagttggaggcattaatcagactgtcagaggccattgcacggtgtcatttggacaatgaggtacaacctcgtcatgttcgtctagcagtaaaactgctgaaaacttccataataagtgtggaatccagtgagattgatctgtctgagtttcaagaacaaaaccacaatgatggtgcaggtggtggcaatgaaaatgataataatagagatgctaattatcaagaggggaatgatacagcgcagcaagctgccggaaatggtaatgatcaagtgggaaacgatgcagctcagcaagccactggaaataatggaaatccagcagatggatctaaaccccaagtgagaaaactcattatgagtgatgaatattatcagagagttaccagcgcccttattatgcgtctaagacagcatgaagaggctgttgtgcaaggagacggtttgtctgggatgaggcaaaaagatttgattcaatggtacgtagaccaacaaaatgagagaaacaactacagttcgatggatgaggtgcaagctgaaatttccaaaattaaagctattatagagagcttaattcggagagagggccatttgatagttgtagataatggggaagccgcggcagcagcagcagaacccccaggcgcaccaagaaattaccgaattttagccgtggctcctaattatgtcattgattgagagtccaagggtgaaagaaatttggaaatcacttcattttattcatttaaagttattacagtgacccaatggttgactatcttgagctgcaaattggttccttatctgttgactgtttatagtactagaaaactgatgatggcctaatatataatgcatttgtatttagagtatattttgttcattatttatcggtccttgtcatcatcttttttctactgaagagagacttgaagaagtttgactgtttgcaaattagacacctttacacgtgctgatagagtttaatt

SEQ ID NO: 120581 - DNA, 290 bp, Glycine max
  Clone ID: PAT_MRT3847_79893C.1
agactttggggatgaaaacttttggataggcgttttgctaacctgttcagtggccctcgaaattatatgaccgtgcatggaatgctgatgctgcactacttgtaagttgtgtttctatactggatatacaatcattgatgatctccctctgagattcagtaatagacgatatggatcttctgacatgctaatccttggcactctgtaaatgatgaattatatctctcgacactatatgcgtaaagtgagaggctctgatagccaaatctcgtatgaaacttcctgctttg

SEQ ID NO: 120582 - DNA, 248 bp, Glycine max
  Clone ID: PAT_MRT3847_79894C.1
tcgcacacacgttcttcatatcattcataatgtcaaaattttataaaataccgatacctatcggaatgatggcaactttacccagcactatgcaactcccttcccacatttacaagatcatgcacctcactacttgtgaacaatacgcatcaattctactcgaatacatccatctcgtattctataaaatcttatcatcatctactcagtccttgatatcaatcaaaactggaatcatttaaatgcta

SEQ ID NO: 120583 - DNA, 567 bp, Glycine max
  Clone ID: PAT_MRT3847_79895C.1
aaaaaggaaaaagaaaccctacttgcccttatagccataaaacaaaactagggttacagggggatgacaaggggtttttgggaaaattggaaaaaggaaaaaccatatatttcccttacccttcacaaaaaaaaaaggcaaaaaatcccccgaaaattgaacaaaaacagggggaaggaaaggaatcttgaattttttcaaacccaaaacgacggatttggaagacaaccccaccttttcccccttttaagggggagcaaaaggaatttataaaaaatggggtcaaattccttcggggggaaacccccctttttaattgggccaacctttcgaggcaaaccaacacttcaacggtttatttttggaggcccccattcggggatactattttcccacaactatataaaaccctgggcccaaagaaaaaccccacattgtccatggcccctttatttaaacccaaatcccctaggctcctttcaacccaaaaaattcaaaggggacgggcccggaaacccctcttggggatctggaattccaacccgtggagtggggaatcaaaacccg

SEQ ID NO: 120584 - DNA, 341 bp, Glycine max
  Clone ID: PAT_MRT3847_79896C.1
aattctgtaaatatatatgtatatgatattacggtcaataatgatgcactcacaaacttttctacacctttactatttaaggtaaaaaaatctctaataaaccttttattaccacattttactaaattaatatttcactttaaaaaaatcctataattttacataaaaacttatcaatttttaaattcaacttacttaacttctaaaattactatcaaacatactctctttattccaaattacaacttctactttaaaccattaattctcaccattaacacatacttttaaattaatcttcacactttactcatcacaatttctcatttacacttttttat

SEQ ID NO: 120585 - DNA, 246 bp, Glycine max
  Clone ID: PAT_MRT3847_79897C.1
ctcgagccgattctgctctagtaaaaacgacagtgtctcagcaggcagcagcctatatctaatcagaatgtgactgttgatgggtgctttcctacaggtcatcggaattgtcaccgtcgaagaattcgggaccagaggcggtggatcaataacttaccacgaggcggaggcactgcaatacgtacgtggcgtaacagacgttgcggaatgacacgtgtgcttatggatgcatgaattaccagagag

SEQ ID NO: 120586 - DNA, 485 bp, Glycine max
  Clone ID: PAT_MRT3847_79898C.1
caaatattcaacccccaaaaccccaaaaattaacttgtagtaccttgagaaaaatcagttgagtccagctgtagatgaactgcttcagattcaggactataatccaggtgtttggtttatgcattgtcatttgaaaattcatacaacatggggactgaagatggcttttgttgtggataatggtaaaggaccaaatgaatctctattaccacctccaagtgacctccccaagtgttgagaaaattgctaagagtaacattctatacacaatgaggaagggaaaacatataaagagaaatatatatgtgcaaaaggaaggaacaatcaaggctaataagatccaatgacaagttgccatgtatttttttcctttttcatcattttttttgtattgtttcattgttcgtactctctcctctttctccttcttgaatgatatttttggctttaattatacatataaatgtcaatcaaaattttaaaaa

SEQ ID NO: 120587 - DNA, 169 bp, Glycine max
  Clone ID: PAT_MRT3847_79899C.1
caatgtgattaagaactggaattacactttttttattgatgcaatccacattttttatacttaaatcctcaacttccaattttttcttttaatactatctattttaatcaatttccacatccacattacccaataaagactccttattcttcattgaactcatttttca

SEQ ID NO: 120588 - DNA, 1842 bp, Glycine max
  Clone ID: PAT_MRT3847_7989C.1
catccaagctctttaaggtgccttttcatttacaacctgactcttgaaaaatgtttcttcaatcctcaacttcatattcttttgattcctgctatatttctgagcaggcactgaaaaccttctaagaggagccctctgctgcagacggaggggatttttcaatgtccaactcattttcttgtctttcctggttggtactactcaaggtatggcttttcaagtgttgttcatttgtttgatctcaaccatcgtgtttgcatccatactatggagaaaacaaaacaaaaacaagacccttcttccaccgagtccaatgcccctacccatcattggacacctccaccttctttctccaacacctcaccaagattttcacaagctctcactccgctatggacccataatacacctttttcttggttcagtcccctgtgtggtggcttccacagcagaagccgccaaagagttcctcaaaactcacgaacccgccttctccaaccgccccgctaacactgtcgccgtcgaaaccttaacctacgcgtccgaagacttcttgttcgcaccctacggaccctattggaagttcatgaagaaactctgcatgtccgaactcctcggtggccacatgctggaccagtttcttcccgtgagacagcaagagacaaaaaaattcatcaaacgtgtcctccaaaagggtatttctggtgaggccgtggattttgggggagagttcatcacgctctcgaacaacatcgtgtcgagaatgatcgtgagtcagacgagtactactgaggacgagaacgaagttgaagagatgaggaagctggtgaaggatgccgcagagctctcggggaagttcaacatatcggacttcgtttcgttcttgaagcgctttgatttgcaggggttcaacaagaggctcgagaagattcgggactgctttgacaccgtgttggacagaatcataaagcaacgtgaagaggaaagaaggaacaagaatgaaaccgttggaaaacgagaatttaaggatatgcttgatgttttgtttgacatatctgaagatgagagttctgaaattaaattaaacaaagaaaacattaaggccaatatcttggacatattaattgctgggactgacacctcagctgtaacgatggaatgggctatggcagagttaatcaacaatccaggtgtgttggagaaggcaagacaagaaatggatgcagtggttggaaagagtagaatagtagaagaatcagatattgccaaccttccttacttgcaaggcattgttagagaaacattaagacttcacccagctggtccattgctttttagagagtcatctagaagagctgtggtttgtgggtatgatattccagcaaagactcgattatttgtcaatgtttgggctattggtagggaccccaatcactgggagaaccctcttgagtttaggccagagaggtttgttgaaaatgggaagagtcaattggatgttaggggacaacattatcatctacttccgttcggtagtggaagaagagcatgtcctggtacttctttggcattgcaagttgtgcatgtgaatttggcagttctaattcagtgtttccaatggaaggttgactgtgacaatggcaaggtgaacatggaagaaaaggctggcatcactcttccgagggctcaccccataatttgtgtccctattcgaagacttaacccattccctgttgtgtgattgttttttattttaaacatcatttttccattcacgtatatgatatgatgtcatgtcaaacatttatgcactttttacataatatatttggggattcaaat

SEQ ID NO: 120589 - DNA, 231 bp, Glycine max
  Clone ID: PAT_MRT3847_798C.1
tacgcgttcgtgaggcgttctcacaaataattgtttttttagttgtgtagtcatgtgtattctgaggaggatttcactcaaagtatggtctgttaattaggtatataaatattcatcaattattagtaatgttctcttagagcacgatggattcccttctgcctttcactggctaaaaaacaaaataaaataaatatattttattattaataatataacttaaaattataa

SEQ ID NO: 120590 - DNA, 600 bp, Glycine max
  unsure (1)..(600): unsure at all n locations
  Clone ID: PAT_MRT3847_79900C.1
ggaatgcctcgtttctttaaacaaaataatgaacctctcaaacatctcgccctcagacttctcatcaatttgagcttcgatagaactgcaagacagcaaatcgtatcaaagggaatgcttcctttgattgtgaaccttctcaatgtgaatcaactcagacttttggtgcttatcgttctgttccaaatcagctcggaaagcaaattgagaaactcctttgctgacactgaatgtcccagattgatctataagctgatcattcatttccctgagcctattgttggaagagagttgatagcattgggaattaatcttgcagcaagcagaagatgtgcaaatattttcgccgaaggtgaacagcttgatcatctccttcaaagagccttcaagtctggtgatattctcctcttcaaaatgattagaaatatctcacaattctccgaccttcctgaaaccaaagattccttcagagcatatgcaccaganatcataaagttgggaatgagcaagaacgttaacgatgatctgaaggtggaattgattggaattgtgagtacnattcagcttgtagatgagtggtatgatagactcgagaataac

SEQ ID NO: 120591 - DNA, 817 bp, Glycine max
  unsure (1)..(817): unsure at all n locations
  Clone ID: PAT_MRT3847_79901C.1
ccttgtgtcatgaatcagcccaagctatcagaccagccactactaccagaccaaggggagacaagtactcacctgaggataaaaaggcacagcacacgtcctcaatactggagggactgcataacaaacttggaccagggatgccgagctggcaacctgtcattggagggagaaaatcctgtctgctagaatccaaattctgttactcattctgttattgctttccttgctccataggatctgtagaggaattataataatagcttagcattcatgtgcccatatatacgaatgaatgatgtaatggaatgcaagcagaaatataatcagaaattccctctccttaatctctctttctggaggtacctagacctcaaacgctaggatccatagagcagaattttctgctcataacaccttgtctaccataatacctactccattctttccccaaacttttcccatgtaccagagcttaaaacctgcaatatccatctccttggctttttctccaattcatttagtctcttgcaggcacataatgtgaatccttctctgaatcatggtgtccaccacctccacagacttaaatgtcaaagtagcaaatctgatcaaacacttctgaactagcttatttacccacattcatctagaanaatgtgaggactcttgctcatttagcactacaatccaggcgccaatgtagcanaccttactcatttgacactatatttggacgataccatagttntaaaaaccaactggtcatcgaacccatagggcattgggtcattggggtagttggttactaactgaa

SEQ ID NO: 120592 - DNA, 258 bp, Glycine max
  Clone ID: PAT_MRT3847_79902C.1
tggggatcaagattgagcagctgcgtcggcacgagtttcggcctctgaagcggacgaggcagctgggatcaatgtggaagagcgccagttcatctcaaactttgtgggcaggtcccctgtgcgtgatgaccagggtgctccaaggcaaattgcgaacctgaacaatccgtcagaggaagagctcgccatgttgctgcacctaggcgaccagtagcccaagcggcttcgcagacagaatccgacctcgacgggaaacgg

SEQ ID NO: 120593 - DNA, 456 bp, Glycine max
  Clone ID: PAT_MRT3847_79903C.1
gcgtacggctgcgagaagacgacagaaggggacggctaaaagctaaatatcatcaaagtactcaaattagcatggctgtcatggttgcattcttgaatttgatcatcatcttttcagtagtctctacaacagtaaaggatgccactgctagggacaaaactgttccagcagcaattctgcgaatgcacttccatgattgtttcgttcgggggtgtgatgcctctgtgctgctaaattcaaaaggaaacaacaaagcagaaaaagacgggccaccaaatgtttctttgcatgcattctatgtcattgatgcagcaaagaaagcactagaagcttcatgccctggtgtggtctcttgtgctgacatccttgctctggcagcaagggacgcagtttttctgtcaggaggacctacatgggatgttcctaaaggaagaaaggatggtagaacatctaaag

SEQ ID NO: 120594 - DNA, 1662 bp, Glycine max
  Clone ID: PAT_MRT3847_79904C.1
aatcaatgaatcataaccatgtattatggggtggaggatgatgacattgtgatttgtgatcttaccaactactcttgaagagtgaagatcatgaaactatagcttaagactggatttaacatgaatatgtaattaaattattctgatcgagagtaacatacaaataaaaaaaaaaaaggaggaacatcataagccacagaaagctaccagaggcttgaaaagtttaaccttcatttagtccacggagcataaagtgaattgtctttttgtaatgagaatgcttcaacattactactcttcattgacagtacttcttaacgaaatgatttcttgggccacattatctcacacaataattaatctcttttatatctataatacgccattttccccatcatagaatgggacggctaaaagctaaatatcatcaaagtactcaaattagcatggctgtcatggttgcattcttgaatttgatcatcatcttttcagtagtctctacaacaggcaagtcactgagcttaaactactatgcaaaaacatgccctaatgtggagttcattgttgccaaggcagtaaaggatgccactgctagggacaaaactgttccagcagcaattctgcgaatgcacttccatgattgtttcgttcgggggtgtgatgcctctgtgctgctaaattcaaaaggaaacaacaaagcagaaaaagacgggccaccaaatgtttctttgcatgcattctatgtcattgatgcagcaaagaaagcactagaagcttcatgccctggtgtggtctcttgtgctgacatccttgctctggcagcaagggacgcagtttttctgtcaggaggacctacatgggatgttcctaaaggaagaaaggatggtagaacatctaaagccagtgaaaccagacaattaccagcaccaaccttcaacttatcacaactgcggcaaagcttttctcaaagaggactgtcaggggaagacctggtagctctgtcaggggggcacactttgggtttctctcactgctcatctttcaagaacagaatccacaacttcaatgctacacatgatgttgacccttcattaaatccatcatttgcaacaaaactgatatcaatttgtccactaaaaaatcaggcaaaaaatgcaggcacctctatggacccttcaacaacaacttttgataatacatattacaggttgatcctccaacagaaaggcttgttttcttctgatcaagttttgcttgacaacccagacactaaaaatctggttgcaaagtttgccacctcaaaaaaggctttttatgaggcttttgcgaagtccatgatcagaatgagtagcatcaatggtggacaggaggttagaaaggactgcagaatgatcaattaataagtcttaaatcaattcaagttaaattgatgttccaaacaagttagaagtatgaacttgttggatcaaatttcctagatgccaagaatattatgtctttttcctctattaaagaaatatgtatatttatctgaagttaataaaatctcaagcatgtcttgggaaattaatttagaactcagttacgaaataaaaaataaaaaaaataaatttataatttaaataacataaattgaggtgaactctataaaaaaaaattgaa

SEQ ID NO: 120595 - DNA, 268 bp, Glycine max
  Clone ID: PAT_MRT3847_79905C.1
ggaaagggtttgcctttaacaagaaaaaaattccaattttggggggatttttaaacattttttggggaaccccccgggaattttcgaagggaaaatttgggaattccaaaaaaaaaaaaaggaggtagaacccttttttaatgtcccggttttttttcttgggacccaccccgggcctttaaaatttaaaaaaggggccgggcctaaaacccattaccggtttaatacttaaacccttgggggggaccaccctttggaatccttttgg

SEQ ID NO: 120596 - DNA, 185 bp, Glycine max
  unsure (1)..(185): unsure at all n locations
  Clone ID: PAT_MRT3847_79906C.1
ctcacccaatattatacgtatcataactataactctcttcatcacaccagaatactccactatcgntacgcaactacacatgtatactttaatagtccacgtacaatactgacgatctctatcattatcctatcatcttctcatatagaacaacgatgtatgtactatgcaagatctatgacgtt

SEQ ID NO: 120597 - DNA, 480 bp, Glycine max
  unsure (1)..(480): unsure at all n locations
  Clone ID: PAT_MRT3847_79907C.1
cgtaagnctcggtaattcggctttcgagctaatgtcctgccacttgcacgtccatgtcatgcgaccatattacttgcaacctcacacacatgtacagtaccatggctgcaaccaacgaagcagaagaagcagcaggaggcaaaagggttcagtacccactggactctgcctcctattttcttctgaacgagatcggctaatgcgttagcgcccttttctacaaagacctctgagtccccatgaactctgccgacgtcncattttaatccatcgacctccaccgattcaaatctgacttatacgacgtccgttgcgaggccaaaaccctatcggtactttcccgctcgaacgtccgcaaagcacactgtgtacttcaccgtnnnacannctcctcggggtggtgatgccgactcatggccgcgggatcactttagtccgtcatcgctcattcccaccactgcggcttaacggagccttgca

SEQ ID NO: 120598 - DNA, 302 bp, Glycine max
  unsure (1)..(302): unsure at all n locations
  Clone ID: PAT_MRT3847_79908C.1
acgggcatgagatcaaatctctcatcatatatttaagagacatgattatttgtcaatcatattacaccatattgatatttgtcatgatttgtgaataagagtcacttgaacacacttaacatttgaatttgaaactgattcaaaagttgggcagcgtgatttccaaacttggtcattggcaaattgttacatgcttcaacaattggaaacataatcttatttatcaggtctaaagggaatgttcttacacgatactcagataatggncaatggaaacaccatttgatttccattttccaaca

SEQ ID NO: 120599 - DNA, 374 bp, Glycine max
  Clone ID: PAT_MRT3847_79909C.1
gtaatttgttgctaacaacagacacttcacttcggctgttttttttttcttttcacccgagagttttagagggactgtgacgccttaaggggttgatggtggactcgactaggggaactacgaaccctaggatttcatcactgaaaccatgaatctgaccgatgcaaacctttcacttcttcccagcgaaactgtgacattcttgagcgcaggaacttccctcatggactaggtggctgaagaggctagtcaccagtgagatcaagctgcagatccaagtgcgtacccgggtctgttggggacagagttcttgtgctcatgggcgtcccaggcaaccagttgccttaacaacttgctattatctagtgcatctg

SEQ ID NO: 120600 - DNA, 320 bp, Glycine max
  Clone ID: PAT_MRT3847_7990C.1
gcttggaacctttgggctgattgaagtgcttgcatggtcgtgagaagatgatagaagggcatttaccaaccgcgataaaatttacaaactcctcgatggaacaaattctaacccaccgtaccgtacaacattacgctaacgaagccgcacgtcctttctatttccatggcgcggtcccctacggttatacccctgtgagtttaacatgccaccgatataaacggtgaatttgccgataacgacgacgagcaccatactaggttagttacaattgataatggacggtgccctattccgactaattgaaatgggctgcgttt

SEQ ID NO: 120601 - DNA, 372 bp, Glycine max
  Clone ID: PAT_MRT3847_79910C.1
atcataattcaaggttgcccccttgtgataccctccgcctcccaaatctctgccaaccctggcctggccggatactttttccgactgccctacgaaaccgataacgatgccaacgtccagggctcccgctagaccggcctactacccggatccaaaggctgcggtaattacagacagcatgctaatgacagtcacgcctatcacatactaacgctgggtggcctgcaagacgaccacatcaccgtttctatgcatgatgacacggcatccaaagacgaacacccaaagcctggagcaatccttctcaaaccccatggacgagatggacatgactgagaagcccacgctcacagcgaccaagaacgcactgca

SEQ ID NO: 120602 - DNA, 1030 bp, Glycine max
  Clone ID: PAT_MRT3847_79911C.1
agcgcaatattttcttctatctcatcctttcctttaggagcaaaatattttcttctatctcatcctttcttttagttttatttttatttttttatcttgggtaaaaaaaatcatgggtgttttcacttctgaaagcgaacacgtttcccccgtctctgctgcaaaattatacaaagctattgtcctagatgccagcaatgtcttcccaaaagcattgccaaatttcattaagagcgtagaaaccattgaaggagatggagggccaggaaccattaagaagcttactcttgctgaaggtttaggttatgtgaagcaccacgtagatgcaattgacacagaaaactatgtgtacaactatagtgtgattgaaggcagtgcattgtcggagccattggagaagatatgttatgagtacaaactggtggcaaccccagatggaggatccattgtgaagtccacaagcaaatactataccaaaggtgatgagcaactcgccgaagaatatgtgaagactggcaaggagagatctgcaggtttcaccaaggctattgaggatttcattcaggctaatcctgattacaactaattaagtcaccaattataattatgtctcagttttattaattatggtcattttgtgttttttttttcccttcttgtcgtgtgttgctttaatttccaataaaattattgtttgactttgcttcatgagaaaagtttgagattattacaaacaaattagaaaaaccataaataaagaatatattaaaaataattaggttatctccgaagatcgtgcgaacactggcaatgagagatctgcaggtttcaccaaggctattgaggatttcattcaggctaatcctgattacaactaattaagtcaccaattataattatgtctcagttttattaattatggtcattttgtgttttttttttcccttcttgtcgtgtgttgctttaatttccaattaaattattgtgttgactttgcttcatgagaaaagtttgagattattacaaaaaa

SEQ ID NO: 120603 - DNA, 328 bp, Glycine max
  Clone ID: PAT_MRT3847_79912C.1
ggatcacacttcatactgaaaattaatattcatgcttttatcacaaacgcggcctaagcccaaaacaaaattccgcaaaaacctttttgggttaacggcgcgcgttttttgccagaccaagacgcaaaacctctaacctcaaacgcaatggtcccacaattttacccaaacactactcacgctaaaaatacgggggccccaaaccttgtggtatctaactgcggggccagaatttaatgatccgctgggaaaaattggcacacaaatgtgtcacccccattgaccatgggctgtataaatgactcctgaccccgccccccctttgatg

SEQ ID NO: 120604 - DNA, 625 bp, Glycine max
  Clone ID: PAT_MRT3847_79913C.1
gaaataaatttaaaaatatttctctttcaataaaaaaaacacaaaataaaaatatgagcagagaagtgtgccatcatctgtgtttccattagttagtattattgataaaattaaatgcattcctaacttcatatcaattcccaaactcttaagaaacatgtaaatttaaccccttttctttttcctaaaaatcctcatttttaaatatattttaggtaacaaaaatatatagttgtgggtgtcctaaaacacttcaaatcactctccattatcaatttaaaaaaaaaaaacccaaagggatgttgaaaaaccaactgggggcccaaagtaataggacgaatgcacctgcaaaattacgtaacccgaaaataataaaattttcaattgcattcggcaaaccctttccgtatcttccacactcgggtctccaacgagaacgcgccacgtcatccccaatcgggtttttcccctcactttaatctctcttcccttcgcactttcccaactcctcaaaattgagtggcattacctttctctgaggccaagttccaacgaaatgggaacagggaaagaaacaaaaaaaacaccctgatgctgaaggcggcaccgggtgcagtaatctact

SEQ ID NO: 120605 - DNA, 960 bp, Glycine max
  Clone ID: PAT_MRT3847_79914C.1
acccggggatggggccagggcccgtcacccgtctccctgtcctctgtcccctgtactgtaggtgaatggcgtgtggcatgtgctccctgctccctgatgaagagctcggtcctcaaatagagtgtcgagagtactcaatacttgataatccctctctgccgtcagaggtacttaagtcatggcttgatgttcagctctgtaaagaaggaacccaagattgtgatgcatcagcatcaaatgataccaatgttggaggaggagtacttaaatttcctaagcacagcaatgaagaaacgtttatgaaagtattctcatcattcaaggatgtaaaagttatcaagttctcttcagtgcaagaggcattcacaggtttcactgacaaggaaagggaagataaattcagaaaccgtgttaagcggtatgtgggcatatggtgttgtgtgccggatcacactcctggtcacatatattatgatatgtactgggatgagaaaccaggatggaaagcagttcctcctcaaacttctgaggatgatcatccaccttattgaaatcaccttagatttgtgttagttaaaacactgatgaatggggaaataagacacacaaatccaaaggagatttagtttctaactaattgtcaacaagattctatacttacacaagtgaagaatctgtatccatattgaaaatgtaagatattcttagagattagacaattagttcttgtgtaacaattaagaatttattttgttttgtatcatgttaccaatatattgcaaccaagagaaatggaggccctaaatttcttagagggtgcactttttggtctttgatgtcttggtagatattgtattgactgtaattaaatactggagacattcaattgtatcactcttttcttccatattttattttaaactgaaaaaaaagtgatgctcgattttctgttgtcaaaaa

SEQ ID NO: 120606 - DNA, 262 bp, Glycine max
  Clone ID: PAT_MRT3847_79915C.1
cgctctgtttctgtctctgtgtttgcggctgaggattccgaacgagcgaccttcttcgtttctcgcaaagtttaagtcatcatgggtaaggaaaagactcacatcaacattgtcgtcattggacatgtcgactctgggaagtcaactaccacatggtcatttaacgacaagcgttgagggaatgacaagcgcgtgtaattgagggacgtagaaggaggcagctgagtagatccaagagtcatcatttcagtctgggtgcctg

SEQ ID NO: 120607 - DNA, 222 bp, Glycine max
  Clone ID: PAT_MRT3847_79916C.1
tcggctcgagctagatctagatcgcgatgtgtcttccttattgtagatggagtcgtcttccataatgtgctgcttgattctccgcatcggatatactggcggagtatgatgtcggcaatatactggtctcacagagaagcactttcgctttccctaaagctattgaggcttcaaaacatgctagatcacttagagtttcgcatgactggaaagactatctca

SEQ ID NO: 120608 - DNA, 199 bp, Glycine max
  Clone ID: PAT_MRT3847_79917C.1
caaattaacgactgacttctatccttcgactgatgcaaaagctgatgacacaggtgctgagtcaaaggagtatatacatattcccatacagcaactaaatgctaggaaaagcctgacaaccgttcacggattgaaaaatgaatacagctctaacaaaatactgaaagacgtaaatacagaattctgtcgcaatgcaaca

SEQ ID NO: 120609 - DNA, 117 bp, Glycine max
  Clone ID: PAT_MRT3847_79918C.1
taaacattgagtgttcaatgactcaatggcgacctgtgcactaacgggaggtgcctctatgacgtctccgcagcctgcatctctgtcaagaaggccaggatacctccttcctcacct

SEQ ID NO: 120610 - DNA, 482 bp, Glycine max
  unsure (1)..(482): unsure at all n locations
  Clone ID: PAT_MRT3847_79919C.1
aggatagtagacagagtaaaaaagaaaaagatgttcttgttgttgatgtcgatcccaaaaaaacctgacccagatgatgctcctgcctcaatttctggggagtcttaaatactatctcagctgatttgggtggagctccctttcttcactatccttctttttcattttttctgctctaaatttctattccgtatttcttttgtgctaccttctacattattgaccattggatttgttaatctcaaatacttacaagttgttgttatggaaaattatctttatgcaggaatgtggtttcatttagtgatggactacctaatgataaagcttcattcacagtcagtgaattccctcttgggacctgtggcaggagagacccaatgaaccctacttgttccaaaatttctctaaccgcanaggtcctgcagaaacttctaatcttttcaacacttaccttcaagaacatatgatatgatgtatgg

SEQ ID NO: 120611 - DNA, 595 bp, Glycine max
  Clone ID: PAT_MRT3847_7991C.1
attctctcacatagtctatctgattccctctgccacttacacacaatacagagagagatgcaattgtcttcctcggaggagcagcttgtggaagcgaagggccttcaagaaacagatatcttcgctgctacgcacccggatgtactgttccaatacttaggactggagcgcaagagcagtagtaattcattgacggcgatgcaaatcccgtatgaactgatgacatttgtattacagagtgaccattaccctgctatgcagcgtgatcgcatacaagctccaccttacaatcatggacgacgactgattttctgcagatgactttgtcgatcacgctacgatcgatgagaaggattattgctgaaatggccagagaacctgtcacatgtgctacagacgctctagaagactgtgaatacaacggacacttatataggagagctaatgcatttaccaagaggaaggcaaccgctcctttgatctcgcctatgttgtgacatacgaagcagaagtgacattttcttactgagctatttcttttctgcccgcctgtaaattatctcatagccttccaccctcccttgcagtaaacttt

SEQ ID NO: 120612 - DNA, 139 bp, Glycine max
  Clone ID: PAT_MRT3847_79920C.1
ggcccagcaataattctcggtgcacaggtggctcctcttttcattcgaaatcatgtcggaacccaagatacccgatgtgcttattaactgcgcccaaaacacacaccaagggtttgtggggcatcttttttaatttttt

SEQ ID NO: 120613 - DNA, 656 bp, Glycine max
  unsure (1)..(656): unsure at all n locations
  Clone ID: PAT_MRT3847_79921C.1
aaatcagatttgataatataaagtctaaattttccaaaactttcaaatggagggctaccaagaattttttaactaactaaaaccaaaaaggctatctatgctgcttcaatcaaaagcagggtgtgccatttacacaccaatcactgtaattccatttacacatgggggaaaaatggacttgggaataaaaatccatcaaaatcattgatgcctcaggcgcttgcttgaagggacttggatgctgacaccaggagttgaattcaactgcgatgtattgtacgatgaaccattggtttgaccagcaaagttaagcatagaagctgaacacgntggaggtagcatttaaataatgcaaggctggaagctgcggtttcagaagcgtatttccagtgtctccaaaagtattaggcacaatgctattgacatcacatttttttatggtaagaggtggaactttgatgttttgtaaaggaggggggtttctccatttaggaagtggccctgcaaggagcaatgttttgagcaatggaccagcatccatcacagcctgaacgaatttacccttttggggaaaacctctgtctttggcaagacaatctataactgcatcggcagtgtcacacattggcttttctgaaggaaccatcaaagcatgc

SEQ ID NO: 120614 - DNA, 381 bp, Glycine max
  unsure (1)..(381): unsure at all n locations
  Clone ID: PAT_MRT3847_79922C.1
ctcgagccgctgatcttggttctatgctaggtacaagagccaaagcgcacccacctagctccaagattcccttgtgctaggcaaactacatatttacacaaggaatcttgcaaagaaaatgtgttggttttgggtccaaaattattgaagttgatcaataagggatatagaaaggctaatgagaccatgaagtcttaataaacttgcatgctgaaacgaaaatctttccattttgtcatctagagtcactgaaaaccagtataacccgggaaagtgttgtgttgcatagaacgagcctttattattattattattatattagnatgaaaatagttcatgttggaagtagtaatttctaataagatttattccatatttaaa

SEQ ID NO: 120615 - DNA, 128 bp, Glycine max
  unsure (1)..(128): unsure at all n locations
  Clone ID: PAT_MRT3847_79923C.1
agttgngcnganggngnacgnnagctcnnaattgcggctcgaggnggntcnccgnanacncttctcagcnggnattcccaacattgatcgctganctgnnagangntntnaggtncnttacngttttg

SEQ ID NO: 120616 - DNA, 1626 bp, Glycine max
  Clone ID: PAT_MRT3847_79924C.1
acagggtggagatcattatgccaagtttggagagagacttaaatgacacgagggggtattatgagagtggaaagactaaggaagcgtcctggagagaatcgcagctcaaagggttgcgtcgttttctcattgaaaaacaagaagatatcatgaatgccctctggcatgatttaagaaaaaatcaacttgaagctttcagagacgagataggaacgttgattaataaattaaaccttgcagtttaagtttttgaaggagtcaatgaaaagcgttaaggagccgacgatcttattggaacccccaccagaagcagtaattgtgccggatggtattttccgcattattccttctttgattttcgcctttggaatttcgaagaagcttctaataggagatgtaactgctagaaatgcagcagtcttaaatcctacagagttctctccagcatgttgtactctactttcttctaatctctccacttatttggacattaaagacataaaggtcatccaaggagggccaaaagaaactcagcaacttctagagcaaagatgggacaaaatattattcacaggaagtgcacgtgtggggaggattgtgatgtcttctgctgtgaagcatctaactcctgtgactttggagttgggtggaaaatgccctgcagttgttgactccctttcatcttcttggaacatagaggtcgctgtgaagagaattattgtggggaaatatggggcatgtgctggtcaagcatgcatagcaattgattatgtccttgtggaaaaggtggaattgatgaaggtctggatcaagaaaatgtttggagagaagagggttctctccaaaactattgccaagatagttaataaacaccacttctctagattgaagaatcttcttgctgataaaaaggtcaaagaatctgtgatttatggtggttcaatggacgaacaaaacttatttattgagccaacgatcttggtggatcccccactggaagcagcaattatgtcggaagagatttttggcccattacttccaattattaccgtggagaagattgaggacagtattaaattcataaattctagacctaaacctcttgccctttatgttttcaccaaaaaccaaacactgcagagaagaatgatatctgaaacatcatctggcagtgtgactatcaacgacgcaattctacaatatgcagttgatactgttccatttggaggagtgggggaaagtgggtttggcatgtaccatgggaaattctcctttgacacatttagccaccagaaagcaattgtaagaagaagtttcctcactgatttttggtatagatatcctccatggacactaaacaagttacaactacttgaagtctcttacaattatgattatctgggattgctccttgtcctgttgggcttaaagagaccatcaaaacgtttaatctcagatcatgtttagctagctagctagcatatatgcacgtacgtgacttcagtactaattaaatgttacctataagggtatccaataaatattgttctttgtgcaagtcatccgtacttgtggattataacatttgcgtattaaattcttatgcagcttgattttagtaagaaa

SEQ ID NO: 120617 - DNA, 1135 bp, Glycine max
  Clone ID: PAT_MRT3847_79925C.1
gctcggaattcggctcgagaaaaactaatggcaggaagtgcacgagtggggcggattgtgatgtcttctgctgtgaagcatctaactcctgtgactttggagttgggtggaaaatgccctgcagttgttgattccctttcatcttcttgggacaaagaggtcactgtgaagagaataattgtggggaaatatgggacttgtgctggtcaagcatgcataacaattgattatgtccttgtggaaaagggttattgtttaaaactggtggaattgatgaaggtctggatcaagaaaatgtttggacagaaccctcgaaaatcaaaaactattgctaagatagttaataaacaccacttctctagattgaagaatcttcttgcggataaacaggtcaaaggttctgtggtttatggtggttcaatggacgaacaaaacttatttattgagccaacgatcttggtggatcccccactggaagcagcaattatgtcggaagagatttttggcccattgcttccaattattaccgtggagaagattgaggacagtattaaattcataaatgctagacctaagcctcttgccctctatgttttcaccaaaaaccatacactccagagaaaaatgatatctgaaacatcatctggcagtgtgactatcaatgatgcagttctacaatatgcagctgatactattccatttggaggagttggggaaagtgggtttggcatgtaccatgggaaattctcctttgacacatttagccaccagaaagcaattgtaagaagaagtttcctcaactgacttttggtatagatatccctccatggacactaaataagttaacaactacttgaagtctcttttacaaattatgattatctgggattgctccttgtcctgttgggcttaaagagaccatcaaaacgcttaatcgcagatcatgtttaatgtttagctagctagctcgttacttgggtacttttattttattttatttctttttcaatagctgttaagatttaggagcgtacccaataaaaattgttctatgaacaattagtgaacggtacttatggataacaatatttgcgtattaaattcttatacagcttgattaatccattatcgtgat

SEQ ID NO: 120618 - DNA, 402 bp, Glycine max
  Clone ID: PAT_MRT3847_79926C.1
acttggaacgcacaagcattatattaggggtgctgggtatccctagcaattgacacctttaaacatgtgcagcacggcattctgacttttagtaacacaatgccatcaaattactgaacaggaacttgatacactagcaagagaacaatcgaccgaaaggaactttcctaccaacaactcacaaaatcggggactccatatttgtcatcccctgccctactgaactcattgtgatcccactgacagtgacaggagcaccgatgagggaaggatggtattccaacggaagacacactgaaccgtcgcaaggaagtctattggtacggagagactcggctgttactcaaggagtataaaaccacccggcgatgctaatattctgccacaacgtaaggctagtgg

SEQ ID NO: 120619 - DNA, 237 bp, Glycine max
  Clone ID: PAT_MRT3847_79927C.1
cccacaccttcgtccactcgttcatttatttttcatcactaaaattcaacacaagctaatgcagaattcatcacagtattcatcatcatccaactgttacatgacaaatcaacaacctagtcatacaagattcaatatccataagcataatactcattaacgacgacaacatcaatgcttccttttatacctgctcatgcatcactactcatcttaatactcttgaaagacctcaaa

SEQ ID NO: 120620 - DNA, 570 bp, Glycine max
  Clone ID: PAT_MRT3847_79928C.1
ggttaatagagtctttctttgtttttgtttttaaattctttacatgcaacaagggtttgattctttcagaccatatattaactaattcatttgtcttattttgttcagctggtttcattatctattcatttggattctggcaaattgcgcctttgaccaagtagcaaggaccccagttttcaactttaaggtgtagattgtctaatattactttctatatgtgagagaatctttggagtcaggattgtttactcagctgactatagttggaatctgagagtttggtatgagatctaaagtgaggaagtaaggaacttgacatgatttttacctgatgtcttcattctggaactgagcaaatgggctgttgtgtctcaacaagcagtcagagtacttgtagtagcaggagcaatggagacacgatcgctccaacctgtctagagattggattctgtggtcaaaagagtgcaaggagaacatcctctgatcatgttgtgtctctgcaccaattaccctcattaccaaacagaattttcaccaatggaaagagcaggtcttcttgcatattta

SEQ ID NO: 120621 - DNA, 292 bp, Glycine max
  unsure (1)..(292): unsure at all n locations
  Clone ID: PAT_MRT3847_79929C.1
ggttttgtttaaaacaaaccatcctatacttattgattngaaaccccacaaaacttnttattcaatcttcagccacaatgaaaaatgccacatttctgataaacatctgagagcatagaggataatttatagatttgataaaccacaacaatggggaaaaggagcctcctatctgatacctcattcttcccactgaccgaaaaagcaaaaaatgttataagcttttacccgggggctgacttccagttgcatccttgcctgttttttgatttttaaaataataaccacccgg

SEQ ID NO: 120622 - DNA, 2224 bp, Glycine max
  Clone ID: PAT_MRT3847_7992C.1
ctgattcggggttcctttattggaaatggaaaccaagtgaatgccatcttccaaggtttgaccccaacacttttctccaattcataagtaacaaacatgtagcttttgttggagactctatatcaaggaaccacctagagtcccttctttgcatgttagccaccgtcacaaaaccaaaccgtgtccgacaccaaggttctcgtcggtggcattttccttctcacaacgctatcttgtccttctattggtccccatttcttgtacaaggtatcccaagaaaaaacccgggaccacattataatacagtgtttttggatcgtgttaatttgaggtgggcaagggatatggatcaaatggacatgatcgtgttgtcctttgggcattggtttaatgttccttcagttttctacgagggtgatgataaagtcttaggatgccataaccatcctgttactaattgcactaccgagattggtttttatggtccaataagaagggctttaaggattgctcttaatagcataattgagaggaaggtaagtaaaggaaatggagttgatgtaattgtgagaacatactctccttctcattttgaaggtgattgggatacggggggtacttgtgcaaagactaatccttatggagtagggcagaggcaacttgaaggagaaaatgctgtaatcagaaggattcagttggaagaagtggaaaatgctaaggtgaaagcaaaacaatttagagggtttaggttggaggtacttgatgtaacaaaattagcattgttaagaccagatggccatcctggtgcttatatgaatcctttcccatttgctaatggggttaatccaaagaagcctgtgcagaatgattgtgttcattggtgcttgccggggcctatagacacatggagtgggatttttttggagatgatgaaaaacatggcacgagcagcataggagagaagagtgaagcattactcatttttcttgttaattcattgcattgatttttccgccatacaggtgatgtgttgcattagaaactagaaagagtattttgtttttctctttgacagcaaacaacaactttagagtttgtaattagattcgtggtgggagtaatgagaattacagtcaaacttaattttgtaaaaataaagatgtttggttattattcggtaaaaatgaatttgtttcaaaaccttagtttgatttgaaagggattgaagtatgcattgagttggaaagtttacaataagttttatagcaaattttcttccaagattaaagctttcagacataaaacacgtactatcaatttataaatcaatttcattcaaaataaattttgcaaacacttatataggaaaggattgtatcaagtgatcagatatcataaatgaaagaaggaaaataaaaattaccgtagcttttcagggtatataagcccatttactttgccttttgtaatcaaggcattgggtgggtagttcatggtttggtggaaaaattaactccaccaccgacaaagaaaattgaggttcggacttcggatatgcatgtgtgtatccctttgtgtgagaaaaatgaagccaccgaaagtagaagaaagaaaaccatcgtgactgatcagaaaattgagaccagtggtgcggtaaagattaaaaaaaaaatgctctactatcagatctgttatccagtgagttttatcttggtatcaatttatctgtattttggactctttctactgtctgtagatacctatttgggtttattgcattgaggcagagcaccggaagcgaagacgaggtcccaaggtcaaaacctgctctgaagttgtccaacagatatataagctgtactccaaggattgagacagccgatgtgggacttggatatttcccaataagctctaggagaacttgtggcaaacccagtaattattattagtgaaagattttatttgttatctttccccaataattagctactcagcaagttacaagttaaatttttttagtttcaatactatttcaaacttaccttaaacatatgcaggaaaggttgatgcatggatagttggtattcataaaatcgttagtgaagcttaaacttttgattaatggatatgtgtgttcattagatcgatattgtaatttgtacttgtgtgataattgctcctcatgtataagatttttcttgcttctgccgaatgttaggcactc

SEQ ID NO: 120623 - DNA, 462 bp, Glycine max
  Clone ID: PAT_MRT3847_79930C.1
cccaacaaaacctaagggggaaacaatattttacgcttaaaatccataaaaccttcgtttgcaccggggttaaacattgcccatttcaaatgtttacaaaacacccgaacttatgctggcttatgaaaggggggccaaacattccaggttaaatggcttcctcatgggggtaatttaaaaggactgatcatgcaaatctattggttgcttatactacgcacaacgctgttgtgtaaaaaagaatctctttgtgtgcaaaagccaccactaatgtttgggttttttggaacattaggcctttaaaaaacttttaacctgggaggagccatatgtatgcggcataggccacgaaatagggcctatatttacggtggccccaggtccaactgccctgggaacggaggctaggcctccatatgccatgggtccagatgcagaaaggttcattgggtgtccaacacc

SEQ ID NO: 120624 - DNA, 624 bp, Glycine max
  unsure (1)..(624): unsure at all n locations
  Clone ID: PAT_MRT3847_79931C.1
tcggctcgagggatcatttcatgtccttactgcatctagcaagggaacaagaaatctaggtactgagtagggaatagttcctggtgctcggcttgtgcctgacgctccgtagnatgtgtcgcgttgatatgtcactgttgtgtcgggaactctacgcttggactcttttcttttgataagcatcgcacacgcacacttgtcgtcatggctgtgctggatggtgaaatgtcttcttctactccattcacgccgagcatgtaacatctatatttaataacacaaactctagcgattatggtaataacacctggtactcctaccgttgcaaagatttctacacctccatctcctaccaatgcctaaaaagatgatgcgaatgttatgggtggatcacatgttctgcaaaattatgaaacccttgactctaacctaactcctgccaatgcctttagaaaagacaactgactcaacatgcactctatgccgagactcactagagtgaaccactcattttaacatatgcttgtctgatagctcatgccatgttggacgctgactctctatcctgaagaactcttgctgactacatacatgactcagctgctttattaatggggtacagtg

SEQ ID NO: 120625 - DNA, 1261 bp, Glycine max
  Clone ID: PAT_MRT3847_79932C.1
cattccctttaggttccgtgttccaaacagtaagtaactactctcttcttcttctattgctctgtaacggtttttttcattccgcataggttccgtgttccaaacaatgagtttgagtatgagcttgtgcggtaattacagtcttcagcttcaaaatcgcagaatcgtaagctgcaatcttcaccaggatggcaggcatattgttcccatcaatacgcaccaaaaaccttccaaacctgaaaagtgtcttcggtccaaatggaagattaatggcaataacattgggacatgcattggagtcatgacagtggcacacttggttgctccagtcgctgcaaaagctgaagtggctgcttctatttatgctttggctgatggaagcctcggtgactggtttggaggctttctattttcagctggccagcagcctctcgaagctgttcagggccaattaacctctctcagtttcactagtttggctgtaatttatggggctgggcttgttaccagcctttctccctgtacacttagtgtcttaccactgacccttggttacattggggcatttggctctggcaaaagcagagcacatgttgctaggagatacaattgcattcttgggtgttcttgcatcatttgcagcactggcttatggacagagtggccaaggattacctttggctgcttctggtttggctataattatgtttgtgaatcttcttgagatcattgagttacggctgccctcattctttgacagttttgatccacgtgcagccgctgccaatttcccatccagtgtgcaagcctacctggctgggcttacatttgctttagctgcctcaccttgtagtacacctgttctggccactcttttgggatatgttgctgcatccaaggatcctgtgattggaggcagcttacttttgacttacacaactggctatgtttctcctttactcttggctgcttcttttgctggagcattacagagcttgctctcattccgcaagttctcagcatggatcaatcctataagcggagcaatgctgttaggtggtggtgtatatacgttcttagataggctgttcccagtcacaatggtgatgtagaaaatctcttggctctaacacgctgtgatattttacacttttaacagttcaatgtatatatgtcatacaagtattcaattcaaataatccttgccttggaatagaaatccaaatgagactattgcataccacaaaaaaaaaaaaaaaaa

SEQ ID NO: 120626 - DNA, 622 bp, Glycine max
  unsure (1)..(622): unsure at all n locations
  Clone ID: PAT_MRT3847_79933C.1
ggctcgagcagacactttatgaggatgaaaacaagaacagaatgatggagactaaggaactttttgagtgggtcctaaggcaaccatgttttgagaaaacatccttcatgttatttttaaacaagtttgacatatttgaaaagaaggtcctgaatgtaagaaccatccagatgagtacactttgtcataggtggagtgtattatcatttcagtttaataccttgcattgtgcaggttccgctcaatgtatgtgagtggttcaaagattaccagccagtttcaacagggaaacaagagattgaacatgcgtacgagtttgtgaagaaaaagtttgaggaattgtatttccagagcactgctcctgactgtgtagatcgcgtgttcaagatctataacacgcgtctgcttgagatcaggcgcgtgtggaagactttcaagctcgttgatgagactttgagacgcagaggtctctttgaagctctctcattatgagaatgtgccagtatgtatgtgtttaagggatatgatatttttacacagagaaattataaagtcaactggatttgttggtatattagaggtcangtatacaacaaatataaatcgattnngtgatttatgt

SEQ ID NO: 120627 - DNA, 302 bp, Glycine max
  Clone ID: PAT_MRT3847_79934C.1
aactagcgttcgatcccatcggtagcagcgctttacgtaagataccagttttgtagatgtgggatctgctcaatctcttgcatggaatcgcatatgactctgatgcgtgtgactctgttgatggtgccatctactttgtatgtgagcgcttgtactaccaaagtccatggatgatctgcttgcgacgtatgcggaaatgcttctgttgaacctgaagaccatactcttgaaggtgctagggactgcagtctttgcataagcacttgtggggaagttctaaattatcaggcattcactgatgc

SEQ ID NO: 120628 - DNA, 162 bp, Glycine max
  unsure (1)..(162): unsure at all n locations
  Clone ID: PAT_MRT3847_79935C.1
annaaaaacaccaattctccaccctcncattgananaaaaanaacnaaacaannaaaatcaatcattntattntatttgtctacgaaaatggttgatttacnttggaaancatagatgcctngtgccaaaacacnanaactcnctctctccgacaacaagtc

SEQ ID NO: 120629 - DNA, 220 bp, Glycine max
  unsure (1)..(220): unsure at all n locations
  Clone ID: PAT_MRT3847_79936C.1
aggagcaacaacccncaaaaagagggacgaagacgacgagacaaacgcaaccggacacgagctttttttttttaaggacgatcccgagggaagggatattcttgtaataaaccctcccgtaggtccttttggcacaaaggaagaacctgatgatgttaaatctcactatgacagaaggatagatggacgcccaggagatgaaagtgaaggagagcatgat

SEQ ID NO: 120630 - DNA, 815 bp, Glycine max
  Clone ID: PAT_MRT3847_79937C.1
agggccgaagttgaacatcctccacgcgtccggcggtgcctaagtcgtatatatgctatggcttgaaacaggggaacattaggtgctattgataccacctgctgtcaggtccttgaagacctttgaggcagatgatgctatgagatgggcgttctttgctgaagatgttcaggtcttggtggtgtagtttttgtagcctcaaaattttaaatggtctatgtgcctttgtctatgaattattatacagtgttggcacagatgaccgtgtctacttgtgggacatctctgaaggcccagatgatgaagataagcttcaaattactaccaatattgttattgctcttcaaatagtgagggaggagaaagttgaacatcctcaaatttgctggcactgccacaaacaagagattttgatagttggtatgggaaaacatgttttacggattgataccccaaaagttggaaatggtgaagcctttgtggtagatgatcctctgagatgtcctgtggataagctcattgatggggttaagctggtaggcacacataacggggaggtgactgatttgtcgatgtgccaatggatgaccaatcaatttgtatctacatcacaggatgacacggtttgtatttttctgttgtaattaactgctacttttgttttctcaagtttaaattcatttttttttatgaaagatgacaatgtttattaaagcattttcctgatcaggctgattatatctggcttattacaaatggaccacatattttggaataaaaaatgtgggtttcaggcatggacaaatggtgggtgc

SEQ ID NO: 120631 - DNA, 303 bp, Glycine max
  Clone ID: PAT_MRT3847_79938C.1
tttttattaatagatcaaaatgggctttctggacggggcgaatcccaaaaggaaaatggcccttgaaatcacatagcgtctgccgacaaacataaaagcacttcttacactgcaaatcgatgggatacatgcctactatcccaagggagaacgcgaattatttatataatgccctgtcagggcctcggcgtggaggggtccacactaagagaaatcctggcttgctccctaaaggaacaaagactgtgtccggctgcctttaatggtacggtgtggaatcctagctgaaaggtaagggacttt

SEQ ID NO: 120632 - DNA, 521 bp, Glycine max
  Clone ID: PAT_MRT3847_79939C.1
gggctctcttcttgtatgctttatgtgtaaatactggtccaagttacatcttctggattatcatgctgatctatacagaactttatattttacttcagtacctgtaccaaattgtcatccagcactgtgggttgagtatcgatcctcacctattacgagaattaggttttccaacacacaaaatcacatcttcatttgttgtcagttcattacctctctttcttgtctatttatttaccctcattcaaatctccataacacctaaagatggtgaatggatgtcttctactgacttcaagtttaagaggactgatctccatgcaaaagatgatcgtactagttataactggcaagatagagcatgggatctgctaaatcaggttattaacatggtaaaactgataatcataagcttttttaggtattggaaatcactcacacaaggagcagaatctcctccttattttgttcaggtgtctatggatgtcaacttctggccagaggatgggattcaaccagag

SEQ ID NO: 120633 - DNA, 407 bp, Glycine max
  Clone ID: PAT_MRT3847_7993C.1
aaaccccccaaacaataaaaacattttgatttttggggggactggaaacataaaaaccaattttgccttttataaatttaaacagaaactggctcaaaaatccctgggagaaaagaggcttaaactatcggcctcctaactgggggcacctaatttttggccccaccatgaaaatcgaataaaaggaaaaaccaaaccaagcagaacctacaaaggtccaataccctccgccaattgcataaaaaggctggcttccaaggggacctaacggggaaacttataacatactcaacttacaaatccattttttaaactagattttttttttaaaaacccaaagctttaaataccaaattagtcaacccaactttactgaaatatggcacaagactgggggcatgaaaaac

SEQ ID NO: 120634 - DNA, 1019 bp, Glycine max
  Clone ID: PAT_MRT3847_79940C.1
cgagactgaggattattcatcgtgatcttaaagcaagcaacattctcttggatgctgaaatgaatcctaagatatcggattttggtatggcaagattgtttcttgtggatcaaactcaaggaaacacaagtaaaattgttggaacttagtaagtatatcacgatatgaaagggttaattaactgttttcctcagtccttacaaatcaaaatagaggattttttttttcctaattgagcttgatggtatttacatgtagtggatatatggcacccgaatatataagtcaaggacaattctctgtgaagtcagacgttttcagttttggtgtactggttttagagatagtaagtggccagaaaaatagtggatttcaacatggagaccatgtagaggatctaataagctttgcctggaaaaactggagggagggaacagcatcaaatctcatagacccgacattgaatacaggttcaagaaacgaaatgatgagatgcatccacattggtttactgtgtgttcagggaaatttagctgacagaccaaccatggcttctgttgcactcatgcttaatagctactctcacacaatgcctgtgccttcagagcctgcgttttttatgcacagcagaggcttgtcagatattcagtcgagggagtataattcaggggcaacagaatcaaaaagcaaatctgtcaaagcatactcaagtgaggaatcaacatgatgagctttaccctcaatagaatttagtgatacagccttacaagtgacatttttcctttttcttttccccggggaatagtaacaaattggtcatttttccatctagtatgtaaattttccatctacatcctgaattcattttaagttgttgactaagagttttggtgtttgcttgttgctctgatgatgacatgttaataacaacctattacctacagttaatgctaccttgtactatagaaacctattaccgttgtgtatatatcgaacttagaatgaagtaaagtttttat

SEQ ID NO: 120635 - DNA, 215 bp, Glycine max
  Clone ID: PAT_MRT3847_79941C.1
gagagagagagtacgaagcacactgagcacaggatgatgctctctttagtgtagggaagcagataatatcagcacacataggtaggaagaaatactagactactaacaatatagctagataaggtggaactagcacagacacacagcacatgataattcattttatacacaatcttattataatggagctcaacatgcatggactaataaaacag

SEQ ID NO: 120636 - DNA, 140 bp, Glycine max
  Clone ID: PAT_MRT3847_79942C.1
cccattcgtccttgagaaacttgtcacaaaattcaccaaggagtttcccctggtgtatacacgagttttggcaaggattaaatccaaagatgcttccaaagatgcttcgaaacttgctcataaacaagtagagaatcaag

SEQ ID NO: 120637 - DNA, 667 bp, Glycine max
  unsure (1)..(667): unsure at all n locations
  Clone ID: PAT_MRT3847_79943C.1
caagattgtttcttgtggatcaaactcaaggaaacacaagtaaaattgttggaacttagtaagtatatcacgatatgaaagggttaattaactgttttcctcagtccttacaaatcaaaatagaggattttttttttcctaattgagcttgatggtatttacatgtagtggatatatggcacccgaatatataagtcaaggacaattctctgtgaagtcagacgttttcagttttggtgtactggttttagagatagtaagtggccagaaaaatagtggatttcaacatggagaccatgtagaggatctaataagctttgtaagtccctttttctcttttcaaagttttcactcttactctttttaagtacaagattagaagatatgtatagctaattcaaatgaaatttaagaagttgaaagtatgtgaactaagtactgacattttctgcaattgtgcacatccttgcaggcctggaaaaactggagggagggaacagcatcaaatctcatagacccgacattgaatacaggttcaagaaacgaaatgatgagatgcatccacattggtttactgtgtgttcagggaaatttagctgacagaccaaccatgngcttctggtgcactcatgcttaatagctactctcacacaatgcctgtgccttc

SEQ ID NO: 120638 - DNA, 519 bp, Glycine max
  Clone ID: PAT_MRT3847_79944C.1
cacgcgtccgtccatatcttcactcgtaatgggttaatgaatctatgacctgagaaattatgagaagcagcaacctgtataatgaaatatgcggatttaagatacaaaggagaactgattgcatgggatgagattaatgataatctccacttacacttttacgaggacaaatacggtgaaaatgcctctgacccacatatgcaacgggttacgagcttgatcaacaccaccagttgtggctgaatgactttaacaccatagattataatggagatgaggcttcctgctgagccaaatatataaaaaaactttatgagattttgtaatttacaggagtatatagcatgtcattagaaatacgattgcaaggccatttatcttgagggcaggcaaatattgcttatatgaggtcaggaatggatcttgttggtctactggactacaatttggctcacagcagcatgagtggatccacaaactaggcatgccgagtacctgaaggagatactaagagaggca

SEQ ID NO: 120639 - DNA, 632 bp, Glycine max
  Clone ID: PAT_MRT3847_79945C.1
aaagattacacatcaatgcataaatcaagcaaaataagatcaagctccaagcgtgagttccgaaacacatacaacaaatcaatctatacaaaatctggaacaagttaggaatcagtgtcataaaattttgctcaacaaagtgggagtgtcagcttctgcaaatctctaggtgaaagttacaacttaccaacatttgatattacctccacacacttgggcctgcagttgccttaaaggaacccactgcttccccatcagctgagcttccactaaacagatgtgaagaaaatgtcccatttttcctcatcttacctggaaattccttgccgatgttacctttcaaagaaaggttcttcttaatgcgatttcgattaagcaggagcatcgtgttgcgtggcggtgcatgcaaagccccttcaacacaatcacctacctgtacacagccccaaggtcttgagggtccatcgtcacgagatgatttaagccttggaaaaccagtcctcaatctcaagtggcccctttgatcaggggaattttcctcctccaatttgacacaaacagggcaagggaggatcgctttttctgtgtctttggcggtgtttgctccaagcacttcgcatgaaaagcatgac

SEQ ID NO: 120640 - DNA, 335 bp, Glycine max
  Clone ID: PAT_MRT3847_79946C.1
gttcggttaagagatataagaagaagaagctagattatgttccattcactcacataataatccgtgacccatttcagatttcgtcttaacgcacataaattcaggttcaaaatctcacctttgttgattttggcgaggattttgagaatggtaggtgattctctgaaaagggtctttttgttcctctctttgatttgatttgatttttttttttttggcgggggatggacatggtaaaaagggggtattgggatttctgattcaggttacacatgctttcagcggaattcaggccgtggctgggggagctcagcacactgtgagaagaggcaatg

SEQ ID NO: 120641 - DNA, 278 bp, Glycine max
  Clone ID: PAT_MRT3847_79947C.1
ggcaattgaagtgttagagaagcaaatcattaagagagatggcgtcccctacttgtggcgtctactagagagggcatacaaactagctaacaaagaagaagaagaaagaattgcgaacgagaaggccacggctttggagagtcgttacttcaattaagggaataatcatataatcaaatcatgtgtgtacattttaccattgcaaaacccaatctttcattgggtaaaataatcattttaacgttgatgccctcatcaaaaaagcttctttcttgcaa

SEQ ID NO: 120642 - DNA, 570 bp, Glycine max
  unsure (1)..(570): unsure at all n locations
  Clone ID: PAT_MRT3847_79948C.1
ggctcgaggtgggatttggtgcactggggatccggtttgctaaacgtgccaacgatcccgctagccaaaaaccgatgcagcatcctaagcatcaacgattggcacaaaacatcaacgatttcttctccccagaggttgtgattgagttgttcaaggtttgtagctgtagctgatatgatccatcgataatctagacaatgggatacacaaattcttagatctctttttcctgataacaattctaaaaaatattggctatctctatttccctctcaatccaacaaaataaactgatgtggaaacactcaacgatggtcttttttctgtgaagtttggataccatgttgagctcaaaagatcctctacaggagtcccttctcccagctccattcatggtgatttatggcacaagttgtgaaagattacagtcgtcctgaattttgtgtggagggctcgcaaagacatcctctcggtgatgtccaatctaaaactccaagtttatcatatctgnttgaggtgtggagagacacctgaaattgtggtccatgctctcctcttttgtgagaagaa

SEQ ID NO: 120643 - DNA, 200 bp, Glycine max
  Clone ID: PAT_MRT3847_79949C.1
gaatgcggctctggcagaggagtatccagggacattctggcatgagctggattatatacgacacgccatcgacttcttgggaatacatggaaagaggaagaaatctttgtaacaaataccccatgatctttgtccggtcttgactgtgaggcaaatctatctaatcagcacaatgtactgggatgacatgtatggtaccc

SEQ ID NO: 120644 - DNA, 334 bp, Glycine max
  Clone ID: PAT_MRT3847_7994C.1
gttggacaaatttgaagattccttcgagatagagatttccattctaaagctaaaacagtccataatttgatgagttttctctggcattgacacagtccattgcaggggtagttgtgcactttgttctgaaaatccaacaccattggacattcatttgatacatcctatattcaagaaatgtacatcccagtttgatccaaaaaaaaaaaaaaaaaaaaaaaaaaaaaaaaaaaaaaaaaaaaaaaaaaaaaaaaaaaaaaaaaaaaaaaaaaaaaaaaaaaaaaaaaaaaaaaaaaaaaaaaaaaaaaaaaaaaaaaaaaaaaaaaaaaaaaaa

SEQ ID NO: 120645 - DNA, 551 bp, Glycine max
  unsure (1)..(551): unsure at all n locations
  Clone ID: PAT_MRT3847_79950C.1
tttaattcaacagagatttagaaaacctcgaaaatcctttatggcctcggaccaatgattcctagaatttataaaatttaatccataaaaatttttagaaaaatgcatcagtctggaaaataggtctttttgaaaaattaaaagatggcaaaatggcggagtgccgcgaatgcaaagcaaatggaagagccaaatatgaatttggcctgccagacttcagcaccaaatcgctcaaaaatcatcttttttcaacaatccatgcaaattcggaatatgtcaagaattttgaagaactggagaagacaaaaaaggagtccaaagaaaaagccgagaagaaacagccgacgatcgaaaatttaatcggcacgaatttgaccagcagcggcattttgtctgtggctgacaaacgaattatcaacatgataacctgtaataatttgtcatttggtttgctctccgacccggcatttaaagctctttgtaaatatgagctaaaggatgaaagcgattatcggaaaagaagtctaccggaagcatacanactcgtcagg

SEQ ID NO: 120646 - DNA, 175 bp, Glycine max
  Clone ID: PAT_MRT3847_79951C.1
ggctcgaggatcggcatcgacatcttttctttgacaacagggccacgaatcattgcgacgacattttttttaacgtcgaacatgctatccaacaaaagggcgcaaaaagaacctcccactgcgaaggattgtctggtaagcccactcactagaactactggtcaatggtaaatga

SEQ ID NO: 120647 - DNA, 363 bp, Glycine max
  Clone ID: PAT_MRT3847_79952C.1
tttaaccatggattttacgtggatactagatacataccaacttaaattttttacaaacaatagaagacataatccgaacccaaggccacgaaaaaaagaaagacacacatagcagaaacaacacatacatagattaaaaaggagaagcgtaaagaggattatggtgactagttgtagaagatgattttctcttgaaaaacaaatcccccacgagagggatgataggtttctgtttctgtttctgttttttgccctttttccctccgaaaagatgatctttttctccaagactcagcatgtgagacaaactttgtgactcttttttcttctctactgttccatcctttctatcttcgctgatct

SEQ ID NO: 120648 - DNA, 231 bp, Glycine max
  Clone ID: PAT_MRT3847_79953C.1
cccacacatcacatttaatctcatttttaaactcacaaacacatacttatacttgagggtttataacaatgaagccaattctatcatactttcttcatctataccttcccctcattgcattcaccatgtatcctcccatttttctttcccttcatatctctcactatcgcatattataaaatctattttactacctcatattaccaattcttttaaaaaatattaactcta

SEQ ID NO: 120649 - DNA, 436 bp, Glycine max
  Clone ID: PAT_MRT3847_79954C.1
gtaggaggatgcagttgggaaatttggtggagtcgatcaaatcgaaggtgagatctttgaagccgaagaagggaaagaagccatacatgaagatggacaagagtgccagcgtcaaggtagagattcgcagcagaaaagcccgcaagcttatagaaaagaccttgaaggctgctgatatttccaattaatcttaccttcttctcttctcttttcataaagagtaacaacattcctcctcttgcttcgttactggttaggctcaagagggtttttttttattattagatcctcttcctctagactctctccgccagtcctctaagccgttgcttgtaataaaagttggcaaagtaaaaataatttctctatatagttcatttgctttaaatgtaaataatgccacaaataaataatattctttatatgtatgaaaaaa

SEQ ID NO: 120650 - DNA, 2020 bp, Glycine max
  Clone ID: PAT_MRT3847_79955C.1
gacaactgagaaaggcaagaagcagccgtgtgggtcacctcattggactgacttcaccgcagaaaggggcgggaaatgcagttccggaagtcactctcacgggatgacgccacagcacagtatttttgtatgatattttgggagtgattcgcgcattcgggttttggcctctaacggtgtactttcctgtggagatgtatatcttgcaaaagatggtcccaaaatggagtatgagatggatttctctggaattgctgagtgtggtgtgcctgatagtaacaattgcggctggtcttggctcaatggttggtgtcttgcttgacctccagaaatacaaaccattcagttcagattattaaacaccacataatctatttgcctccttggggatgtaagaaactctgagggtggtgatggttgtgatctctattgtatcattatcttacaagtggtgctagataaaaattatccctatgataatttaagaatcggaacttcgaataattgctgtccgatgcattcagtctacattttttcattatgttgtaccaatacaagtggtacatcataatgattaaataagttttagtagtttattatgttatattacttatgaaacgtgcttgtattttgatttgagatttgtaatttaatttaaatcttatttttagatgacttatacaatattacaagtatctcatacacgatctgttttggtgcagtgcaaattttcttttctcaaattccagattttcataacatgtggtggctctcaatagttgcttcagtcatgtctttcacctattccataattggcctcgttcttggaattaccaaaattgcagaaacgggaactttcaagggtagcctcactggaataagcattggaactgtgacggaggcccaaaaagtttggggtgttttccaagctcttggtaacatagccttcgcctattcatattctttcgttctcctagaaattcaggataccatcaaatctccaccatctgaagtaaaaacaatgaagaaggctgcaaagttaagtattgcagtgaccacaacattttatatgctttgtggctgcgtaggctatgctgcttttggagattcagcacctgggaacctgcttgctggatttggtttccataaactatattggcttgtggatattgctaatgctgctattgtaattcaccttgtgggggcataccaagtgtatgctcaacccctctttgcctttgtagagaaggagacagcaaaaagatggcccaaaattgacaaggaattccaaatttctattcccggtttgcaatcctacaatcagaacatatttagcctagtttgtaggacagtgtttgtgatcataaccactgttatatcaacgttgcttccattcttcaatgatattttgggagtgattggagcattggggttttggcctttaactgtctactttcctgtggagatgtatatattgcaaaagaggattccaaaatggagtatgagatggatttctctggaattgatgagtgtggtgtgcctcttagtaacaattgcggctggtcttggctcagtggttggtgtctatcttgacctccagtaatacaatccattcagttcagatcattaaactccacataacatctattgcctccttgggaatgtaagaaactctgagggtggtgatggttgtgatctctattgtatcatcatcttacaagtggtgctaactcaaaattatccctatgataatttaagaagagtcggcacttgaaataattgctgcccaatgtattttagatacttctagtctgcattttttcattattttgtaccaatagaagtggtacgtcaaaatgattaaataagttgtagtaatttactatgttatattgcttatgcaatttgtttgtatttttatgagatttgtaatttaatgtaaatattattttttccgtattggatatatgttaattgtattgtcttagtggggtcctattaagttggtatcccggtttcc

SEQ ID NO: 120651 - DNA, 1255 bp, Glycine max
  Clone ID: PAT_MRT3847_79956C.1
cgaatttcccggttcaccccacccgtccgcggcgaagaagctcggacgggcgcgcgagcaaggagcagcggtggacgacttcactgcagtaggggggacgagagggaactgcaaatccgcaattctctctcccgataacatcgcatcacaccatagcctcctttgcttcttcggaattcacactgcaatctaatctcttgtccatctaaagatggtagaatatgcttcgagaacaaaccttagctactgtcgagattatgacattgaggaggactccatggatggcatgcctttaaaaagtgatcctgaatgctatgacgatgatggccgtcttaaacgaacagggaccatttggactacaagctcccacataataacagctgtggtaggatctggggtgctctccttagcctgggcaatagctcagatgggttggattgctggtcctgcagtgatgatcttattcagcatagtcactttgtatacttcatcatttctagctgattgttatcgactggtgaccccatattcgggaagagaaattatactttcataaattgacaaggaattccaaatttcaattcccggtttgcaatcctacaatcagaacgtatttagcctagtttggaggacagtgtttgtgatcataaccactgttatatcaatgttgcttccattcttcaatgatattttgggagtgattggagcattggggttttggcctctaacggtgtactttcctgtggagatgtatatcttgcaaaagaggatcccaaaatggagtatgagatggatttccctggaattgctgagtgtggtgtgcctcatagtaacaattgcggctggtcttggctcaatggttggtgtcttgcttgatctccagaaatacaaaccattcagttcagattattaaacaccacataatctatttgcctccttggggatgtaagaaactctgagggtggtgatggttgtgatctctattgtatcattatcttacaagtggtgctagataaaaattatccctatgataatttaagaatcggaacttcgaataattgctgtccaatgcatttagtctacattttttcattattttgtaccaatacaagtggtacatcataatgattaaaagttttagtagtctattatcttatattacttatgaaacgtgtttgtattttgattggagatttgtaatttaatgtaaatattatttttttctgtattatatatatgttaattgtattgtctt

SEQ ID NO: 120652 - DNA, 141 bp, Glycine max
  unsure (1)..(141): unsure at all n locations
  Clone ID: PAT_MRT3847_79957C.1
nggggggggggggggngccagcaggcaagacgggacccaagaccagagacaacacaanggacaagcccgaaggacancaaacagaaaagccccggaaaacgaggcgccggagnccacaaaaggacacccnagaacaaaaac

SEQ ID NO: 120653 - DNA, 227 bp, Glycine max
  unsure (1)..(227): unsure at all n locations
  Clone ID: PAT_MRT3847_79958C.1
tnatttaagcagaagcaggcgagtgaggaanagcgaagagtgaanagaatggctcccaagggtttaaccttnctggcngtgttaatatgcgtttcagcactgncactgagtccttctgttgcgggggaagggcnagataatggcctgttatgaacttctacaggaatcangccctcaggctgangccatcatcacngaacangtgcaagcntctgctacaagcgccc

SEQ ID NO: 120654 - DNA, 669 bp, Glycine max
  Clone ID: PAT_MRT3847_79959C.1
attattaataataagatcgattacttcaattcgagcaaaattacttctaataaaaaaaatacgtgattttcactttttttttttcttcttccttctctattatgacgtagactcttaattaataaaaccaatttaattatgagaccaaaatatcacaacaagtggtggagagttgaattaaatagatttgatggacttaaactaacatcaacgatgcactaccgtcgcagaataaatcaaagagtaatggtcaaagaaagttattggtccatttggtactgtgccaagtcagcaactactcttcttactgcttcctcgaaggcagactcgtcccattcacttccctgaataatcctcaatctgaaggttagttgatgaagtgcattgttcccttctgcaatgtgagtgtttgcgtccatggaaaccaaactcacgtggtgagccagttttaagaatttcaataaccggattaataaatcagtttgagaaacttgtcctctcacattcacttgcaactccaccattctctcttctgatgtgcttgattcgggtacatgtgaaattctgacacttaatctttcatttggtgataaactagctaccttggtttcttcagctgtagattctttggctggcaaaagtgacgtcaatccctgatttctgttgctt

SEQ ID NO: 120655 - DNA, 671 bp, Glycine max
  unsure (1)..(671): unsure at all n locations
  Clone ID: PAT_MRT3847_7995C.1
atgatttagannnagctgttgattttnnnnnngtagcaggggtcctnctggagatctttatgtttatctngatnnnnnggagatatccgggattcaaagagatggcattaatctccgctctacaatatcaatcagttatctagatgccatactaggggcagttgtcaaggtgaagacagttaaaggcatttctgaacttcaaatacctcctggtacccaaccctggagatgtcctaatcctagcaaggaaaggtgcaccaaaattaagcaaaccatcaatacgtggtgaccacttgtttactgttaaagttacaataccaaaacgtatcagaaagaagtactgaaggtcctgcaactcaaaatgttgaaagtacagtagcaacagtggcagaacctactgcacaaccagaagatcaaaatgacgcgtggaagaaattgaaggacattgctggatctctagcaaatggagctttcaagtcgctgaaagataacctttagttccatggatttattaggtggcccagtgtctcctggaggcagtttttataattgaggctaggcgcttcaacaatttttgtagcagctggaagtaatattttgcagactttgtatttataaatgcnntcactgctttgttagcattagttagaaaaatcaaacaagtaatgcgt

SEQ ID NO: 120656 - DNA, 393 bp, Glycine max
  Clone ID: PAT_MRT3847_79960C.1
cgaaagacgacagaagggtcctcagttgcttggatatttgtgacttcatctccaatattatttgtgactctttccatttgttgattgattaactcattgtcaacaacagataaaagttccaagtcttgggcttccaattggatcactttgttgttcatctcttatgaaattacgtagcatgaaacaaacattaataattcttatttatgtttttatatcaaaaaaagaaggggttcttaatatacttcatccttttttcaataccccaaatgacctttcaataacattccttgcacttgcatgacgaagattaaataactccttgtagttttgaggagtgtttccaatccattcattaagatgatatctagtccctcgataaggtgctaaaaa

SEQ ID NO: 120657 - DNA, 1560 bp, Glycine max
  Clone ID: PAT_MRT3847_79961C.1
gtttttctcacttttctttttcttttgggctttcagtttcacataacaaaccgtttgcagaacatcccataaaagcttagcttgtattcagtttctcttctcccaacgtttttgtcgctagtaacagaatattacaaagtaacggctttctcagtggagcgcttgatttggagacggtgggggtgggaaggttatggctttttgcccaattttttgttgcggaaatagttcggatcgcaaaggacgagggaagaaacaacctccatggcgggtgttttctttgaaggaattacactccgctacaaataatttcaactatgataacaagctcggcgaagggggattcggcagtgtgtactggggccagctctgggatggatcgcaaattgcagtgaaaagattgaaagtttggagcaacaaagcagacatggaatttgctgttgaagttgagatattggctagagtacgacacaagaatcttctcagtctacgtggctattgtgctgaaggtcaggaacggttaattgtttatgattatatgcctaatttgagcctgctctctcatcttcatggacagcactcagcagaatcccttcttgattggaaccggcggatgaatatcgcaattgggtctgctgagggaattggatatcttcaccaccagtcaacgccacatatcatccacagagatatcaaggcaagcaacgtgttgttggattcggattttcaggcacgggttgctgattttggttttgccaagttgatccctgatggggcaacacatgtgactacaagagttaaaggcaccctaggctaccttgcaccagaatatgctatgttaggtaaagcaaatgagagttgtgatgtctacagttttggaattctccttctagaacttgctagtggcaaaaaaccacttgagaaacttagttctgcggtgaagcgatcaataaatgactgggcactgccattggcttgtgagaagaaattcagcgaactagcagatccaaaacttgagggtaactatgcggaggaagagcttaaaagagtagttttaactgctctcttatgtgttcagagtcagccagagaagagacccaccatacttgaggtggtagagctactgaagggagaatccaaagataagttagcccaactggaaaataatgaactctttaagaaccctccagctgtaggacatactgatgatgggaccgttgctgctgaaggcagttcagatttcatctcagaagacaaggaatcaaaacctgagttggaagagaatactgagccataaactctgcaaaagaaatggaactatggatttgatatgctatacagattgattgtgaacctgcaggattgctttttttgtattactatttttattacttgtgcagagaaagactgggtgcctattcattatagaagttgctgcatgcatgtttctacttgccacactatgaatgtggttatgaatcatgcagaattgctgaaagtctgaaactaggaatttgatgttaaatacagattgtgaagttttcaaaaattgtgatttct

SEQ ID NO: 120658 - DNA, 1251 bp, Glycine max
  Clone ID: PAT_MRT3847_79962C.1
ggctcgaggtttcacataacaaaccgtttgcagaacatcccataaaagcttagcttgtattcagtttctcttctcccaacgtttttgtcgctagtaacagaatattacaaagtaacggctttctcaatggagcgcttgatttgggttggtgggtcaacttcaagtttcaatttttttttcatttttgtgcctccactctcatcttcatggacagcactcagccgaatcccttcttgattggaaccggcggatgaatattgcaattgggtctgctgaaggaattggatatcttcaccaccaagcaacaccgcatatcatccacagagatattaaagcaagcaacgtgttgctggattctgatttccgtgctcgtgttgctgatttcgggtttgctaagttgatccctgacggggcaacgcatgtgactacaaaagttaagggtaccctgggctaccttgcaccagaatatgccatgttaggaaaagcaaatgagagttgtgatgtctacagttttggcattctccttctagaacttgccagtggcaagagaccaattgaaaagcttaattcgacggtgaggcgatcgatagttgattgggcattgcctttggtttgtgagaagaaatttagtgaaattgctgatccaagactgaatgggaactatgtggagggagagcttaaaagagttgttttagttgcacttatgtgtgctcaggatctacctgagaagagaccgaccatgcttgacgtggtagagctactgaagggagaatctaaagataaattttatcacatagagaacagtgaaatgctcagaagccttctagctgtagaaagcaatgatgagacatcagtggctgaagaagacagtttagactatatatcagaagaaaaagaattagaacgtcccttgaaagagtatacttaaactatgaatgataccaaaaagataaaactatgagcttgaggggttaaatataggttgtgaagggtttttgttttcactgggtgcccatttgttagattaacatgggtatgtttactgctgcgcgtgattgtatgagtgtttggggttgtccctttgtgtagtgttttattccccttgtgttgtggttaccaacttgatatttgcattgtgcatgacccctgttactatgctattgctattaagttttggcgaactatgccatattagaaattataaaatatttcttctattattttcttcaaaaaaaaaaaaaaaaagggcgg

SEQ ID NO: 120659 - DNA, 260 bp, Glycine max
  unsure (1)..(260): unsure at all n locations
  Clone ID: PAT_MRT3847_79963C.1
tacaagagattctaaganaagaaaacctgancaatgtcttgnttccttgtaatactatttctccagtcctgcacatttggtacaactcattctgagactagtcaccacaagaaacttccctctgctgttgtggttggcactgtttactgtgatacatgcttccaacaggatttctccatgggaaaccacttcatttcaggggcatcagttgctgtagaatgcaaagatggatatggggaggtcaaagccaaggtttagga

SEQ ID NO: 120660 - DNA, 480 bp, Glycine max
  Clone ID: PAT_MRT3847_79964C.1
ggctcgagggtagaaactgctggaaccggactttttctgaccatggcgaagaggttcgaaatattgggcggaacggcatatatgggttgaaagcaaacgtcttggtaaaggatgcacagacactattattgtccaaacttggaaacccagaccgatcaaaagaaggtaagctaccttttgtccctaatgaggccagaaagaccggatctacaaactttgatagggtcaaagtgcttggcatggatgacaatggggttagcaggacaccaacagatggacttatttatgcgtttcagatgtgatgcaacaactgcctgctcaactgaaaaatggctgcgtgttgattttttggaacatgaaccggccttcatggatgtttgtacaggggtagaggggtattaacttgtagtgcgtatacatgagaagtttacgaggcatcaagatagaccactgatgggtgcttttactgggaacacctaa

SEQ ID NO: 120661 - DNA, 410 bp, Glycine max
  Clone ID: PAT_MRT3847_79965C.1
ggggaacaaagcaacaaacttcaacgatgggtcagtaatagttcgttcaaggattttacaatccgaataaatcaatcccttcataaatggaaggacccctggggttagtttccctgggggaaaaggaattttttttttaaaaatggcctcccctttttttttccttggggggtgaataaaaaccaggttttccaactgggtttgacaaaatggagacggggaaaccctggtgacgggggggggtgctaaaaacaggggtaatggctaaaactattttggggatacaccctaatagggtaattgctccggggccccccccctttggagaaggccttcaaagctccctttttaactggtttgaaggcgaaaatcctgaatttgccgatgggtcttaactccagagggggttt

SEQ ID NO: 120662 - DNA, 1870 bp, Glycine max
  Clone ID: PAT_MRT3847_79966C.1
gtcgagccgcttacacaccatcattctcctctactgaactcgatcaaacaataataaccggtttttctcacttttctttttcttttgggctttcagtttcacataacaaaccgtttgcagaacatcccataaaagcttagcttgtattcagtttctcttctcccaacgtttttgtcgctagtaacagaatattacaaagtaacggctttctcagtggagcgcttgatttgggttggtgggtcaacttcaagtttcaatttttttttcatttttgtctggtcgattgagaaggctcagttgcagagacggtgggggtgggaaggttatggctttttgcccaattttttgttgcggaaatagttcggatcgcaaaggacgagggaagaaacaacctccatggcgggtgttttctttgaaggaattacactccgctacaaataatttcaactatgataacaagctcggcgaagggggattcggcagtgtgtactggggccagctctgggatggatcgcaaattgcagtgaaaagattgaaagtttggagcaacaaagcagacatggaatttgctgttgaagttgagatattggctagagtacgacacaagaatcttctcagtctacgtggctattgtgctgaaggtcaggaacggttaattgtttatgattatatgcctaatttgagcctgctctctcatcttcatggacagcactcagcagaatgcatgcgtgattggaaccggtggatgaatattgaaatttgatctgctgagggaattgggtacaacaaagattggtaaatgccacttattttccacagagatatcaaggtaagctaagtgttgttggattcgtgttgtcaggcattgtttgattattttggttttgccaagttgatccctgatggggcaacacatgttacgatgagcattaaaggcatcctaggctgccttgcccctgaatatgctatgttaggtaaagcaaatgagagttgtgatgtctacagttttggaattctccttctagaacttgctagtggcaaaaaagccacattgagaaacttagttctgcggtgaagcgatcaataaatgactgggcactgccattggcttgtgagaagaaattcagtgaactagcagatccaaaacttgagggtaactatgcggaggaagagcttaaaagagtagttttaactgctctcttatgtgttcagagtcagccagagaagagacccaccatacttgaggtggtagagctactgaagggagaatccaaagataagttagcccaactggaaaataatgaactctttaagaaccctccagctgtaggacatactgatgatgggaccgttgctgctgaaggcagttcagatttcatctcagaagacaaggaatcaaaacctgagttggaagagaatactgagccataaactctgcaaaagaaatggaactatggatttgatatgctatacagattgattgtgaacctgcaggattgctttttttgtattactatttttattacttgtgcagagaaagactgggtgcctattcattatagaagttgctgcatgcatgtttctacttgccacactatgaatgtggttatgaatcatgcagaattgctgaaagtctgaaactaggaatttgatgttaaatacagattgtgaagttttcaaaaattgtgatttctttttttaattgtttggggttgtccctctgtgtagtgttttattccccttgtgttgtggttaccaacttgatatttgcatggtgcatgacccctgttactatgctattgcgaataagttttgtcgaactatgccatattaggaaatataaaatatgtcttcgattattttcttcaaa

SEQ ID NO: 120663 - DNA, 263 bp, Glycine max
  unsure (1)..(263): unsure at all n locations
  Clone ID: PAT_MRT3847_79967C.1
atnacaagggcacgggattagtatattacattataccccagcaaacagatatacattgtgcctcgtaggagtcacacaatattctcaggcttaaaccaaaaaaatttattagattagattanatatgatttgaccaccttggggtggcggtccaggttatccttattattccagaaattacctgtgcgttacccttccgattcccccatatgtttagggtgcccagggttagatggctttcctttaaggggttttttgaaacc

SEQ ID NO: 120664 - DNA, 252 bp, Glycine max
  Clone ID: PAT_MRT3847_79968C.1
agcacattttatacaggcagaaagagcaattcagtgatggagttggctataggtggattgatggccttaaggcccatgctgcaaaacatgtattgaatccatgcttttttgtacaattcagtgatggagtttgctattgtcatgaaatttgttttgcttataattggttcttgtcaatttttccataggtgactgaaaaaatgatgcttaatgctggtaacatttacccccacaacaccccaaaaaccaagg

SEQ ID NO: 120665 - DNA, 269 bp, Glycine max
  Clone ID: PAT_MRT3847_79969C.1
ggggaaaaactaaaagggcccccaaaagggaaaagggtacctttgggtgggtccaaccaaattttcctggggggggggggcggggaacccccaaaaagaacatttggggggggaccaaaggggcatagggaatttaaccaattaaaaccccatttcgggccaaagggggggggtcaacctgggccaaatctacaaacccggagtcattggggggcgttaaaaagggggccccgaggccagacccccgggggcggaccggggggaccccc

SEQ ID NO: 120666 - DNA, 682 bp, Glycine max
  Clone ID: PAT_MRT3847_7996C.1
ttgttgcatacgcacccccagacatcattatcttatataaatataaaaaaatatataatttaatagaattcgtgcatcacacaagatttaaaatctaattacaaataaatgaatgaaattcaaccccatcccccattaaatcaaataaagacaaagactcatcactgcatcatgactctaaattcatcaaagcaaagcaggccatctccattcaaatcaaagtggccaatcatagttgtgcattgctccatggattttgattctcctaacctacccagcatcctttgcaagcttttgggagtaataaacccaaacatttcagtgtcattgtacatctcaaaagcttcttccaaatccttcaacttctcgtcttccccagctgcctccataagtttcacaaaatcttccaaactcaaaaacccatcaccatcagaatccaactcctcaatcaacttttcagcatctttggccaacaactcaccaccaatcatgcctagccggttcctaagctcacatggagaaatcttaccatccccatcctcatcaaaatacttaagaacacgctcaaactctgtgttcatcctcataactttagaaaatacacgcaaaaatattgatgaaaaaaattacacttgtgaaattgttaggcacaagattatttagttatgtaggtgcttggttg

SEQ ID NO: 120667 - DNA, 399 bp, Glycine max
  Clone ID: PAT_MRT3847_79970C.1
gccacactttgtatttcactcgggactacgatcattgctacaagaatgaaagaaaggcggggggcctggcaacctatcacgtgccatatggagtgcacattcggggaagattcgatgcaaaattcgcaaaaatgcttgcaaaagatgcttcgaaatacgctgctgaactgcaacgtgagctccagaacgatatcaagcatgcattaaagcgcacattagaggccaagaaaaagtgcaatgaaaggtctattgcagggtttgatcctgccatcaatgacatcacaaagcacgtctgagtgtgtgcacctgtttcaccacctgttgctgatactaaagctgatatcaaatgccctgtcaacagaaagatggtcataaatactgtcaactatgcagttaact

SEQ ID NO: 120668 - DNA, 380 bp, Glycine max
  Clone ID: PAT_MRT3847_79971C.1
gctcggaattcggctcgagctctctcttaatttttctccataggctcttcttctagacaactgtgaaggcattttactctcttaggactcacacaaatcagagcctgctcctttcctcaccaaaacataccaactggtggatgatcccgccacagatcacattgtgtctaggggcgaagacaacaccaccttcgccgctaggcgtcctcctgagttggaaagagaccttgttcctaactacttgaaacacaacaacttctcaagctgagttcgccagctcaacacctatgggtctagaaagatagagccagaccgatgggaggtcgccaacgaattcttccagaaaggagagaaacacttgctgtgccagatccataaaa

SEQ ID NO: 120669 - DNA, 568 bp, Glycine max
  Clone ID: PAT_MRT3847_79972C.1
aattttttagttacgatgtaggtattttttagctaagtttatatgtcattggtgattttgttttgttatgtacattaattaaaaaattagttagtagtattaaaataaattaaaaatacacggtgaataaatcattgatacatttttcttatataatacacataaaattaaacagtgtggtgactgaaatgatagacgagaataacgaaacataccaaaacatacaattgtaatgcaaatatgatgaaattaatgatagtctgaaagatgttgtacaggagacatgtctttttttatttaggtcactggtttgttaaatatagctaaaatttttattgggtagaattgtttccagtagttggattctactaacatctttagcatgtctttgttgtttttcaattctgttattttatattcgattaatttttctgaatacttaacatggtccgattgtcgaaagaacaatcgtctgaccacttgtgattcgtgaattccataagggggaacccctagaggtgcaacttgcttgattatatccttgagtttgtccatgctacatcctgaa

SEQ ID NO: 120670 - DNA, 1142 bp, Glycine max
  Clone ID: PAT_MRT3847_79973C.1
ctccggctcgaggtttccactatcattatttgcccattaaaaatcaatttttagctctcattttcatttttttgcaattcctccacacacaccatccaattcccgtctttgatattttaatcacagagagagaagagggtttgtttctgggttttggaaatttcagcccccatcaaagaagaagccccataatcatcgaatcgaaggaatttgattgaaaggtcgaaacttgagcatctgggatcgcgaaattggggatttttttggttaaaagggtatcttcggaattgatggcaaaactgtacgtgaaggcggtgccaccggcggatctgaacaggaacacggagtggttcacgtaccctggcgtttggaccacttacatcctcatccttttcttttcttggatcctcgttctctctgtcttcggttgctcccctggcatcgcttggaccatcgttaatctcgcacactttgctgtaacatatcacttttttcactggaagaaaggaactccatttgcagaggaccaagggatctacaatagattgacttggtgggagcaggtagacaatggaaagcagcttactcgtaacaggaagtttctcacagttgttcctttggtgctgtacttgatagcctcacacacaacagactatcagaatccaatgctgctcttcaacactgttgcagtgattgtgctggttgttgcaaagttcccccacatgcacaaggtcaggatatttggaatcaatgctgataagtgacatgttgcatgtgtccgtgacacttggctaccaccaccacctacctgctcaagagcctcttgtccttttgttctggagaaaaggtcacacctttgtatagaaggcagaactggaaggatactcaagtaatgttttgttgccaactgcttttaaggtattattaaacaaataaatatgttgagtttttttctgtacagtggaaaagtatatgtatcggattatatcggtgcttttaaaatgtaccttttctagcctttttttccctttatttgatgccttagaactgagatatacaaggatgatcctttccgttaccattaaaattctattgggtataactttttcttttggaaataaaagtccttctttatataactc

SEQ ID NO: 120671 - DNA, 607 bp, Glycine max
  Clone ID: PAT_MRT3847_79974C.1
taatccattccacacctttctattctttttaaacccttgatcatatccattttcgatcaccccttcaaaccaaaacaccaatattatttcaagtactattgatataatatagtgatgaagagagaaagagaagttgatagtataaccatggccaactacttgatgctgctttctcgaaccaccaccaacttgaacacttccaacaaccgtgtgtttgagtgtaagacatgtaaccggcggtttgcgtcgtttcaggcattgggtggccaccgtgcgagtcacaagaagccaaggttgatgggagagagtgatagccaagtgctaattcatggttcaccaccaaagcctaaaacacacgactgttccatttgtggattggagtttgcaataggacaagctttgggagggcacatgaggcgtcatagagctgcagcagcagcagcatcaaatggaaacatgcacactactattaattcttggttgagttctggcagcagtagtggtggtagcactgttgataatactttaccaccaaacatgaaccacaaccccaacgtcaccgacaccaagaggattttgtttcctgatttgaatttgacgcctctag

SEQ ID NO: 120672 - DNA, 1137 bp, Glycine max
  Clone ID: PAT_MRT3847_79975C.1
cacacacgccatccaatttctgtctttgatatttttaattagagagagaaaaagaaaaagaaaaaacaaagagagaaagagagaagagagagggtgtgtttctgggttttggaaatttcagccaatatcgaaaaacaagaagccccatcaataataatcatcgaaggaatttgaaaggtcgaaacttgagcatctgggatcgcgaaattggggtttttggttaaaagggtattatcttcggaactgattgatggcaaacctgtacgtgaaggcggtgccaccggcggatctgaacaggaacacggagtggttcacgtaccctggcgtttggaccacatacatcctcatccttttcttttcttggatcctcgtactctccgtcttcggttgttcccctggcatcgcttggaccatcgttaatctcgcacactttgctgtaacatatcacttttttcactggaagaaaggaactccatttgcggaggaccaagggatctacaatagattgacttggtgggagcaggtagacaatggaaagcagcttactcggaacaggaagtttctcacagttgttcctttggtgctgtacttgatagcctcacacacaacagactatcagaatccaatgttcttattcaacactgttgcagtgattgtgctggttgttgcaaagttcccccacatgcacaaggtcaggatatttggaatcaatgctgataagtgaaatgttgctgtggccatgacacttggttaccactccttacctgctcaagagcctcttgtccttttgttctggaaaaaaaggtcacacctttgtatagaaggcagaactggaaggatactcaagtaatgttttgttgccaactgctttttaagctgcttctaaaagtattattaaacaaataaatatgttgagttatttctgtacagtagagaagtatatgtatcagattatatcggtgcttttaaaatgtacctttcttttctagtattttttcctttatttgatgctttagaactgagatatacaaggatgatcctttccgttggtattaactttttcttttggaaataatagtccttcttttttataactcataaaagcataaattgaatacttacattagacgtcacctg

SEQ ID NO: 120673 - DNA, 420 bp, Glycine max
  Clone ID: PAT_MRT3847_79976C.1
aattcggctcgagctcgagccgattcggctcgagtcaaaatctagaacagcatcagaatcaatcagcatattctgtcttcttcttctgaaaacaaaaatgcctcgcgggggtggcggtagctccggtggcggaagatctgctcattcagctcgaagtcatgcttcacggccagctcctgctcagagtgacaatcgtggatctctctttgggactgtagctgaaggattggcttttggttctggaagtgctgtggcacacagggctgtggattctgtattcggtcctcgaactattcaacatgaagtagcagctactgggcctcctcctgcttctgctgctaataagctgggcggtgatgcatgcaatgttcacgcaaagggctttccaagattgcctgaacagctatgagagtgacatta

SEQ ID NO: 120674 - DNA, 237 bp, Glycine max
  Clone ID: PAT_MRT3847_79977C.1
cctgggagaagttcacccccatgcactatattcctatactacctgcaactccacttgcgagcacgcgacgtttaccctatggatccaatctctggtactgaacggttcaggatgcaccgtgtttggttcctatggcccaattgcctatcgcgttgattgctacaactgcctgcatagagatggagtccatcgcacggctcagtatggcgatattctgtgcactatgttggtaaagca

SEQ ID NO: 120675 - DNA, 861 bp, Glycine max
  Clone ID: PAT_MRT3847_79978C.1
ctcattcaaatcccgggagcgaaccacgcgtcttcacattcacattcaaaatctagaacagcatcagaatcaatcagcatattctgtcttcttcttcttgaaaacaaaaatgcctcgcggtggtggcggtagctccggtggcggaagatctgctcattcagctcgaagtcatgcttcacggccagttaaccatgctccacctccagctcctgctcagagtgacaatcgtggatctctctttgggactgtagctgaaggattggcttttggttctggaagtgctgtggcacacagggctgtggattctgtattcggtcctcgaactattcaacatgaagtagcagctactgggcctcctcctgcttctgctgctaataagctgggcggtgatgcatgcaatgttcacgcaaaggctttccaagattgcctgaacagctatgagagtgacattagcaagtgccagttttacataaacatgctagcagagtgcagaagaaattctggagccacattgagtgcatgaacatgcttgcttcatttgctttgccttgcaatggtatagctttggagtttgcattggagtccagatgtgtctcatggttagaactacgttttttatgttactaagtattccacattgctaattaataaatcggttttgtccgatatttgtcccaatataattactgtgaatctaatgactccgagtttgcattggagtccagatgtgtctcatggttagaactatgttttttttgttactaagtattccacattgttaattaatgaatcggttttgtccgatatttgtcccaatataattactgtgaatctaatgactccgagtttgcattggagctc

SEQ ID NO: 120676 - DNA, 596 bp, Glycine max
  Clone ID: PAT_MRT3847_79979C.1
ctgaatctgtaactcaatgtccaatacgtcctggtggaaagtatacctatagatttaacataacaggacaagagggtaccctatggtggcattcccactcttcttttctacgtgcaaccgtctatggagctcttatcattcgccctagaagaggaaactcacacccattcccttcagtttaccaagaagtccccatattgcttggggaatggtggaatggtaatgttgttgatgtggagaacaacgcaattgaaaccggtattggtccaaatttgtcagatgcttacacaattaatggcttgcctggagatacttacaattgctcccaaaatcagacataccaactccaagtgaaacatggagaaacctacctgttgcgcattatcaacgctgcactcaatgcacaacacttttttaagatagccaaccacacattcacagtggtagccatcgatgcttcctacactcaaccctacaacaccgatgttataatccttgccccaggccaaaccgtggatgcaatcataaccacaaaccaaactttgggttcttattacatggccttcactccatatcattccgccccaggcgtttca

SEQ ID NO: 120677 - DNA, 313 bp, Glycine max
  Clone ID: PAT_MRT3847_7997C.1
tggtatcactggatgaaagatcatcactgatacctatggtgggtggcgtgctcatggacgaagtgccttttcaaggaaagaccctaccaaggctgacagaagtggtgcctatctcgtgaggcacgctgtatagattgttgtggtaaatggccttgtcagaaggtgcatgtgacaaaactcctatgccattgccgtgcctgagcccgtggcattgaatggggacacttatgaaacatgaagaatctctgaggtggacattcttcgcatttgacaggcataattcgactctagacctggcatgaccgccattaac

SEQ ID NO: 120678 - DNA, 410 bp, Glycine max
  Clone ID: PAT_MRT3847_79980C.1
gttgatagatacatggcttatgacacggctggcaaatttttcaaggactgccgccagggcggggaacctttaactacgcatgcagccctgcatccttggacaaaaaagaaatggggtgattactacgtctatctaaattatggtaccactgatatactgcctattacggaagtttgtgagggtatcaaataattcaacaacgtgcattctatcttgtctactgtgagtgagcaaggctcgaccactgctattgagcttttacctactactaatacgagttctagagatactctaaacaggtttgacggatttcttccttatacataacacgctgactctctgatatcagacttataccagcgcttagaggaaccgaactttctacgcagttgtgattttaacatactgta

SEQ ID NO: 120679 - DNA, 293 bp, Glycine max
  unsure (1)..(293): unsure at all n locations
  Clone ID: PAT_MRT3847_79981C.1
ccacatggtttctttnttttaaatatacattttaatgtatctaattagcatactatntaagctgacggtttaacttacaccggcccattatctacaatactatcangaacacttgcttcaatgtctgaattcaagtctaattacaatgaaaattaaagtatgaatcaatgcattaagctaatttttgatgctatatgtactgacatattaaatgacctaaaaagtgaaagtaatgttaatacctacgtaataaccaattaacataacgaatatcttataaaccaccttctacc

SEQ ID NO: 120680 - DNA, 540 bp, Glycine max
  Clone ID: PAT_MRT3847_79982C.1
cttcattgtatgatatgactctgtcaattgatcagagaaaactaaaaccaaagacttctgcctcaaataaatttcctcctgccggggatgttatggtactcgtttagcatcacgacaccctttcatggaaccggagacctccctctctcattgcattgagattgcttgcacctaagcaagctgtaaggttacctgtttcggatatcgccgatcctactcttgaagaaaaaggccaagatagttcacgctttgcgagaaaagatcatcgtcgaaccacttgtaaatatatttttttagtagtgctcaagcgaaacctcacttacgttttttcagtagtgtgagctggacctaaaccaaccaataagatggcggtataagccattttcccggtaaaaggaaggagcattattccctttcttgatttgacccaaacagatagattacctacaaatagtagcacttcgctttgcgaaagcactgttatcccgctgagttcctcagtgaggtgaagtacttatttttttattttgacgaatgctc

SEQ ID NO: 120681 - DNA, 350 bp, Glycine max
  Clone ID: PAT_MRT3847_79983C.1
cttgtctctgaacactcatcaccatggccaagcttggggtttacctttgattccttattttcagtggctgcattgctctgagagagcatgcacagcaaaatgagtgccagatccaaaagctggatgccctcataccggataaccgtatagagtcggaaggtgggttcattgagacctggaaccctgacaacaagccattccagtgtgcccccgtgcattgacctctctcgctgcacccttaaccacaatgcccttcgtagaccttactacaccaacagtgcctaggaaatctacgtacaacaaggttatggtatttttggcatgatattcccgggttgatctagcactta

SEQ ID NO: 120682 - DNA, 444 bp, Glycine max
  Clone ID: PAT_MRT3847_79984C.1
tgcctgctgttagctggtcaaatgaaaagtattacttggagcagattctgccactttttggcgagcataaggtggtacatttcaacaaaacagatgcacgtctagcaaacaatggtctcccacttgatctacagaaacttaggtgtcgtgtaaatttccaggcattgaaatttactcctcaacttgagaatttgggccaaaaattgattcggatacttcgtgaaaatggaccctttctggcattgcatctgagatatgagatggatatgctggctttctcaggttgtacgcatggttgctctattgaagaagctgaggagctcaagcagatgaggtatgcattcccttcctggagagagaaggagatagtttctgaagaaaggagatcacagggtctctgtcctttgactccagaggagtctgccttaattctgcaagccttgg

SEQ ID NO: 120683 - DNA, 179 bp, Glycine max
  Clone ID: PAT_MRT3847_79985C.1
ctagaagccattttgggacataacacatgttatttgaaggagtcgttataatcctactcagagtaacatgtgttatgtcctataagccattttcggaggttgtgtttgatgtcattaatgaactacatggttattatatatgctaccgtaagtgattttgaaataaatgcgttgaattt

SEQ ID NO: 120684 - DNA, 286 bp, Glycine max
  unsure (1)..(286): unsure at all n locations
  Clone ID: PAT_MRT3847_79986C.1
cgccggcaagatgggtaagtgtcgtggtctccgtactgcccggaagctccgcagtcaccgacgggaccagaagtggcatgatanacagtacaagaaagcccacttnggcacagccctgaaggccaatccgtttgggggtgcctctcacgcaaagggaattgtactggaaaaagtaggggttgaagccaaacagccaaattctgccatccggaagtgtgtcanggtgcagctcattaagaacggcangaagatcacagcgttcgtgcccaatgacggttgcttnaac

SEQ ID NO: 120685 - DNA, 256 bp, Glycine max
  Clone ID: PAT_MRT3847_79987C.1
cacatggacactaacacgtgcaaacacagatgctggaatggccaatgatggcatcaacagtgggatggactacaacgtgagagtggaaatctccactatcctatacgcggaagagctttaggccgtgagacgtgctgatctcaatcgctacaagcactcgttggatgaagatgttgctgctcatacctctggtcatctacgtcagctcttagtggggttggtgacctcatataagtatgctgaggatgagatcagt

SEQ ID NO: 120686 - DNA, 688 bp, Glycine max
  Clone ID: PAT_MRT3847_79988C.1
tggagcgattcgtgaagctgggacagttaaagggaaaaagacgggtaaatttgcaacaagtgattggatgaaggtagaacaagaacgtgatacgcccgggcatgaagatttttcagaggatacgtatcgtacattaatggcagtagatagtgcagttatggttattgactgtgcaaaagggaaagagccatttgaattacttgatgaaatagaagaaacacttaatattgacacttatccaatgaattggcctgttggtatgggacaaaatttctttggtattattgatagacactctaaaacgattgaaccatttagagatgaagaaaatttattacatttaaacgaagattacgaacttaaagaagaacacgcgataaaaaatgatagtgcatttgaacaagcaattgaagaaatgatgcttgtcgatgaagcgggtgaagcatttgataatgaagcgttactgaacggtgaattaacacctgttttctttggatcggcattagcaaacttcggcgtacaaaatttcttaaatgcatacgttgatcatgcgccaatgcctaatgcgagacaaactaaagaagaggttgatgttagtccattcgacatagatttttctgggtttatctttaaaattcaagccaatatggatccaaagcatcgtgacagaattgcatttatgcgcgtg

SEQ ID NO: 120687 - DNA, 873 bp, Glycine max
  unsure (1)..(873): unsure at all n locations
  Clone ID: PAT_MRT3847_79989C.1
ggaagagctcgacttcaaagttttccaactaacctcacacaacattctcagcctcaaggagaaagccaagggtagcaccaatgctcgtgccactgggtttaatgttatcactgcccatatatggagatgcaaggccttatctgcaccctacaacccctctaggtcatccaccatactatatgccgtggacatacgtccacggctgaaccctcccctccccaaatcctttgcgggtaatgctgtgttaaccgcgtatgccacagcaaaatgggaggaattggagaagggagagttctcaagcttggtggggatggtgacagagggtgcaaagagaatgagtgatgagtatacaaggtctatgatagactggggagaggtgcatagtgggtttccacatggggaggttttggtgtcttcgtggtggagattaggctttgaggaggtggagtatccgtgggggaagcctaagtattgttgtcccgtggtgtatcaccggaaggacattattttagtgtttcctccttttggtagtggggatgatgggataaatattatagtggctcttcctcccaaggaaatggacaaattcgagaccctcttttacatgttcttgaattgagtttgatcgatggcaactgtatgtctcttcgcttgatatggtcatcagtatgcttagttatatatgttggtgtattaataattaattaagtgatgaatggtattttttttagataacaatgagtgatggtatttatatgtaagtgatggttttgatcaagagatatgatggctaataaaaaaaaaaaaaacnnnnnnnnnnnnnnnnnnnnnnnnnnnnnnnnnnnnnnnnnnnnnnnnnnnnnnnnnnnnnnn

SEQ ID NO: 120688 - DNA, 358 bp, Glycine max
  Clone ID: PAT_MRT3847_7998C.1
tacccactacacattctatatcacagcttttaacattactccccttaccttgtttcaaagatggtttttaaagatagggctgcccacccctctccttcctccaattctacctctcttccaatcaatacctccctcattgccccatatagagttgtgttcaataatgcttcattgcaaaacacatatgtttctatcagtttacatatattttccatcatatctcaagtcaccactgatgcaccatccaatgttgaaaaacacttcaacaaacatcattataactttgttcctaacaattttaaacccaagaccccttacattgtatattcctactcaacacaaaaatcactttgtatta

SEQ ID NO: 120689 - DNA, 374 bp, Glycine max
  Clone ID: PAT_MRT3847_79990C.1
gccactcgtgccttaatgtatcttcactgggaggagagagagagaaagaaagacagaagaggtgacagactggcagatctgacgacgaccctataggagctagatcttaaagaaacagagacacatctgattgagctaccataagacgctctcgacgcagaggcaactcccaagaaacatttcgaacacaaggaagagcttgattcggaagatatgatgactatctacatcaacacatcgctgccacatgtctgtcagtgatgtacttgaacgcacttgataaactggcttccggataatagataaacgaatggctatatgtagacaccactgacttgaagaagcacatgagataccctgttggatactcttac

SEQ ID NO: 120690 - DNA, 261 bp, Glycine max
  Clone ID: PAT_MRT3847_79991C.1
cggctgcgcgaggacgagagatggggaagatgaggggaaggcacataagtaggaggcactccttgcaactggtagcaatagtgatactggctacattgctcatgctccatctgagtcaaacggtctatctgatgtactaatagagtagtcctattttaactggcgtctcggcacgcgcacgtggtctcgcagcagctgctgctgcagcagcagcaggcggtgtatctggatttgagtttggtgttgatccaaacttggacc

SEQ ID NO: 120691 - DNA, 790 bp, Glycine max
  unsure (1)..(790): unsure at all n locations
  Clone ID: PAT_MRT3847_79992C.1
agtgatccttatgggttgaagattctgtcggtttatggctgtgggtcaaagaacatgtcttatgacagtgccaacttaaccaccncctgatatcaagtggcttggggttaggcctagtgatttggacaagtacaagatacctgagcagtgtaggttgccgatgaccgagcaggatattaagactggtaaggacttgcttgaggaggattttgtcaaaaagaaccctggttgggtggaggaattgaccttgatggtcaagactaagcaaaaggctgaaatacaggctttgagcacttttggttttcagtatctgtcagaagtttatttgcccttgaagttgcagcagaaagattggctttgacctgtgaataatgtagtaatatctaagaattaaaatggtggttatgccactacttagcccaacagcttagtcatgctatagtatctctgcaagttgcaccagaatgtggtaaatttttaagtatccttcattgaaaaattgttaaaaaattatgttgatcgcctgtttttcagactgagtttataattgtcttattgttcttgcttcagttaacagggaactgggtttattaaattataaaccccaagtgcttttgaattgcttaagtttcccttgatgttgcttgaaattttgaactccaagcattataggcatttaaattgtgtcggattagtacaagtttattttcccttgaaattgcagctgaaggattggctttgacctgtgaataatgtagtaatatttaataattgaaatgggggttatgcc

SEQ ID NO: 120692 - DNA, 263 bp, Glycine max
  Clone ID: PAT_MRT3847_79993C.1
ttgccgggtcgccgcgctccgtcgagggcggccgccctttttttttttttttccccttttttacacaataaattaatgtccatcaaaagcgggacctaataggaaactggaccattggctcccacatatctgttcacccaagactctaactgcgcgggagtatacctgcaggtatgtgcacactccgacagcctcatacgacgcggacggcgataccaccagcacgcgctgatgctcatagagacatagcatctttggctatg

SEQ ID NO: 120693 - DNA, 1107 bp, Glycine max
  Clone ID: PAT_MRT3847_79994C.1
acgagttcaaccccaatttctccctccaacaacatcaacgtagaaccttcttccccggcatagccttttcctccgacaataccaacaacaacacatcaacacttctcaatttccaatccaacaccctcaacaccaccatgctgcagcagcaggccaagccggagcttagcgacggcggcgtgccatcttccttagacatttcagacacaaacacagaagacacaacaacaacaacaacaacaacaacaaacctaagccgcaagagaagaccagcaactacagaacaagacctatcctccagcacgcagcagcaccaaatgggtagctatctcctacaatcaagtgcaggcgctattccagcgagccacgccgccaacatatggatggtggccaattcaaactcgaatcaggtcatgagtggcgatcccatatggaccttcccaccggttaacaacagtgctttgtatcgaggcaccatgtctagcggcttgcatttcatgaattttcctacgcccgtggcgttgttgccgagtcagcaactagggtcttctgggaatattggtgctgttggtggaagcagtcataataatcacaataataatatcaatgaagggcatttgagtatgcttgcggggcttagtccttatcgacctgttattggcgtttcggaatctcaggcgagtggctcgcaatcgcatcgtggaagtggcaccgatgatcgacatgataatagctccagtcaccactcctagagaggacatgtgatgtcatcatcaccgtcaatccttcttcttcttcttacatgttgtgtagtttgattgatgatgaaggatctgtttagcacacgtgaggtttggttgatcttcgaaattcagttttatttattcccaaaattatttttttggtgtgattaaatataaggaaggagaatagttttttttagggtttgccagatgacaccatttaacaattgggtatttggccgcctgcttcttcttttcttttcttttcttttctttttttggctaaaaaatgtcttctttgagttatttcactacacgatatcttatcatcattgattgtttgtggaaaaaaaaaaacgaggat

SEQ ID NO: 120694 - DNA, 318 bp, Glycine max
  Clone ID: PAT_MRT3847_79995C.1
tacaaaatcaaggattttttgatatattttaataccctcaaaaaaaactctaaaatattttaatcataactaatacaattatttacctataaaaataaatatatattcatattcccatacatataaattatatatcaacaaaaaaaatcttatattactttttaaaaaaaaattataaatccattttttttaattaaaaatactattccaattataataataataaaaaaaaaataatattacataccttctatataatccaaacttacctactcattcatactacataataacacttatataatacacacctaatat

SEQ ID NO: 120695 - DNA, 496 bp, Glycine max
  Clone ID: PAT_MRT3847_79996C.1
gttttgtttttttctttttttctttttcttttgtttttatttttttttatttttgcaacaacgttaggctggcttcctaaacgttgacaaggtctgaagaggaaaccccccttaaatttttacccaaatttatatgttcttaagggaatcccctaacccaaaatccgggggggaggtttcctatgggggggctcccgcatggtaggtccacaaattcttttttttgtcccccatattccatccaatcttcgaggggatgcgaggcttgaccctttacccccctgcctttattgaaaaaaagaggggggaggggggacttttgtttcatttgaaaacagcccgaaagagaggtagctttttgataaaaccgttccctttttgcctaccagggccaaaactgattattttaccttttaaggggctgagggcttccccaaaaaaataggctccgcccctcttatgatgttcagggattagtttggggaattttttcggg

SEQ ID NO: 120696 - DNA, 287 bp, Glycine max
  Clone ID: PAT_MRT3847_79997C.1
gccgttccggtattgcattgtcgactcgagcgacccgtcagaccttcgaattattgttttaaccgtgccaatttagcgtacgcccatcatggccacgcgagcggcatcatccacctcgtacttccatggggacgcgcctcctggaggcccattcctgtggcggtgcggttgcacgcccagttcgggtttggcaagaagaaagccgccgcccccaatgaagtttccagggggtcggactctatctccgattggccccttgggtatcctggccccaaagctcctgcttg

SEQ ID NO: 120697 - DNA, 328 bp, Glycine max
  Clone ID: PAT_MRT3847_79998C.1
gacgcatgctccccgccgtcagctcctaatacttctcgaggaaaaatacaacatgaatttttatacactacccgcagtgatctctactaacgacgacggttacccacaacaagcgcgggcgcgcgcacatccactcccgctcagcaccctccgatcccgaccgaaagccacacacatacgtctcctagagagagcgggagaaaccaaccctattcaatctcaaatctaaggaccaaaaagatattcttcatctgaaaaccttgaaagacaccttgaccttaatgcttcaacccacccctcaacaacatacccaaccagacctatcact

SEQ ID NO: 120698 - DNA, 295 bp, Glycine max
  Clone ID: PAT_MRT3847_79999C.1
gtcttatggagatttgttcttggggatggtgaagagatgacactgattccgggacccagggctgaagaggcttacaacaagctagtagatgaactggagaaaagcgctactacattggttggcattgaatgtgctaaggatgagaaacttactcggcgcaatattctagacaaacctaagacgcgctgcttcactattctccatatggagtttaatcttgtggcccgctagaggttgttaaatgatgtgaggtcaattatgaagaaaagggacaagcttagctggtaagttggaa

SEQ ID NO: 120699 - DNA, 294 bp, Glycine max
  Clone ID: PAT_MRT3847_7999C.1
tgctgcgagaagacgacagaagggatctccaataaaagataagtacagaggggcaactgtcataccttaatttcgtccggggacaattgtttgtcaacatgcgaattttcattggccaagttgagctacttaacatcaatcactacgcaatccgtagggtttcgtgacgtcacgaaaagagatgagcaagatactcagaatgggggcaatttttgtcaacatagggattttttccagccgagttaagctgcttaacggcgatcactatgctatccgtagcgtttcgcgacgttt

SEQ ID NO: 120700 - DNA, 483 bp, Glycine max
  Clone ID: PAT_MRT3847_799C.1
gtaggttcagtctcttctgtgtgctgaccgttttatgtatctctttatgtgttagaagttccaatatgaacaagtgcgtggagacagacaaccaagcgcttctcaagttaaaacatggttttgttgatggaagtcacattctatcttcgtggagcggtgaagactgttgcaaatggaaaggaatttcatgcaataatttaactggccgggtaaacagattggatctccaattttctgattattctgcacaattggaaggtaagatagattcttcaatatgtgaactgcagcatctcactttcttagatgtcagttttaatgatttacaaggagagattccaaagtgcattggttcacttactcaattgatagagttgaaacttccagggaatgaatttgttggttctgttcctcgtactctggcaaacctttctaatttgcaaaatcttgatcttcgggataataataatttggttgcaaatg

SEQ ID NO: 120701 - DNA, 562 bp, Glycine max
  Clone ID: PAT_MRT3847_79C.1
aacataaaaaaggcaaaaaatttcctaaatggaaatttgaattatcaaaacctttgggaaaacaaaaaacggggggtggagcattcccttcacaaatttggatcttttaaaccaaaaaaaaagggacttgcatgcaaaatcatggcataaaaccatgcatagaccttttaaaaaaaaaaaaaaaggaatagaaattttttttttccaagccggatataactacgttacaaaaatacacaaggctaactttgggcatttgaaacccacagttttgatttcagggggaagctttaaaaggcatttttgaaaataccttggagttaagaaaacatatgcaggggggcacattttacaaaaacgttaaaaacccttagggaacattggacggggcccatcgaaaattctccacaggctggaaggaagttcatgccaaaaaaatacagccccagcaaggaaaaaacattacctgggggataaattctgaaaagggaaaaaccctttggggggttgagtgtgttacccaaatttctggattacatcattagcaactcaaacttcccta

SEQ ID NO: 120702 - DNA, 973 bp, Glycine max
  Clone ID: PAT_MRT3847_7C.1
cggccgctcaggcggcccgcttgttttccagagggtcgatcccttctttttcgagaaaccactctctctctctttcttaattcactttctctctctaaaatggcggctgcttctagaagatcaagcgggccagtcctccgaacactctcgccggcgggaaggtttcgcaattcccggccatcgccggcgaccaccgccttcgcgtcctcaacttcaaccttctccgcacgctccaccgctttcttccagaaccgttccagctctcccacacgtgacaatctatacggttcttcttccggttcggttccctccgtccggttcggttcaattaccccgaactcttccatctccgtcgcgggtgccggcaggcatagccaccaccagaagcggacctgcatgtgctcgccgacgtcgcatcccggttcgttccggtgcagccttcacaagagcttcggctcgcgctcggcagtggcggcggcgtcgcctaaccggctgaacgcgcggcggtcggcgatgacgaactcgctcgtgagaatccgcggcgtcgaaggcgaattggtgaagcgagccttggcggcgctgatccggccgtcgtcgcaccaacagcgccgccgcggcgattttcggccgcggccgagcagactctctatcatgttcacagcaaaagattaagaaaacttgtgaataattctgtgaatcaccggaagcttaatcgcgccgagaagaaaccgcagtagacggcggcgattcggtagaaacggtttgagattttgaacggattagctttttctgttacttctagatccgatatccgatcgaagattatggatatgcatcgttctttgtgtgtacataatttagaatttaaaaatataaaatagaaggcaagtgaaatattagtcagtggctaccattgatggcgatgtttgcaacttcggctcgtaattttatttaaacagatttgcttttaatt

SEQ ID NO: 120703 - DNA, 218 bp, Glycine max
  Clone ID: PAT_MRT3847_80000C.1
attgtatccaaaatttttggaagcttaagattttgtggtcctgacttttacaaattagaaatagacagatggtacgtacatgttcaacttagagggttttattcctaaattatgtcaactggctcaagaagagggggaagatgaacgagctctgcggctacgttcagctggactacaagctctatcctatatggttcatttcatgggcgagcattccc

SEQ ID NO: 120704 - DNA, 210 bp, Glycine max
  Clone ID: PAT_MRT3847_80001C.1
atgcgtccgcccacacgttctagaacggtcgctgcaccactgattatgcgggacatgctgtacctgtcggtgccaaccgaaccgtggacacacacatacgagccagacgcagcaccgaaaggaatgacctacatgttggaacctcagctgacttgaatagggtctacatctttacaaagggaattcatcttattatgggacacataaagg

SEQ ID NO: 120705 - DNA, 113 bp, Glycine max
  Clone ID: PAT_MRT3847_80002C.1
ggctcgagcgcaaacgtaccactacattctcacaggctcgaccatccggtcccggcgatcagcggacacgggtaccatttccccctaaccccaatccatgttcgaatgaggct

SEQ ID NO: 120706 - DNA, 246 bp, Glycine max
  Clone ID: PAT_MRT3847_80003C.1
gggatgtcaatattcggtgtcttcatgtcattgtcgggaccccattatattgaattatgagctcagtaccaaatggggtcatctctcagtggattagatcattgtcatttgttagtgtgcaacggaattgattcaatcaaaagggtcatatttgatcgtagatctaagatttgaactgaattcaagatttttttttctttgtccgagattgaattttggcggaggaaatcgggagtgatagttgat

SEQ ID NO: 120707 - DNA, 388 bp, Glycine max
  Clone ID: PAT_MRT3847_80004C.1
ttgtgttgcagatttgaaggtaataaacaattgatggatgagtattctcgtaaaagaggtgtagatgggatgggattccctagaaaggggatgggccatgtatttagagatactgctaatactagagatcgaaatggtcaaatttgtagtcgattgggttgcagtagcagagccaatcttcccaaagttgctcacgtcagatcttctgaaaaaggacggaccagaattttcagtgcccatccctccaacagaagaaattcggagagggcctctagttgaaggagaaagtacagagtctagtaatgcaatattgatggaagtaggaagttccagtgcagtatcaaatactaaatctcaaagagctggattgcgtgcgcaagaaattaaa

SEQ ID NO: 120708 - DNA, 444 bp, Glycine max
  unsure (1)..(444): unsure at all n locations
  Clone ID: PAT_MRT3847_80005C.1
acccacgcctccgcttttttgatttcctttnactcctgggggggggggggggggtctattggggtgctctttatggggtttctacaatgggctcctctgctcatgcctatgggggggggggggctaatgctcatgccaccttctatggggggggtgagncgtctttgacaattggtnnggcatctgcgtgtggggggggtgtacanccaangggatgggacaaacactgcggctctaagcactgggctgtgcaacaatggggtgagcgtggggtcttnctatnagagtangggtgccaatnagccacagggggtgccttccangggctattggggggactgccaccaatttctgtggtgcaaacaatgcgcttncccaacaacaatggggggcgtgggtgaccctcctctccaacactttnacctanctcaacctgtcttccta

SEQ ID NO: 120709 - DNA, 1159 bp, Glycine max
  Clone ID: PAT_MRT3847_80006C.1
tgtgttgccgctttgaaggtctcaatcttttcctgcgtgtgctctctccctcaagccgtcttgttgcgacggtgttcccgtgatcggcgtcggtccggattcccgggtcgactgctattccacgcgtccgtggcggtcatcttcgttgtccccgggttgcggtagtgtgccattcttcccatcggtgcccgcgtcagtgaacaacaccatcaccacctccaccaccatcaacaccaataacagcagcataagatttgaagctaataaacaattgatggatgagtattctggtaaaagaggtgtagatgggatggtattccctagaaagggaatgagccatgtatttagagatactgctaatactagagatcgaaatcgtcaaatttgtagccgattgggttgcagtagccgagccaatcttcccaaagttgctcaagtcagatgttctgaaaaaggtaaatctttgaggccttcataccagtcctcttcaagtagcaagggagcaattggaagttcctctagaactactagtaacccagccaaacgacttttagaacctaggaaaacattatcctctcagtttgaggcagattcatctgaaactagtagtgtacaggatggaccagaattttcagagctcatccctccaacagaagaaattcggagagggcctctagctgaaggggaaaatacagagtctagtaatgcaatattgatggaagtaggaagttccagtgcagtatcaaatactagatctcaaaggaatttaaatcaaagagctggattgcgtgggcaagaaattaaaagcactggtgcagtgaggcgggctgtttccagcagttatgggttaaggaacctcaaatgcaactctatatctgatgtcgtccgatctggttgttcatcatcagattcaagccttaatagaaggaaggatacaataaaaaagggaaactgtgaagggggaaatagttccactgttagggggaaaaatatcactgggtcttcactggaaggacggaattctggctccagaaatggcatatctatatccgattcaagaagatctagaaatgttccttctcaccggagcaccagcgtggcatcagtaagaactcaaagatcaattagtggtcaagccaggggaaggttttgtagccaa

SEQ ID NO: 120710 - DNA, 820 bp, Glycine max
  Clone ID: PAT_MRT3847_80007C.1
ggctcgagctctttttctctctctgtttctaaggccaaagaagaacaacaccttcaccgccacctaaactaacaacagcagcataaggtgtgaagctattgaattcacttaaaaattctcaattttttccttcgtgttctctcttcctcaatccttctttttacacgaagttcgggtaatcatcatcgaaccgaattgaaaccgtgaataatatattggtttctcgtggcggtgatcatcgttgtacccagaaattgaaaaatttgaaggtaataaacaattgatggatgagtattctcgtaaaagaggtgtagatgggatggtattccctagaaaggggatgggccatgtatttagagatactgctaatactagagatcgaaatggtcaaatttgtagtcgattgggttgcagtagcagagccaatcttcccaaagttgctcacgtcagatcttctgaaaaaggtaaatctttgaggccttcatttcagtcctcttcaagtagcaaggatgcaattggaagttcctctagaactactagttacccagcaaaacgacttatagaacctcggaaaacattatcctctcagtttgaggcacattcatctgaaactagtagtgtacaggacggaccagaattttcagtgcccatccctccaacagaagaaattcggagagggcctctagttgaaggagaaagtacagagtctagtaatgcaatattgatggaagtaggaagttccagtgcagtatcaaatactagatctcaaagagctggattgcgtgcgcaagaattaaaagcactggtgcagtgaggcggg

SEQ ID NO: 120711 - DNA, 1002 bp, Glycine max
  Clone ID: PAT_MRT3847_80008C.1
ggctcgagagaaaagaaaattcaccagtgaacaacgaaggatagaagaaaaaaaagcttcagtgaaagaaaatggcgttgtacctggacgaagaagagatttggaagtgcccgaagcatccatcgaagcgaagaagaagcggaatttgccatatttgccttcgcgaccgtctcgtaactctttgccctgactgtgctaacgtgcgcccctgttcctgctacgccaccagctcctcctcctcttcttcctcttcgtcttccttctcgcgtttttccggcgccagcgactccgtcggccgcgtccacaacctcatcgagcgggagccagggctgcgacgctcgcgctccatggcgattccgtttctccgatcgaggtcgcggttctccggcggcggcggaggagatagggttttggatctcgatagcgcgagggagtcgccggcgatgaacgacagccggtcgagaaaaccgttctagccattcggcgaggtcgttctggtcaatgttcaagtcacagaagagcagtagacacgacggcgtcggcgccacgccggagcaggagtgggaggcgaagaagatattggcggaggaatgaggcggcgatggtggcataaatccgatgatggcgcggtcaaggtcggtggtggtgacgccggtgatggcggtaacggtggtttccgcgacggagaattgagattgtggacgaaagggagagggtagttctttccgagtccgacgaaggctttcccgcaatccaaggtctctaaatgggttcatgaacgttttcctttgtatagaggaaggatattgtgtgagaagttcaagatagtatgatgtaccaaaagagtaatctgagggttaaaaaaatttgtataccatacacaagtttacacacttgaccaccgtagcatgtgccttacatgtgaaacaaacgttctgcttttggctccttggcaagagaaattcaaatcggatccagtatagtgatattattataacaata

SEQ ID NO: 120712 - DNA, 290 bp, Glycine max
  Clone ID: PAT_MRT3847_80009C.1
ctttttgttctcatttctcagttattgtttaatcatcgtaccatcacactttgggtgatgctttgtcagctgcatttattttacttcagctattcaaattccttaatgctatctctagatatcacaccgcctgaagccggatataaagaagagagacttgtgagcaaagaatccaaacgttgtgggggggcacctgtaatccttcgctctgaggattaagctaatccagactgctcatccactgcatctgagtgcattgcaaggcattaaagtaggtgaagtcaatccag

SEQ ID NO: 120713 - DNA, 961 bp, Glycine max
  Clone ID: PAT_MRT3847_8000C.1
tacggcacgcgtccgtacggcgaagaggagaggattggatttaaaaaagaaaagacaaaaaccgcattgagtggggcctgccctaaaatggcccttacagagcttctctatcaagagctgctagttggtggttgaggagtaataggttccgcataagctacatttcgtgggggaggcacctatccagtacttccgaactcgtctttcatctacagacattgggtcgctaaagccaatagttcggtgtccgggcaacagccaagccactcatctttggttgcagcttcggcggaagcctatgctttcagttcagttccattccttggttctccggttgattgccctgcccgcgtcacaccttaaaaagctttggaacggcagtttcacttacttctcacggacattggaccttcttcaaactggcctttgaactttagcaaagagtctattggatagaacggggagctatttgctaatcgagggcttcacttccctgctctggttcaagactagctaggtatcctcctcagtatcgttaccacgctagcttgaatagtctcagagcttggctacgattgcctcgaaggaatgcagagctgtcttatagtagcgagcaccccccttatgaaccttaaaccagaggacagaaagaaagcaaaaggagaaggaagagaagggactaatagattgatgttatcctactagcagtgactagaaggaagggagccaagtcactaactagaggaagggtctacgattgccgggtcgtgttcgtgaacctataaagaacttaaaaaattgcttacactcctcggaaattactgaaagactggcctacgacccctcactgaaaaaggtctctctctgcttaaaaaaggaatgaatttcagaaaagtctttgggcgtactttgacgaggggtgacaactccttctttctattctatataagtgccaatagcc

SEQ ID NO: 120714 - DNA, 654 bp, Glycine max
  Clone ID: PAT_MRT3847_80010C.1
ctggaacaaaatttaaatgagggaccaaaattatgttttagcctaaataatatctctaaatatttggtctttaactgagccgtttgatccatgtagccaacctcacctaatgggacaaggctttgttgttgtaaatattagttgtgttttcatcataagtgaattgtgtgtgtctgtcaattctggtggggtttatggtggctgatattcaggtgagatttttgcaggtttgtatttttactgggtcagttccatttgcagaggtttttttcctctgttaagagcagtaaggagaagccaaaggagctttcctcttggctgaaaacctttgggagacatctacaggataaatccttgtatgcgttgggtatctcttcagagttccagttagggatggatgatactttactttttggcttagatgcatatgaagatacagaaaagcctcgtgggaaagcagtctttcatcataagtttccagatcatgatctaacagttgaggcaggttatcctgaactttttgttgatacgactggtgattactgcgatttaccatctccaatggcagttgatcttgcttttgtgactaccagtgattcttccaccgcttaccatatgtgtgcacgctacactactgggtcacccaagcatgtt

SEQ ID NO: 120715 - DNA, 511 bp, Glycine max
  Clone ID: PAT_MRT3847_80011C.1
tacatcatggtgctgtaatgatctcaggccatatgcttgtcagaatacagaaagccaaagatattttatgatctgataaaaaaaagttaaatggggtcaggcatatcagaagcaagtatgcagtatgcacaagcagggtagcatgtcttttcaagccaaagcatatatagccatgttatctttgcttgatttattgggagtccttttcttcatttattttttgtaattaacacaggtcatgcacatgatggcaagtttcgatcatatcattcaaaagcaatagtgctgtagcagcggcttatacatggattgaactaataaaatttaggttcggaaatgaagaatgagaatgaacaaaacaaattctacttttgtataataagatcctatggtaatatgtgacatgacttgtttttatgggcctttttttgggatgggatactatatctttttagtttttatgatataatgagttattatgttattttgtaataagtttcaaaattttatt

SEQ ID NO: 120716 - DNA, 604 bp, Glycine max
  Clone ID: PAT_MRT3847_80012C.1
cctcgtgcccaatagcacgacgctccacattgtgttttccggtgaatattccgtcaactgcatgcaccggtgaacgtcgctggaaatggaggaatcacagagaattggcatcgacttaatgcgtggtttccctcgccggagatcggtggaaaaccggtcatcttcccggcgaagacgctccatcttctccggcgccggcaattcggaatctgtggacgccgacgacttcgccgacgtctttggtggcccaccgcgaactctccttgcgcacaaattctcgagctccggttccttttacgaggaagttttccggccgccagagttcacgtgtccggcaccgaaggatggccggagcttgccggtgttcaggattccggcgaggaatgagggattttacagcgacatattcgggtcggacgatgaccggagatcgagagaccggtcaaggtcactttcgaaagagaattcgtcgtctgcgatgagttcggaggagttaagccctcgccggccggcgattgcagatgacgtggcactttctggttttgcttcaaagctaaggccaatcaatattccatggagatggaatccatccactgtgatgcct

SEQ ID NO: 120717 - DNA, 275 bp, Glycine max
  Clone ID: PAT_MRT3847_80013C.1
aatttggtttaggagaaaagatggaggaaataggatagggggtgggaaaattgatgaatagaggtatttctgcagtttggatggataggtgaaaacaaagggtcaatgtacagaatatgaaactgttctgtttccaaaatcactctctcttctggcatgtttcacacgctatgtagctatgcttctgtgaacttcccttcctattgaactgattgttctttcaaactttctattatgaaattttctttgttgggttttctttcaaggatttttta

SEQ ID NO: 120718 - DNA, 265 bp, Glycine max
  Clone ID: PAT_MRT3847_80014C.1
atgacacctgcttaatctataaacagaaggggcggcccagtcaaactgcccaccagagaaagaataccggccggatcgaccgaccgaagccgacctagcttccaaaaagaggggcagtgccccggtacccatccccggaataacaaaagaacgttaaaagtggaggcgtctcactgacgctgtgccgagctcccacttatgccacgcctctgaaggcgtgtcacgaaagtgaggactaagagtcacagctgaaccaagcgacgtt

SEQ ID NO: 120719 - DNA, 423 bp, Glycine max
  unsure (1)..(423): unsure at all n locations
  Clone ID: PAT_MRT3847_80015C.1
agccttcggatttttcaatattaatataaaaatcttaaattatgcattctcaaatggaggaaatggtatcttggaagtactttttttgtgtgtgagagatctcggaagtactttctatgtactccactacacatgcagcttattttagcatttaaacttatttatcctagtgacacagccaccatgaaagtcgaaatttcctggaaatttcctttggcaaaatctgatagtcagtctgacaaagacattaataatagatatcaactcaacagccatcacacaatgaagaaattaaaataagaaggaagttggtactatttactatataaaaaatatttaaaatacattcacatttctatttacattntatttttctttcctatttctctccatttattatcacatcatttgtcatatttctct

SEQ ID NO: 120720 - DNA, 349 bp, Glycine max
  Clone ID: PAT_MRT3847_80016C.1
ggctcgagagaagaggtgaggctgaggatgaagaacttgaaggtgtttggggaggatcccttgggactctcccttgactctaacacaggaaactatagggctgtgcagatatgacatcaaacgcaaccgcatgttctctctctcttgccacagtctgatatacacttgccatctgtactctttgcacgagaacgccgtttggagccctaacgcctggctctcatgcttcgatgctgttaccgacgagctccaacccggagacagccgatacctacttcgactactctcatggagaaagaagcgcttcttatctgaacctccaacggccatttattgctccacaacgata

SEQ ID NO: 120721 - DNA, 403 bp, Glycine max
  Clone ID: PAT_MRT3847_80017C.1
accaaagggccaaaataccagaatctaaagacccccaaagggaaaatggggaaagaaaaagggggaaccaaaaaaaagcgaccccaaaacacggttcaaaaaaaaaaggcccacctaaaaaaaggggaaaaaaaaccaagggccaagggaaaaaggggaagaaggcggggaaggggaaaaatgcaattgggaaaagggaacacccggttatgcctaatcctggatctccgatgggggggggctggatggggaaaatccccccagggggaccgcccccccgggttaagggcccccgggcccctgccccccggccagggggcccaaacccaaaccccttgggcctgaggccgaatcccaaactcccaattgggggtttaggaaatttaaagtttgatttttggcc

SEQ ID NO: 120722 - DNA, 558 bp, Glycine max
  Clone ID: PAT_MRT3847_80018C.1
ggggaaccaacaaaaaaaattattttaaattttggaaaacaaggaaaaattattaaaaagcggtaaacaggggaaaaaaattttccaccctttccccccccccccttaaaaaaaaaaggggggggggggggggaaaaaaaccctttttttttaattcttttgggcccccaagcagccccccttaaagggctaaataaaaaaaaaaaaccccactaggccaaaaccacggggatagcccgccccgccccccccagggttttttttttcttcagggttcggaaaatggccccaccacttttttagttttaaaaagggccccccccacaagggggtttcatcccccccacaacgcgggggaactttttttatcccctaaaaaaaactggaaaaccccctggttttccaaaaaaacaaagcaacccaaatgttaccggcctgggttttccactccaaataagggggggggccaaaacaaattttccttttattaacatggcccacatttaaaccaaaaaacccagatcccagggggacattttctttagcaaatttatgccc

SEQ ID NO: 120723 - DNA, 349 bp, Glycine max
  Clone ID: PAT_MRT3847_80019C.1
ccacgcgtccgcggacgcgtgggctagttctagatcgcgagcggccgccctttttttttttttgtcttttcaaatgtatttcttcattattatgagattgaatgtgttgggcaatttatcccctgtatgtatagtattagtcaatgggtaggggggtgagttaaattgcttaagtggtgttgcttgtagttacctcctcagcaacttcttgttgcatacacgttgaaattcagagtcggaggagattttgcttttgaagcttcacgaccatatgtaatcacctaactaatattatcatgtaacgatgtcttatgattttccaaaaaaaaaaaaaaaagggcgggccggt

SEQ ID NO: 120724 - DNA, 286 bp, Glycine max
  Clone ID: PAT_MRT3847_8001C.1
cacgcgtccggcgatctcagtgagatgatcgtgtgctcacttgatctcatcataatcgtcagcgtgaagtgaagattatgccgatcagctacatcaccgtcagaaggtctgaagaggctactcaccccgacccgttgaaggcggctctggctgatttcatctcaaccttcatcttcgtgttcgccggctcaggctccggcatcgtctacaacaagctcaccgacaacggcgctgacacccctgccggactcatctccgtctccatcgcccatgcattcgccctctt

SEQ ID NO: 120725 - DNA, 173 bp, Glycine max
  Clone ID: PAT_MRT3847_80020C.1
cttgtcgcgtttatttcgcaaacccggaccccgggtcgtcgcaccttaaaaccggaaaacagacgcactacacattgagttcaagaacggctcaaaggcttcctacgtctgttgagtaccactgctaggggaaagaaaaatcactctctgtgctggccacagactgcgtgaat

SEQ ID NO: 120726 - DNA, 400 bp, Glycine max
  Clone ID: PAT_MRT3847_80021C.1
tactcggacttgaattcccggctcgaccgacgcgtacgtccacgcatactcccacacgttctacggctgctaatgaccacatacgggttaaaatgtatggcaatttacaagaaatcaaggtcaaactagtgtgtcaactttagcgtaacctctatctccccactctactcccctattcccactttacgtacttcttcacctcttctttctttacaaaatacaatatcttacccttcacacactcaccccttttgttcatatctcctcaatctttcatctggcaacttctcaattctcaccaccatcatcctttcactagaatctacctgtgctcttagctgttctatgttcatacgatatagaaactttaattttatctgtgtacaaatttcaccctgat

SEQ ID NO: 120727 - DNA, 575 bp, Glycine max
  Clone ID: PAT_MRT3847_80022C.1
gaattggtagttatgaaaaagaagaaatttggtgcatggttgcatttttatattttagctcaaatatgtttttttatttttgataaatacttaaattttacgtttaatttctaataaaaataaaatttttcattggatcacttataaaataatttttttatttttttatttttaatactttattttagttcctgataaattaaccaactttatttataattttgtatgttttttttcatttgttattagtattttcatatgggagcaaaaacaaattttttattttatcagagtaaaagtaaagaatttttttattagggagtataaacaaaattttgaatatttattaaaatcacgttcaaacatattttagtcttatgtttttcatgaagctcccaccaatgtttgttatctgataatttttaacacgctcaaaactaagtcttgttaaatatttgtctcctttaattatgggaccaattaataaaaggtacattaaacttgccttgttgtaacttctagtcgatgcgctttagacaataagtagttcgagaaatttaaaattttcaatatga

SEQ ID NO: 120728 - DNA, 132 bp, Glycine max
  Clone ID: PAT_MRT3847_80023C.1
acggctgagagaagaccacagatgggcacctcattgggtatttccatcactttggcgctggactatctatgtcagtggatgtgcctggatatttgttgaccctacttgctgaggatggacagcctccagact

SEQ ID NO: 120729 - DNA, 1397 bp, Glycine max
  Clone ID: PAT_MRT3847_80024C.1
ttctccaccacaggacacagttccagatggaagttccaagcttactatatgtatgatctaatgctgtttacaaatcgtatcctatctacataatcaataaatcattacttttttatatgttttttttttttcatagcaagtttttttttttttttttttttttttttttttttttttttaggtactaaatgtgatttttttccaaatagagccacttacatagttcaaattccatgttatacaatgattcttttattcactttagttaaaagaaggaacctgaacatttctcccaaagggagtagagaaaagatgatcatgtacatttttatatgtatgatctactgctgtatacaaaattgcaatggccaaaagggagtgaaattatgtgcatatcaagtatctaaagctgaactcatatggcataatttgtacaaattgtgataagggctcggtttttctttcctcaaggaatttaagggcttctttccccaattcacttggtaactggagacagatccaatccagcaatgactccaagtcttttgcaaagttcagcaaataccaatccagtagctttgggatagcaaactttgaagttgaaaatccaattgctgcctgtaagtactctcttttggccacttccagttcattctcaacctgggatgctgtgtaaactctcacagcaggagaggaccaagttccagaagagagagcaaatgtcactaggggttctgacagttccagtccatatatgcttcttgctgtcatttgatgattttttgttcccttggaaaacgtaaatttccagtgataaggaagtcttaaaatgaaatgctctatggttgttgcacttagcacgtgcccaccaacatttattgttgccttccgcattagtgcaacagccatttgaggattctctggtatgccattctctatgaatgcctgaagcaaagtagaacttaaaataccatcattattatggtttgacaggataattaggcgcacaaattaagattttttattctgattattgaggaaagttataataaattgtgtggaaaaaatgtttagatacagacgttttggattgaaagatttggcatcaattgcacataattgcctgtatggaccaatatccctcttcccaaattccaaacagatgccatatggatcccaaaaatctgcttcttcatcacagttttgaggttttagatcccacacgggtgccatgtcacatgtagaacctggattcttcacggcactcattctcaagagaatgtttgataagcactttagaatattttctgaaattatatttggactctgctcgagccgccttgtgattattgaggaaagttataataaattgtgtggaaaaaatgtttagatacaga

SEQ ID NO: 120730 - DNA, 814 bp, Glycine max
  Clone ID: PAT_MRT3847_80025C.1
gcccaagccaaacaaaaatctaagtcaacagtaaggttacttattcagtagttcttctctctcgaattttcactcactttctgtgcatcaatggcggcgataagtctccggaaggggaacacgcggcttccgccggaggtgaaccgcgtgctgtacgttcggaaccttcccttcaacatcaccagcgaggagatgtacgacatctttggcaaatacggcgccattcgccagatccgcatcggcaccaacaaggacactcgcggaaccgctttcgtcgtctacgaggacatctacgacgccaaaaccgccgtcgaccacctctccggcttcaacgtcgccaaccgctacctcatcgttctctattatcaacaagcgaagatgagcaagaagttcgatcagaagaagaaggaggacgagatcgcgcgcatgcaggagaagtacggcgtctccaccaaagataagtaaatgtaaaatacttcgttccttctcggaagtgcctagggttagggtttgggttttcgagactctgtttggtggttttattgtactgttattgttggagtaagtataagtgagtatgaattcatgtttacgatgttatttgtgagaatgaaatcaaatataaattcatcggaagtgccttgtggttgttggttagggtttttcgagaaactcgcctctgtatttactttggtttaattgtgttgccgttcgagttgctattgaatagtataaacggttaaactcaatggtgacgatgtttcccacacacgttttgagtgaatcgaattgaacattgcattgactctaaaaa

SEQ ID NO: 120731 - DNA, 639 bp, Glycine max
  Clone ID: PAT_MRT3847_80026C.1
gaaacaattaacagtaaggttacttcttcttcttcttcttcttcttcttcttctctctggaattttccctgacttttgtgtgcatcgatggcggcgatcagtctccggaaggggaacacgcggctgccgccggaggtgaaccgcgtgctgtacgttcggaaccttcccttcaacatcacgagcgaggagatgtacgacatcttcggcaagtacggcgccattcggcagatccgcatcggcaccaacaaggacactcgcggaacggccttcatcgtctacgaggacatctacgacgccaaaaccgccgtcgaccacctctccggcttcaacgtcgccaaccgctacctcatcgttctctactaccagcaagcgaagatgagcaagaagttcgatcagaagaagaaggaggacgagatcgcgcgcatgcaggagaagtacggcgtctccaccaaagataagtaaattaagtacttccttctcggaaatgcctagggttagggttagggttttcgagactctgtttggaggttattttgtattcttattattgttggagttagtataagtgactatgaattaatgtttacgatgctatcattatttgtgagaatgaaatgaaatataaattcatcggagatt

SEQ ID NO: 120732 - DNA, 207 bp, Glycine max
  Clone ID: PAT_MRT3847_80027C.1
gcctataagtctactgcaatggatgcaactgaagcggggttactggccatcaaattcaccataaccatcccaggatgaaccaagacaggccatcgtggacgatatacgatgattactgatcgcaggtacctattgaacacttgcgttttgtgatgcataagatagggaaagatgggaaaagttcattcatggttgataatagggggc

SEQ ID NO: 120733 - DNA, 492 bp, Glycine max
  Clone ID: PAT_MRT3847_80028C.1
aaaaccagaaaaagggaagcagggggtttcacttattccattaccagcccaaattttaaaaacaggccaaaaatcgtttaagccaaaaatgggtaacaaaaaacagcaaacatccaagggggaaaaaaaaaaaacaatttggggaaacaaaggccactagttacagcccaatggcaaaaccctaatttttaaaaacttcagggggggcgtaacaacaaaaaaaactttgttttgggaaaactatttgggggggaaaccaacacctaaggaactaacgggggattcacgggtttgcacactcagggggcaaaaacatggggggaaaaaaaaaaaaaaaggggcccgggggggggaaaaagccagggaaaggatctaaaaagctatcaagggattggcagccccagttggaggaattccatcccaactaaaaaaccgggccccttaataacaaacccgaaaaccaggtggaccacatgtcacccttacgtaaaa

SEQ ID NO: 120734 - DNA, 208 bp, Glycine max
  Clone ID: PAT_MRT3847_80029C.1
acattgataaatagcttatagatgaatacatagaaagatcacgtacataagaagtggagatagtactcacaatagtagttttagccctagttatatgtgacatatggcaccagttagttcaattttaacaattttgctgatgacatttttcttaagtaaccttgttgagaatagaacatgctgattgatcatgattgtagtagttcca

SEQ ID NO: 120735 - DNA, 481 bp, Glycine max
  Clone ID: PAT_MRT3847_8002C.1
tttttttttttttttttttttttttttttttttttttttttttttttttttttttttttttttttttttttttaaaaaaccaaatacccatcctggaaaaaaacaaagggggcccccaatttttttgccttttttaaaaaaagggaccaaaaaaaaaaaattccgtttttaaaaaaatttttttgcaaaaaagggttccggttgggggtttaaggccctaatccttaaaacaaaaggccaaagggggggcattttttggaaaaacgggttttttgggtccctaatgggcggctttaacggggggggggtgtttgtaatcttatttaaaaccggtgggggttttttgaaaaaccttggccccgactttatggggattggtcaaatggcccccccccatttaaaaaggtccccttttttttttgggggggcaggtttttttattttttaggggttttttataacccaacccagggggtgtttt

SEQ ID NO: 120736 - DNA, 448 bp, Glycine max
  Clone ID: PAT_MRT3847_80030C.1
gcggcgaagctgggaataaattcgagcgattcggctcgctcgagcttaacctcaattttaattataatcgtccctggtaaataggctttttagatattatgatacagcatcgttttctatgatgattatacagtgccatgatttggatttctagcgacagcctatcgtattccgaggttacagttcatgttttgtttcctcgttttgatgcactgattttataattactttatcaactgttcatgctagagaacccactcattgagaattctaaagtcagttaaaaactcaagaaacctcagcaagcttatttatggagtgtattctctaaccgccttctattggttcccaccttattcaaggggtgcgttgtatgttgcctttcttacatgcgaggggcggagatgcttatagcaccttagtcacatgtgagaaaacactagaatct

SEQ ID NO: 120737 - DNA, 273 bp, Glycine max
  Clone ID: PAT_MRT3847_80031C.1
ggctcgagagaaccctggacaccccacatattttgattgttagttccgaacatgtcaatcattgggcacagatgcttctgtgctctccttgcgctgatgggtatagcaagatgatgatgacgtatcgcgttccataaaaaccatgacacttgatgggaataatgcagaagaagaaacaatggctgctgcttacaacctcagctatcacgagccatgcaaaccttgggagaaggcgaactatgtttagtccaagattggaaaggctgattcggc

SEQ ID NO: 120738 - DNA, 1249 bp, Glycine max
  Clone ID: PAT_MRT3847_80032C.1
ccgaatctgacaatggagtcaacgtggttggagttgttggaccaggaaaggaaacaataactcgtaaggtttatgaggtaattgccccaagttttcctgctcattgctttcttcctgatgtgggagaaaaaattagggaacatgggccggaatatctccaaaacatgcttgggccttatatgcttggaaattcccaggaaggagtgccatttataaggcatgagaaggttcttgcagttttggattgcattgactctctggattcgttgaaagctgctcttggacttactcctcgctttgctcctggaagtcaagtcttcattatagctccagatataactttgcttgaaaataatggaattgaaaaggtatatgaagtaaaggggttagacaagacatcggcttatcaagtgctttgcctagaggctttcagttccatgaatatgagtttcaaatacatggacatcataagccgtgctgaaacttgtgctgatggcaatccttgtgctttgaaagctattggttccagttttcgtggaaaaacaatagcggaatgcgagattgcattagatgaatataaaagaattcattattctgaattgatagagagcatgattggagaaaacaattggatcccatcgttcggggatatttcagaagagtatacggagtatgacatgccagatgtcgaactagcctcagatgatggaagcgggatggggaattttttgggatcctctaccctcttgtcccaggcaaacatgcaagatgtcgaagcagcctaagaagatggaagcaggatggggaattttctaggttcctctgccctcttgtccaaggtgttctaatctcaaatacgctggtagatggactcaatgtacgctgttatgagtatggaaaattaaaccctaaaccggcaatgtatgcaggtgttttaaactatataggactattctgaagattgatcctgactagttcatggtaacaatattgcaggttggtttataccattacctgtgatcatgttgcctttgcctagataacggaatatgagcaatttatttttggggtttaatttaagttttcacttcgggtataggtctacactcccggcggtaaaaaatgaagatacattgtttatctaaaatagcggtatttaaaagagagagaaagagaaacaccagcggggttggcatgggatatcggggctagtgcatttgaaggtgagctaatttttttcaaaataaaa

SEQ ID NO: 120739 - DNA, 730 bp, Glycine max
  unsure (1)..(730): unsure at all n locations
  Clone ID: PAT_MRT3847_80033C.1
ccacgcgtccgcaaatgttgtgtacctctggtgtgctgcggagagtcttgaaatgactgaggaatatggtgaaggtaatcttatttcacaggctgaagcctttttcaatcaagtggtcctccgtagttggaaagactctctgagagcacttcaaacctgtgatgatgtttcggcccatgctgaagagctccacattgtgaaaagatgcattgaatcactggcagcaaaggcatctactgacccaaatttatttgggtggccagtgctggagcgtggtggtcccttgcagagccctggtggaagtgttttgtggaatggaataagtactggggcaagaccaaaaaattcgagttcagattggtggtacgaggatgtaacaaatttgagtttacctctttttaagacattgatagctgtcatggaatctcgaggcattaggcaggaaattattgccggttctcttgctttctatgctaaaacatatctgcctgggttaaatcgacgtcaggtttctggcgagtccagtacccgtctgtcacaggtagccatggggtctccactatcagaagacaaccagaagattctactggaagagattgatggattgctcccaatgcagaagggcctggttcaaacaaagctcttgtttgggtctactacgaacagccatgattctaaccagtgagcccctcttgcatatcaaactntggagaaacggattggcttgcag

SEQ ID NO: 120740 - DNA, 508 bp, Glycine max
  Clone ID: PAT_MRT3847_80034C.1
cttttttttttttttttttttttttttttttttttttttttttttttttttttttttttttttttttttttttttttttttttttttttttttttttttaaaaaaaaaaaaaaattttttgggtagaaacttccaataaaaacagggggggtcggcaaatcagaacaaaaccttactttccaagctttaacaaaacgggggtttttaaaaccctgaaaaaaaaaaaggggaacatgttacaaggccttgggcttttttttggtggcattttaacattttttttttcaacccaaaggaaaggaaggaaaaagaaaacccgaaattgcccgccttaaaatgccgcggcgggggcagaccttttatgatgcttacgggggttcaagccgatttggttgccggcggcaccttttttttgggcggaaaattggcggcaaaaggggatttttttttttttggggagcggaaaaagggggggggggaagcggggggggttccggttttttcgggg

SEQ ID NO: 120741 - DNA, 1965 bp, Glycine max
  Clone ID: PAT_MRT3847_80035C.1
aaattactggatcttgtaccatattgcacccaatgctctatccatattcgtgcaatgtaagctgaaagatttgttggattcaaaaagttcttcaaagttatgtcagggcttacatttaaaggtttgggcaatttggctaattaagtttaaggcagcaaaaattgatgtttctagttgaactcttcatcatatttaattagtcaagtttgtgttcgtgtaggtcttgctcttgcaactagtatgtatcggatcttaaatatggagtgtagttatggcaagtcagtgatgactaaaataatgatccctctaaaagttttgattttaatcatttatgatcctggaggacaaaaagaattgaaatgatatttgactattcactatttagactttaaagtaccacttggggacagctaaatgcccacgcgtccggtttggacaaatgttacaactgcaaccaatggtccttctgctagattttctgtggctggtgactgtttagacccttttaggagtggtgttcttatattcatcggtggttgtaataaaagtcttgaggccctggatgatatgtattacctatatacagggattgctcgagaaagtgaacagagaccagaaaaattatctttaaagaagcaattgaaactgaaatgtctagaacaaaatcccaatcctagccaaaatcaagttctagttagatatggagtgggttctgatgtgggacagaccatgacagtgttgaattatagccaatcaagtagactaaatatcccagtaaaccaatccctacctcctggtaagaaaatgtttgaagccaaggttactgaaaacatctcagaaggatatactattgaaactgttattgatggaaaacctcttcgtggaattctgtttttaaacaagcctatctctctgtacacagatgctcatacttgcagtaggtatgttttcttgagttcttcccctcaccagtctctttcacttttcaatgcgttgatagtattaagcaccttttggtatacaagtttgtttcaacttatgcttaattcaccaagcaggaaaaggactgttggtgaaattgatagtgttgtctcgaatggtatacaccctaaccaatttaagactcctaaagtggtcaagcaaaatcaaatggaaaaccgagaagcatctcgtggagacagttcagaatctcatgaacaccgcactgaatccattgccgtgcttatgtcaagtaacccaatgactgccaatccttctgatacccataaggtgaagttgttttctgtacttttgttagttagagttctagaggatggcctgagtaatgaatgatttctatttttttattccacctgtcagagattggtcaatagaattattctgtgtgaaaaaaatgaccaagtgattctgttgagatttctactgaaaggaagttgggtcttaacattcagattttttgttgccttaaaaattcccagaactgacactgaatttctgaaacctgctgcagctgagagcgctttgcatctgtcatgccaagtttcagtggcggattccgcaactccacaactccacaactccacaactccaacgacaagagaatgcagtgaatcagcaaaattaatttgagctcaggagataacggctgatggtgataactgtctgctaggcatttgtacattcctcttctcaagtcgatcatagagttcaatataactggtgatataggctaacgtgttccactggtgggttatacaatcatttactcactgtcaccctttagtctgaaattttaattgaacaaaaccatgattacgtttaggtgtaggtagtgatagaaacagttctattttattgtgttatgttcattcctgtcttcatttattgcatggaaaaaaaattttgttttgttggtggctgggcatcagtactttttctaaatgcagtttaacctattaaattcta

SEQ ID NO: 120742 - DNA, 424 bp, Glycine max
  Clone ID: PAT_MRT3847_80036C.1
ctcgagccgcatcggatcaagcgaggcttaccaagaaccacatgatctagcacatcaaggacttggcctcatacaacaaggtggggaagtactacattgaaatggggccctacaacactcatgtcacaccagtgatcctgacgaacatcattgagaaccctgcttggcacactgagatcacaccttaccaggctgagatatttcaggggaggctagagacactgattgatcaccacaccatgaccactgacctcaccggattgcctatggacaatgctgcattggttgatgagggaactgttggtgctgacgcactgtccatgtgcaacaacattcagataggggagaggaacagcttcattattgccagtgactgccaccctacaaaccattgatatttgcgagacaagggctgatggtgctg

SEQ ID NO: 120743 - DNA, 272 bp, Glycine max
  unsure (1)..(272): unsure at all n locations
  Clone ID: PAT_MRT3847_80037C.1
taatannananntaaggtaaanctnnngaattcganttnngatcttnnnatnaantnatnnanantctcctatntagnataagantnnanangtcganttnngnanannncananatnntntcanantananntcncaatgatcngnattnnngttaaaagtngtataatnaaaaacaattngnngttggtncaaatgatgctnttaatnatnacggaganaanaggctcantgagaaaanaatantaannngaaaatgnanatnaagttgt

SEQ ID NO: 120744 - DNA, 496 bp, Glycine max
  Clone ID: PAT_MRT3847_80038C.1
tgtcaaccgccatagacaatttgtgaagggaggccaccatggcggtgccatatggcacaatggcggtgccatatggcacaatggcatgcttatttggcagaattttggccttacaccattaataacacttgggcctcaggtcaaatttcctaggaacggaaggaatggcatatactaagatgctggcgggaatggagtcttgagccccttatttatctggcgcctgcctaataaaagatcgaagaaccaaatgatatttcaatcattattttgaaattgaaattgcttgttgacatgtatgcaatgaagatcaccaaaagtcgctacatgaaggaaaccaaccaatcactgttccaaacctaaatgcatcaacgacaacatttttaaacttcctttattcccttccaaatcaaatgttatccttgcattctgtcaatagcaattttcatcctaggtaaccaaaaaggacttaagataaagctctaggtaatataag

SEQ ID NO: 120745 - DNA, 600 bp, Glycine max
  unsure (1)..(600): unsure at all n locations
  Clone ID: PAT_MRT3847_80039C.1
acgacagaagggggaccaacgcaactcgattcctagcctcttcacgttgttcttttaagcttgttttaacggctcgaagttcccggccagcttgttttcagcttctttgacggctccaacttcgcgactcgaacgcgacgaggtcgtgaagaaggatattgttcgatcacttttgccgaaatcagggaatttcttccttttctgaacaacaggtactgggttgcaaacgggttgtgaaggttcattaaaatactgggtatgtagacaacacaccaacacagagactgctccaggtcattggtaagcataagctcctgttcatctatattttctttgaaacatgtaattaattaaattactttgcaagatttgtagatacttctgctaaattattatatggatgataaattttggaactgattagatgtttaatatcaagaaatagtatgacttttaattgcaatgttagccacttgatcatagaagctatgataccatgccaagcaccaacttggctacngattttagttgttaggtgcattcacatacttggttttgtatatctaacaaatgctaatgtcatccagtcctatcgnccnc

SEQ ID NO: 120746 - DNA, 354 bp, Glycine max
  Clone ID: PAT_MRT3847_8003C.1
gcgaccactcgtcacgaccactcattctgaagaagttagtgtaccttacggatggtggaactaagaagcgggcgggatatgcatagtccgggtgttgccgtagactgaagacctggctagtctcagagcccaaagactggtgtatatgccaacgtcgctaaccacttgaatgtacagtactgtaactcggcactactattcagaagtgtaagtcaatgaggtctcatatctgaaggatgtgctgatgccattataccctacaattactgagtgatcactcaacgctggaatggagaccattattgtgcacatagggcctataggcctgctaatcgacgagctctttcagaatca

SEQ ID NO: 120747 - DNA, 403 bp, Glycine max
  Clone ID: PAT_MRT3847_80040C.1
ggaaaaaccaatctcaaccgagaaggccttttcccttttttttaccttttggaattggaaaacctttagccgcttttcccatatccggccctggaacaggcccctttttttccctttttttccctcccttttcccccaaacattttgggcaaagccagaaaagggttgattggagggttgaaacccttgccttttccagaaggtcccaaaagggggagccccgggtaacctggggccaaccttttatctaactggcccaaagctaagggcctggggcccggctctttgggggggggggagattctttaaagggggtcattttttaaccccatgccgttactttggggccaggttctttttgggattcaaaaaaatttattaacccttcaaaaagaaccccgcc

SEQ ID NO: 120748 - DNA, 171 bp, Glycine max
  Clone ID: PAT_MRT3847_80041C.1
ccgatgcgtgggaaaatttctaactatagagtgtgggattttgttcacgctcatgggcggtacttgacgtaatggtaatcatgtaaaagtgataatatgtcttaggagaaaaaatatatgaatgaaattcgggttccttcatatgaaaaacatgttgctcatgaaaaattg

SEQ ID NO: 120749 - DNA, 247 bp, Glycine max
  Clone ID: PAT_MRT3847_80042C.1
aaggtcccaaagtcacttagggaagattattaggggagggaaactggatgaatccacgaagaatggggctgtgacctcactcgccttcctcttgccactacaggacgcacagagggcccgcaagctcgttgaagacaccattgccgacaagcagagcaagctcgaccgcctacgaagcatagacaccgtcaacaacagcctcatgaacctatgtcacaagctgcccgaacagatcttccacgacatc

SEQ ID NO: 120750 - DNA, 352 bp, Glycine max
  Clone ID: PAT_MRT3847_80043C.1
agtatttttacttttgtcttttttgttttttttttacgattgtgcgattggaattgaacgcggtgttgaaattcttttacagccaagcaaagacactatcatgatgaaaatgcccaaagctatgaaaaaaagggaactccaaagagagccggaaattggagcctggttcaatccacaaggaaactaaatatctataggctgtgttgccctctgaaagtgggccctgtcaaaatctttgacagtcagatgccgtattgttgatcatgtaattcatctgcacccacttgatccactcctgatcagttgaatccaactcttaagagagccaaacatccctggtaggagaggaacg

SEQ ID NO: 120751 - DNA, 395 bp, Glycine max
  Clone ID: PAT_MRT3847_80044C.1
cccctcgatcccaattcttttattctactaaagggcaaaaattcctttaaaaaggccctcatcacttaattactaagggcaaaactttcaaggttaacgggggaggggaaaaaaaaaattcaaaatttctaaaaaatgggcgctcctatattcggtttaacatccaagcccttaggctggctccaagatacatcacaaacttttacttaaaagggaaaggggggataggggaaaaataaaaactcatttgcccaagacatcctttttcctccacaaaaaaggaaagcaccctttgaaattggaacttctattggttttggggagaggagggttaattttcttcatagggatactcagggggagcaaaccacaaaccccaaaaaataattggggga

SEQ ID NO: 120752 - DNA, 543 bp, Glycine max
  unsure (1)..(543): unsure at all n locations
  Clone ID: PAT_MRT3847_80045C.1
ggccgcccttttttttgggggtggggtgagctttggagataacttgatgatcatctaccctccaaggattttagacgaaaaggacaattacaaccctcgacagtgaattgggtagaaaacccaagtgaacgaaaaccgttcgcaggagattttttctgagaaaatcaaaaacacacaggtggggttcttctatttaggttcccccctctcttataaccagctgagggaaaactgctggtgggtcgctggttgataaatcatctcctgctaaataaggccatgcattccccctcttatgagaggccccccccagtacatccatttgttggggcaagttcagctcacgacagacctcccaaatgttacaggggggttaatggcccttcctgagaaggccccacccaacaaattgttcacctcctcagttaaaccaatggctatgggagcattaattcccaaaccacccttcttggggccaatggcggantcttcgaccgtgttcaccttaccgacagtcttgacgatctacaacaccaaggcgtt

SEQ ID NO: 120753 - DNA, 304 bp, Glycine max
  Clone ID: PAT_MRT3847_80046C.1
gagcgtcatcgacattctcaccagagtcgattccatttgcaaaaagtacgacaaatacgacggccaaagccaaagggacttttttttttcctccgacgacgcattagacaaactctacgccttcgtcgacgccgccattgaggtcttacttgagaaagcagacacccgcttcaaggagacaagaaaggcatctactgtggcgatcaatgtcgagatccgttgaaccaacgacaggtcgttggaggaggctcccaaggcgccgagactggctatgaaaaaggcaaaggggttttcatcacaagac

SEQ ID NO: 120754 - DNA, 269 bp, Glycine max
  unsure (1)..(269): unsure at all n locations
  Clone ID: PAT_MRT3847_80047C.1
cttgacnacaatantgtnaaacncnnnatcnagtttcagacgttntgtcntctctnggagattggntcttccagggctgcttactcttgaccntgcttctntctcgggccttaaagagggnagntngtgtgtctctcaaggntccaccttgnncggtcagncatttacagaacctatcanngcnnacttcagntcnactgcnttgaggngcaagagggattcgnacaaaagctctgtgctgtgagggccgaaacagtggtncagcctnt

SEQ ID NO: 120755 - DNA, 351 bp, Glycine max
  Clone ID: PAT_MRT3847_80048C.1
ctcactcgtccgtggacgcgtgggttcatatactattcacgaaaaaaaaccatattgccaattaataaaaaaattatagttggtacataattcttaaaataattattataaaattaaatgaaattttcatatataatgatctttttattggatgacaaaagtaaaaactctttatactataaatgtattggctattatactctaaattttagtgtcgcctgtgagtacatgtatatgttgtgaacctataaaaacagaagttacatactcagaaagtatgtgtgatactacagtgatttaccaaagcttttaattccaaccttatatatatatatatatatctatatatga

SEQ ID NO: 120756 - DNA, 437 bp, Glycine max
  Clone ID: PAT_MRT3847_80049C.1
tcggctcgagaaaaaaatttatcaggacctacaacaaaaattaatcatttgtcaaagatttaaaatatatttaagtctttatattatcaaatatcgactactacaaccgcaatttatattgatcaattaagtatcagtttacaaggtgcaagggatgttgtggcttctactattttagccatcatgctgtgatggcttgtgttacatccacatctacaactacatatatgtttttccttctgtcctagtatatcataaaactttgcagtctgcagtccatctccagaatccaaaccatatatcgttctagtaccttcccgacatctacatcaaagtctagtacctgcgtaacaccctacgtacaaagtccagtacctatctggcacctacatacaaagtccagtacccgtctgaaccttatatggttcacaccacac

SEQ ID NO: 120757 - DNA, 590 bp, Glycine max
  Clone ID: PAT_MRT3847_8004C.1
tccacgcgtccgatccttcttgttccttggttccaacaaaaacaaaacccctccaaaaccttcatttcccaattatccttccttttcaactcttcaatgacaacaatctgaacccacacctacatggcttcttcttcttcttctcttctcccaaggtcacacattcccacacccctcatctccaaaatcagctcctcccccagaacatggagcctcttcattctcacatacccttcacaccccaaaaacaacaacaacaacaacaacaacaaaagactattcctttcccccaccaatgcagtgtacactcaaagcccctacaccccttccacaccctccaagaccgaactccacaacgaccccatcaccgtcctcaacgagaggattcggcgcgacttgagcaagaaggaggctttcagaacggtgatggactcggaggaggcggggaagtacatgaagatggtgaaggtgcagcagcagagagggttgcagaagttgaagggcgacagagagagtaaagatggggtctttagctacaaagtcaacccttacacgctccgttctggggactatgttgtgcacaggaaagt

SEQ ID NO: 120758 - DNA, 317 bp, Glycine max
  Clone ID: PAT_MRT3847_80050C.1
aaaataaaaaagacatttcaataaataataatacataagattgatatgaaagaaaaacacaattttctaataagatgatattcacaatttccttaaaacatcataattcatatatgatggattgttgaagcatcttcattctcatctaattggacacacgcttggccaatctgggtgaagttctaacaccgtctcctcagcagcttcacttgtaatcttcttcgttttgcgatttgaattctctgccgcttcaaccaccgtcttcttcacagctttgacacctttaaccaatctgctactccgagttttcaaccacg

SEQ ID NO: 120759 - DNA, 164 bp, Glycine max
  Clone ID: PAT_MRT3847_80051C.1
gtcgacatatgggcaactccgcatcccactgggttggcgcgttgggattttgagccaacaaaccttattcagacgtgcgaagtcttgcggggggctcgcgtggacaaggcgagtgaatggtcacagccacaataggtttggggaaatatgctggagatgcacgg

SEQ ID NO: 120760 - DNA, 363 bp, Glycine max
  Clone ID: PAT_MRT3847_80052C.1
taatgatagttcatggcagaataaacgttactacaaacccagtaagcacattgcatttacaataatcaagaaattgttacaagcaatgtgcttactgggtttgtagtaacgtttatgttgtataatgatagttcatggcagaataaaaaaaagtaattttcatcgccactctttccattttgaatcagaaattctatttgagattagatagggaaatctattagagctggcctagaagcgaggggttaggatagtttgtacaagattttgttaccattattgtataccaaaagaaagatattgtacaggagcgtgaacaatttggctgattgcataatggagtcagaagtgtttggttcactt

SEQ ID NO: 120761 - DNA, 866 bp, Glycine max
  Clone ID: PAT_MRT3847_80053C.1
ttttcaattgttatttttataatgatctggtcagatgattatgatttagcttttgctaaactgtatcttttcctgctgttcaaaattcaaatactgattaaatacaaagttcattatcaattttaatatctcaaattcccaatgctgaaggaagagtatttccttatgaaaagtaaggataggcagtttctctcatattattcagggtggaagggatgggggataagttaaagtggaactgtttttttaatagttttaagtttggattcaccatacattatgtgcaaaattttaaaccattttaaagaacgatatcttttttaacttgtgtttatttgtccatttgattgatcccaaacaccatgtgatttttatctggtgaggtatatgtaaagagagaagtgtgtactttgaaagttagatgccaactttccacttttgcattatgtcatgttgaaagagataagttacaaatttatcatgattttatcaattgaggtttaaagctgtcattatttaagtacacttctcacaccgtgatgctttatttcacactaaacaaatcatttcaactatatattctaaatatgttctatggagtacatgaacctttgttgctgtagagctgtgaacattcattgctgattgtggagcatcagatgtttactcttatccagatgatgaaagtgtcttggatccacaattagcgcagcatctggcattttttggcattgacttttcatcactacgaaagactgaaatgacaactgctgaaagagaacttgatcagaatacgaattttgagtggaatcgaatccaagacagtggacgagaagtagatccaatttttggacctggatatacag

SEQ ID NO: 120762 - DNA, 471 bp, Glycine max
  Clone ID: PAT_MRT3847_80054C.1
acgacttcaggcacgctttgcattcaatcctataatgtagtctttgtcgatagagacttactagcgaatgcgcaccaggtccaacgtgcatacgcaacgaaagcaacccccgcagcttatcacggaatcgtcgacggactcacacaagtggtcaggtacgtgtcggctagtcgttcaaattgcttgatcgacttccgtgatcgtagctgtatgaagacaaagattgactgatctgtgtaatgctttgttccggtaagcagaacggagggcgtgttggcactatacaaaggagctggagcgcgcgttgcattccatgccccatccaccgctatcacgatgtctcttttcgaaagctgccagcaggtctttgcttctctcatcgatgcgtaatgtagaaaacttacttcgtttctggctttgcccacgccatcttgactccttttattggttgggcgtcgttcgacaatgatc

SEQ ID NO: 120763 - DNA, 285 bp, Glycine max
  Clone ID: PAT_MRT3847_80055C.1
gtgtgggaaacaacaaatgaagattcttttttcaactcagggggattttttcatcattgacttgaaagggggggcttgtacacataagtttaattggacactcattggaaatattgaaggggactttcattaaacaaaattttaagagtgttccttaacaaaaagcttgctcactttttgctttttaagaaggcttccccaaaaagccaaattaaattttttcttagggggatcaccaatgcagtcaaaggactgcttttgtatttaagaaattttcatttggtt

SEQ ID NO: 120764 - DNA, 314 bp, Glycine max
  Clone ID: PAT_MRT3847_80056C.1
acggtgcaacttgtcattccacatgactaccctggcttatattccatgatatggggattgaattaatatcataacttcacaaatgctcgtgtgttaatcttttctgacctcctcaacgaagactgagttactgattattggaccagaatcacttctgtaagaattaagctattactcaacagacttcaatcttgataatgcaaatgatgacatcactgtaaagatacgttcatgcatgacctatttagttagaaaaatgctaaaatgtatcttatttgatcgcattctaacgattgactatagaattgaccctc

SEQ ID NO: 120765 - DNA, 385 bp, Glycine max
  Clone ID: PAT_MRT3847_80057C.1
aatttctcaaggcaaagtgaaaaccttcctctataatatacctacaactaccaacacacccctcatacaacaccacttcacaatacgtctcactctttcatccgcacttataccgacgattcataatattactacgcataatctacaactctctctatcactgctctattaagtccctacctccacgcgtccgtcccattctcccctcgcccacttaaccaaccatcgccccacccctccgagttaaaactaacctccccgacactccaacaccccccaccccaccctaaaatcacaccgtgcaacgcaatccaccgcaccctacatcaaccccaccccccccattccccccccaaaaacccccccaaactcccctccccccccc

SEQ ID NO: 120766 - DNA, 487 bp, Glycine max
  Clone ID: PAT_MRT3847_80058C.1
ctgacgcgtgggcgcacccaaaagctctaccaagccttcttggtctcctaacgtcaggtcatcacgcctttcacctacaacgcgctcatcagcgcctgcccccgaagcggcgactactataaagacctaaacctaatgtccaacatgcgccgtgacggataccaaccggacttggtcatctacaggtgcatcagtaagtacctcacgcgctacaacagagttgactctcctattgtccagacactctacaccgatatcgtgaccgataagatagaaatcaacggccacctcatgaacgagatgattctagggttctccaaagccggacaacctacacacgccatgcggtttatagctatggctgacaacaccggactgaaccctaaaccctcgacgcttgccagggctatcatggcacttgcgaattcgggaaggacgccctagggtgaagcgctgtttgaggagattagagagaacgggtcggaac

SEQ ID NO: 120767 - DNA, 206 bp, Glycine max
  unsure (1)..(206): unsure at all n locations
  Clone ID: PAT_MRT3847_80059C.1
gagctgggggggaggcggggtggcgctcgagggccctgaggccatacggggggagaggaggacgccacgccccaatataaggcggcgcatcccggcggatgcgagcccacagggccggccagaaacgatctcaatatgggggggggggggccancccctccatgaccactggggacccgcgtggcctgactagtgggggggccggg

SEQ ID NO: 120768 - DNA, 968 bp, Glycine max
  Clone ID: PAT_MRT3847_8005C.1
aaaataaaaagttgttttttttttttccattcgatttgccccctaaacaagcggggttagcgaccataatgtggaaacactatgggtttattttaatttgaatgtactacctttacaactattgatgtaaccaaccaatgcccccactacgccgtgtttgcacctacaaatagcccaacctgggctttcagcaatcttgggttataaattataattcattgggatgtttcccccccactactgatatgtccggatttaattggagaagataactacttgctcttgatacatgaagtgcccctccataaggaagtgcctcttctttgattttgaaaatggagagtgtttagatactacttatccattaaaggctttatcctatccagggaggaattcttatcccggaaaaacctcttgatagattgcaaattacacagggcccatcaaaggttataacatcttgtaattcatatatccaagcagatcgcatctattttaatttcaattcccatgctaaccttattattattcaaagaaatcataggatcatctgattcctccaaaaaaacgaatatgcttaaatacaatgagaaatacgtattttgttactagtgagtatcctgtaatatagcataatatccatcctggatttttacattatatctatatatctttctatatcttgatagatatatagatagatatatacatatattgctaatatatatctaacggacttatttaaaattctttaatataatgtttactaaacaaatattccatttgaactaatcctctgaatctccaccatcgactaaaaattagctatcatgattactagataagccgctatcgtgaaattactacacacgctgctcttaggaagcagtgcatgagcatcttgggtcgagacctagtagcggcatgacatcttatcttctaaaaaataagtcctataatgaacctca

SEQ ID NO: 120769 - DNA, 1357 bp, Glycine max
  Clone ID: PAT_MRT3847_80060C.1
ctcgagccgaatcggctcgagattttagcctctcttaattcataattcctcaccttcaaatctccattctgcttcattttctgcaaagaacaaacccctttctgaagaaagaatatagtcttcagctggacaaggatcatttattttgaaagacaagtttgtgtgacaatcttatagttctaagaagggtgcaagtgagagctttgctgtgatggcaacccgtagatattcttttggaagggctgatgaggccactcatccagactccatgagggccactttggctgaatttgcatccactttcatctttgtctttgctggagaaggctctagccttgctttggttaagatttaccaggattcagctttctcagctggtgaattgttggcagttgcacttgcacatgcatttgctctatttgctgctgtttcttctagcatgcatgtatcaggtggccatgtcaacccagctgtgacatttggtgctctcattggaggcaggatttctgtgctccgtgccgtatactactggattgctcaaattctaggtgctatagtggctgccctcgtgctcagacttgtcactaataacatgagaccatcagggttccacgtggggcaaggtgttggagtaggacacatgcttatacttgagataatcatgacatttgggctaatgtacactgtgtatggtactgcaattgatcccaaaaggggttctgttagcaacattgcacctttggcaattggactcattgttggggcaaacatccttgttggtgggccatttgatggagcctgcatgaaccctgctctagcttttgggccttccttagtgggctggagatggcaccaacactggatcttctgggtgggtccactgattggggctgcactggcagcactggtgtatgaatatgttgtgatcccaactgagccccctcatcaacaccaacctttggctcctgaagattactaggttcttatactagttgcatttgtgtatcaaaaaatgagtgttatgagttgctttggaatatctaaatatatgctatgcttgtgttttcttttgtttttgcaaccacccttctgtttgagtggccactatgctcctgcatgtgtatttttattttcttgttttggggtcacaactgccgaaacctagttgagtgtgtagtttttgtattttgtcttctacacattgaataaaatgtgtgaaaccctattttgtatagggatgccgcatcaggttcaagtcacttgcatgtaaacaccaatatgctaaaagtaaccaatggaatatttaagggggaaaacctaataaaaggatgcaaaagatcaaccattcaagatttta

SEQ ID NO: 120770 - DNA, 176 bp, Glycine max
  Clone ID: PAT_MRT3847_80061C.1
acgaggtgggttggagcgaatagggatggatcaaccattttgtcaccctaagttagcagaggacatatccaattaagagttagtcttaccactttcaaatatattccttgccgaaaaaaaaaaagatacacgaccaaacaaaaaaaaaaagaaacaacgaccgtttcaagtcaaca

SEQ ID NO: 120771 - DNA, 1260 bp, Glycine max
  Clone ID: PAT_MRT3847_80062C.1
cattttagctttctcttccttcataatttctcacctttcaaatctccattcagcttcattttctgcatagaaaaaacccttttctgggagaaagaatatagtcttcagctggacaaggatcattcatcttgaaagaagagtttgtgtgtgacaatctttatagttctaaggagggtgcaagagagaactgaatttgctgtgatggcaactcgtagatatgcttttggaagagctgatgaggccactcatccagactccatgagggccactttggctgaatttgtttctactttcatctttgcctttgctggagaaggctctggccttgctttggttaaaatttaccaggattcagctttctcagctggtgaattgttggcagttgcacttgcacatggatttgctctatttgctgctgtttctgcaagcatgcatgtatcaggtggccatgtcaacccagctgtgacatttggtgctctcattggaggcagaatttctgttctccgtgccgtatactactggattgctcaaattctaggtgctatagtggctgccctcgttctcaggcttgtcactaataacatgagaccatcagggttccacgtgggacaaggtgttggagtagggcacatgcttatacttgagatagtcatgacatttgggctaatgtacactgtgtatggctactgcaattgatcccaaaagaggtgctgttagcaatattgcacctttggcaattggactcattgttggggcaaacatccttgttggtggaccatttgatggagcatgcatgaaccctgctctggcttttgggccttccttagtgggctggagatggcaccagcactggatcttctgggtgggtccactgattggggcagcactagcagcactggtctatgaatatgttgtgatcccaactgaaccccctcatcaacaccaacctttggctcctgaagattactagttgcttccactagttgtatcaaaatatgagtgttattaatagctttttgtgtatctaaatataagggtatgcttgtgttttcttttgtttttgcaaccacccttttgcttgagtggccactaggctcctgcatgtgcatttttatttttcttgttttggggtcacaactgccaaagcctagttgagtgtgtagctgttgtattttgtcttctacacatattgaataaaatgtgtgaaaccctattttgtatagggatgctaaaaataaaaaaaaagggcggccgccgatt

SEQ ID NO: 120772 - DNA, 293 bp, Glycine max
  Clone ID: PAT_MRT3847_80063C.1
cccgggtcgacccacgcgtccgcacgaacgttatatactaattacaggcataaggctagcgaaataatatcactcgcattcctgaatgtacgggggtgccggctctatacataagacgtggaacaagcaaccgacataacttgcaccctcattctgcgaggtggcacatattacatcatgccatcacacttgtggctctgctcctgcgggattgaaactagcacggacaggaaactcaaactggccaggtactgggatacatgattactcatatacgttacgaggcacactca

SEQ ID NO: 120773 - DNA, 235 bp, Glycine max
  unsure (1)..(235): unsure at all n locations
  Clone ID: PAT_MRT3847_80064C.1
ttcggcatnggcaacggcggttaacggttaaaggctccggggaaatttcagggtttccggagnntnttnccnggttgccancaagcctntngaaaaccaacnaacccggccgtnttttcggggaggaagtacgcacngtccgnantattgnggnanagngacgcggngatggtcagancgncagagtagngtgancnaggnatncgatanagccgnancgncantgnctatccgn

SEQ ID NO: 120774 - DNA, 562 bp, Glycine max
  unsure (1)..(562): unsure at all n locations
  Clone ID: PAT_MRT3847_80065C.1
ggctcgagagacggtccagtgatcaatagctggtttcctttgtttcgtttgtttctctttactttttttgttgtcttccttttgatcccttttctctctttttctccttcttccacaccctcttctcctcatcatctcatcaatcacatcatgtattctaaaggcaaaggttcactagctgaacgtaaacgtgcagcgaaaaaagaagaagtcaaagaagatggatctacagaaaagaaaacaacatctgcatttttgcgtattcaaaaagatttggctgatcttgaattacctgataatgttgaattaaaaaaggaggatgattataatttctcatttgttcttaatatcaatgaaggttattggaaaggtggtatatttgaatttaaatttgcatttccacaaacatatccatttgcaggtcccaaagtgacatgtatggataaagtctatcatcccaacattgatctggaaggagctggttgtgtgtcagtgttacgtccatggaagcccacctattctacccaaattgntctctctggncttctcttcttattctctc

SEQ ID NO: 120775 - DNA, 405 bp, Glycine max
  unsure (1)..(405): unsure at all n locations
  Clone ID: PAT_MRT3847_80066C.1
caccgcaaaaagcgaaggaaaagccaattatttgggaacaaacttaaccagatttcaacaaaaaaaccctaaatcaaactaaaagctcgacaaaaaaaaaaccccccttaacaaaacagggggatttaaaaggacaaaaaaaaaacccccttttttaaacaattcacggtggggaaagacaaccaatttacgggggggggggggaaaaatttttgggaagcaaaaaatatgtttatcaggaaaggccccccccccctccaccaggggatcaaaatcatcagaacccacaaaaaggcaattatcagcccattctttaaagggaatccttttcctggccacgggcttcctcatnataattttcataattcacccgaaaaaaagacttctaaaatttttttttttccc

SEQ ID NO: 120776 - DNA, 321 bp, Glycine max
  Clone ID: PAT_MRT3847_80067C.1
gtttagctttactttttgaatggacgttagaggcctcccaaccgaaaaccaaacatagccttaataatacctttttatttatttggttttagttttattattataataactcagtttttcccttagcattgctttgttttaccctttttaaggagtttgtgcttcgtaacatattctaatttctgagacatttaagcagagctttagaagattgtatcattatggcaaagatgtcatttgttagataattgtaagtcagcttgcaatacgagtcctcggaagctctaaagttattaaccctctacacaattttactatgag

SEQ ID NO: 120777 - DNA, 692 bp, Glycine max
  Clone ID: PAT_MRT3847_80068C.1
ataagcttaatttatacagtgatattggtaatatcatggcattaaaacaaagagctaaaaaaagaaatattaagataaatgttaaagaaatcaatgagactgagggagtcacatttgatgattgtgatattttcttcattggtggtgggagtgatagggaacaagcgcttgccacgaaagaattaagtaaaattaaaacttctttaaaaaatgcaattgaagatggtatgcctgggttaactatatgcggtggttatcaatttttaggtcataagtatattactcctgatggtaccgagttagaaggattgggtgttcttgacttctataccgagtctaaaaaagaacgcttaactggagatatcattatagagagtgatacttttggcacgattgttggatttgaaaatcatggtggtagaacatatcatccgtatggaacattaggccgagtaacgtatggttatggtaataatgataacgatcgaaaagaaggtatacactataaaaatctattaggttcttatcttcacggcccaattttaccaaaaaatcatgaaataactgattatctacttgagaaagcatgtgaaagaaaagggatactatttgagcctaagaagatcgataacacagaggaagaagctgctaagcaagttcttattaaacgtgcaaaagaaaataaaaaataa

SEQ ID NO: 120778 - DNA, 174 bp, Glycine max
  Clone ID: PAT_MRT3847_80069C.1
agaatcttctgtttttggatctatatactttggtttatgatgatggtgtgtttgaatcagaagagtggataggtttttggtttggaatttggattgggttggttttgttctcattctctgtctctccccaattggcccttttatttgatagtttgatggcacttgatctggttt

SEQ ID NO: 120779 - DNA, 562 bp, Glycine max
  unsure (1)..(562): unsure at all n locations
  Clone ID: PAT_MRT3847_8006C.1
ccacgcgcccacgcgtccggtttgcaattgtttgacattgagttaggaaaaatgggttccaaggctttgctcgttcttgttatgctcttggcttctgtcctccttctttcagcggaagttgcatccaaagatgtagataagaaacttgataaaaatgatggtaaccatgatacaaaaggagtcgatgaaatgaaatattatggtggttgggggtctggttgggatagataccgccgtggttggtattgccccaatggttgttgtcaatggagctactactatcaaacctgttggaggtgctgctattatcctggtgaacatgttgatgtgcgtactgatgctcaacctcgcaactaaacatgaacattgtgcttaaagtataggctattgttatctatataaataaaacttcatgggacgtgtacttcatgagacgtgtacttatctagttatgcatgaaataaaagtgaaaatctttcactgtgcattattactaaaggaataattaatggatttggcaatcggcatgattctcatttcaaaaaanaaaaannaaanaaaa

SEQ ID NO: 120780 - DNA, 175 bp, Glycine max
  unsure (1)..(175): unsure at all n locations
  Clone ID: PAT_MRT3847_80070C.1
tgcttngaaacaatctattctgtaattatttatcgattgaatatacattgaaaaatgttgcntgcnnnaaaaccagaacgcttaatgttttcatgaccaaataaagagggtgcatgatcctaaaatcaaattttttttagaaaaaaaaaaaaaaaaaggcgtccccaaactcagc

SEQ ID NO: 120781 - DNA, 700 bp, Glycine max
  unsure (1)..(700): unsure at all n locations
  Clone ID: PAT_MRT3847_80071C.1
ggcatactggacgaactgcaagacgacaacagcagtcttcggcccggaatgcatctatcttcagttaccaaatatgctgtaaagctcgcatacttgcagaccagtgtttcgtccgcatctaatgcgggtgaacgcatggttgtgcccacagcaatgttgctggcaggattcggattaggactttcaacatttagtgttaagaaaatgtcgggcacaccatgccgccgcctgagtttagtgcgggtgatgtaataaattattaaatgatgtatttgttgtaagaaactttggagagaaatgaccgcgctctaaatgaatcttggtatgtttcccatgagtaatgacttcatttggataggctacttaattgactgaagttgtgagtgttctggtgtgagagaagctaatatgttgcttcatttacactttgtatgagatttgtaacttctaagtttatatagaggcaaattttgctacatattgtcttcctgatgctggtatgagtgtgaaatattttatgctgcaatcatgaacatcatggagtcccgaatgtacagaagtcattgtaaattattgtagtcatattagagtgctaaagtattgatagtttttttgttttatttttatttttttttggttaaagttttagtgtgtattgtgcagttcatttncttagctgaagctaatcatcttaattatt

SEQ ID NO: 120782 - DNA, 155 bp, Glycine max
  Clone ID: PAT_MRT3847_80072C.1
aagaaggggttgtggttcggaggatcatttttcgtttagaagcggcttgttgaacaaaccctagatctttaaacatacacagagtgtctaataggacaattttaaaaggaaaaggaaaaccacgattttatcaaacatctaattacaagacgttt

SEQ ID NO: 120783 - DNA, 326 bp, Glycine max
  Clone ID: PAT_MRT3847_80073C.1
gacggatattctagactcttccctattattatatatgtggatgtagtagcatgctggataaactcttccctaaatatatttttagtataaaatacagatatcttatccaataaaaaaaaacaaaagagaggatacaactagaacaaagaacaaaatgacaaagacacttacaccatgcttaaaaaatgaaggtgaagctgacttatataaaaaaaatataggggggaccactcactggaggcttcatacaccacggaataaatttggaacacgtacaatctggacacccaattttccttaaaggtaatgatattaaacccctgcca

SEQ ID NO: 120784 - DNA, 2630 bp, Glycine max
  Clone ID: PAT_MRT3847_80074C.1
aggtgtgatccgtaacagtgagaagaagaaagggtgagatgtcaaagcaatggcaatggagttccgcttggacgttgcttctctttctcatcttcttcctctcctcaacaacaacaagcaccactgactacgcttgcaaattctcccagtcccaccccttctgcgacacttccctccccactctcacacgtgcgcgctccctcgtgtccctcctcactctccctgagaagatcctcctcctctccaacaacgcctcctccatcccccgcctcggcatccccgcctaccagtggtggtccgagtccctccacggcctcgccctcaacggccccggcgtctccttcgccggcgccgtcccctccgccaccagcttcccccaggtcatcctctccgccgcctccttcaaccgctccctctggctccgcaccgccgccgccatcgcccgcgaggcccgcgccatgtttaacgtgggccaggccgggctcaccttctgggcccccaacatcaacctcttcagggaccctaggtggggccgcggccaggagacccccggcgaggaccccatgctcgcttctgcttatgctgttgagtatgttagaggccttcagggactcagcggaatccaagatgctgtcgttgttgatgatgatgatacgcttatggtgtctgcgtgttgcaaacatttcactgcttatgatttggacatgtggggacagttctccaggtataacttcaatgctgtggtatcacaacaggatttggaagacacttatcagcccccatttcgtagttgtattcagcaagggaaagcaagctgcttgatgtgttcctacaatgaggtgaatggtgttcctgcttgtgctagcgaggaactcctgggactggctagagacaagtgggggtttaaagggtacatcacctcagattgtgatgctgtggccacggtttatgagtatcagaaatacgcaaaatcccaggaggatgctgttgctgacgttctcaaagcaggtatggatattaattgcgggacgtttatgcttcgacatactgaatctgctattgagcaaggaaaggttaaagaggaagatttagatcgagcacttcttaaccttttctctgttcaactgcgccttggactgtttgatggagaccctataagaggtcggtttggcaaattgggaccaaaggatgtttgcacccaagaacacaaaacactggcacttgatgctgcaaggcaggggattgtactgctgaagaatgacaagaagttccttcccttggatagggatattggtgcctccttagctgtcattggtccattggcaactacaaccaaattaggtggtggctactcaggtatgattttcatattgggacattgtaatttttccatcttcatttggtttgtttcatttaattttgcttgcagtagatacctcatgcctgtggtcaggctattcttttatacaaccctacactccaatggcattgatatatgtacacaggactttcacactgaaatgccaaatactttttctattctgaaataattgctgttttatcaatttattatttgtcatttaacaattgtttaggccatcatcttttaaatgtttctctatcttttagaagacccctcaaaaccctgacatcgaactgtatgatgttgtacctactacctaataatgtaggaattccttgctcctcatcaagcttatatgaaggacttggagagtttgcagagaggatatcatacgcttttggttgctatgatgtaccatgtgattctgatgacggttttgctgaggccattgacactgcaaagcaagctgattttgttgttatagttgctgggcttgatgcaacgcaagagacagaggatcatgaccgagttagtcttctcttgcctggtaaacaaatgaaccttgtatcatctgtagctgatgctagtaaaaatccagttattcttgttcttattggtggaggacctcttgatgtctcttttgctgaaaaaaatccacaaatcgcaagtattatttggttgggataccctggtgaagctggtggaaaagctctagctgaaattatctttggagagtttaatccaggtatgtatacttataaatgaatatgctgttagacaaggccgtctttatgcattgggaacatttgaaattagatgaggctctatgctctcccagagtgatagttgttatttttaactttacactaactactgtcaagtgtactttttctaaaaaattatccttaattgaatgtgattggatatgggttcgaatccggaaacagcctctttgcatatgcaagggtaaggctgcgtacaacatccctcccccataccttcgcatagcgaagagcctctgggcaatggggtacgaagtttttttttttagatataatttggaaagatcggacgaggaaatatagattgatcatatttcttgaaggagactaccaatttagggttgtaacatgcgttgagatgcttgaaaggccaagttaactctattataagggaaaggagcttctatttttactgcaacaaaaatcttgggcatgatatggacatctacatgtacaggtaattgcttttttctatatccatcccc

SEQ ID NO: 120785 - DNA, 144 bp, Glycine max
  Clone ID: PAT_MRT3847_80075C.1
tcaataccatcaaaaacctggcataatctacatcaacagtgaggccaaacaaaacacagacgagaacctcatccatctattaatatcatctatatcaacaacaaatccaaccattacacaatcatacactactaatccaacaaa

SEQ ID NO: 120786 - DNA, 539 bp, Glycine max
  unsure (1)..(539): unsure at all n locations
  Clone ID: PAT_MRT3847_80076C.1
cccacgcgtccgcccacgcgtccgcttattttgtttttagtatttggtttttgtattttataaccctagttttgccatcagagacatttgaatatgttaggattgatgatttttcttgaatcctgattgggaacatcaacactgttgcgccttgagtcgattcgcgtctctttttttttttttttcattttttgtgttaatttgtggctgatttattttgcgttaatatctaattggatgctttgaattgataatttgtcgtacgaatttccttaaattgatctcggatctttgttttccacattatataacctttggtaattagattttagaaatttgcaaattaaatagaggaagtggagaaattctattagtaattgtcttttagatcagttatggcggtaagagaaatgaaacaacacactctttggttgaaaatgattaaaattgtgtgggtcccacacttttttcaatgaactctacacatgattntgtaattttcaatcaattttaacaaataagaaagtatgttatttata

SEQ ID NO: 120787 - DNA, 347 bp, Glycine max
  Clone ID: PAT_MRT3847_80077C.1
ctcctgtgaatcagacctctttcagtgttctccatggggttgttggtcttcgtcaacacattccaaattgcacccaaaaaaagcttttgtttctcgatggatagaaatgcaaaaagaagggttagcaaatactagtttgaactcttatggaatttatgcttatgacacagtttgggcagttgcacgtgcaattgatatattcatcaaagtacacaatactattaccttctcgtttcctgataactataacttatctcatatggtaggaattggtattcagcttgacaagctcaaaatctttgctggtggatctgatcttgtcgccattttattccaatcaaattttc

SEQ ID NO: 120788 - DNA, 350 bp, Glycine max
  Clone ID: PAT_MRT3847_80078C.1
ggaatggggagtcattcaattaagcatctgcgttgtgaaaggagagactctttgagcaaaattttccccttttctttgctggcattcaatattctgtaattagtacaaggagcattcttttctcatactttggttttgggttcccaacaccatgttcaattaggcactgtctaaaaacctcagacatatttcacacccaaggtatatgggttagcaacttcccactgttgggcctataaaccatcttagacttggaaaggggatgccaaagttaaattcgcgaattttaatgggggaacaccacaacaattaaaaaaaaatggtttcaaaaattaacttaatcacttgga

SEQ ID NO: 120789 - DNA, 274 bp, Glycine max
  Clone ID: PAT_MRT3847_80079C.1
cggctgcgagaagacgacagaagggtacggctgcgagaagacgacagaagggtacggctgcgagaagacgacagaaggggtaactattttagcatgttcgatctcttgtttatggaaacaatcatgtacgattttaatgtgatatgttgtgattgctgatgttttcttttacttgtagactatgttcagaattcagagccagttcagaaagtattgctattgttatgctgtggtaatatgttttaaaaaaataaaaagaatatttaacttaaaa

SEQ ID NO: 120790 - DNA, 637 bp, Glycine max
  Clone ID: PAT_MRT3847_8007C.1
tatcgtacggctgcgagaagacgacaaaaggggtgataaattttgaaaaaatattcatttaaaaataaatcgtaaattgaaccacgactgtgtacatataggtcagaaatagatttataacttctaaaaaacaatagatgaaaatagggaaaaaaaatgaaagaatgatttacactaatttaagtgtatttttcttgacattattttgacatattaattgtattttatattttacgatacataatttatattgtgctaaatgtatttttaactattactcatttcaatttcaattaaaaacaaatttatattagaaacaaggatgaaaaaagaaaacttcaaagagataagatgctaattatttaaaaacaaaaaatcaaattgaaccttaaaaaaacaaagcctttcatttgtgcacctaaaaaaactgaaatcgatgttagctattgagataaaaggcttaatttagccttcatttttttatctccaaatccaatgataacggtatcagaactgcatgaactgaactgaaagggtgaagaaggagaagaagtagaagaagaagaacatgtaccggtctatttcgtctttctagttattggttggtgaggccaccaataacagaatcaaggtttcc

SEQ ID NO: 120791 - DNA, 482 bp, Glycine max
  Clone ID: PAT_MRT3847_80080C.1
ggaaagaaaaaaatcattgcctttccttggggggctcctccaataaagctcactcccccccttttcgtagcatttttgcaaaccgggcccagatttaaatgacaaattcttcttggggggggcccaagggccccttatttgaatatgaatacctgactttccggaaactttaaacaaagatcgctttttcaatccaggggaaggaccccaattcccccgcccatttgggacaagtttttttggaagcaatacataatcgggtaatagctggacaatactggcactggttttaccccctttatgaagtaaatggggcgcttcccttttggcccaagacatccaaaatcagatgggggttttccctaaaactgggccaattatatccaacatttttctgccgcgggatgatgggggataactctaaatatagctgctaataaagatcttcatgacgggattgggaaaaaaatttttccagggcc

SEQ ID NO: 120792 - DNA, 411 bp, Glycine max
  unsure (1)..(411): unsure at all n locations
  Clone ID: PAT_MRT3847_80081C.1
cacccccaagggaaggggacccccgggggcaaaaacgaaagacccagaaagcacgcaccaaagagaaacgcaacggacccccaggaggagcccccaagccccgaaaaaggaagaaagcnaccagggcggaaaaagccaggacccgagacgggcggacaaagagggccgaacagcccccaaccaaagaggggccccgagaaccacagcccccccccggacagagagcccccacccagacgccccgcccggaacgcaaaaggacaagcaagaaaaaaacagaaaccgcgccccgcgcgaaagcacccccaagggggggggcaaaaccaccccacaaaaaccgagcccaaagccaagccccccaacccgcgcgagacaaccagaagcgccggcaaagggggacccaaaaacaaa

SEQ ID NO: 120793 - DNA, 618 bp, Glycine max
  unsure (1)..(618): unsure at all n locations
  Clone ID: PAT_MRT3847_80082C.1
gatgtgaacagtttctttgtattaacattagatggcactagacctctaggattacatgatcgttacttcagagtctaaaaaggaagtagataacagatacgaaattgcgtgggagttgttagaccgcctcgcatggtctgaagcaagccgaaacttgctagagtccttttgtgtcaagtcacattgacaagacgtttaaccggcctggtaaacgctaagagcgacaacgtgggggttgatcatgctcaggttgaagggagtgaggtaagggttggcatcagtgagggcgatgaacatggtgtcgttcatgatgccggcaccaccagcgtagacctcaccagcgggctggtaggtgtaaccggcgttgggaccggtcttggtgatgggagtgtaggtcatgttgagctggttgacccatgcgacgtactgaggctcaccagcggaggtggcggtaacgtagctgttgttgggcccgacggcctggccaggagcgtcccagatgaagcggacctgcttgccggcgaaggagaggggctcgnagcggntgtgggcgacaccggngccgcaagcaacgccagtctcgttcaagtttgatgcagactcaatgtgggggatgtc

SEQ ID NO: 120794 - DNA, 1036 bp, Glycine max
  Clone ID: PAT_MRT3847_80083C.1
tggaagcattgaaggacgtagctgctatggctcgaggaaagatccagatcaagaggatagagaacaccaccaaccgccaggtcacttattctaaacgacggaatggccttttcaagaaggccaacgagctcaccgttctatgcgatgccaaggtttctattattatgttctccagcactgggaaactccacgagtacatcagcccctccacctcaacaaagcagttcttcgatcagtaccagatgactctaggagtcgatctctggaactctcattacgagaatatgcaagagaacttgaagaaactgaaagatgtgaataggaatcttcgtaaggagattaggcagaggatgggagattgtctgaacgatctgggcatggaagatctcaagctccttgaggaagaaatggacaaggccgccaaggttgttcgtgagcgtaagtataaggtgataacaaatcagattgacacccagaggaaaaagtttaataacgagaaagaagtgcacaacagactcctgcatgacttggatgcaaaagcagaagatccacgttttgcattgatagataatggaggggagtacgagtctgtgatcggattctcaaatttaggtccacgcatgttcgcattgagcctacagccaagccatcctagtgcccaaagcggagcagcaggctctgatcttaccacttaccctttacttttttagtacgcaagcttaagcagctcgatctcttcatcaatcagaaataccacattcactcaaatttcaataagaatatgacttgtgatcgatatcttaagttatgcacccgtacgtgcagtttgtacttaaccacaaaacaatctcacgaatcttctcttctcggtcgatcgcatatatgcatgtgtgaattattcagttgcaactactgttatctgtattttctttttgcctaatcatataccataaacatgaagttgtgcttccttttattgagaatgctttagcatgcatgattatttatagagcgtttcatatataagtctatttta

SEQ ID NO: 120795 - DNA, 2718 bp, Glycine max
  Clone ID: PAT_MRT3847_80084C.1
ggctcgaggcctcccatttgcggcaatgcaaatgcacctcctctttccctcattaattgaaatcgctgccccagatcgtgcaagtgaagattcggctagctgaagcattgaaggacgtagctgctatggctcgaggaaagatccagatcaagaggatagagaacaccaccaaccgccaggtcacttattctaaacgacggaatggccttttcaagaaggccaacgagctcaccgttctatgcgatgccaaggtttctattattatgttctccagcactgggaaactccacgagtacatcagcccctccacctcaacaaagcagttcttcgatcagtaccagatgactctaggagtcgatctctggaactctcattacgagaatatgcaagagaacttgaagaaactcaaagatgtgaataggaatcttcgtaaggagattaggcagaggatgggagattgtctgaacgatctgggcatggaagatctcaagctccttgaggaagaaatggacaaggccgccaaggttgttcgtgagcgtaggctcgaggcctcccatttgcggcaatgcaaatggacctcgtctttacctcataaattgagagggcttcggaaggaaatgagagttttgttccgttctaagcatggggaaggaaggagatctatgggacgattcagtactcatcaatgccttcgaccaagctatttctacttacaacaaaatgcatagcagcggcaaacacaaagacgccgcctcggttcaagaggaggcgaagacactgatcggagaaaatggctccaattttgacactacaaggggtgctgatacgaatattccagctactgatgcgcttgattcaggtgagactggtaatttgtcgaagttggaagaaaatcatgacacagagtcacaggtggatcatctggattcaacaaggggtcaagacatccagaatgcacagaacggcaatgcatatgctaatgctgtaaatggttgtaaataaaagcgctgactctgcttgacccttaactagaaaagggtgggaattttggaaatgcgtgtgctgattctatctttggatttccctatttgtattctctgattttctctactgttgcaccaaaatctatttatcaagattattcagcgactgcataccaagtttatgatccaaatgctgtctgtacatgttgcccgtgttacagtcaatgtctgccggctccatgcacgtcagttcctggttggtttttgggtggaaaatctgtaagcaatctgtgtagcaatctttctttggaaattgatcaaaaaatgtatttgccctgtgaagaaggtacaatccactaactggccatgggaactccggagaactaacctgtgcatactataagaaaaaaagagtaaagatcttaaattaattaaaggaaaactagtatgtgttgtgtctgtagcgaatatttggtttgcggtgtctatcttttgctcaattgatgatccccttcttttttttcattactggatgtaacatataatgtttgcattgagaacacgaatgagtcgaagttttaaatggaactatatgtttttaataaaatactcaaaattagatctactacaatacttgttatattctgggtagattttcattcgatctatctgtgatgacgtatttggtaaatctgtgttctattgaatttgctcaatttagcatatttatcattaatgaattcttttgcttataaagaatattagaaattagatgtagatgctggaggaatgatccagatcacgaatttggagaacaacaccaaccactatgtctcattttctaagacatagaatgcctttttataaaaggcctacgatctccttgttctttgaggtgacaatgtttctattattatgttgcccaacaaaggaaaactccgcaagtaatgcagcccttctttttcaaaaaaagacattgctaacaaaggatatttaaatgctgttgaacatgattaaaatgtttatattagtataaggtgataacaaatcagattgacacccagaggaaaaagtttaataacgagaaagaagtgcacaacaggctcctgcatgacttggcgtgaaaagcagaagcacgttacacatcggattgtcacccaaaggaaaaagtttaataacgagaaagaagtgcacaacagactcctgcgtgacttggatgcaagagcagaagatccacgttttgcattgatagataatggaggggagtacgagtctgtgatcggattctcaaatttaggtccacgcatgttcgcattgagcctacagccaagccatcctagtgcccaaagcggagcagcaggctctgatcttaccacttaccctttacttttctagtacgcaagcttaagcagctcgatctcttcatcaatcagaaataccacattcactcaaatttcaataagaatatgacttgtgatcgatatcttaagttatgcacccgtacgtgcagtttgtacttaaccacaaaacaatctcacgaatcttctcttctcggtcgatcgcatatatgcatgtgtgaattattcagttgcaactgatgaactgttatctctgtatgttttttagcctaatcatatacctgaaacatgacgttgcatgtgtttccttttattgagaatgctttagcatgcatgattataaattatagagcgtttcataggtctttattttaact

SEQ ID NO: 120796 - DNA, 1034 bp, Glycine max
  unsure (1)..(1034): unsure at all n locations
  Clone ID: PAT_MRT3847_80085C.1
ctatgattttggctatttatgtagacagttttttcattaatgctacttgataacagttgacaaggctgctanaagccagtgttggatacgatttgatagttaaaaagtaccctttgtagtacagattaaaccatcagtatagaactaatttggactaaaagccaaataagtgtagccttatcaaaaatatcccaccaccaccataatagcatgatttacaagtatatactggctcaaagatacaccaaccaaaaccatgtatatggcatgaatgcagagatttaaaatgatgactgctcagagccatcaaatcctacattatcaagccatgaaacaactaattcaatatggggtctctgccttggatcttcatctatacatttacaagcaatagctagtacctctaagagctgtttctcattatccttgtgccaaatgactgaatcaaaaatttcctgctccctattctcagattttatctgcaacacccaagacactagattcctgctacgttgcccgatgatgacttctaccggccttcgaccagtaagaagctcaacaagaacaacaccaaagctataaatatcacccttgaaagttgctttcagtacctgactgtattctggaggaatatatcctaaagttcctactaaatctgttgaaacatgggtatcataaggttgaagtagccttgagagaccaaagtcagccaaataagctttgaatttatcatccaaaagtatgttgctggatttaatatcacgatgcacgatatgtggttcacactccttgtgcaaataagctaatccatgagctgcacctttggcaatcttgagtcttgcatcccattttagagctgaatttccatcttcactctcatgcagccaatagtcaaggcttccattctccaagtaggagtaaattaataatctgtcattgaaatgctggcaataacctttaagtgaaacaaggttcttatgttgagctcttgagagtgcctccacttcagcttggaattcacgttctacctgacc

SEQ ID NO: 120797 - DNA, 101 bp, Glycine max
  Clone ID: PAT_MRT3847_80086C.1
tactgctgcgacgtcgacacacagcgggattcattccagacaccacccctcttctcatagcctgctcagttggcagcaggtactctcattcctctagcgga

SEQ ID NO: 120798 - DNA, 696 bp, Glycine max
  unsure (1)..(696): unsure at all n locations
  Clone ID: PAT_MRT3847_80087C.1
aattcggctcgagtttttgttttgtttacctctttgtctccatcccttctttatttatttgttgttacttggtgctgttgtccctctccctgggagaaaaaagaagaagaagaagaaagagtttgaagtgaaatgtgagatatgggaagtggagtttcaacactctgttggtgctctgggaccaacaacgagcccgacgttattttcagcgccaccgacccactggacgaaaccctaggccactccttctgctacgtcagatcctccgcacgcttcctctctcccactcactccgatcgcttcctcagtccttctacttcccttcgtttctctccgacccatacccgacccgaatttcacgaaaccgggttcaaagccatttccggagcctccgtcagcgccaacagctcccttccgacaacagtcattcacttggacgaagaggtgaacggagtttcctccaggggtaatatcgtaaatggcttcgaaagcacggcgtcgttttccgccctcccgctccagcccgttccccgaggcggcgagcccttcgaggtcagcggcttcttcctctccggtccaattgaagccaacgccgtctccggccctctcccttccgccgccgcctacggagtcagcagcggcgatgttcctttctcggcgccgctggcccgactttacagtaagaagaacaanaag

SEQ ID NO: 120799 - DNA, 295 bp, Glycine max
  Clone ID: PAT_MRT3847_80088C.1
acttcttttttggggagaagcggcagacactgttaggagtactggtggtgcgaatggatgggggctgatgaacggtgatgctgctgagatggcgcaaatggaacaccctcagagtcgtgatcacactgagatttatgaaacggctgtgaagattcttgagacatactggatggtggtagacgacaagactactccttcaggggacgccggtcaataagggatcaactttggggggactcacccacctgcggggccttgtggcggatcctgctgtactcagaaggagatcagactg

SEQ ID NO: 120800 - DNA, 381 bp, Glycine max
  Clone ID: PAT_MRT3847_80089C.1
gcgagaagacgacagaaggggtgtcacagctttacatgtgcatacgttgaaactgaagtgtctttctgtccaagataactaaaagcctaaaaccacagaagaagattcttgaaggaattttctatctattttaaggttgatgctgtcgatcgcaacttgttcataactgtttgtgtttgtgaaataactttagttttcagatgtattattactgatattaaaaaacagtatatgtctggtcagtaggtacagggaagaatgcctttttatgtccttgaatggaaagctaaaacttggtggttaaacatgcatttagatagttgttgcctgctgagcctattgaaactggattcttcctaccgtttgaactccttcacccat

SEQ ID NO: 120801 - DNA, 331 bp, Glycine max
  unsure (1)..(331): unsure at all n locations
  Clone ID: PAT_MRT3847_8008C.1
acaaaatcaagttcttcccacagatgaagcaaaaggggataacacttacctctcagctttaacactatgcttcanccaaattttccctgcaatcttaaacactactgttaatctaaatttgtttaatatcatagccaaagcaaagagttcatctttatcancctcgaaaattacttctttactacttccaaatccacaccctcaattaactaagtaacttaaacacatattacctatattaacaagttactctcttctcaattgctccattcgcaccaataaaggatatgtgagatagaaactctatactctctcaccaattagtcaatac

SEQ ID NO: 120802 - DNA, 453 bp, Glycine max
  Clone ID: PAT_MRT3847_80090C.1
acggaggaacatgttaaggctataaaataatcttcattctacaggaggaagattcatatttatattgtgggcccaaccgggccaagggcccactagtttattctgaggcgagaatatctctaccatccttactatgaccttccctgcctcactacatgttccatcacattttctaaaaaaaacgaacctattgcaagaatttgttctgtccctacgttcggggccttgctgctttttgcatgggggcaggcatgcaatacgttctttaacattggacccaagttgaatactttctgcttgcccaccttactgctagaccatttgcagactggttcgaacatgattatatgtacaccctctacttacgaggggacctgaatctccaagcttcaaatcttcatgtgctctgcgtctaaggatcttggtggaagaactacacctgtgattcatatt

SEQ ID NO: 120803 - DNA, 857 bp, Glycine max
  Clone ID: PAT_MRT3847_80091C.1
agggagtgtgagcaaaagcaaaagatgaagatccagtgtgatgtgtgtgacaaagtggaagcctccgtcttctgtcctgcagatgaagctgctctttgccatagctgtgatcgcaccattcaccgcgccaacaagcttgcaaccaaacacgcccgtttctctctccactaccccacctccaaagacttccctctttgtgatatatgccaagagaggcgtgcatatctattttgccaagaagacagggcgttgttatgcagggaatgcgacgttcctatccacagagccaatgagcatacccaaaagcataacaggtttcttctcacgggtgtgaagctctctggtacttgtttagatcctgcttcgtcctccaccaattacaccaataataatagagtcactggctctgaaggaagaaacgacgctcgatctagaatgaacagacccagatcatcagtttccaatgaagaaaatgcaagtaattcttcttgcaaggttgaagacaacgtggctagtgacactggttcgatttcaactagcagcatttctgagtacttgattgaaacaatacccggttactgttttgaagacctccttgatgcttcgtttgcacctaatggtttctgtaagaagcagaactttgatcatccctgggcgtttcaggaccaaaagcgaacaagtggagacactatggccgtgccgttcctgaaactagtcatccattgatcaaaatatctaaaccctcgcggtcataaactgtttgtaaaaatctgttggaaaatatcttctttatttttgttatttgtaaaaatctgaaactttatgattttattttttattctctattcccaaccaca

SEQ ID NO: 120804 - DNA, 2206 bp, Glycine max
  Clone ID: PAT_MRT3847_80092C.1
cttcagttttccatagctcttatgggaccgccgccgatctctggcgcattgttgaaaaaccctacattcttttatttgaaccctagcactgtcgggccaagaccgttaagggccttcatgcggcccttccgaccgcagtcgccagccaagaggattcgggctgtgctcgcccggcggcacagctccgtgaatttcataagagcctctagactgaagatgagcgtatgcgaggacgggcttggcaggatctttgggtttgctacaccgcttacggctcgttatgagctttaagatgcaggcgtccgagggcaatgtgtttacacctgctcagctaagtacaacaagtgggttatcgagggcgaggatgttgccgtaaaaatcaatggttttaacatgagataccaagcaattgctattgaggatgtaaggagagaagtgaaaatattgcgggctttaacaggacataagaatctggtgcaattctatgaagcctatgaagatgatggcaatgtttatatagttatggagttgtgcaaaggaggggaattgcaagataggattctttccaggggtggaacttacgcataataggatgccagagttgttatgagccatatattaagtgtggaagcattttgacatctgcattattttgttcagcgtgatttcgagcctgagaatttttttttcacgtgtaaggatgaaaggtcgaggttgaagtccattgtgtttgggttgtctgattatgtaaagacctttgagaggttgaatgatattctgggacgtgcttattaagtagatctaaaagttttgcttagatcttatgggacagtggcagatatgaatttgtttcttatgctttattcaatacttttaaacccatcttttccaattttggcaagccaccactttctcctctccctgtttctcttgcgctgagacgctggttttgatgaggctcctaggccttcattatcggttagtgtcaaagatattgttgagatgtggatcatataaaggattgtaaaatattgagtgatcttaaggccctaactcttgtgtacccatggctggtatcaattcatgatgatatgaggatacctttggatatgataatccacaagcttgttaaagcttacatttgctcgtcttcgttgcgcaaatctgctttacgggctcttgcaaagacattaacagtagctcagctagcatatctcagagatcaatttactctgttagggccaaacaaaagtggattaatttctatgcagaactttaagacggctgttttgaggagctccacagatgcctcaaaggattcacgggtcttagaatatgtcagtatggttagttctatccaatataggaaattagattttgaggagttttgtgctgctgctataagtgtgcaccaacttgagggaatggagacctgggagcaacatgcaaggcgtgcctatgagctttttgaaaaggaaggaaatagaccaattatgattgaggagcttgcctcggaacttgggcttagtccatcagtacctgttcatgtagtacttcaggattggataaggcactcagatggaaagcttagtttcttgggatttgtcaggcttctgcatggggtttcttcccgcgcatttcagaaggcttgagagaatgtacacacagttgctattattttttcttgcccgttacctttaaatattttgatggtacctaaatgcatgagctaactccatcagcagacctcagtgggcttctgcaagttgaaggcagtggctgataggaatttgtttctgaagctttatgcaacatatatctatcccacttttccaagatttacaaacacaacctatattccccaccttgtttctcactcactttagtttggtggttctggagttagaagcttgtacagttgaaagctagaccaaaaattgtacccaccttgtcttaagggtttaccccttgtgtacccatggcacctatcaataaacatcacgtgaactccttgataatagacagatatgtagcctttttttcgtagtattttgttgcatttatatgttattattattcaaggccacaagggttggtactttttatataccatagcattattgagttttgaatctataacttcttgcaaactatgcaaatgcaaaacccttttcatcatatatgggtggcatttggttaatgatcg

SEQ ID NO: 120805 - DNA, 144 bp, Glycine max
  Clone ID: PAT_MRT3847_80093C.1
gtcgcgataagatcatatactgggacagacctacagacgatttaccagctatacgtgtgcctttttaacgttagaattgccaccatacctacaatagcagctacgcaggatgatgtgaatcttttgggtattgtgggaagccca

SEQ ID NO: 120806 - DNA, 669 bp, Glycine max
  Clone ID: PAT_MRT3847_80094C.1
ttaaggggctcgagccgaggctgctcgtgcaactactgatatcaattataacaaaacattgaaggattattagggaagttgtagtttgaaactgcaccaattatatatacaacatgtgtcgtggaacttttgtggttgcaaccactgttggagtggtggaggcgttgaaggatcaagggtattgcaaaatgaacagcacaatgatgaagttggtggctcaacatgccaagaaccacatagggtcagtaactgaggccaagaagctggcttctccttctccttctccttctacttcttcttcttcagtaacttcaaataacctgagagatgatgagaagagaaggatggcagaggagtctctcagaacagttatgtatttgagcacatggggtcctaattcttagagttagaaaacattagattaatatcataaatatttagcataattcagcagggcacaaaaaatatgatgccagtgatcagctcagccacttaattctataaaactggagagtgctcataacatatatagcactcttggtgcactgattgtgcaaggttttgatcctcattaattgttggtgggtgtgtattgcgatttggatgtgactgtaaattgccatatcaataaaaagttacgtgctttggcacggaaattattgtgtgaaa

SEQ ID NO: 120807 - DNA, 676 bp, Glycine max
  Clone ID: PAT_MRT3847_80095C.1
atgattcttataatgtttaaactttattcttttgatccttcctgtcaaattacaaaaatgcttacaggactgagaaagctccaatgttagatgaaacatcatcagccatacaagtctttttataacagaaactaacagaaaaggtaaaagaaaaatgtaaggtcagaatattatgggatgataaacaaaaaaaaaaaaaattaaaggattaaaagcaaaatttggtatatttacaaagacaagaaagattttaatcatcagccatacaagtatttttgtaacagaaactaacagaaaaggtaaaagaaaaatgtaaggttaaaatattatgagacaataaacaaaaaaaaaattaaaggattaaaagcaaaatttgctatatttacaaagacaagaaagatttttaagtcaacagtatttaagtggttcatttaactatgcaaaattcagaatttattatttgtcaaccaaaagctaacatgtaatgggtataaatattgatgacaattcgacaatgttttacaaaaatttataagaaaacaaaaccgtattaacaactacgccggtcttgagagattttcacaaacttcataaacagtggacgcaataattgcatcgatggttgtaataacattgatggtttgtaatagtcgtaaaagacagaaagttaaccaca

SEQ ID NO: 120808 - DNA, 177 bp, Glycine max
  Clone ID: PAT_MRT3847_80096C.1
aaacagaaaatgaattaaacggggtgggtttaaatccacaccaataaaaaaactctatgcaaagtaccagccgttataatgcactctacaatatttattatccaaaaaaagcattttatttatttaagcacctcatttaccagaccggcaaaaaaaagaatgttttccgtcaaatta

SEQ ID NO: 120809 - DNA, 380 bp, Glycine max
  Clone ID: PAT_MRT3847_80097C.1
acggctgcgagaagacgacagaaggggacggagcaggagttcgttgggagctataagctacattatcttgaggagattatgacactgactcgctctttttgtgcctctgcaggtggggtagcatgtccatcccatgcgacaagctaccagaggttccatatccaaatgagaactggctatagcgagcgctcttccaaggtctaatgcgcaggtgtcagcctagcatcgggaagcacacaacatgcaagcctctaagacccttcctgatgagtgtgtagcgccaacacaggacttccttagtggcgagcagtttaaagcacactcttaaacaggtgatcatcaatctgtatttcatgctcatgaacacgaagtccattgca

SEQ ID NO: 120810 - DNA, 572 bp, Glycine max
  Clone ID: PAT_MRT3847_80098C.1
agatcacctcttctcttctttcacagcaatgtctggcatcttaagaaatctgtcacttcctcccaaaatcttctccctcaccttgcttctcttattaaactctgttttgtttccatgctggtactcccttaatgagcaaggccaagctctattagcatggaagaacagtttacacagtacttcagatgcactaccatctgggaatccttccaacccaagcccatgcaattggtttggggtgcaatgcaacttacaaggagaggtggttgaggtaaacctgaagtcagtgaacttgcaaggttcactacctctaaatcttcaacccctcaggtccttgccgactcttgtcctctcaacaaccaacatcacaggcatgattccaaaggaaatcggagactataaggagctcattgtcattgctctcagtggcaattctctctttggtgacaccccagaggaaatttgcatactgagcaaactgcagactatagctctgcatgccaactttcttgaaggcaacattgcatccaacataggaaatttatcaagtcttgtgaatttaacactctatg

SEQ ID NO: 120811 - DNA, 249 bp, Glycine max
  Clone ID: PAT_MRT3847_80099C.1
acgctcactatgactgcggccggcctgtccttttttttttaaaatttagaactccagatccttccttccgaattgtgaaacggtactagtcactttgcaacgtatcgattgataaggcacatggtcacagatcgtgccttgacacaacggcagatcctgagactacgcttatgggtagagacatgcccaggagttcaaactggccacgcccgtattgtacgcagtagtactattgcagacagaaggctc

SEQ ID NO: 120812 - DNA, 694 bp, Glycine max
  unsure (1)..(694): unsure at all n locations
  Clone ID: PAT_MRT3847_8009C.1
actttatccattttcgccattccaagccattttacacaaaccccatcaattctgactcccccataactccaacaaaatcctcaatttcaggttattaagagaagaaattgaagagccaagggtgtgaggggttttgagtagtgattttctttttccttgtttgatatggctcttcactgtggtactttctgcttctggactgtggcttctcaccctccaagttctgtcaagttgagtcaacccactataaaagcttcctccttttcttcccctcttgcccctccacttgtcaaattgaatgtcagaggaaaggcttttcctggtgatgggacacctgaaacaaaagaatcacctcttgtggtttgttttggtgaaatgctcattgattttgtcccaactgttaatggcctttctttggctgaagcacctgcttttaaaaaggctgcaggaggtgcccctgctaatgttgcagtaggcatatccagattaggaggttcatcagcttttattggaaagggttggtgaggatgaatttggatatatgcttgccaatatactcaaggaaaataatgtaaacaatgaatgggatgcgttttgacccctggtgcacgaactgctttagcatttgttacattgangagtgatggatagcgagagttcatgttttatcgtattccagtgctgatatgctgct

SEQ ID NO: 120813 - DNA, 420 bp, Glycine max
  Clone ID: PAT_MRT3847_800C.1
gctgcgagaagacgacagaaggggatccttaatattctatagtttttttcggtacatttaatattccatagtttgaaggcataaatataatatttttctctccgacctttcaaatgagcatatacacagagacttaaaggtttgtgaatgtgatgatattgtttttaaggatttattcattagtttcataatgttaatttttaataatgcgaaaatcatttaggatacaacacattttgtgacaaattcaggtgacagaactgtagatatgtaattttgtcaacccgcataaaaaaggaaaaaaaatggttcattatagtagatttgactaagaaaaaaaattatcatgagaaaaaaatagtatattattaatttataataatatttattttttattgactacaaaattgtaaagtaatt

SEQ ID NO: 120814 - DNA, 129 bp, Glycine max
  Clone ID: PAT_MRT3847_80100C.1
gtggagcaatatgctcacttgggattacgtacattatgtttggcttggcgtgagttaaagagagatgaatatcgagaatggtctttgatgtttaaagaggccagtagcactttggttgataggggtgga

SEQ ID NO: 120815 - DNA, 203 bp, Glycine max
  unsure (1)..(203): unsure at all n locations
  Clone ID: PAT_MRT3847_80101C.1
gtcgcangcacgcgtacgtaagctcggaattcggctcgagnanngancggagacgagncnttancagcgttaananaagaggagaagaacatatgcganagtncgatccatggcccgtnttcntcatagcgcnagtggatacgcnnctngcccttcctcntngganncgcagtcaccggagctctaatnancanannttccct

SEQ ID NO: 120816 - DNA, 132 bp, Glycine max
  Clone ID: PAT_MRT3847_80102C.1
cccacgcgtccggtgaggccggttcaacactctgtcctccgggggaattcgaccgttgccggaaattcagctccgccccaccgctgcttgcggaaatccaactttcgtgagaccttttcgcagatgctgcac

SEQ ID NO: 120817 - DNA, 122 bp, Glycine max
  unsure (1)..(122): unsure at all n locations
  Clone ID: PAT_MRT3847_80103C.1
cactgtcantgccatatatanatttctgtcttcatcaaaggtgagttttgcatctccttgtcattgtatactctgcaagcctttttgcttattgntgtgctgtatctgagnaatttgactgt

SEQ ID NO: 120818 - DNA, 529 bp, Glycine max
  Clone ID: PAT_MRT3847_80104C.1
ggcccaacttttaaaacccgcttttttaaaaaaaaaaatccccccccccaaggggacaaaagctttagacccggccggtaaaaaaataaccaactgggaaaaaggcttacaacccgggttatttttcagtcaaaaactaacgggtacaaaaaagggaacccttggggggcttccttttcatggggcccaattaaaaacccccaaaagtctaaaaaaggggggggtaaatctggggaacaccaaaaccgggatccttggatttaaaacgggcattccaattctaaaattcggacccaccaaacattactgggtggacccccacaaaatgggggcttatcgggggcaaggcttttataaaaacatccaaaagcaaggggtcaacagttccaatatccccccatattcgagccaagtgggtttgcaactcgagacccccaagggggaaaaagggaggggggcccacattggcccctggaaaaaaaaaaaaccggggggggcctccatgggaaacggggacaggggcatattc

SEQ ID NO: 120819 - DNA, 356 bp, Glycine max
  unsure (1)..(356): unsure at all n locations
  Clone ID: PAT_MRT3847_80105C.1
cccacgcgtccggcggatttggtggaggtggaggtggtggcggaggtggtggaggaaggaggttcgggtagctgatttggcnaanaaacannatgatgttttggtgcaggaggttgatttggcgttataagtagtgatacacttattttttcaaaataataacattactatcacagatgctcttatctacttactttatgacgaaatttcaactgatcctaaaatcttcttattgcattaagaggtttatgaatatcaacttgcatacaacattttcacatttttgctcatacaagtatggccatgtgagggttctcgattctccaataactgaagatgaattttctggaattgct

SEQ ID NO: 120820 - DNA, 1621 bp, Glycine max
  Clone ID: PAT_MRT3847_80106C.1
attaaaagagtgaagttctattattttttgtatatcgataacatttgattgatgtgatttttaacagtgctgcgggaaccgcaaccagactgtgaaccagctcatccccaaaaaaatacagacttctaaaaataatcatatcaacatgctctaaaattaaaaataaactttaaatttccctttttttttgtaaaattgaccaaaaacagcataaactttatcaagtagaatcaaaccctcatgaaagaaaagaaacggatcaaaataccccaaaagatgcaatggcccagcaccttaaaatagcccctaccctaccaaccctataaccaaaaaacaaaaaaaggaaaaaaaaaattccctgtaaaccaggcaggattgaggcacctgtaacttattgcaatatttgcaaaatgcagggttccaatcaaacccacccctcttctttcactctcaaatcattggccttcagaacaaaaggaatggaactagtcatctgccatcaaaatttgaagcttggatctaactatgattaaagaaacagtacatcaagcttcagatccgggatcagaagagctcaactcagcagaagattcacgcaagttagatgcataagattcaaacaacttggacagctttggctgcattccctggcttagcttgaatgcagttgggtccaatttcttgcactcctgatagaaagcattgatttcctcctctgtaaggccttcatcctcatctgagttctcctcccagccaagagaccgaaggaaagcagcttcttcctcatctggatatattgtaacactgggatttgattctttctcttcattatcagaaagtctgtgaatcacttcatgagcatgggtaccattgctagtcagttcagtaccatttccatgagactgaggacttgcggaagggctaactattactcccctatttacttcaccagatttctccatggcaggagatgaaaccattgggccagagtctggaagaactgcagaggagttcatcaatgttttcttcttaatgagattgaagaaatcattccggctctgcacttgagagatggaatgtttcttctccaaattggaacctaatttcaaatccatagaagatggcttccgctccgtaggggattttaggttatttgggttcctcaatggtgcagaggcagctcctgaagcaacagcatgttgatttcctggtttgctgttagaataatttgttggatttgatacatccttagaggtaggggaagcaccattttcccacactactgatttgagatcagtaaacttcccagatgtctttggagtatcaactttggcattaacactgcgaacagattggcttgcaatgtgcaatgcagacggttgctgtggcacagtcttggtaactacattcatatcagcatttctgatagctgttttgggctttgatttctcagaattatgaaccgaagctttaggcattgagggtgttactggaatcaactgtcttgactgcttgatagccagttcctcaagcctttgggttttgactagcacctggggagcagagcgagctcgggatggagtctgtgacaatgcccggacgcgtgggtcgacccgggaat

SEQ ID NO: 120821 - DNA, 378 bp, Glycine max
  Clone ID: PAT_MRT3847_80107C.1
cacttataggaggtgcggctgcggatgtgaggcataattagaaatgctatctctaccgccgttgaaccgcgagatgaagacataaagcattgactgcttgtatagctacggtgcatacgtgcgtggtctatgactacgtcgccgtcgatggccctatagcttctcgagagagtctccagccttctagtcctcgttgtaatgcatcactgataattctacgcctacgcccattacagatgcacaatggtgctcgagcatgaggctattcccagatagaaatacgatgatacctatgagaccacattgttgatgcacagagagaatcaggtcttattgctgactctgtttaccatgtatggataactgaagggtaacaga

SEQ ID NO: 120822 - DNA, 224 bp, Glycine max
  Clone ID: PAT_MRT3847_80108C.1
tcatcgttcactatcgttgctgggatcttcctccggtcaaaatacgagcgctcttaagagtttacggcttgctgacggtactggcaacgatgggtgcgtgccattgacatctacatccacttcgtcgcgctcattgtcaccatgactgctatcagatatgcgcatcttcacatttacaggcacttgactcattacgagcgttcccacttatcagagttacatca

SEQ ID NO: 120823 - DNA, 261 bp, Glycine max
  unsure (1)..(261): unsure at all n locations
  Clone ID: PAT_MRT3847_80109C.1
gacagacaggttgagcttctgaggcagttagtgagtggtanaaaatttcacatagaggaagtcatcaatgtaaagaacactgatggaagaactgnatcccacattgccacaatagggaaaattcacactgatcttgttaagctcctgatgactgctccatcaataaatgtgaatgtgagtnatgctaattgnatgaccccacttgattaccttaagcaaagtcccaattcagcagcatcaaatgtgctaattagaaaattg

SEQ ID NO: 120824 - DNA, 1612 bp, Glycine max
  Clone ID: PAT_MRT3847_8010C.1
gattacgaattcgagctcggtacccggggatcctctagagtcgacctgcagctatgtgtgctgatttgcatggttctgttataagacttatagaaccataatggaagatcttggcctgccagaaagaaataatagaacaatattactagaatttatgaattgagtcaaagtggaaaatatcaaaaggaaatagacttagcaatcattttgatgttttacctgatattaaggaaacctgaaagtgagttcttaaactacagaaacaataatgctatataagtaatcaaaaacatggtttagattagatccttacacagtgagttctaatgtttaaaaaattcacaaagtactggttcaatgaagtaactttgagtaacggaacaaagattacttgagaaaagtgcaacataaagaatgtggctcaatagtggtctgatttcccttcgattaactcatggagtatggcatacattttgctttagtttgactaccacaaattctgcttttgtttttacctttctgattaggtccaaatcaagttcatcttcttggagcagcatatcagcactgggattacgataaaacatgaactctcgctctccatcactcctcaatgtaacaaatgctaaagcaagttcgtgcaccagggtcaaaacgcatcccttcattgtttacattattttccttgagtatattggcaagcatatatccaaattcatcctcaccaacctgttcatgttgcataaagcattagactctttggcattccaagaaactctaactcttctgatttataaaaaaaaataggctcgtttatcttgatatcattctcatttgcctttcatactcaacagcaggaaaaattatatagtaaagggcacaattgaaaatcagctttaaacacgcaattatggacataattctgatattgtaaaatttaagtctagtaaaatggatctactcaacaagcaaacaaggccataaaacactaagtgttatacaagctgatgaacctcctaatctggatatgcctactgcaacattagcaggggcacctcctgcagcctttttaaaagcaggtgcttcagccaaagaaaggccattaacagttgggacaaaatcaatgagcatttcaccaaaacaaaccacaagaggtgattcttttgtttcaggtgtcccatcaccaggaaaagcctttcctctgacattcaatttgacaagtggaggggcaagaggggaagaaaaggaggaagcttttatagtgggttgactcaacttgacagaacttggagggtgagaagccacagtccagaagcagaaagtaccacagtgaagagccatatcaaacaaggaaaaagaaaatcactactcaaaacccctcacacccttggctcttcaatttcttctcttaataacctgaaattgaggattttgttggagttatgggggagtcagaattgatggggtttgtgtgaaaattggctttggaatgggcgaaaattggatataatgtaagcaaagggaagagagggtacagtttgcaggttgttctgggacgctttttattgatggggttggttaccggcgccctcattcggtaagacattggaaa

SEQ ID NO: 120825 - DNA, 446 bp, Glycine max
  Clone ID: PAT_MRT3847_80110C.1
ctctttcctagctactacctcctgcagtttccaggcttgaagtcaaacccctatatttctcaaggatatttgttcttctaattctccatccaattcagcacttttgcaaaatggcttcaaattcttatacaagggaaaggttctcaaaattataaggttgaccaagatttctttcatttttccccataatctgagatatagggaaactcaagagtgttggtgatcaaggcagagatagaaatggaattcagaacaaattttatggaactaggaggaagatgaagtattaactagttggcatgattcaagttttacagcccaatggggtaacctctctctcagattatgatggagttaccagatatttggatattaagactggttgtggcatgtgttttttgtctgcatatatttatcagatcggctttctgctatgcaaactgaag

SEQ ID NO: 120826 - DNA, 475 bp, Glycine max
  Clone ID: PAT_MRT3847_80111C.1
ggctcgagtactttttcgatttgttccgacccattacctgctaccacacttctatgcctattcatttttctggtgctgctttgggagaataaggtttccgagcaataaatactggattcatttgatgacttttaaagtcttcaattgtgtgagtttcttttccagtatctaaaatttaatgtgcataaaaatcttgttaggttgtgaatggtagcttcttcctccccaaatcaccgatggcttttttatttcagaaatttcaagaggctgtgaaaacccttgcaaaaaatcctgcttttgctagggatcctagtcaactacaatttgaagctgacattaaccgtttattcctttatacaagctacaatcttgtgtgaaagaatgctgatgaagcagatgcggaagagatttttgaaattgccaataaagcctctgttgctgatcaacaaatgccagtaaaaaaaaatgttcattc

SEQ ID NO: 120827 - DNA, 204 bp, Glycine max
  unsure (1)..(204): unsure at all n locations
  Clone ID: PAT_MRT3847_80112C.1
tttgagagcctcgcgttccttctccaganaatgaagcgggaggggtccttcgttctcggacacattctacgacgtaagagagagcacatgatgcacgaagccagtgctagactccaatagaggtgacagtggccttgctgacaaacatgggatccactgaaacttgtatcagggggttggtcaactgttcacagggagtcgttc

SEQ ID NO: 120828 - DNA, 509 bp, Glycine max
  Clone ID: PAT_MRT3847_80113C.1
cactgaaaacagcagctgaacagggcgaaccgaaagaaattcaaaccgaagcagctgttacaagggacgaagtaaaggaagctgagaaacttgaaggattttcagcccctgctgaggttacccctgaaactccagttcagcaagacaccattcgtgattctgctgctcctgagatgctcaaagaaacaaccacagatgacacgtccgttgcccaacacgaagataccgtgcgtactaccgacgagcaggaaattactacttcgtctctacctggagagccaacgccagacccagctcagtctcaggagcagcagcagtcctcagagcccgcagaagaaaagcagacatcgtcctcgaagaaaaagaacaaaaagaagaagaagaagagcctgtcttctacttctgtggatgagggtcccagcactgccccgcaggattccgttagcgaacaagaagtggtcgacccttaagccatcacgattactgcttgaagggctgctcctgatact

SEQ ID NO: 120829 - DNA, 452 bp, Glycine max
  Clone ID: PAT_MRT3847_80114C.1
aattcgggtcgagcgcgagcagatggcaatgtgggcaagccatatactgtgtatgtaccatacctcaggtagctagtgaggataagtgcctgctgtgatgaaagctgcagcaggctcgaccagtgtcaactcaacgacctgaactcacagaaacactaccacggacaaacgctggaacgtggtgatgcgcacacaggggactgtcaacaccatgagcagaaatgcgcctgggccactgtggacgatctcactcatacacgggatgaggcacactcggcacttgacgcagctaatactgaaccgaccataaaagtccaaagggctggagcagtcggagaaagggcgccaagagaaactagtgccttgggggaggcacatgaacaatctagcataataggcgctgcgccagagaagcatactcgtccatgcagtcgagatatgatgccccactt

SEQ ID NO: 120830 - DNA, 707 bp, Glycine max
  Clone ID: PAT_MRT3847_80115C.1
caagggagaaaagataagtaaagaaagtatatatatcacagctcagtataatgcagaatcacctagtttcccctctgccatggagaagggaatgaggtgaattagcaaaggaaagaaaactagactccatgtctctatttccaaaattggagcctgaactcatcttatcaaaggatgaagatgcaagtgagtgcaagaactcatcaaacccctcatggtgacttatatcccctggctttttcaagtcctctggcacctcaacttccccatccaaatacctcaccacttgcctcatgctaggcctagtaacaggcacatcatttgagcacatcaaccccaatttcagcaccactatcacctccttctcatcaaaatagccatttagttttgggtccaccaaatcaagtattctcccttgtttgtacttttcccacacccaatccaccaacaccaactcttctggcaatgccttaggctcgatcggcctgcgcccgcaagccacctcaagcaatagtgccccaaatgcaaaaacatctgagcttgttgttgcctttcctgttctaggcaactcaggtgccaagtagcctaatgtacccaccactcttgtggtgcttgggttagccccgtgttcatacaatcttgctaatccaaaatcacctaatcttccattaagctcaaaatctagcagcacattgctagctcgagcc

SEQ ID NO: 120831 - DNA, 651 bp, Glycine max
  unsure (1)..(651): unsure at all n locations
  Clone ID: PAT_MRT3847_80116C.1
ttcaaatttaaataaagaaaaagaaattgtcatcacatgaactacactcaaaattttggccaataaggatacaattaaaactgtttctttttcttttccaaataaaaatggtgtctctgaaaattcaatactgcccagaccaagtgtcttaggcctatttcaggccaaagtgcagttggcgcatacaaagggcaggtactagtctgccaaagaagaaaattgctgagtcgagcctctccagaagttcggatcaagatgtctgggtcaggtgccactgccatgtacatgtgcttctcaatatccaccagttttattaaaggaacatcaccctgcttatacttcctctcttcagtcatttcaaacagttcattgcataatgtgatttcagcttcactattgttttcgctatgtttctctacggtatgctccaacatgccatctttctctccagcaccttgcactcctttgtttacactgctacaagctttggttacattttgatagtcattacttgaatcttgaaaaagcaaatcaaaaccatcacctttcaggccctgatcaattcttgcaaatgcaccatttgtaagctttgcttctttngatgcttgaacttcattccattttttccttgcagcattcttgaacggcatg

SEQ ID NO: 120832 - DNA, 391 bp, Glycine max
  unsure (1)..(391): unsure at all n locations
  Clone ID: PAT_MRT3847_80117C.1
aaangcaggagaggtttagcggctcagtgaaaaaaaatcttattctagtaagtcatttgtccgttgctggtcatcaatctccggtctcgattcccggttctcccgggcctattcccttaaagcttgttacggtattctcactccgatcgccccaatgaagggcaatctctatcccttctaactttattctgggatttcttattggcattggattttacaagtgagctaatcaccaaatgagcattaacccttataaagtaagctagtacaaggtagacttaagcaatctcattgccctgaaagaaagctcagtaggtggatcttctttccaggtcgcaggtggagagccggttgaaaggccttctgccaattgagaatgatccattaatgt

SEQ ID NO: 120833 - DNA, 594 bp, Glycine max
  unsure (1)..(594): unsure at all n locations
  Clone ID: PAT_MRT3847_80118C.1
tcgatctatcgctagaaatgtaccaggtgccgtgcaccttgcacaaaacctattaaccggggggtagcatacatccaccaacaatgtccggactactagtaggggatgtgtgcatccctaccagatagagatacgtaagactaccttgaagcgtgcaatacaggattgcgtatggcggttaaatgttaggtagtcgaagaatccgatccctagctacagattacgctagctagggccggggcctgtgcattagcagctgatggtaagctaggtaagagtgcacagagtgccaccgatcggggtgggtaggcaactgcaccagcgtaggtaccagctagggctatacgcgaggcccccatgtggcacgcgccgccactaacaaggataacgataacggaacgcgctgtatttgcaaggctaatggacggtacgaaaactagcaacggattaaataactggcagccccaaggctacatgcctgatgagtacgcgatcacaggtcgagctgcaacaccaaacacatgggngccgcatacggcagcggttacagcagtaagtcacgcagcacatcgtcggcagcattcgcacagcgtg

SEQ ID NO: 120834 - DNA, 464 bp, Glycine max
  Clone ID: PAT_MRT3847_80119C.1
acatgttagtagtccacctgcttgggggggggggggggggctgagaggataacatgagaaccggagggaacttgacagcgcccgaaggggagagagagatcaaggtgaagcaacagggaggtaatttatagcagtagtaattgaccaaacatttggctagttacatgtagcagccttattgccgactaacccgtactagagtatcatatgcgggaatagtgaataatgagcaatggtatatgctagttgtatgtgtacttatcctggcaacttgtcagcctgaatatgtctatatactggtgcggtggccataaacaggcaatcattgtgtttagtgtcagtgttaattacataggatggagtatgggatcaaaggcataggtggccaactcagtaggcttggcaactgcccagttaaataaatggaatcacgagtctgatgcttggcgaaaatatgatgcaga

SEQ ID NO: 120835 - DNA, 135 bp, Glycine max
  Clone ID: PAT_MRT3847_8011C.1
gtctttgatgctgtcttgtttaacaatgaatttgacatcctttccattcgctgaaaataaatgtattcatatgtaacacattgatgcgatcctcagaataatactcaacatttacagtattgcctaatccttcta

SEQ ID NO: 120836 - DNA, 197 bp, Glycine max
  Clone ID: PAT_MRT3847_80120C.1
ggccgccctctaattttttacttttttaaaactcatataaatgcacaaaagaaatgatcttgttcacaacaaatcacttaccttaggccacagttggataaagaacccaaagacgcatcattctgaagctatttactacgtcaaaacgcctctacttggtgaactctcttggataacacctattggaaacaatgaaa

SEQ ID NO: 120837 - DNA, 392 bp, Glycine max
  Clone ID: PAT_MRT3847_80121C.1
gatgcttcaaaaccaagaaaaattagtgacaattcctggtcctcgtctgactttttttatatcagcaaaaatataatgatcagttggtgtccaaaaaagttttatgcaattgtgctgcttttatggtatgcagcaggatccattcatggattttcaatggtgcagaaataaagtgcatagagagggagagaatggcactcctcaacttcaaagaaggcctcatagatgtctatggcatgctgtctacatggagtggcgatgaaactaatagagattgctgcaaatggaaaggaatagatgcaacaatgaaacagctcttgtacaaaagcttcgtcttcgtggtcagtatacacaatatttgagagtggctatatttaactggatttccaact

SEQ ID NO: 120838 - DNA, 456 bp, Glycine max
  Clone ID: PAT_MRT3847_80122C.1
agccatactgtgtttgattattctctccctccttcatcttcatttactgctctggaggtgggggactattattcgctatttttttctaaacataaaaattgttcaaatattttgccatgggaacccagcatctgcaggcctgggactgtttcgtttaacgagtcatgtttcctcccgcttacttttgccggcggaggagtgccggtgactactgtgattattcttaccacaaaaaccatgtggccactttcaggtcatgccggtagccggttgccccacccgctaaaaagaatcagggtgctcctgcttatggcatgccgctgctggcggtaacctccgcggcggagtttaagagacccagcaatgatgatttcagggatgccacgagcattcgtttggatatagagcccattctaaagcggggccatgcgctcaactttggtgccaagagcgact

SEQ ID NO: 120839 - DNA, 296 bp, Glycine max
  Clone ID: PAT_MRT3847_80123C.1
ggattatggatctaatgtcaaacagtttaatatttataatttcaaaaagaaaagcctctttttagcaacttcaaattataagaattgattacttaagtccttatttcattaaaatccaacaataatcatcgcttacccaaatactcctgattgtattcattagagtacttttaatggtgatacgttgcttatttgttctttctgctacattatatgaagaaaaaaaaaacagcatctcacttttttgcgttgcttctataagcaagtcttgtaacttgtactggtacctttactaa

SEQ ID NO: 120840 - DNA, 1121 bp, Glycine max
  Clone ID: PAT_MRT3847_80124C.1
ggctcgagctgttgtaaccctcttacccgcactttccgcgtcctcccccacctcggctccgcctggtcccgccacggctctgtcctcgtcgactccgaggaccgcgtcatggtcctcacggagctcgccgccctctactgccaccgcaacaccaccacctggctcaaattctcctccaacctcccctcaaaaccccgttcatctcttctcatcaacgactccgccttcgccttatgtgatgtcggctccccctggcgcaaccggtggaagctcttctcttgcaccatcaaatccacaactacttcagtcgtccctgtctggtcccccctcgaccgccacgagtggggggacgtcttcgatgtcctcaatcggccccgcctcgtccgtggcggccacggcaatttcatcctcatggtcggcggcctcaagtcctccttcgccctcaacgccccctgctccaccatcctcgtcctccgcctcgacctcgacaacctccgctgggacgaggccgcccgcatgccgtccgaaatgttccgcgccttccgtgagtcgaccaagttcaaggtcttcggcggcgccggcgacatggtctgcttctccgccaagaggatcgggaaattggcgctctgggaccgccgtgcctccgaggggcacgagtggaggtggatcgataacctccccgagaacggcaaaggcctctaccgcgggtttgtgttcgaagggaggctcaatgctgtcccctgactgaggatttagggtttaatggcttgctgggaattggtaatgctgtgttggattaatattgcttgtggtttttttattattattattatgaaatgtgttgctgtaattgtattgtaccattagtttctacacaatgcaatttttaactgatttgtggaatcttgctttgttcttttgttttttgttgtttcgttactaaatcgtcgtagatttttgctttcattgacatatataatgtattactggcaatgaaagttgaaagttgaaactatgggacagaattgacacctagtcaatctagtgaaactacttgtaatttgtaaagacaagtgtggggataataaaggaatgctataattgagtgagaaaaaaaaaaa

SEQ ID NO: 120841 - DNA, 220 bp, Glycine max
  Clone ID: PAT_MRT3847_80125C.1
cacgtaggggttatagagagactacatagtgatcctgacttttaagcgcaacaatggaggtcgcaaccaacacggccgaagccacctcaagttcattcgatgctacgactggcgcaaatgctgtgctaaggaccaagctatcaagaggtattttgtgaggaacattggtgaacaggcttcagatagagatattcacgaggcttcgatctatgaacaatta

SEQ ID NO: 120842 - DNA, 249 bp, Glycine max
  Clone ID: PAT_MRT3847_80126C.1
cttccccggaacgcttttatgatattggcgaaaaacagtcgtttacaaagaccgaaattctgctcatagatccatgaaacaatcaccacacacagtgtatatcgccaaaaactccgcttatacaacaacttaaccggaaagacagcattccagcattaataccctacctttgtcaaacaagggggacctcaaaagcccgagcgtacgtccttttgggggtcaccataacaagctctgcggctggcttgc

SEQ ID NO: 120843 - DNA, 280 bp, Glycine max
  unsure (1)..(280): unsure at all n locations
  Clone ID: PAT_MRT3847_80127C.1
cacttagcatttgaagaaaaaaaaaatttcatcttaaaaacttttttttaacttcttccgaaactaaggtgtataagttgatcttaggttatggngaaattcaacgtatttnacttncttgtttccttctttnntaagcatttatgaaaaaaaaattatctaaagtnggccaagactacttncnattagtttgccaagntnctatttngggcataattttttccctccgtaagatattacgggtgttncccanctcataggttngaaactaancccgctt

SEQ ID NO: 120844 - DNA, 1097 bp, Glycine max
  Clone ID: PAT_MRT3847_80128C.1
gggtgtaccaaaggtgctgaaggaagcaccccattgtgtaaggcacatggtggggggaagcgctgccttttcgatggaggtggcatttgcccaggggtgtgcatggaagcaccaccaatggcactccatgatctacccttcacacccatgaccaccatttccctcttcatcattctattttctctattttccaccccttcccattctgccctcacttgcgcttcccagaagctcaaccgcacctacgccaactgcaccaaccttcccaccctcggcgccaccctccacttcaccttcaacgccactaaccgctccctctccgtcgccttctccgccgagcctccctcccgctccggctgggtcgcctggggcctcaacctcgtcggcgatggcatgcgcggcgccgaagccttcctcgccttcccctcctccgcctccgcctccgccatcaccctcggccgctacaacctcacctcctacaaagccatcgacgaagtcaaagcctttaccttcgactcgtgggacctcgcggccgaagaatccaacggcgccgtaaccatctacggctccgtcaagatccccgattcggcgaggaacgtcagccacgtgtggcaggtgggtcccgtggccgcgggcaagcctggggtccacagcttcgaaaagaagaatacggactccaaggccgcgttccctgtcgcgctggtggggcccaacacaactacaccagcgagtggcgaaaacgcgactgcgcccgcgagtggtggggacaagaagaacggtgctgctggggagagctttggggttgggttttacttttggttggttttcgcattgatgattggtgtcgttgctatttgatgtgattctttttcaccgttttaccttttaccccctggagcagggtcattcaataatttttactgtactgggacatttggatttttttttaatatttgttgtattgtaggtttttttttttttttaatctgtacgcgtcgttttgggggttttatttggggatggtagatccgtagatgggttgtgcctgttgtgttagaaattcaaattctgcttttagaatgaacatgtagttattg

SEQ ID NO: 120845 - DNA, 168 bp, Glycine max
  unsure (1)..(168): unsure at all n locations
  Clone ID: PAT_MRT3847_80129C.1
gcggcggcttcnaaaaaacaacagaagggcatatacatcgctttattaacacatcaaatccctgctaaacctgcattcctattctggattccttaaacaacataattctcattatttataccccacctcttatttcttcatacctcctcatacctaaaatcaattcaa

SEQ ID NO: 120846 - DNA, 407 bp, Glycine max
  unsure (1)..(407): unsure at all n locations
  Clone ID: PAT_MRT3847_8012C.1
ctttttctcattctctggatccgattcaggaatattattatttttaaattcccctgtttgcaaaanattaagaattgtttgcgtcgtcagatttgaaagtgcttcaattgaaatttattttcatttttattttagtctattttattcccattcgtttcgtaaagtcaacgctgccgggagaagcgtgaaaatagggtgttgatcccagttctcacgtttagttgtgtaaatggatccgtttcagaagagaggaaacatacaaaattaggttcaaaacgttgacattcttcgtgttgggaattagtgcctttggtggtcaccatgttccttcttagaaggcaaacccagaatcaccatgagaatgattcctcatatcaagatacaaaggtggctgaactcaagacagc

SEQ ID NO: 120847 - DNA, 249 bp, Glycine max
  Clone ID: PAT_MRT3847_80130C.1
cggttttgggctcaagtttagagtcttttcatctgtatcaccaccagtataagatgcagaataaaaatgaatgccctttgcttttgtaatgtttaggatttgtacttatgtatggaattgttgtacaatttcaatgcaaaaaagatttgaagattccaaaatctatagtaattccaagaaatatatgtgaatatgcagtttttaaatctcaccattcaatgcattttttttacacattaaaaataaatt

SEQ ID NO: 120848 - DNA, 376 bp, Glycine max
  Clone ID: PAT_MRT3847_80131C.1
gcccgaaattccgggttggaccacacccgtccggttattcgtggggggaatatgaagtcgtttgtttattaaaggcccccggaccatttcctgggcatggaatttaaattccggcgtaaacccatgaccttccttggatttaattccgttggcaatggaatttcaatttccctaggggcttaaatatttcccggcatttgtgcctagcctaatttttttaatagtggatatccattcccctaatttttttttattttttttccccgcccaaaccttaattccttaccctattccgttttttttaattcataatgaaagggggaaggtccaagaccgattctaagagtgccatttccaaatttgttgtgaatataaa

SEQ ID NO: 120849 - DNA, 601 bp, Glycine max
  Clone ID: PAT_MRT3847_80132C.1
cccagatctggtgtggcacctgggccctcacttccctcgtctgctgctgtttcggattctttgaagctcgctgtctcatatcttgctgacgctttgctgggactggtgactgtgcttctggatttgtttgctgcttggtcgtgctcgggtaaggcgctggtggtcatctcctcggatccggttgagagccgttgacctacgcttcacgctgctgccctggtggcggcctcttgtgctgaggctgattctccgcctccggatttggtgttgctgcccattgctgccccttgttgggctgatgtgggagttcctcggatggccctcgttcccatgtactcaatgagcactgcaaagtctttgggcttgctagctgccatccgttctggttcagtgtgtctgcgactttccttgccttcacaccttcctgttgcttacttcgtcctcgttggcgcagccctcgaaccttttgcctcggagcttctttttggcctttattttcaggctttgaaaaaagttgaagaagctatgctaagactggagaatttgcttcaagaattgtatgtatcaagtactagttctggaaaagagcatttgaacatct

SEQ ID NO: 120850 - DNA, 501 bp, Glycine max
  Clone ID: PAT_MRT3847_80133C.1
gaattaaaacatattttgttttcattgacgggtctaccgttatggttacatgatattccgggtatcgtattcagatctgacaatgagcaattcaagttccacatgcaaaggttcactgcgaaaatagtcaacttaatgaaatcagccaatctttttgcttcacaaggagggcctatcatactatctcagattgagaacgagtatgggaacgttgaaggggcatttcacgagaaaggactgtcctatattcgttgggctgcccaaatggccgtggggctccaaactggtgtgccttgggtaatgtgcaagcaagataatgctcctgatccggtgatcaacacatgcaatggcatgcagtgtggaaaaactttcaagggccctaactcgcctaacaagccttcactatggacagagaattggacaagtttttaccaagtctttggtgaagtaccatacataagatcagctgaagacattgcatacaatgttgccttgttcatt

SEQ ID NO: 120851 - DNA, 1536 bp, Glycine max
  Clone ID: PAT_MRT3847_80134C.1
gcggagtccgattgatcccattttgacaaataatctataataatatctgctatgaaaacacatgttatatttatgttgtaaaaattttactgaagatcaaatgtagtagtgtatttttaacttttatttatacttttttcatcatatacaataactgtctaaaaataactttcattgactttttggggtttgttacattaagtgcactaatacatgaatatatttttgagagaaaagataccaattttataagtgctttaaatgtaaacatatatgcacagaaaaaaataatatgattctaattatttatgaacataaaaacaaatagtttattaattgctccatattttcgacatggggttgcataaaaatcatgagttggttgctgaaacaagactcatctagattcgtggcatagatactttggaatttttagtgttagcgggaatgaaaaggtatcatcgatcatgttaacgccaagtcattccttacgttagtattgagcatagaatctcatatccttgcgcatgaaaacaaataaataagtatggctggatgatccatataaatgctaggcactagaacacaatatattagtcaagaaggaattgaactatgatgaacgatacatcatctgattctgaaaatgaaattatcggatcacgggcaaagctctttggacacgaagaaccgattcatgaagttcttggaggaggaaaagtggcagatgtgttattatggaaggacagatatgtatcaggtgcgcttttgggtgggatgactgtgatatggtttctatttgagatcgttgagtacaatttcgtggcactcctttgtcacatttccatcaccaccatgcttgttctattcatatggtccacggttgcagacatatttaagtggaaaggtccccagataccggacattgttttaaaggaatctttcttccatgatcttgcttccatcctccacaaaagatttaaccagttattaccaatgctcctccgcatttcatgcggaatagaccttccaatctttcttctgaacattgtttccctctatattctgtcagtgattggaagctacttcagctttgtcaatctgctatatattggttttctctgcatgcaaacgctgccaattgtgtatgaacggtatgaggaagaaatcaacaactgggtcggcgatgtcataatagttctcaagaaaaactatagaaggtttaacaagaactacctcaacaaaattcccagaggaccagggaaggcaaagaaaacccaataaactataatactcaaaacttcaaaatataagatatgatggtttatataaattcctttccaagaaaacaaataccaaacaatgtaatagttttatttttcatacatgtccaattgtgtaattcgaaggtgtttacatggatagcgtgtgaggagtagtgtatttttatttttcactgaaatccaactgtaagttttcttcactaaagaattgtgcgtatggtgtggagtatatatgtgaaaaacgtttctctcc

SEQ ID NO: 120852 - DNA, 592 bp, Glycine max
  unsure (1)..(592): unsure at all n locations
  Clone ID: PAT_MRT3847_80135C.1
nattcggcacgnggtctttgcgacttcgtaagcgtttagctgccagcgtcttgaaatgcggcaagagaaaggtttggttagatcccaacgagacctctgagatcgagatggccaactctcgtcaacaaatccgcaagttagtcaaggacggtttgatcatccgtaagcccaacaagattcactcgcgtgctcgcgttcgtgccagaaccgaagccaagcgaaagggcagacacatgggttttggtaagagaaagggtaccaagggaagccagaatgcccaccaaggtcctctggatccgcanaatgcgtgttttgcgcanaatgttgaanaaataccgcgcccaaaagaagatcgacaaattcttgtaccacnagttgtncttgaaaggtcaagggtnacgtcttcaanaacaagcgtgtgttgatggaacacatcttccaaanccaaggctgaaaagcaacgcnacaagaacctcnaaaaacnagccaatgctcnccgtttgaagaaccaagccanacntnaaaaacnttcaaagaangtccctgaacgcanaaagttgggtttccccgaaaaaactgaagacaaccccna

SEQ ID NO: 120853 - DNA, 372 bp, Glycine max
  Clone ID: PAT_MRT3847_80136C.1
gtacaactcaacatgcaaagatgtaatcttagcacaaaccaaggctaaggagattaaccaatggaaggaggaacgtatagctgaggaagctactaagttgcctaaagaggcagctctagaactggcagaaaaggagaaagttaaagctcaagctgccttggaagcatatgaggaagccattaagatggttgaaaaggaagcacaaagaagaattcaggcagaggtgaaggctaggagagaggcgcaagaaaaggatcgagcattaaatctgttgattatcaacgatactcggtacagaaaatacagtataaaggatattgaagaggccactcagaagttttccccatcattgacagtaagtgaaggtggata

SEQ ID NO: 120854 - DNA, 723 bp, Glycine max
  Clone ID: PAT_MRT3847_80137C.1
agctcgcggttgggctcgaggcactcttagaaggcattactgatacacttggaaccgaactactcgaaagcttgttaaaaatggcaccaagcaaggaggaagaacgcaaattgaaggaacataaagatgattctccaaccaaacttggtcctgctgagaaatttttgaaggcagtgcttgatgtacctttcgcatttaaaagggtggaagcaatgctttacatagccaattttgagtccgaagtggagtatcttaggaaatcctttcaaactttggaggctgcctgtgaagagctgcgaaacagtagaatgttcttgaagcttctagaggctgtgctcaaaactgggaaccgtatgaatgtggggaccaaccgcggcgatgcacatgcattcaagcttgatacgcttctcaagctggttgacgtcaaaggtgcggacggcaaaaccactctactgcacttcgtcgtacaagaaatcatcagaactgaaggcgcacgtccctcaagtactaatcaaacaccgagcacgaacttgaacgacgatgccaagtgtagacgcctcggcctgcaagtcgtgtctagtctgagttctgacctagcgagtgtgaagaaggccgctgctatggactctgaagtcctcagcagcgaggtatccaaactctccaaagggattgcacacattgcagaggttgtgcagttggatgaagcagcagggtcagatgaaa

SEQ ID NO: 120855 - DNA, 609 bp, Glycine max
  unsure (1)..(609): unsure at all n locations
  Clone ID: PAT_MRT3847_80138C.1
aattctttgaatcgaccacaaaagtttgagaatactagtgtcatacaccaattacgctgtgggggtgtccttgaggctgttagaataagtctggcaggttaccccactcgaaggatttactcagagtttgtggatcgctttggactaatagctcccgaatttatggatggaagttatgacgataaagctgtaactctgaaaatattgcaaaagctaaagcttgagaattttcagttaggtaggaccaaggtatttctcagggctggtcaaatttgcattttagactctagacgtgcggaagttttggacaatgctgcaaagtgtattcagcgtcgactgcggacatttattgcgcgccgggatttcatctcaatccaagctgctgctctttctattcaagcatgctgcaggggatgcattggccgaaagatatatgcttctaaacgggagacagcagcagctatctccattcagaaatatatccgtatgtgtctgatgaggcatgcttatgtgaaattatattaattctgctattattgtacaatccaaatggtcgtgggttcacaactcggcaaaagattcctgcatagnaaaggacaccaagctggc

SEQ ID NO: 120856 - DNA, 259 bp, Glycine max
  Clone ID: PAT_MRT3847_80139C.1
acgcgtgcgacgactgcaagaggacggcggaagggggagcgaaagaggggttttggaacgtgccggattcgaggctctaatctgtgcatcgcgtgattgctacaaaaccgataacgagtcccgtacccgattcgaggtacctgacgctctccgtacacaccctcgacatcggaactcgtctgaaccgcctcatcttttatttatgaagcaacatcctctatgaaaagctggcacttgttcaagaactgacaactggtgc

SEQ ID NO: 120857 - DNA, 158 bp, Glycine max
  unsure (1)..(158): unsure at all n locations
  Clone ID: PAT_MRT3847_8013C.1
ttgganagaangngtnngtnnagnnngggaattaggntngntangggatagttantgaggatttgngnnatngangtgngagtgngangnggagngattnntnnngngatnttgnnagagagnangtcaggaggnngttgatnngtgggntgagnngn

SEQ ID NO: 120858 - DNA, 532 bp, Glycine max
  Clone ID: PAT_MRT3847_80140C.1
ggggaggggaaataaacccaaggtttgtcgtaatagaataaatcagcaatgcttgtgaaaattttaatttccttagaatacatttatactgctggtagtattctgcagacgaaagggagaagaataaagagataaagattgaggagagaagaacaaagatcggatggaaaacaagagagaagaactgaacaacataaattacaagctggtaaacaacgggtgagactcaaagtaaatagtgaaaagccttctgattctaataatactcttggcaatgatcaagaattattgtagctgtgaaggcccagagtagcaacctagtgtgtcattttctgaagaatgatgatgcatgttgaagcatatttttaatttaacagggaaaacttaacatcaaaaacttaaggggcaatcaaataaaaaggaagcaaagcaaggattcaatttcaatgatctgtaaactatagggcctctgtgttttcattttgcaattcaggtcactatcaccacttcaaaaaaaaatggcagtcatgac

SEQ ID NO: 120859 - DNA, 486 bp, Glycine max
  Clone ID: PAT_MRT3847_80141C.1
ctaaaattgaatgaatgtggatacttgcaagttttcaaaatcgcttcttattttgactgttacttgcaagttgtaaaaaaactctcagatttacttcttttcctgtggcatccctgcctgacatttagtaaacattgccagatgttatggctctccaatgtgggatgtaaagataactttatattttgcaactcattttgtattcgaatgttgcgcaatttaaattctattttaaccaaaccaaatcaaattggcaggacatgaaccacaaggaaatgagcaagctacacgaaagacctcaccatcgataaaccgtgccaacatgcctaacattctacaaggttattgttcacaacgagggggggcggctcataaagggcctaattttgcagaccctgccctccgaaataaaagtttttttttggggcgcccaaaattcaatctcctgcccctgggtttccacccttgggaggggaaaaccccggg

SEQ ID NO: 120860 - DNA, 210 bp, Glycine max
  Clone ID: PAT_MRT3847_80142C.1
ttttttttttttttttttttttttttttttttttttttttttttttttttttggaaagaaattccttttgtccatcaacattttattcattatgataatgaacatatggaaatgtaagccagcctttttttattggcaaggggggtttacaattttggggggggggttccactgggggggcagggcttttgaaattttgttgggttccgc

SEQ ID NO: 120861 - DNA, 702 bp, Glycine max
  Clone ID: PAT_MRT3847_80143C.1
gttccaaagtgtcatgccatagtaatcaaaacaactcaacacaaaacctagaagaaggaaaactatcacacaacttaggaggaaaaaataggagggattttctcattggctttggagaactttacggtgcttctactcttagcaacaataacaacaaccttttagccatcgctgctccaattctccctcctgacctagaaacttatggttcaccagagttaccaactgatgtaaagccggccaccatttgttgccctccagtatcttctatcgtcatagacttcaagcttccttctgcgagctaaagagtgagaaatcgtgatgaatttcagttccttacaccattgctacaaaactgcatctttcgagataaggagaagtgagattatctcatgactatggtcggaccatcagaggtaacaagaaacaccatctgagctcgtagaacattgatcgggtgcgggcataggtggacactcaaaactacacccgccagtcaggggaatagtcatcactgcctatctcgcgacggaagtgcttgtcggggcggagggcttaggccatgccttgcgctgttgactataaatactgtagtcgggtgtcgtggtgtacgtcgtcgtgtcctagtttccctgctctccatgttacattaatattcttttctctaaaaacacaccaactatattttctcaaaaaaaaaaa

SEQ ID NO: 120862 - DNA, 768 bp, Glycine max
  Clone ID: PAT_MRT3847_80144C.1
acggcgcgagaagacgacagaaggggcttccatatatacaacacaataacagaaagaataacaactaaattgaatcctacacagctcacgaattcagagttttagatttttgacaaaagtgatggatatgacggaaacaaatcacctaagcaatgaacaaccaaacatctattcaggagcacatggattgaatcctaaacacacacataactgatgcttaaatatatttaagcaagaaaacaaatcattcacacactgaatatttattcagaaatcagaagacgacagaaaggaagcacatggattgaatcctaaagagaaagtgcaaaggattgtattgacttctttgcatgcatcctcagataactcaactcacattgaaaacagaacatgaagtcaaaagcaaattgggaagtctaagctacaaatcaattaaaaaaggaacttgagaagacccatgagaaagaaaagtcatggaacctcaagcccgtggatcaaaagcgaaaaatgcaaaatgccattaggaaataactgtttgaactttgaacctaggaatttaattatatggggtcaatgattctatgagtgtataggagacaataacatttagcgagaatcgtaagaatgaaattacaatacagttagaatagttacaaattccaatgatagggagtggatgagagacaatacacaacgggagccagaagtgagggaaaaaaacagtaatcatcaaccactttagaaaaagaaaaaaaaaaagagaagagt

SEQ ID NO: 120863 - DNA, 251 bp, Glycine max
  Clone ID: PAT_MRT3847_80145C.1
agggggctggagggaatttaagattctgttgcaactaacgaaacagacaaaccgttgattaaaaagcagaaaacattgggtggtgggtggtattcggagggggcgggggggatcaacaccaacaatgactgctcgaaaagaacaccaatcggctactctttcggagctgctgaagcgcgagaagaccaaagagaaaactgagaagcccgatggtgttattttgaacgggcaagctagggagaaaaataaag

SEQ ID NO: 120864 - DNA, 223 bp, Glycine max
  Clone ID: PAT_MRT3847_80146C.1
tcaaatatcattccaaatattatcactttattaacaatactcatctgcttctacttactaacccccctcacaatacgattccaattctcatccacattgtcaaacccatttatgaatccctcatttctcttcactacattcaataactctgtaattacacaaaatcccttctatccttcttacccttaccatataactcatactagattctagacttattatc

SEQ ID NO: 120865 - DNA, 369 bp, Glycine max
  Clone ID: PAT_MRT3847_80147C.1
gtactcaggcgtggtccttttatgacttcagatggtatctttgtgatacattcctagttcctgataataaggataactgcaggcattaaaataagtaggatcaacagagtaagaacatgcatatacgaagcatatatttatgatctgtagtagaaagaaacagagtttaagatgaaggcataaatggtactaaaaaataggcatttatttcctgattattttggcattttgtatcggtgattcaaaataaaaacaaaaatgacattggatttggaggtgcatctctttgtcgtaaagctggttggacaaaaatgagcttcgttgtggggtatcctaattcctaaaggctaaagcaatgtgtaattttgt

SEQ ID NO: 120866 - DNA, 430 bp, Glycine max
  Clone ID: PAT_MRT3847_80148C.1
acataatggaataccaacaacagaaacaacaatggaagaggtcacaaaggacaaaaccctcttcttcttcttcttctcacatcaacaatctcgatgatggttgtcttatgcacattttcaacttccttcctcctattccagctatttaaccagtaaattggtcatgcatctgtgatttggtgctgaatgccctcatcctcaagagtgtttccttgctgatatttctactttggcacgatataatgtttttagcctctctttgttgttcaccctacttgttttaagatggaattacttggcatgtcatcctcgcttgtggcttcgggttgatcgatcagttaaagagttatctgaacccggtgttttcccaaacattgaaaccgctgtatctgcttcaagaccaggtgataccattttaatagcaactggt

SEQ ID NO: 120867 - DNA, 1143 bp, Glycine max
  Clone ID: PAT_MRT3847_80149C.1
accactaattatcagtaatgaattcaattgcaggaatttggcagttatatcaaaccaatagcagtctgtttgtttcatagttcttttattaatattcttttagacaactcattaagaagacaatgataaactgaatgtttattattacatatatgacacatcctaatagtaaatattaaatagcaagaacaaaaaacgctctagtcaaagaatcataaatatcactactaaaattacagacaagtctaggtaagcaaaccaacaaaatgatatcaaagaggcttgtcataatcaatttgatcacacatctgctccacatcaaaccagaaaagaagtgaagttcgagcataaatcactctgacgcgttgcaaggccaaatccccacttgttaaaacagctttggcacccccttcaatgcgggtttgagaaacaaatacaccatcaccattattactcttggtttgagagggaagcaccacactgctactggctgtactcacaatgggacatgagagataatccagaggattagactcacattgaagtatgcatccatctatggttagccttccctttctatgtagcaagcaacaaccaagctcggccctcacggttaagtttgctaatttgcatgtggataggaactctaatgcactgtctgagcctcgagaacaaacaagtgttgtgtcatctggaacttcacctgcaccaattaagcaaagtggtttccttatttgaatgtttgcaacacgatgagttccaccagctgctattaaaatggtatcacctggtcttgaagcagatacagcggtttcaatgtttgggaaaacaccgggttcagataactctttaactgatcgatcaacccgaagccacaagcgaggatgacatgccaagtaattccatctgtggcaaacgagggcggtattaaagcgatctggaataggaggaaggaagttgaaaatgtgcataagacaaccatcatcgagattgttgatgtgagaagaagaagaagaagagggttttgtcctttgtgacctcttccattgttgtttctgttgttggtattccattatgttctgtgatgaaccaactccatgccccccccttctgttgtcttctcgcaggcgtaaatcgatccac

SEQ ID NO: 120868 - DNA, 844 bp, Glycine max
  unsure (1)..(844): unsure at all n locations
  Clone ID: PAT_MRT3847_8014C.1
cacgcgtccgctcaacctcaatcagaagatcagaatatggctcaacctcaatcagaggatccaaatatggttcatcctcaatcggaggatcagaatatggctcaacctctaatggaggatgagaatacagctctgccacaattggaagatgagaatacagctcagccacaattggaagatgagaatacggctcagctgcaaggaagttcaaaattggaagatgagaatacagctcagcccgcaagtgaccttccagaccagaaggagggaactacggcacagcctcaaatgagttcaagaccagaggaagggaatacggcaccaacctcaaatgagttcaagactcagaaggaagggaatacggcacagccgcaagtgagttcaagatcagaggatgggaatacggctcagcggcaagtgagttcaagatcagatgatgggaatacggttcagctgcaagtgagttcaagaacagaggatggggaatacagctcagccacaagtgagttcaaaattggagggtaaggaaagtcccctcagccggaagtgaattcgagattggaggatgggaattctcctcggccacaagtgaattcaagtttggatgggaatacagttcagccatcggcagtgctggtttctgatgactcgcgcagccggcagcctgatgaaccttctagcctcaatgttcagcagcaggatgatggaccttcaagccccaaccgtcagcagnaaggcagttcctagctcccgagaccttattttgggaaatnggggttgcggaaccattggcgnagggaccgaatcaagataaacctggcatcaaaatcaaagcagcagatgc

SEQ ID NO: 120869 - DNA, 181 bp, Glycine max
  Clone ID: PAT_MRT3847_80150C.1
cagttgtaaaacaaaggttccttcagtggaagtacctttcagtctctgtcttccttttaaccttaaaacacacctttctctcccacttaagataaagtaccacactcctgaggaggaaatagcatttggacctggttgctggttatgggactacttaagaagaagtggagcatctggtttt

SEQ ID NO: 120870 - DNA, 932 bp, Glycine max
  Clone ID: PAT_MRT3847_80151C.1
ccacgcgtccgcttcaactcgctaacccttctaaaagcctcttgtgagtaactatcgttaatatatccctcctccattctgaatcaaattcattgtttgttgaacccatgccactgattcacactactccaccgcttcactatgccatttccacacttatcaatgcaccatcatcatcttcttccaccctctctgctgccacattcggttccaattttctgcgcaaaatccataacccaatttttaggttttccaccgccagaaatcgctcgcgcgctgcagtggtcagagccaaagcagggaccgattactattccaccttgaacgttggccccaatgccacgctgcaagaaatcaaggcctcctatcgtaaactggcgcgaaagtaccatccagatatgaacaaaagccctggggctgaggataagttcaaggaaataagtgctgcatatgagatgatgagaaaagatctttatatgatcgctttggtgagtcaggtctacaaggagataatggagggtcgactggtgctccaggggttgatccttttgatttattcgatacattctttggtcgttctgatggagtatttggagttggtgatgaagggagcttcaacttcaattttagaaacaagagaaaccatgttcatgatattcgatatgaccttcatttgagctttgaagaatcaatatttggaggacagagggagatcgaagtttcctgttttcagacatgtaatatgtgtgatggtgcaggagctaaatcaaagaattgcattaaacaatgcacaaattgtggtggcagagggggagaaatgaaaactcagagaacaccctttggaatgatgtctcaggtttctacctgctctaagtgtggtggccttggcaaaataatcaccgatcaatgtcgaaggtgtgatggcagtggtc

SEQ ID NO: 120871 - DNA, 274 bp, Glycine max
  Clone ID: PAT_MRT3847_80152C.1
tacggctgcgagaagacgacagaaggggtatagccctacctcaccatcatatagccctacgtcccctagttacaatccgcagtcagcgaagtatagtccttcgttagcatattctccaagcagtctgagattgtctccatcaagtccatatagtcccacatcaccaaattatagtccgacatcaccatcatattcaccaacatctccatcttattctccatcaagcccaacatacagtcccagcagcccatataattctggtgtgagcccagat

SEQ ID NO: 120872 - DNA, 425 bp, Glycine max
  Clone ID: PAT_MRT3847_80153C.1
actaacctttttttttaatcacaaatacgatggtttccatggcacccacaacctttttttaaaaccccaaactttaatttttaaacggaaggcccgtcacatatttttcccgggtggggcccaccaccaaattatcctaatccaaccagggcacaatttccatgtccttaacccaacccccttacgacctccagtccttaaaattccagcccatcaaagaatccatcgggtaacgggaaatgacgcgccgttccatgaccgccatgttaacctacgccgccaccgactttgtattcttcggagccggttcggccgggttttcttgcgcgtccgagctatagcaggaaccccgccgggggcggggccatagttgagcagtcagtgagccccggcggcggcccgtggtttgtcggccagtttttttc

SEQ ID NO: 120873 - DNA, 365 bp, Glycine max
  Clone ID: PAT_MRT3847_80154C.1
ggttaagggcaagaagctttgttgaaacgattgagacaaataggacatgtttattacaatagaagaaacaaactttcattagtataactcattctaatctgtgttcggataacgttagttacttggacatttcaagatccggtctcctatcaatcacttcgctcgatgagtcttcaggaaatgcatcgggataagtagccataattttttatttcatacttctgcaagagagggttaaccaacctttaatgtaagatttcgtaaagtaaataaatatgaaaataagccacaaaaaagaaacataagagatatgtgtctttgggaggggggggaggatagcaagcacgggtggaaggttctttcat

SEQ ID NO: 120874 - DNA, 320 bp, Glycine max
  Clone ID: PAT_MRT3847_80155C.1
attgtatatttaggattgggagttaactaattttttgttgttcgacaccacaacacagacaaaaaaacatggaaaaagaaaacacagaaaatccaacacgaaccagggaagaacaaaaaaaagccccgaagggggccccaaaagccccaacaacggggcggggtacaaaaaacgaaccgacgaaaaaggaaggacctaaaccccgcaacgccggagaagggaaacccccaatacaaggaacgcggcaaacaaaaaaaagggggaaaaaggccagaaaaaaaaggggaacccaccggaaaagggaaagggaggacccccgg

SEQ ID NO: 120875 - DNA, 260 bp, Glycine max
  Clone ID: PAT_MRT3847_80156C.1
agcattttgtgatctggtttggtcagatcctgaagatgtggatacctgggctatcagtccccgaggagcaggttggctttttggagcaaaggtcacaaatgagtttgttcatatcaacaacttaaaactcatctgcagagcacatcaactagtgcacgaaggctataaatttatgtttgatgagaagctggtgacagtatggtctgctcctaattactgctatcgttgtggaaatattgcttcgatcatggtcttcaaag

SEQ ID NO: 120876 - DNA, 1293 bp, Glycine max
  Clone ID: PAT_MRT3847_80157C.1
ctctaccatgcgcgcgcgacaggacggcgtgggaggcgcgaaatccttgtgcaccgtaagggttgtgaagcaggcagagaagagccatggtgcacgtttccttctaccgaaactatgggaaaaccttcaagaagcctcgtcgtccgtacgaaaaggagcgtttggacgccgagttgaagctggtcggtgagtacggacttcgctgcaagagggagttgtggagggtgtgcaccgtaagggttgtgaagcaggcagagaagagccatggtgcacgtttctttctaccgaaactatgggaaaacgttcaagaagcctcgtcgtccctacgagaaggagcgtttggacgccgagttgaagctggtcggtgagtacgggcttcgctgcaagagggagttatggagggtccagtacgccctgagccgcatccgtaacaacgccagaaacctattgacccttgatgagaagaaccctcgccgtatcttcgagggtgaagcccttctccgaagaatgttccgttacggactcctcgacgagacacagaacaagctggattatgtgttggctctcaccgtcgagaactttctcgaacgccgcctccaaaccctcgtcttcaagtctggcatggccaagtccatccaccacgccagagtcctcatcaggcagaggcacatcagggttgggagacaggtggtgaacatcccatcgttcatggttagggttgattcgcagaagcacattgacttctcactgaccagtcctcttggtggtggtcgtccaggacgcgtgaagcgaaagaaccaaagggctgctgctaagaaggctgctggtggagacggagatgaggaggatgaagattaaattattaatggcttctgatatttatagaccttgtgctcgtttttttatctgtgtcggtagacattttagatttttgaaatggtctgacttttataattttggcattcttgtttcttgtttgaggtaaagctgtgcctgagatatgatgtttttgaactgttctttctaaagtattcaagttttgctccaatgcctgtggtgatcaatggtattcttgcaacttgattcaactgctaaaaaattggtggttttaggcttctttgcataagacagttagttagaagttaaaatgctcaaagatattgttttggtccatcaaatgacagaattagttcttgggggcctgatttcagctatggtttcatcgagtacaactaggtttcatggtataatgacgaattctagattttattctatgctaagcaatacttgtgt

SEQ ID NO: 120877 - DNA, 278 bp, Glycine max
  unsure (1)..(278): unsure at all n locations
  Clone ID: PAT_MRT3847_80158C.1
ttatcataattattgattacaaaaaaaccatgtgtgatgaaacaaggtactcatttgggcattatgtttgtnnnnnttttgacttttacgtatcaagttgactattttcactgcaataaagattggtcttgcattaaaaatgctgaagagaatcatgctatccatttagaccttgataagcttatcgaatacaaactcgatcttttggcatgtattaaagtgagttttgtttttcttagaaagctttgataacggatgttaaattctataaagattga

SEQ ID NO: 120878 - DNA, 403 bp, Glycine max
  Clone ID: PAT_MRT3847_80159C.1
aaccataaatacacaacccaaaaattccaaaggggcccgaaaaacgaaaccaaaaagccagggggaaaaaactcttaaaagcaaaaaaaaaggggaaaggaagaaaagccccacaaaaaaaggggggggggaaacaaagctttgaaaaaatttcaaagatcaaaaaacccggggggttggaggccaaaaaacttaacccccgaacttggaaaacggggaaaaacccaagggaacggaaaaaacccttgggggttgccgatttaccccctgggaacccctttaccccccggaaaggattagggcccccaaaaataggggggtaccacaagggtcaagaccccccaccattgtatccaagagaacctttggggaaaggggacccaaaaacgggccccaaaccgaa

SEQ ID NO: 120879 - DNA, 416 bp, Glycine max
  Clone ID: PAT_MRT3847_8015C.1
gaagtgagaaaaaaggataaggaaggagccaaactgtgagagctctaaacaaaaatgagcttcacattcaacctccatgttcccaaagctctgcctcctcttccctcttcatcacgtggaacaacttctctcttcttttcttcaaagcagaaatcataccacaacaacactagtccttgccaatcactacttataacatgcagaagccacaaaccaaattatgatgataccagcctaaagtatacaagtttggcactgcaagtaggagcactcttggccttgggttcttctttgggcaccatttttaaacttcaggaaattccctcgggacacttccttgcagtacccttggtctgtacctgaagatccttcaaaaagtacaagttcatacgcaaagtacccatatgccgaacctg

SEQ ID NO: 120880 - DNA, 917 bp, Glycine max
  Clone ID: PAT_MRT3847_80160C.1
gagaattaaaagaaagaactttactgaatagtaagaaaagaacagaaaataggagagcaaactcttctccaagggtctccccttcacaaagagctaatgctcaatttacaacgacaacaaaattaactctaactaactaactaactcattatttcttcccctacttatatctaataaacccctctaactaactaactaactcattaacagactaactattttaactaactttcccttctccttatatcctaacaatacaaccctcctaaaagtcaaccttgtcctcaaggtaggaatttgaaaactggaattgcacactgaaacttcctcaagttttctatgattgctggaagacaactgcacccactgtagttgtagcttaactaggaatgacccactgcccctgcatgcggggttgtgttctgtggctctagtggaggttgtgatggaagcaaattctgaataatctggacttccatgcgtggtgctgcaatctctttccatctctgctcttataatgtcatcagctacacagggctccaaatttagtagtataaatctagctgcccagtttctgctccacttttatgaatcccattttgacagccaatttgggccctgatccactatgtaaaaaattggtcacacattgtagaattccaaaaattccccttcctctttctcatccttcagaacggaatcatttactctaacaagatgtgcctctttggtgtccctctatggggaatcaactgtaaaccagtgttgtcaatagcggatcatggaaaattgcaaaaagctgaaaatccactatagaatatagcggatagcgtcgtgaccaaatagcggaagccgcatagcggttgaaatagaatatatataacaattaaatatgtataaaaaagcatgctatatgc

SEQ ID NO: 120881 - DNA, 793 bp, Glycine max
  Clone ID: PAT_MRT3847_80161C.1
ctttgaccttggcctcaatgctcttgatttgaggtctggcttggtgatgttagcattggaggagcagaacttgccaaatctgcaaagctcgtgaaaagtgggattagtgacattgatgttccaattaccttcaggcctaaggattttggctctgctctttggacatgatagaggaagggggacaggctacacttttaaaggtcatattgatgttgacactccctttggagcaatgaaactgcccatcacgaaagaaggtggtactacccgtctcaagaagaatgaagacagtggagatgacgaggagtgaagaagaaatggcagcaagttattagcatatgttcttttatatactaggcccattagaaagttaagtaaaagggacttgaacttaaaggcactaattcagagtttgatggttatttatctatcttgaaagtttcaagttgacgatttgattgtgtatggttatggttatttatgtgaatatcagtttggagtttgctcttctcttgaagccacgttcctgttagagtacataattgatatgttgtcaaaaaattgtgtcaatttttttagtcctaaataaactgtgagtggttatgttaccttttctaatggtttaaaggaagatggtgttgtagagtgttttgctattgatgtcatctattaaaaaaaaaaaagtatgtaattgtaatactcaacaatgtatattctgtagatgttattcaaactttattatgtgatgtttaaatttcattcaattgcacaatattttttttatatgccatcc

SEQ ID NO: 120882 - DNA, 195 bp, Glycine max
  Clone ID: PAT_MRT3847_80162C.1
tacttctgcaagaagacgtcagatgggttctgttgcgggaggactacagaatggtacagttgctatatgactacagtatgactcttataatgataataatgaatgttacaatagaatactatacttatatagattacatgtctaaattaatcttatatgaatttgtacaaaattatttgacactatgtcttctaa

SEQ ID NO: 120883 - DNA, 545 bp, Glycine max
  unsure (1)..(545): unsure at all n locations
  Clone ID: PAT_MRT3847_80163C.1
gggaaatgctggtttcctactgggccaaataatggtcatgagtgatttgaaggtgaagcacttaaaaataaatcaattatggatctattatcatcttttgcgnttctatttaacaatataccttcaacaaaaggtctcacatctcaaacttaacaactgaactctgactctcacactatgcttcttgggaccggctctttcataacccactattatacctaccaaatttggaattcaatccaagaaataacaccggaaaaaaaaatttattggcctcttccaaaataattggagctggattcatcgatcaataagcaacaacttaaaaaaaaaaatcatttctttttcaagaaattggtggataaatcactcaaaatttaccgaacaccaacttcaatgggttgaggaaggtaccagaaccaaatgccactcgggagacctttggcaacatggtactcggggatcccggggtgaaaattgctgaatctttaccttggataccaagaaacagcttcatgaaccctcnnncccaaatcctggaaccc

SEQ ID NO: 120884 - DNA, 376 bp, Glycine max
  Clone ID: PAT_MRT3847_80164C.1
aacgctcgtcgcaagaagacgacagaagggggcaggggggaggcctggaaacaagcgaaccaggcccccaccagccccaaaagacccaaacggcaaccaaccccaaaaaccccacaaaacccacggggcccacaacaacccacacgcacgccccccacaaagaacgaccacccaacggaaccaaccgaaaacccacgcggccaaggacacggaggcgggggggacaccgagccaggagaacaagcaaggaaaccaggagacccgggcccggacaggccccccaagaaggcccaagagccggaaaaacaaaaagcaaagccggaaaagccccagaaaaagccccaggacgcccacgaggaaaccaaagccgcgacca

SEQ ID NO: 120885 - DNA, 218 bp, Glycine max
  Clone ID: PAT_MRT3847_80165C.1
ggctactggatttcagcctcaaatattcttgatattcctcagtagaaaatcttggcttggtccctcatggacctagatagagggggtgtgttgaaggtcgcacatggcggagatataaggttgacttggtgctaaagagcgaagggagggagggataagtcttgggtttgaatcctcccactaacaaaaaccaacaaattaacaactaacatttgccg

SEQ ID NO: 120886 - DNA, 573 bp, Glycine max
  Clone ID: PAT_MRT3847_80166C.1
tcggttcgagggctcctttcgatgcacgtggattccgcgtggcgaatcggcgtagaaaaaaacctgttaccggttgaaacagttgacgccgggctcaaatcccttgctagtggatgccctaatttacgcaagctcgaggtggcaggttgcagcgaggttgggatttcaacgattggcgccgagtgtgctaccttgcaggagctggagctgcagaggtgtgacgacgccgttttgggaggtgttgcagggtgtgagaatttgcagattttgaagatagttgggtgtgtgaaggggttttatgagtccgtggtttcggacattgggctaacgattttggcgcaggggtgtaagagattggtgagattggagcttgttggttgcgaggggagttttgacggtgtgaaggcgatcgggcagtgctgtgtgatgctggaggagttggtcattgtggaccacagaatggacgatgggtggctcgccgggtttcgtatttgcgagaatttgaagactctgagggttcaatcgtgcaaggtgatcgacgggagccccgggttggaggagcatttggtgtgc

SEQ ID NO: 120887 - DNA, 261 bp, Glycine max
  unsure (1)..(261): unsure at all n locations
  Clone ID: PAT_MRT3847_80167C.1
aaaatactacacaanaactcttttcctttctccctattatatcacataatcattctcacatctcgtctatttctaaaacatctctgtctcctacaaaaccaatattatctcttatttacatttctattaaccttcctttccacacaatccactatactttcttctatacctttcttcatttcctcacactattacaatctcactcttcaacatccatatccaacatttcctcaccaactattattcactacctttcaatca

SEQ ID NO: 120888 - DNA, 370 bp, Glycine max
  Clone ID: PAT_MRT3847_80168C.1
gagttccggggtagacgtacgcgtacgcgtacgcgtcacgctgagaggaagtgtagagggtgattctctgactgctaccttgtggcggaaaagtggttacgttcaggtgtgaccagtactacacggtagggagggctcttgcgacgggatctgatcagctccgcaagatctaccgaatgaggctctgtgccactatcaaggattgtgacacgatcacgttctggtatgatgtgaggaaactggactatgtgtagtagagcagtggccaattgcttgacatcaactgagaatggagtgaagatcccaactaactatgaagagctctggtatctggttgcggcatcagagtacgactagatactagaacatg

SEQ ID NO: 120889 - DNA, 403 bp, Glycine max
  Clone ID: PAT_MRT3847_80169C.1
aaacaaagggaaagggttctttcaactaattttttacaaaataatttttcttacaaatttcaaaaggggacccaaattcacccctgtgtcacttatttgacagggcttacgagagaataaaaattaaaggggaaaaaacaaaacccagaagcgatgtttttttaaagcaaataaaaagaagcgaatcattacaatcccaacgaatgctgttggcccccccttttcaaaagaaaaacttccagtaaaaaaaaacacttaagttggcttccgcatgttacctccaacacaaattacttcctccccccccagtaacttgagatactttaactggccctgattttataattcggcgcttcacagagaatttgtaaaaaaaaccctccattgcggggtctataggttc

SEQ ID NO: 120890 - DNA, 783 bp, Glycine max
  Clone ID: PAT_MRT3847_8016C.1
gctgaagtgagaaaaaaggataaggaaggagccaaactgtgagagctctaaaccaaaaatggccttcacattcaacctccatgttcccaaagctctgcctcctcttccctcttcatcacgtggaacaacttctctcttcttttcttccaagcacaaatcataccacaacaacactagtcctagccaatcactacgtataacatgcagcagccagaaatcaaatcatgatgatgatggcagcctaaagtatacaagtttggcactgcaaataggagtactcttggccttggctgagcagccagtattggctgtgactggagagaataaccggccagaactcctctgggttttgacacaatggggggttgttctctttggatatttccttgtcgtgccaccaataatcatgtactggctttggaaaagatggtacagaagaaacttgctggagatgtatttacaattcatgtgtgtcttcattttcttcccaggggttattctttgggcaccatttttaaacttcaggaaattcccacgggacccttccttgcagtacccttggtctgtacctgaagatccttcaaaaattagaagttcatacgcaaagtacccatatgccgaacctgaagattatgataatctatgagatcaagaccaaaacacaacaaatcagatgttctataaatgtgcggttccccaaaactacattgttgtgaatgtagggttatacctgtttttctgcttttgattacaaaatgaatatattgagtgggattcagttgc

SEQ ID NO: 120891 - DNA, 278 bp, Glycine max
  Clone ID: PAT_MRT3847_80170C.1
aattcgagtcgagataacccttttactttttcacctttttttttttccctcaattgagcccggggtgggattctctatacacggggccggcccataatcaccgtctttatgctcgcttcccctaccataattcacctatatccaacttcggccatacatatccttacctgatcaccacccacatcccaatttccatcgtaaactgatcactggctctctggctgtatccagaactgaaaagccaacctccagaaccttaggtttgaacgctgcacttt

SEQ ID NO: 120892 - DNA, 1193 bp, Glycine max
  unsure (1)..(1193): unsure at all n locations
  Clone ID: PAT_MRT3847_80171C.1
cacgcgtccggaccacatgaccttgtcggttgttctgcaagacaaattcttgcagtactagtcagtagtcaccactccttctgagtgtgcaaaacaacctcttcccctgttcctttcctacttggtttttatggatctggatggctggtaggaaacaacacccttctaggccctcttccacaccacctttctcaaaatcccacattacatgtctttcttaatcaatcttaactcttaaaacaatttactctctccactctctttgtgtctcccaaggtgctgtgttgtgttgcttggtgcaattaaagctttctactttctacctcaaatctctatagcctaatattctacccgctgaggtgagtcttatattttattttatctccaagggaccccgctagtagtctcatttccattgaatatgaatttctaccaatttttttttttatccttttctctttgttttttccctaagaaaaaaataataattaaactattcctattccgtcgctatagtggtgctatatatactgttaaatcactcattcacttctgagaataggattgagtagtgaaaattggttggtgggttagcacccagaacgtcaatatcagaataaggaaagaataattgtgggcgtgctagtaattataagtgtttggttgagtctagtcttggattagatgggataaatatgaattagctagggttgaggagagactagaggaagatccacaagcataattaaagcagaaaatgaggaagatgatgatgatggcttaagatagatttattacagcgatcgagtcataattagagagagagagagcatagaaggttgaaatcaaacctagcttgctagatcttggccacaccacagacatcagcaaaccttgatggcaatgagagggcaacaagataaggaaatagagataccaaccacaaccactttaggttacaaccttcccaaccgagattcttcttcttcctcttccaagctctcttctccaactgttggtgaaagaagtagcagtgatcatgatcaacagcatcatcaaccaactcatcaaactcgcacattaatcttcaacgaaacacctcaccataatctctatccaccaccaccacctcctnctnctgctcttgcacctcatcgacccacgtcagatccagatctaagccccccattgct

SEQ ID NO: 120893 - DNA, 174 bp, Glycine max
  Clone ID: PAT_MRT3847_80172C.1
gtaagtttcggtaatggaatcggcagtggctatcaaatgcctctgctgttgcgtatcacatcatgggctcagaggccccccactcctctccggggcagcgctgttccctctcatcacgcttctcgggggggacgtaccctcgggtctctttggagtgacatatcccgtcatggg

SEQ ID NO: 120894 - DNA, 172 bp, Glycine max
  Clone ID: PAT_MRT3847_80173C.1
ggacggcgttttcgtgtccgatggaccggtgctttcgccgtcggaagaagtggagccggatgaaggtcacgcactacgggagtggcgccggctaaatgccattgagcttgaggagaatgagaatagggataaagaattgagactgagcattattgaggaagcttgggagtat

SEQ ID NO: 120895 - DNA, 477 bp, Glycine max
  Clone ID: PAT_MRT3847_80174C.1
tacggctgcgagaagacgacagaagggggctgcatcctacattatagttgagacttttgaactaaaatcctgcagtagggtttatactcattcacgcaaaccctaatcccaaatgctttccttctctgtttctggtttccctccattcccacttcgcagggcatatccaagaagagtaagtgcaagctttgacattgacaccccacaagaccccaattcagtcaaccctaatggctcgaatgctaaatttgaagaagaagaagaagaatttcgaaagggaaaggagagagggagagtgataggtggtggtggggttttcattggaaggaagaagaaggcggggaaggagaaagttcaatgggtttgctgcaattgtgggtacagtgcagggcaatggtggggcatgtgtcgatcatgcagtgtatctggcactatgaaagaagccaaatttagtgatgctgatactgggggtaaggg

SEQ ID NO: 120896 - DNA, 358 bp, Glycine max
  Clone ID: PAT_MRT3847_80175C.1
aatgtttttgtcaatggtttcttttttctttttccgttgtcttttggtgtttttgtgttcttgatgattttcatgccttaggagagatatgaaaagaaatggtcgatgtggtgcctgtagtttggaattggacttgtgggttgaattgggatttgcatgctgaatgaggtgtcatgagaattgagccttttcttgtttgcatgtcgctgtaaactattagtttggtgtttggtaagttctaagataaacatcttggtgggtttatctaatcttttttatctcttgcttcaaaattaggaaataagttggtttctctgcaccgccatagttgttgttctgtgaaaagttaccttccttt

SEQ ID NO: 120897 - DNA, 233 bp, Glycine max
  Clone ID: PAT_MRT3847_80176C.1
aaaaccactttttcccctttttttttggagagagagaattccaagccccctggtcccagggtgatgctttttttaaggggggaagcagattttatcaggccccatagggggggtgaaattttagctctagcaatctagctagaaaagggggttcttgcccaacccacagcacatgaaaatttattttatacacaattttatttttatgggggtcaagaagccggggctaatta

SEQ ID NO: 120898 - DNA, 275 bp, Glycine max
  Clone ID: PAT_MRT3847_80177C.1
atgaaatctctgaggcaaagctggtttgtgaagatctcaaagggaatctgaataaaaaggagtccatcatcaaacatctcagtgccgcaaaagatagacttctagtggattgtgatgacaagttcaaaaagtgggaagacgaaaaaaagggttggtgttggccttagaagaggcaaatgagaagacacagaaccaggaacaacagattcatcaatacaaacaagagattgaaagaatgaaaggctgtctttcagtttcagagaagaagtgtttgg

SEQ ID NO: 120899 - DNA, 279 bp, Glycine max
  Clone ID: PAT_MRT3847_80178C.1
ggaatgaatcaaccacaggtatctaaggtctattcacctatcatcaacatcatccgactatctggcgtctacacatctcggatgaggaaggcgtatagcagaatacagcagccctatctattcggtacgatacggctagaatgagattgtcgtcccagcagtgtcaccagtgagcgcactggttatcgcagcactcgtggaattgcttagtacatacattgcgtcacagggtttctaactcaaactgtatatggtctcattacttgatgttcacagaga

SEQ ID NO: 120900 - DNA, 204 bp, Glycine max
  Clone ID: PAT_MRT3847_80179C.1
cacaccaaatgtctaactcctctcactggccttccttattaatgtcttatgactccaatgaccttcactcttgcattggcaaggctacaaaagcagtcatgtgggcaatcagggtctgatgatcatgatcttacaatgatgggggaccaccacacaaacacccatgtggcgataatatccttggcatgcatcaccactcatcat

SEQ ID NO: 120901 - DNA, 396 bp, Glycine max
  Clone ID: PAT_MRT3847_8017C.1
aattggaatttcggagccggccgacccgtcacgcagtcccatactttattcctttgtcctccctaccgtaaccatgtctcagactgttggggggggacattgatatgtcatgtgacacatatgccttatcagtgctgagagctctagtaaaattgtatggaggggaatcatataacattgatttcaacgaacaaaaagtgttagttaaaggaaatgtccagccagacacatttctgcagaccgtttgcaaaactgtgaacatgactacctcctgtgaacgtgacccaggatcatctgaaactatcacagcaactgcctataacatttgcctctattctgtgcagaacacgttactgcgtgaatcaaatactatttgatggtcttgaaataatgatg

SEQ ID NO: 120902 - DNA, 389 bp, Glycine max
  unsure (1)..(389): unsure at all n locations
  Clone ID: PAT_MRT3847_80180C.1
cacaccttaagaaaaaaaaaacaccaaaaaacacactgtgatagaattcctaaaaaatggtttcagaaaaacagggttagcaaaaagcaccttgcatcactacgcttccaagtattctaggagttatcaaaaaacaaaagggcttgaaggtagcctagttactagcaaaatagatcatgaattcctttcaagaatttgactcatcaaacacggacagtaacagtaccaaagccatcatcaacttcacatcaggtaacagcaccaatttcccaccagcgccaccaccatcatcatcttcaccgccatgttcctcttcttcttctggcaccaccaccctgagccgctacgagaaccaaaagcgccgcgactggaacacgttncggcagtac

SEQ ID NO: 120903 - DNA, 1632 bp, Glycine max
  Clone ID: PAT_MRT3847_80181C.1
tgcaattaagcccctctggtctctcactcggactttctctctttgcttgggacacggccataggtcaaaccaactcagctagctgcatactcttctttttctttcctcacaccttaagaaaaaaaaaacaccaaaaaacacactgtgatagaattcctaaaaaatggtttcagaaaaacagggttagcaaaaagcaccttgcatcactacgcttccaagtattctaggagttatcaaaaaacaaaagggcttgaaggtagcctagttactagcaaaataggtttctctctctttctccactattcttttacccgctttcctgttacgttatctccaccattttccatcaaaaatcttaccttctctctctctctttctctttgagtcttgaaaccctgctgaaatccgatcaaacaaacatcaaacccatttttctatttttttttcttttcttttctctcttacacaccttccatgccttctcttttcaagagatctttcttccttctcctcctcctccttcatctccacaactcttaaaaaccctcctcatcgatccaacaagcagcaacctcactgaatctacaaacagtaacaaagattattactcgtagatccaataacagtaataacacctcagtttcttctcttaacagatcatgaattcctttcaagaatttgactcatcaaacacggacagtaacagtaccaaagccatcatcaacttcacatcaggtaacagcaccaatttcccaccagcgccaccaccatcatcatcttcaccgccatgttcctcttcttcttctggcaccaccaccctgagccgctacgagaaccaaaagcgccgcgactggaacacgttcgggcagtacctccgcaaccacaggcccccactctcgcttgcacggtgcagcggcgcgcacgtgctggagttcctgcggtacctggaccagttcgggaaaaccaaggttcacacgcagctttgtccattcttcgggcacccgaaccctcctgcagcgtgcccttgccctctacggcaagcgtgggggagcctggatgcactcatagggcgcctcagagctgcctttgaagagaatggagggaagcctgaggctaaccctttcggtgctcgcgctgtcagactctaccttcgcgaagtgcgtgattcgcaagccaaggctaggggaattagctacgagaagaagaagcgcaagcgtccccaacaacctcctttgcctccctcaaataatgcaaaagttgtgatttgacaatgggctgggggcactgcaatatgggcacaccctttgcaatggcattagaaaaatattgtgtaaacctaaactgcagtactctcggtagatgcagcagtaatttatgtagtggcagtaataaacactagggagggctgtgcatgtgtgtctgtgacaaatcaacaatatcacaacattgtccgatttgtattaataaaataaaaatgtgtatgaactcttgaagatgttatgaagaaaataataatggatctcaagatcttgtcagtttccatattaattataccttcattcgagtgcagttgttctagtaatttctcttactgtagttactttgttgcattttgaaaaatatatattatct

SEQ ID NO: 120904 - DNA, 493 bp, Glycine max
  Clone ID: PAT_MRT3847_80182C.1
ggtttttggagaatgaattagaaagaaatttctttttcatttcttctatctttctctctctctttttttctgttgttctaatctcaaacacttttttttacaatatatattttattaattataatattgaatgtttaaataataaaaccattttacattctctaatcaacggatcatttggttgacaggttgatgaagatcgtagcgaaatacgttagttagtatgatatgcaagaactcgtgattcatcaaaatatcgaacgcaaattgcagtgtatcttcatggatacatctaggaatgaaagagaggaaagtgaaaaaaaaatataacaacaacaaatttatgagaaagaataaacaattttttttttctttcattatgaatttgttgtaaaataggatcattcaacatttttttagatgttatgatcaaaaacacttttctcaaagaagagagaagaagaaaaatgaaagaataatttgatatttgtct

SEQ ID NO: 120905 - DNA, 131 bp, Glycine max
  unsure (1)..(131): unsure at all n locations
  Clone ID: PAT_MRT3847_80183C.1
ggttgactttcttgcacaccgcaagcaggagcagagccnactcgaggngaagaacaaaacaatgccaccccaccgangcgcgnacgagaagaaaagggaaagaaaagcgcacacggcgcgggccacgaacg

SEQ ID NO: 120906 - DNA, 1184 bp, Glycine max
  Clone ID: PAT_MRT3847_80184C.1
aattcggtcgagggtcaaaccactcagctagctgcatacccttttattcctccccttcccaccttaaaaaaaaacaccaaaaaacacactgggatagaattcctaaaaatggtttcagaaatacagggttagcaaaaagcacctagcatcactacgctttcaagtattctaggagttatcaaaaaacataaggggttgaaggtagcctagcttctaggaaaataggtttctctcactatctttctccactatccttttaccctctttcctgttacgttgtcttcaccattctccatcatcaatccaaccttctctctctttctctgctgaaatctgatcaaacaaacagcaaagccatttttctcttcttttcttttctcccttgcacaccttccatgccttctattaattctctagagatcttcttccttctccttaacctcacaactcttgaaaatcctccttatcgatccaacaagcagcaaactcactgaacaaatccacaaacagaaacaaagatcctactcgtgtagatctaataacatcaccttcttcttctcctacagatcatgaattcctttcaagaatttgactcatcaaacacaaacagtaccaaagccaccaatttcccatcatcatcatcagcagcaccagcagcaacagcaccaccatgttcttcttcttcttcttcgaccactctgagccgctacgagaaccaaaagcggcgcgactggaacacgttcgggcagtacctccgcaaccacaggcccccactctcgctctcacggtgcagcggcgcgcacgtgctggagttcctgcggtacctcgaccagttcgggaaaaccaaggttcacacgcagctttgtcccttcttcgggcacccgaaccctccagcaccgtgcccttgtcctctacgccaagcatgggggagcctcgacgcactcatagggcgcctcagagctgcttttgaagagaatggaggaaaacctgaagctaacccttttggcgctcgcgctgtgagactctaccttcgtgaagtgcgtgattcgcaagccaaggctaggggtattagctacgagaaaaagaagcgcaagcgtccccaacaactttcattgcctccctctaataatgcaaaagttgtgatttgacaatgggctgggggcatgtgaacaccctttgcaatt

SEQ ID NO: 120907 - DNA, 183 bp, Glycine max
  Clone ID: PAT_MRT3847_80185C.1
gaatctgcaaattttgcggtgtgaattttcgtttgcagagaagaaaaagatgcctttgaaggtgttagatgcgacagtgtcgagctttgatggggtttttgacaagttccgatcacaggctccaacaaacaaagccaatctcctcctctgacccagctggtgccctgattgtgtgagagctga

SEQ ID NO: 120908 - DNA, 178 bp, Glycine max
  Clone ID: PAT_MRT3847_80186C.1
atagcagcaggaggacatatgctgcattacatgaggaataaggggggtctaccatgatgcaatgggatctagaccacattaaaaacctagggctaaagaactagactagactctcgacaagagactgctttgtatgagctgctttaaatggcagcataggtcatgtcaacgtcagata

SEQ ID NO: 120909 - DNA, 367 bp, Glycine max
  Clone ID: PAT_MRT3847_80187C.1
gtcaaaacttagaacacaggggagggttttaaactcactgctcacatatggggcctcagcttcttaccaacctcggcaatattcttggctacctaagaggcggatcctacattattgcgatggcattcatccctctcctaaaggacctggggtcacagctctgtcgaacactacggtggaccacgggcgccgttcttgtgttccagcaggcagccactatccgagctgaaatttatttagcgcttccgacctggggatctaattaccaccggagcaaacctcgtgaaagaccttgtttaagtggcacccactgggggaataccctgtccaacctctccccaccttttattaccaacaactgaaaggg

SEQ ID NO: 120910 - DNA, 1091 bp, Glycine max
  unsure (1)..(1091): unsure at all n locations
  Clone ID: PAT_MRT3847_80188C.1
gtcactcttcgtaaaacagtgaagattggacgacctgggtaccgtgtcaccaagcagtatgacccggagactaaacaaagatctctcctattccagattgaatatccggagattgaagacctcacgaagccgaggcaccggtttatgtcctcctatgaacagagggtgcaaccctttgataaaaggtatcagtacctcttgtttgctgttgaaccatatgaaatcgttgctttcaaggtgcccagcacggagattgacaagtccactccaaatttcttctcgcactgggatcctgactccaagatgttcacgctacaattgtattttaaatccaagccgccagaggcgaacaaaccgcagcctgcctctactgccaatggcacagcaccatctggtgtaccaccaaggcctttgcccccaccaccccaaggtccactaccaccacctccaatgccgggatctatgccacctcctcctatggcagcaactaacggtcctagacctgcaccttctggtggaatgccatctattccacccccaccccctgttgcaagtgggacatcgggtttcaacatgggtgctagacctccatcaatgccacctccacaaggttttccttcccaacccatgcagggccatggtgtccgtcttcnctcctccacccccaaacatgggacagtaggtcctcaggctttaggacagcaagcatcattggaagtgctaaacaactgtagtagaatgtgtccgttaaggacttaatgctttgtatggtagaggcaaggtttcttaagcaatacaccaaattacctgtacactcttcattgtgccatttttacatttacaaattaagatgttgaagtatcgagatttttggctttggtggtatttatgtctttggagtgaccgtgtccacaaatttaggtctcagtagcttgatatgattggaatattttggtttgttgcaagtaatttaggatcaaggcttgatcgggtcatttatgtagtagtaactacttgattatggggaatcacaggtgatacggtttccgcaaaaaaaaaaaaaaagggcgccgctcgcccacgcgtccgct

SEQ ID NO: 120911 - DNA, 296 bp, Glycine max
  Clone ID: PAT_MRT3847_80189C.1
gaaatttttattgatcgtgaacacaggatgccgaaccttaaaacacggcaacaaaagcgagcgttactcgattaaaagaatccttaaattgctacctacaatcaagtgtacgaaatcttatgggaaagagaatgactgtatggactggccacatacttcgtaaaacatcttcttatgcactctaatgttacctgctgaacactctcctattagatataggactacgcgctagataaaaacgtgatctgtgaatttcgcagttgtctgttgaatggaaagccgaagcacaggaaatg

SEQ ID NO: 120912 - DNA, 177 bp, Glycine max
  Clone ID: PAT_MRT3847_8018C.1
tacagcagcgacaattcaacatgatggtattgcagctatatatagagatactaatcgtgttgctagagcatcatatcattgtaggggttacagctgaccacataagggtgtgcttcgacaagactagtgaatcatcatgttacgataacactacatattgataccgctgctgtaata

SEQ ID NO: 120913 - DNA, 1439 bp, Glycine max
  Clone ID: PAT_MRT3847_80190C.1
tacggctgcgagaaaacggcatcgagaatggggatctcagctgaaaatggatcgagaatggggatcgaagccggggagcggaggtgcggcgtcggcgcagaacgaagccatagaccggcgagagcgtctccggcgactggctctggagaccatagacttggcgaaggatccctatttcatgcgcaaccacctcggaagctacgaatgcaaactctgtctcactctccacaacaacgagggtaactacttggcccacactcagggcaagcgccaccaaaccaacttggccaaacgtgccgctcgcgaggccaaggacgcccccgcccagccccaaccccacaagcgcaaagtcactcttcgaaaaacagtgaagattggacgccctgggtatcgtgtgaccaagcagtatgacccggagacaaaacaaagatctctcctattccagattgaatatccggagattgaagacctcatgaagccgaggcaccggtttatgtcctcctatgaacagagggtgcaaccctttgataaaaggtatcagtacctcttgtttgctgctgaaccatatgaaatcgttgctttcaaggtgcccagcacggagattgacaagtccactccaaatttcttctcgcactgggatcctgactccaagatgttcacgctacaattgtattttaaatccaagccgccagaggcgaacaaaccgcagcctgcctctactgccaatggcacagcaccatctggtgtaccaccaaggcctttgcccccaccaccccaaggtccactaccaccacctccacctcctccacaagggctacctcctggtgcacccatggcaaatcctcctagagctcctccacctccaatgccgggatctatgccacctcctcctatggcagcaactaacggtcctagacctgcaccttctggtggaatgccatctattccacccccaccccctgttgcaagtgggacatcgggtttcaacatgggtgctagacctccatcaatgccacctccacaaggttttccttcccaacccatgcagggccatggtgtccgtcttcctcctccacccccaaacatgggacagtaggtcctcaggctttaggacagcaagcatcattggaagtgctaaacaactgtagtagaatgtgtccgttaaggacttaatgctttgtatggtagaggcaaggtttcttaagcaatacaccaaattacctgtacactcttcctttgtcatttttacattttcaaattaagatgtggaagtatcgagatttctggctttggcatttatgtctttggagtagaccgtgtccacaaatttaggtctcagtagcttgatatggttggaaaatttttgcttgttgcaagtaatttaggattaagactatttgattatggggaatcacaagaccgattattaaattgttttt

SEQ ID NO: 120914 - DNA, 470 bp, Glycine max
  unsure (1)..(470): unsure at all n locations
  Clone ID: PAT_MRT3847_80191C.1
gagaaggagtaaaatattttccagtgttctttttttttttgaatttttcttctgccaacaggggagtcaaatctgctagatgccggtttacatcatgggagattatgtcactgtctcgaccactcaagaacacattgcaatccccattgagaaattgaatgcattatcacttgaagttgcaaaggaagaaaaacatgtaaccgatgatgcatatgtggacaatgtccaaaaacctgaagagaaagatgaagaaactcaagaaaagggagattgtcgctactgtcaagaagaggactttatttttaatatggaatcaccctgcaattgcaatggtagcgtgaagtatgttcacaagagatgcattgatcaatggtacaattccaaaggccgcatgatattatgtgagatttgcaggaagccttacaatccaaatgattacccacttnccggacttcattatgatgatgatg

SEQ ID NO: 120915 - DNA, 344 bp, Glycine max
  Clone ID: PAT_MRT3847_80192C.1
caaccttctaaaaacagggatatggatagtctaaattgatggttcattggtatatattattcaattagacccactaataacttaaggattttattttccttattcttgtaagacttatttttgctcacataagacctgactatattggggtgacgaggatatttttacaccggtctttagtgatttttatacaggatgaatcttatatacgacgaattcaaggccccaaagtctaccaaatttagcaaacaaaatttcatggctgcaacgatcagcgggtctaaagaattataaatcttggctcatcaaagtatgagcctttgcccgccccactcttgtgagca

SEQ ID NO: 120916 - DNA, 411 bp, Glycine max
  Clone ID: PAT_MRT3847_80193C.1
tggcttcgaacctttgggctgatttatgtgcttgcatggtcgtgagaagatgatagaaggggatgtatgtccgtatgcgctgctttcccttcttgactctttcgaaaacattgtaatttcccgactcttgcccaacctttcccgtactcgaaagaagaaatctatagcggtccatggctactgaccctacagactcaccaagaccactcggaacggtagtaacccatagctcccatactactaacaaactcggcggaccaactcaccacaaggaccacgggctcgtcggatgaacggacattaacgacagtccgtgggcggtgagcccacggtatctaacgtatgtcactctctagtagccactattcgccctaagccggccaggaaccgaatccccctaagtagacatac

SEQ ID NO: 120917 - DNA, 398 bp, Glycine max
  Clone ID: PAT_MRT3847_80194C.1
ctatcacactaatatcattcgaaaatctatcttcctcacgggtgttctcttacaccctactatattctccaactctcaaaaacatcccttatacataaacaacaccacacgctttcacatacaccatagacattactatgattactcctacatccatcaaacacaagcattatgactagtatatactttgcaactcacacgtatctagaactacacataatcaccaccaccacaaaatcttttctcaacaccatctaccaacaactatcgacaacatcactgcacacatacattaacttcaagcttcacatgaaaaaatgacaactcttctataataaaaccacacaatctatatacacaaatatttggaatcacatactataaacatcacgtactta

SEQ ID NO: 120918 - DNA, 430 bp, Glycine max
  unsure (1)..(430): unsure at all n locations
  Clone ID: PAT_MRT3847_80195C.1
agcttaaatggaatacattttttttatagccctgaattggaatacttaaaagtggaatatgaaagcaaattagcccagaactgtgtaaataattactctatgatgactcggaagcacattagttcattcaactcaagaacaatgatgcagctctaattgatcactaattaattatatatatgatgaatttcaccaatcgtcatgccacttatcccacccatttcatggtattagtaatgtgcatgacattgacctggaatcacttggtacnggatgctacaccaatgtctaattaaacaaagcctaggcctatacttaaattttactgactctctcttcttgatatattgggccttccacatcagttttttcaacatggcgaaggactaattaagccttattaggattaatggtatcattccttggagct

SEQ ID NO: 120919 - DNA, 297 bp, Glycine max
  Clone ID: PAT_MRT3847_80196C.1
ctttcactcttcttcgtctcaaacctcttcgttccttcgattcattccatttcttccaaaatggccaaagacccagttcgcgttctcgtcactggagccgcagggcaaattggatatgctcttgtccctatgattgctaggggagtgaagctgggtcctgaccaacccgtgattctcacatgctgaaattctcaacacaaatcgttatggggtaaaaggaattggtgagcgcatcctctctaaggtgtgtgctaaacgattggttaggcagatgggtatatgcttatggtgtgattc

SEQ ID NO: 120920 - DNA, 375 bp, Glycine max
  unsure (1)..(375): unsure at all n locations
  Clone ID: PAT_MRT3847_80197C.1
gcctgatagatntgagagttactctctatntagcactgaagctcatcaatcctacttagcaatgatatagctggaacattttagaggcctcctacgataccaaatatctatgagataaacatggttatgttttgttagaggaagggctagtgcactgtgagcgaaggctgcaagatagcgtgattgtggaaatctcgttagaacagattcattctctgatcaaacttgccaaatctagttcaaggaaaaccatttcttctgaggataaaccttttaactcgagaagccaccaccgcatatactataacaagcttggctagttctctggggtgatctcacagaacaaccagcaacttatggacttggatatcttgc

SEQ ID NO: 120921 - DNA, 336 bp, Glycine max
  Clone ID: PAT_MRT3847_80198C.1
aatttgaagagcataaactatgaattctggagaacaaatttccctaccattacattttttgtctcttcctcgtacttttctttcccattgtaaaaatagtatgagaaactgtttggtgaacaaatatgctggagagatttgactgcttcatttattattatttattgggagaagaggactggtttctatatttgtaaatgcaaaaattaccacttcgagtgaaattacattgtggaactaccaattttacgagaaaaataagtgttctttcggtgatgaattgtaattgcaatatctatattaatattcaaactataattttattttgttttaaaa

SEQ ID NO: 120922 - DNA, 398 bp, Glycine max
  Clone ID: PAT_MRT3847_80199C.1
gataccatctttcgtggaattagtgtgataacttggttagacctaatctgttaattgtcattaaatgtcatccctggaatcggattttgttgttggttgtaacatagtaatcagattgaagaggacgattaagttaatcagagcaggggagaccactctaagttcccatttgcttcagtatgctaaataaaacatcagtttgctgttgttgtacaggccctgtcattggttttcagaaaacaatatgccatgacgttctctgagcgtaactgattgcaatttgcagaagaccattgaagcacgtgaccacaattttttagttgctcaattacgtatcaaattctgattacactgtcattatattgttaaatgcgcaagcagtatacacttggttcaat

SEQ ID NO: 120923 - DNA, 367 bp, Glycine max
  Clone ID: PAT_MRT3847_8019C.1
tttttaactacgtaatggttgatttcttaatatgcaagcctaatgaaaaaacattatccttggaccaaaggcttgtactcccacctaaactatagagagtgacagattttttttatgctctggcgtcatgcagatataggctaaataatgcacactatacgggcaatgccgggtactgttcatcaggggggaaggcggtagaatgcatctcccccaaagtcgaaagctctatgttgacaggtgaaggggcggttacctactaggaacattgttatcaacgtaagaggcaaatgccgcctttgaagactttatgttggaagactcatttaccgcagttgatgccaccacaaacggaaagaacaataat

SEQ ID NO: 120924 - DNA, 649 bp, Glycine max
  Clone ID: PAT_MRT3847_801C.1
ccacgcgtccgctcccccgtcccccaattccatatccatttccaattgatactggtctatgcataggtgaacctgcatttgttgccatgattaaggaacatcccaagttatgtcaatctcatgatgaatgcatgaagaaagggagtggcaaattttgcgctcgttatccgaatcctgagagtgagtatggatggtgtattgactctgattctgaagccctaaaaggcttcttgaagatgcctacaacatttgccgagtaacatggtatgcccaatgaaaaagttgcacacaaagatgcgtctactacttcgaataaatgtgtgctccatgcaataagtagtttttgtttccaactcagttggtaatgatggttcatgtttgtttttgagcctacaagtaatttttcttttggatcttgatatccaagtattctttggatatatgaattattaattatagcctaatgtcagtgtatattgttctcttgtgtggtaaactagtactgccaaactggtaactctaccattaggcatttacttggtagatgtatgtttatttttatgattaacataaaggggtactttaatgagttgcaaactgaaattgggtgctatttgaagaggaaaaggattggaatggagtttctgct

SEQ ID NO: 120925 - DNA, 405 bp, Glycine max
  Clone ID: PAT_MRT3847_80200C.1
gaagatgtgccttaacaacaacaacaacaacaaattggaaaacgaaacaacaatggatggtttggtgactttcctagaccagacaataacaacactggcctactttttgggtttcaacaaccaaatagaagcaacgggaatttgggtgagaacactaacttagttcccaaacaacctcctcctcctttatcattaaactcaaaccactcccaaagacaagcacaacagcaccaacaacagccaccaccactttttccaaagccagcaaatgtaacttttgcagctgctcctatgcatttgttgaacaatgcacaacttgctagccctggcagaaagagagggttgattggagttgctgagcattcgatgaatgttggaatggttggtttagccacagctaatgtc

SEQ ID NO: 120926 - DNA, 246 bp, Glycine max
  Clone ID: PAT_MRT3847_80201C.1
gtgtctcgtggagattggggtttctcttatacggctattacagggtgtggcactacgggtgtgcagagagagcgacgactatagaagccatacggaggtgttatgatgacgacgggtggtgagagggtgggggttaatataacacgcactaggaggtcaccgatctgggtgttttataaccatgacgccatggaacctgcactgggattccataacgtcgtttttcatctctgagggaatactggt

SEQ ID NO: 120927 - DNA, 459 bp, Glycine max
  Clone ID: PAT_MRT3847_80202C.1
ggtggagaaaatggctgacgagctcagtaggacgtggggcggcctccattgcataggaaatttatcctcccaaggagccctccaatttcctgaacgaagggagctaacgagactaatagtgaaagctgtctcatgctgattgcaagaatgcaactataagcgatggcctcgggatgccattaaccgtcacttctatgacatccctagtgacctggctttcacacaacccctaatcctcttgtaacctatgtctgggcgggatgattacagggtggttcccaaatcttacccattgaaatctacttttcctatgactaactttcgagaccaggaattcatgttaaatgaattgaacttttgctttaagtaaccatgtatgcggcaaagacttcttaaagatgtgtgtctaccgcctgacacattaaatcctccaacatgttggatgtgtgatgcatatcc

SEQ ID NO: 120928 - DNA, 531 bp, Glycine max
  Clone ID: PAT_MRT3847_80203C.1
ccaaggaagcgtttcccgatcatcagctgtatgacgatcctccttgctttgggggggggggggggaagcaatcgtaggttaggatggataacggataatagcgcaataagagatatctaaaggtgctgcgtacagagtgtggaaccaataaaaggtgggatggagggatagtgggcgacggaagaagttaagacaaacaagtggaggaaacgggaatagaaaaccgaaaaaaaaagtataagtaagacgccggtagcgccaaccacccgtcgaaacagcgcatggacagggcgatgtgcgtaaaatatacggtattttggtatgggtttatttgcgaggggaacggcgtgtagtataatagtgattggggttatagtacaggtagggtgtagggtagggccacccacaggttaggtacggtacttagcccgcggctacgtatgggtctctcggccgtctggtggcctctaaaagtaacacgccgacaacaaaggtcaaaatgtgcgactgtaggtatcaaaaggagaggga

SEQ ID NO: 120929 - DNA, 508 bp, Glycine max
  Clone ID: PAT_MRT3847_80204C.1
attgttggtttagttttatcaattgcaatagactaaatcaatttatgaacacccttatctccaacgagttggtttttgacatgacattatgacatcatttggtccatatagccaacccaacctggtagaaagtggtttttgttgtaaaaagattcaaaattgaactccttttccatgtaaacactcattatcataaaatactagtagcttaccttggatatcaacatcacaccctactttataatattgagctggagccaattgactgtattgagcttcaagcgcattggcaaaaattcaacaaggatattggataatagtgaacattacaaaaatctttctaagcaaataaataaaaagctgaaaactttaaacttctactcatacatacaccaaaaatttatcaaacagaacagtatgcaagcttacctaggtatgcaatatcaaaagagcactatgaatggtatattattcttgggtttaagagagatgactccccagacagtaa

SEQ ID NO: 120930 - DNA, 394 bp, Glycine max
  Clone ID: PAT_MRT3847_80205C.1
ggatattccggtcggcgtgtcgggttctgtcgttgtcgtcacggttctctattgtcttatggcagcatccatgaccaaacttctcccttacgatgtgatcaatgcggaagcaccgttttcggcggcgttcagtggaagatcggacggttggggatgggtgtctcgagtgataggagtgggggccagtttcgggatattgacgtcactgttggtggcaatgctgggtcaggctcgttatatgtgcgtcatcggccgctccaatgtggtcccctcttggttcgctagggtccaccccaaaacctctacccctgtcaacgcctccggccttctttgtatcttcacagctgcaatagctcttttcactgatcttgatgtcctcttaaatctggagggg

SEQ ID NO: 120931 - DNA, 411 bp, Glycine max
  unsure (1)..(411): unsure at all n locations
  Clone ID: PAT_MRT3847_80206C.1
ggcgggcganaatctcatcctcactttctatctctctcttctctaattcacacataacaattcatatggggttgtcaatttagctttcaagacccctcaactcttcccaattcatcaccccattttccctccaaaggcaccactttaccaccaccaattttcaactcatatccatgtcaacaatgtcctaaaaagttcatcctttaatttgtcaaaaatcatcaaaacatttctgttgacttcattttcaccaatatattctatacaggaaatttcttcaagcttcatcaaaaattccattccagtttgtcttcttaaaattgtatcctcttacaataatgcttcaaatctattttcttttataatattaaaaaaaatttcacaaattttaacctcctaataatttttttt

SEQ ID NO: 120932 - DNA, 708 bp, Glycine max
  unsure (1)..(708): unsure at all n locations
  Clone ID: PAT_MRT3847_80207C.1
gatcagcaccaaaaagctactataataatttgtaattatacaggccttgaaaattaatatattctataactgtcacaaaatagataaatggtctccttccaacaagacattaataaacttaaaataaagtaaaaaaataaaaataaaagcaccaggaagcaaatgtatttacaaacatacccccacccaatcatgcaacaacattgccatgaaggaagagtaagaagaggcaagatgaaaatgaagctgccgagcctgttgtggtgtcaactcatcagctgcacccatctttgacacccttgtaagtcattccttcatttttgttttcccctcaaaatcatgtaacaaagtaatgcaattgtaaagacaaatataacatatattcatcaatcatgtggggatagatattattaatatatctccaacatcaacataggcgttcagaatggcctcagcaaagttgtcatacatttctctctcgcgcttgtgttccatgtctgaaactgaacaccagcacacactgctttaaccttgtttttgtgagagtgggggattggagaagaggacgagacacgcgcaagagaaaagnttaggttctgaagagcaaactaaactaaaacccaanagaaagtgagtgagttattatgtatatgangaacagaagggaaaatggatctaacatcatttttttgcagcattagatgaccc

SEQ ID NO: 120933 - DNA, 1592 bp, Glycine max
  Clone ID: PAT_MRT3847_80208C.1
aaatgtgactcttcgcattttactattcaagtatgagttattggaaactctcttcaggtgtattttattgtcacggattaaaaaaaatccagcaagtgactgccactgtttacatctgatccaaaaataataggttccgaaacaaacaataaaaaaacaaaaaatataaaaaaaaacaattgacaaattgcaaatgtgcaatcctcaaatctttctccaaacaaagatccccaagatgcctccttgcaagtactttgcaattccctcgattctcttcttcctcctaagcttcttaatctttccaaccaaagcagctccaatttacagttcccatgcgtgcacagactcttctaaataccaaccaaacagcacattccaaaccaacctcgacctcctcctctcttacctttcttccaacgccacccaaggcgcccacttttacaaaacaacagttggcagtgaaacccccaacgccgtcaagggcctctttctctgccgccgagacaccctcaccgccgtgtgccacgattgcgtcaacgccgcagccaaagacctgacacgccggtgcccagttgagaaagaggccataatctggtacgacgtgtgcatggtacgctactccaaccaaaactacctcaacaacatagtacccgcagtggacatgtctgactccaaaagcgtggctggcgctgatcttgaccggttcaacgaggtgctggcgggattgttgaacgctctggcaacgaaagctgcgaattccgaggatgagaagttcgaaacaggggaagtgaacttgacgagttcagtaaccctttatgggttagtgcagtgcacaccagagttgtccttgttcgattgcaacatgtgtttcagaagcgccattgcatctgttccaaattgctgtgatgggaaacaaggggcaagggtgttgcttcccggatgcaatatcagatatcaagtgtatccattttacaatagcactaaaatattggccacaccggttgtgaagtctcgtccttcaggacggagtcgggttgaagtgattcttacatttgttatccctattgttgctgccatggtgcttttcacttttggtatatgtcatgtcatgagaaagcaagcaaagagtctgaaacaattatggaggaaaacgaattactctgaaggtgtagatgagattgattctataaacttacggggataagagatagttatcggtagtttaatgggacaataatgcaaggcaaggttgaaaacgttagattgctaagctgtgtagtgatgaagtctctgatgcattcatctacctttttgtctttcgaatctgtgcaaaggatgcggttgcattttatcgttcaacgggcaatttggcaattggcatgtggttgtgacttgtgagattgaagtagtagctctctgcatcagcatccacaatgtctatgtttgctgtaattacttttccagcttgagtcattgtttagatgtaaaaataaacttgtttaggttagatatccatgaagcatgtgtgtggatagtgtttttatttgagtaatcattatcttacatatccaaaaataattcacttagtattt

SEQ ID NO: 120934 - DNA, 432 bp, Glycine max
  Clone ID: PAT_MRT3847_80209C.1
aacggaaggaaaaaaaaaaaaaagatgcagaaactgcgggggtggtaaagtgtgggaagaagaccgttcaagtgttttgatattggtttgggacgaggagtaagttaatttgtgtagcgtttccattaaaacggcgtcgtaatcatacgttggtattcagacagcatgaaaactcctatttcgggtttctacagaaaccccctgaagttcataacgccaactgacgagaacttaaaggagtatctaataagaccctcaacatatttacaagcaagcctaattccacttccaagaaaactgcaaaaaagtcatcttctaactggatgttttattttgggttggcaccaacggcaactgaatcccttgtgcaaggtgctttccaagaatggtcactggcttgcttcatagcattttctagtgattaaatcaaga

SEQ ID NO: 120935 - DNA, 149 bp, Glycine max
  unsure (1)..(149): unsure at all n locations
  Clone ID: PAT_MRT3847_8020C.1
aagacgtggaggctagctacactgtgtagctgcttgatggatgtcaaaaaatgtgaaaccaaacatgctctataagtnacttttaattttgacaacttatgtatggttatatgcctttgatagagtatatcattactccacacacatnt

SEQ ID NO: 120936 - DNA, 287 bp, Glycine max
  Clone ID: PAT_MRT3847_80210C.1
agacgctcgaatttacatagactgaactcgaaagcgcaccagagtgcctccctattgttatttttcaaatacctaatctaccgtcgaacctcctctttcaagaagaaggacgccgaccgaatcgatcagctctcgccgatcacaattcgagggaaagatgcacgaggtgtgggtccatagccgaccagaccgtgatgtaaggccgagtgatcacggtcgtggtcgtgccggagttccaccggctggaggagatcgacgcctgcgcggcccactgcgaggtcaacatt

SEQ ID NO: 120937 - DNA, 228 bp, Glycine max
  Clone ID: PAT_MRT3847_80211C.1
acaacctcaagcgccatccagaatgctgtgcccttcattgattaaacgacattcaaatttggttgtctttgccaatccaaaatctgccagcttgacagatccacttggatacaccaatatatttgcacatttaatatccctgtgaaccacattgcgatcaagaagatactttaaaccatgcagaatctgactcgtataggcagagacttgggaatctgaaagagttac

SEQ ID NO: 120938 - DNA, 286 bp, Glycine max
  unsure (1)..(286): unsure at all n locations
  Clone ID: PAT_MRT3847_80212C.1
accggcggggacaatatccaccacttcgagcctggacatctggaaggggaacaacgcgctctagcttccggatggccccgatgcgaatgaattggacctagtacttggaaccctctttgtggttcacccaatcttcttcatcggcgaggctaggaatctggaggacaagctccctgangctgccagggggaacgcttttctcctctttggcagcgattgcggcagggctggacgatttcactgtcacaccatgcgggaggcttccgtatattcttggatgggagtg

SEQ ID NO: 120939 - DNA, 497 bp, Glycine max
  Clone ID: PAT_MRT3847_80213C.1
ggggggggaaaaaaaataaaattttttccccttttgaaaaggggtgcccttcccttggggtgggacaactttctttttagcaacaaacaaaacttacatacaaatttttaggccccttaaaaccttgttttttaaacaaaaaaaaagttttttttcaataatctacataaaaaaagtttacctggagattatcgaaaaaaactttaattttggggaaaaataaaaacccatttttcttataaaatcacctttaaattttatccttcaaaaaatgacacaagccttgggatttttttccatgcttggagaaaaaaaatttggggtcatgtaggggttttatgccctttaaaccttgacccattccaaaacaggatttgggggggggtttttttttttaacaccccccttttattattgtttcttgccttattccttatttcccccccttttcttttctccctccttctttggttctggtttctagggaaccccctttt

SEQ ID NO: 120940 - DNA, 1056 bp, Glycine max
  Clone ID: PAT_MRT3847_80214C.1
gtcaaacacaagtgttatgcaacagataccctagattcaagcctacatgcaatgtgataccatttttcagtgaaaaaccttgtcgggcacctagaagtacacgatgagacatgcctcacaatggctaaggcaggtcactctcactaagtgaaatcttagggagatcagttagggtcactctgttttgcgagaaatgctccaaccatgtaggatcaacacaagcttaaaagagcactcaaactcagtgtatttccaaaattattttaactcatcgcacctcaagtgattaaactcgtcaagttcccaccgtgaaacccattaactcgtcgcccttaaagagtcttatatttgtgtgattgcagagttcatagctcacaactcaatacatacaacatctcagcacacaatctcattaaataataatattctctaattacaacataataataactttcgaggtcatgtcatataacattacaaaatcataaacatcaattacaatagaaaaccatacccatataagtatttaattatatgtatgataatactaataataaaatataataacttcaaagcttctaactatatggaaaatatatagtcattgttggacacatatatactataataatatgagtatatatttttaaatgtaaaagaatgggttcgtgaattgcaaactgattcctaaagtatacttaagtaaatatatatcacatacaaaattacaatctaaaatgagttgttgcagctgcatcactaaataaatttataaatttatactacgagtcaggatcttatctatatattaaaaacatgtatgaatgtacactaattatattgaaaatgcaaactacaaggaattcaaagcacaatttaattcaatatttataccacaatacaccaaaattcaaccaaaaattactacataataatttcaataatttagaccaaaattagagtgaagcacttaaagttttgaacccattttctatggcatgcatattcatgtaactcaacgagccaaatacaaaacaagaaacaaatacaaaacaa

SEQ ID NO: 120941 - DNA, 329 bp, Glycine max
  unsure (1)..(329): unsure at all n locations
  Clone ID: PAT_MRT3847_80215C.1
acaacatatcanaatgctcaaattatctttcttgcaacaactaatcctccttcaaaacttgatgaagcaatactttcgcttcttcctcaagcctttgaaattgtaattccacaccaaaaggagaggtctgaaatatttaaaattatcttaaactattacaatattcaacacaacataaacttttgtcatatacatgttttttctgaaggttacactggttcacatctatttgatctttgcaagaaacctgcctattttcctattacacaactactggatgaagagaataaaagaaaacaatctcatccccctatacctttgtcccattt

SEQ ID NO: 120942 - DNA, 613 bp, Glycine max
  Clone ID: PAT_MRT3847_80216C.1
atctgagactctttctcttgaatcgctatccattccttgcgcagtgggacaagcatcagaaacagaggcaaaaacttgttgccattccacccaaattccgcgttctttcgctgatccaacgttttcatcattctctccactgtatacccagaaaatctcctcgccaagggttgctctcgggggatattgatctcatctcagacactagttacctgaatctctgtgattttgatcactcgaagctttgatattttgtatggttttgaatgatttcatgcttcagggtttagtgtagtagggcttgattgtgttgaatatatgacatggcttggacaaccctcaaaggttctcccagaatgtcttctcatccaaggcctctttcttggattgtgattatggtgggagcactggcatttttcttaatttatgcttcctgggttcttgtatcatccccaattggtgccacggttcagggatatttttatagtgtaggtagttcagagaagctagatttgcctgtgtcttcagtgaatgaagcttctattaatgatggtcactcgaatacgagtttagatcttgttgataaaaacccttcctctgaggatctgcaatc

SEQ ID NO: 120943 - DNA, 450 bp, Glycine max
  Clone ID: PAT_MRT3847_80217C.1
cttttctcgtttcttatggaacaaatattactccatgattcactaaataggcaaaaatacatgtgaatcatacttatccggctgcacaaggacagtgttgaaattccgacctctcataactaagcactcctgaaccactaaaccttcttgactcaatcagaaatacctactcctcccaggtttataagaccaaaagagctagaaccaggcgaggctaggcacaacacaacacaccacactctggaggcgaactgtaacaacacaccattcactcggacactgtgcttcttcctgtccaacacaaacttgttacaaaggcagagggctgcctttgagactccctagcactatttgtaccaaccacttccttgccattattttcagaagcgactggcacactagagctgtttatgaccctagcacgaagtgaatcagactcatgctgaacct

SEQ ID NO: 120944 - DNA, 966 bp, Glycine max
  Clone ID: PAT_MRT3847_80218C.1
ggctcgagcaaatctccttcaccttccaattttcctccattgtttgactgccagattattatcacctttccaggacccaaaataagagtatgacatgatgagaccaaccaggtttgatttaatttattggaaataataacaataatattaaataatgcgttaagcatataaagttttggcataaatagggtggttgattgaaggttccttctactactacttcttcttcttcttgtcttctctagctaccttatcatcataaaaacactaaacgcccctctatactctctctaccttctttcttgtatccgtcttaatttctgtcgctatggcttcggatcacaccatgagctttcattcttcttccttacacgaagaggacttcgatgatgatgatgatgatcacctacacccccacccccacaacttgtcgaggctctccgtctgcactagcagcacctttggcgacaacgaccatgttgacaatctcgcctccatgtgcgtctcacacttgtccattgaaagctttgacgcagatggtgtgttatcctccgactctgaaaacgaattggggagtttttactctctgccctctactcccccacgaaggaggaaacaggttaaggactatgcaagtgacaatgggaatgaaacaaagaagagtgatccacgaagaaggagaagaccatcaatgatggggtttgacggaagggggtaagaatagacagaggacatgagacgcctagcggggagagaaaccaaatggaactgctcttagttattctacgtatgataaggaattgtatgccttactcagagctttgcatactgatcagcattatctcttgcccaaggaattagttattcacagggatcatgagttgtgatatacttgaatggacaaggaaagctgaacaagatgcatgccaagcgggtcgaatttcttgagcaattcccctatgtgat

SEQ ID NO: 120945 - DNA, 402 bp, Glycine max
  Clone ID: PAT_MRT3847_80219C.1
tatcttaaagattttattgacagtaacaacactttaatatttataaataaaaaattaaatatcatactcattatatatttataaataaaaaattaaatatcatactcattataaaaaaaagtatacacatatctcaagtcaaatctcttggtgatataacaataaaagtcaaccaaatactcctgttttagtttttttttttatatttgtatttctctctattttgttacaccacatcatcacttatattggttactgatctgatctctcatatagtcatattttagtatctgagttgtatcataaccaatatttactccaaaacaaaatatctttccgttcatatatgcgtcaagtcaaaagctttatatatgtccgtttagtgaagagcaaactggatta

SEQ ID NO: 120946 - DNA, 278 bp, Glycine max
  Clone ID: PAT_MRT3847_8021C.1
acggctgcgagaagacgacagaaggggagtgtaagcaaattgagctttcaacaatgacaataccaaatctcacccatttcaggtaacggtgaataagaaacaatttggtttaattttggagctgaagtgatgataagagtttctttgtcgcattgatgaggtaaaactttccctccttagctactacctttttggcattttggcaaccatttacaaattgagcataaaggaaagagctgaaagtgtgccaacttttttccttaaagattctttggtat

SEQ ID NO: 120947 - DNA, 254 bp, Glycine max
  unsure (1)..(254): unsure at all n locations
  Clone ID: PAT_MRT3847_80220C.1
cacgagccgtaaattgggagagcanagcaccaccaccagcgggggcagnagcgggagaggggggacggcacccccaagaccanggggcaaaagcannaagcgacggcgaaccaggaaagggcgacaacaaggaccccgcaaccacccggcccacagggaaancngagaagaggaaagaagaagaaaccccaaaagcnagacagaacaacgcagcaagaaaggcaagagaaggccaaagaaccgacaaaccaaag

SEQ ID NO: 120948 - DNA, 475 bp, Glycine max
  Clone ID: PAT_MRT3847_80221C.1
ctgcgagaagacgacagaaggggtcatgaatagtgcactgacaatttttgtggtcaaaattgcgtgaacagtgttgtgaatagtgcattgatagttttttgcgataaaaaaatgatctataataacgtgaacagtgttctgacgcgcacaatgacataacagtgatgtgaatagtgttctgacgcacatagtgacgtgaatagtgttctgcaaaattcttggcgcgcacagtatcgctacaggattcctgacaccgatagctttttgtattttttttaaaattatgtccaacacattactaatatccatgacacatttttttttgtagtttaaacgtcaaagaataaaaaatatatcgtgcaccaattccatggacaaccacctcaaaatatgagaacaaaataaaaaaaaactatgatttggacctttgcaacaaagcttaagtgtccatattctgtatttttttaaaattatg

SEQ ID NO: 120949 - DNA, 187 bp, Glycine max
  Clone ID: PAT_MRT3847_80222C.1
aattgatcaatcatatgttctatgttcgtgaatatgcgtggaagtggagacaacctgttgataaatttgtagctgaccctgtatgtgtctgaactttaacactgattgatgaaatttgcagctcacttggtatttattcaaggagattggatcagatcaagctacttcaatggaggttctgagattc

SEQ ID NO: 120950 - DNA, 294 bp, Glycine max
  Clone ID: PAT_MRT3847_80223C.1
tttagacatggagctacaaagtcaaaagaaaattgggggttgctggtgatgaatattgaaattttagtgtcaggaacgtatgattgtgcatttgtacttggaggaagaaacaccaaacgagaactgaaaaagaaataagaaatacacaaatggcagagcttctgttattcttgaaaaaaaaaaaaaaaaaaaaaaaaaaaaaaaaaaaaaaaaaaaaaaaaaaaaaaaaaaaaaaaaaaaaaaaaaaaaaaaaaaaaaaaaaaaaaaaaaaaaaaaaaaaaaaaaggggggggc

SEQ ID NO: 120951 - DNA, 594 bp, Glycine max
  Clone ID: PAT_MRT3847_80224C.1
cgagctagtggagcaagtattacaattcagagacccaggggtgtgccaggagagatgactgttgagataagtggtactgcttcacaaatacaggctgcccaacagctagtgcagaatttcatggctgaagctgcaagtgcggcacaggatcatatggggggttcaattaaccaaggttacaattcctatcctacaaatcctgtctatgcatctccgccctcaagtgctgctggtcatgcgggccatgcaccttctgcagattatggttccgtttacggcaccaattatggctattgagaacattactttacattcaattttaaatgaggagccctacgttttgtaaacattgagagttcaatttcagttctagttctcgtgggtattgcaaccgggcctctgcgtgtcctgtcttatatcccctatattttcgctgtactacatttggcataatgactgaataggatttagagcatatgataatttggtagtttttcatttgctcacaactaactttttatagggttttttttaatcctaaaaaagatttccctgctttgatccttatagaaatgttttcgtataattaaggct

SEQ ID NO: 120952 - DNA, 298 bp, Glycine max
  Clone ID: PAT_MRT3847_80225C.1
attctatatctccgcgctttctcacagaaaaaagggaatttacattggcatacaaaaagatgctgatcgcctataaatttcctacctctttaaactgcaaaattttccgccggaagaacgtacatggggggagaggcaaagccgaaacccttgtgttcagacaaactcaagaaacccccctggctaccgaaaatggttcttctaagaccccagcacttggcaacggaagaaataatgtaaagctggcatatgagaaattatggatgttgttccaccctcggaaattcaaaggggggac

SEQ ID NO: 120953 - DNA, 385 bp, Glycine max
  Clone ID: PAT_MRT3847_80226C.1
ctagagagcgagtacgtatctgctcattagagccttgcggtgcttatgaataaaatcaacaggattttcagcccaagcaccggaaggctctagagagcgagtacgtatctgctcatttgcatgagtggattgacctcatatttgggtataagcaacgaggcaaggaagctgttacagcaaataatgttttcttttatactacctatgaagggacagtggatcttgataaaatctctgacccagtacaacagcgtgccatacaagatcagattgcttattttggacaaacaccatcccaacttctgactgttcctcacttgaagaaaatgccattagcagaagttctgcatttgcagacaatattccgcaacccaaaagaagtcaa

SEQ ID NO: 120954 - DNA, 451 bp, Glycine max
  Clone ID: PAT_MRT3847_80227C.1
ggctcgaggggtcatttgccgggtatcttaaccacatccgggtggaggggatcccgggtcgagaggcgaagacgcactcattttcggcgaaagccagggcaggagatcacagcggaaggaggacgcagaaactgacatggacatacccagcagacgaagcatcaggtccgcgggataagacttatgaaacacactcagatgtggggtggagagcctcgggccccaacaatagtagctggatcatggcgctcaagtgagggaagaatagaaagctggaaaataagaattgaggagcctgccgatgaaactgtaaatgatagcagaagctatgtgggatcataggaggagcgccaaaaactcgcagagagtatctgagatgtggggtcgcttagatattaaaaatggaaaaggaaatggtgtttgatcagattactggaatgggatttgattg

SEQ ID NO: 120955 - DNA, 1100 bp, Glycine max
  Clone ID: PAT_MRT3847_80228C.1
ttaatactcactaataaaaagcgaaggggtttccgagttttgaaggagagagagagagacatttgtaacgacaagaagcagaaggtatagtaatactgagtggtcaaattacggatcaggattcaggaatttccattctgagacacacagaagcacagaaagaaactccttttaatttttcaattttcaagtcaagatcgatctgacatcatagaaaaatgaccatggatgtcgttcagctgcagaggaagctgcgcgaacaccaagccgctatgtttcaacagggttttttggatgatcagttcagccagcttcagaaactgcaagatgagagcactccagattttgtgattgaggttatcactatgttctttgatgattctgagaatctcctaaaaaacatggcacgttgtctagaacaagtgccagctgatttcaaacaaatagatgctcatgctcatcagtacaagggaagcagtgccagtattggtgctgctagagttaaaaatgtgtgcgccaccttcagagctttttgtgaggctaagaaccaggaaggatgtatgagatgtctatcacagttgcaacaggagtactctctactgaagaacgctctacagtacttattcagtctgcagcaacaaatcaaggctgctggtggttccattcccacacaatagagtagatgagtgataaaaaagtgaagcttttgatggagctgctgattttgttctttttttatcttttcctggattactcgttcagaattacgtccaaggtttgaacgatggattatggtgctgatatgatgaataaacatttcttgcctagtttgtcgcatacatacatgatattatattattcttctccactaaactgtagttaagtttgaagtttcctatgtttactcgttagggtgataatgtttatcgttcactcatttgttaaaagaaaatgcgtatatttatagtgtttagctcttgaactcttctgttcagtttaaagaattatttggaaagtgtggaattaatagcccttcaactgtaagagatatgtttgtaaggttattagtttgaaaacagcggtacgcaaattcttgtact

SEQ ID NO: 120956 - DNA, 1224 bp, Glycine max
  Clone ID: PAT_MRT3847_80229C.1
gttcggctccagcacatacataacataaaatcttcctccgttcaatcttcatctctctctctctattcatctccgttaagcaaaaatcatgggtccgatggtgctgagccaactcgccaccggtcttagcgttctagccggagcggttctggtgaaatcggttatggaccagaagcccatggcaggcccattcactcgctgccccacgtgcaacggaaccggtcgagtcacgtgcctctgctcgcgttggtccgacggcgacgtcggatgctccacgtgctccgggtcgggtcgcatggcctgcagcagttgcggcggctccggtaccggtcgacccttgccggcgaaaatcgcgattcgtccgggaccggtcgtccattaattagtccaaatctccgttgggctcgctagcctcgcaattaaactactcacctattcgttgagctcgctcgctactactccttttagcgttagtataacattttatttttatatatctatcaattattatgcaatatttatgtaatataaagtcgaacgttaccacctacgcaaattaattgttaggttccaatcatatactactagtattactgtaattcgtattcttgatttcttatacaagcatagatcatatatataattttgatcctcttttcgtttgaaggcatattttgttgctgttgctctaacaatgaaattgaagaaagcgcgtagtgtaattaattgattgataatgcgatgaatcgaattgagttgctctggcttgttgtggaatttactcacatggttgtggttgtaatgtgaatcattgtttttgtatttgaatgaattgttctgtctcactcgcagtcatagtgaagtgttcaaacttgaagctactgtacaattgttgaatacaaggccacacttgttgctgagcttgactatggccttttgcaatctgtatcaccatgcttgactcaatcaaattcgactatttcattgtgtcacagtttttaaattaaacaatgactttgtatttgctatttataatagtttggcttgaacaagattattttcggtgaaggatacatttagtttagacaaaaaataaataatcacttcatacttttctgtgtaatttttttaataaaaaggaagcataactaccgtttatttatttatttatttcaaagtttaataacccttctgtcgtcttctcgcagccgtacggacgcgtgg

SEQ ID NO: 120957 - DNA, 153 bp, Glycine max
  Clone ID: PAT_MRT3847_8022C.1
ctcatcggcaacctccatctgaaaattctctcgcctgaacgtccaagcacaatcccgaaccctaaccagcgccccagctcgccgtcggcatgtccgccaggttgctccggcgagtcctccaggagcgtgaggccaccccgcaggacaccgacg

SEQ ID NO: 120958 - DNA, 124 bp, Glycine max
  Clone ID: PAT_MRT3847_80230C.1
ttctcgatcctcatcggctcgagctaatggtctacgttctgcggagcaccgacgtcgagatactaggcacagcgtcatcggttttctacccccattactcttgtttgctcgttctctgccggtg

SEQ ID NO: 120959 - DNA, 577 bp, Glycine max
  Clone ID: PAT_MRT3847_80231C.1
ggtcgtgaacgtgtacaattccacaaccactttatttactctccttctctcctctcccttgagcagattaaaatcatgggtccgatgctgctgagccaactcgccaccggtctaagcgttctcgccggagcggttcttgtgaaatcggttatggaccagaagcccatggcaggcccattcactcgctgccccacgtgcaacggaaccggtcgagtcacgtgcctctgttcgcgttggtccgacggcgatgtcggatgctccacatgctccgggtcgggtcggatggcctgcagcagttgcggcggctccgggaccggtcgtcccttgccggccaaaatcgcgattcgcccaccgaaccgcccaattaattaggtcacctattcgttgggctcgctcgccactactccttttagcgttagtataacattttatttttatttttatatcaatcaattatcaattattatgtaatatatagttgaacgttaccacctaagcaaattaattgttaggttccaatcatatactactagtgttactgtaattggtattcttgatttcttatacgagcatagat

SEQ ID NO: 120960 - DNA, 768 bp, Glycine max
  unsure (1)..(768): unsure at all n locations
  Clone ID: PAT_MRT3847_80232C.1
cttgttctttcattagttaaagcttggggaatagatcttgatgaccagccttgcagcaatccagattgtctatatctgcatgggattggctctcatgaggatagtttcacaaaagatgaaatagtttcagcatacactagaagtcgcgttcaacaaattactggtgctgcatacaatatgcaacggcaatcagggaatgtattgtctcctccattggatgattgcacggataattcatcaggaaaatcaattgtgaaaaattcatcaagtacctctgttagcattgtaagaggttcacctcctaatggaacttctgggagacctatagctctttctgcagctgcagcatggggtatacgggctacaaattgtcagccagctgcttgtggtttattatgtccaaatggactgtccaagcttaaacctgatacaatcagcagcaccctacccttttcctctgctgttgcatgcactattcaggcttcattaaatagtgatgttacaaagaggccactgtcgagtgatgggagtcatagtatgacacctcaagtaaaaaatgaattattgaaacctgttaaacaaaatagaagcatggatatcctggatagtgctgaagaaagaactttggcttctgaagnttctctttcacccatgaaattgaacaatcagggtgtcttctctaccattagccggatatagtgatagaggcagctttactggcacaaacaccactaattctattgacatcactcgacaaccaagcagcat

SEQ ID NO: 120961 - DNA, 368 bp, Glycine max
  Clone ID: PAT_MRT3847_80233C.1
gtaagtacaaacttgagttttataccaggtatatagctctagatataaatacacatattatccataagagggacggcctagtaatagatacattatacatgcgtaaaactaagggaaaaaacgagggctacagtttcatactaagtttccacccaaagtaaagggcttagtctacaatgagtgacagactaatgaagattctctggggggccttcaaaaaacttgacataggaatttttatttgattatctgttgagaaagaggagggatttaagaggacctagagatcttacagagaatctgatagttcaagaggatctggttacagtgggccgtgggatgaagatagtgctgagaaacatcataac

SEQ ID NO: 120962 - DNA, 471 bp, Glycine max
  Clone ID: PAT_MRT3847_80234C.1
ggcaggtaaagttacatgcttcttaagggtgcataaactttgcaccctaccttacttataggcgtacaaggattcacatgaaccaatgctttaaacttggcaccacatgcctactctttcggaggacgacctctcgtgtgagcgactgaaaatgagctaccttactctttacaagactcacaaagctgcaaatcctatccaacgagccgaacaagattacattggagcaccttaacagtggaagagccaaaatgtgattttttttactggaaaatgcgtttccaaacaaatacaactagctacgcgaacaacaattcttgttggggaccactgattgaaacagcttctaactaaacctaatgcggtttgtgtaaatggctaagggcaccccataatagggtattgtttagaaagggcacctcacccttgttattgacctctggggagacaaccctgacatatgcaccttga

SEQ ID NO: 120963 - DNA, 348 bp, Glycine max
  Clone ID: PAT_MRT3847_80235C.1
aaaaagaacccacacttcacacattattaccacaattaaaagagggggggaaattttcaaatagacagagcattctcaacaagaggggcatggcaaattttctttcgttgggacaacgaattcctacttaccaacggaaaccataaaacgcttttcgctgactttcatagctccgaagtagagctacgcgccaaaataaagttagcaaaaccttaagtctatcggcttgatctaaggcctcagacatcagtaggcacgagctgttatatcaaaaaaggcaatgctccctacatatgaacccgagctaagttaagaggtctgacctcaacacctaatactgattgatag

SEQ ID NO: 120964 - DNA, 1801 bp, Glycine max
  Clone ID: PAT_MRT3847_80236C.1
gggagacgcatggttctgaactaattgttataaataatacctaaaattttgagttgtcctaaacattggggtttaaacaaatccaatctctcaatataaaacccaatgatctcaccctcactctgtttctgatttctcactcttcgtttctcgttcggttcatcagcgtgtgtctcagccatggcgtttccctacatggaagccgttgtcggatttatgatattaatgtacatttttgaaacttacttggatgtgcgacaacatagggccctcaaacttcctactcttccaaagactttagaaggtgttatcagccaagagaaatttgagaaatctagagcctatagtcttgataaaagccacttccattttgttcacgagtttgtgacaatagtgacagactctacaattttgtactttggggtattgccctggttttggaagaaatcaggagattttatgacaatagctggtttcaatgctgagaatgaaatactgcatacccttgccttcttagcagggctgatgatttggtcacagataacagatttgcccttttctctgtactcaacttttgtgattgaggcccgtcatggttttaataagcaaacaccatggttattctttagggacatgcttaaaggaattttcctttctgtaataattggtccacctattgtggctgcaatcattgtaatagtacagaaaggaggtccatacttggccatctatctttgggtttttacgtttggtctttctattgtgatgatgaccctttatccagtactaatagctccactcttcaataagttcactccacttccagatggtcaactcagggagaaaatcgagaaacttgcttcctccctcaactatccgttaaagaaactatttgttgtcgatggatccacaagatcaagtcacagcaatgcctatatgtatggattcttcaagaacaagaggattgtcctttatgacacattaattcaacagtgcaaagacgatgaggaaattgttgctgttattgcccatgagttgggacactggaagctcaaccatactgtgtacacatttgttgctatgcagattcttacacttctacaatttggaggatatacactggtgcgaaattcagctgatctgtatcgaagctttgggtttgatacgcagccagtcctcattgggctcatcatatttcagcatactgtaatcccacttcagcaattggtcagctttggtctgaacctagtcagccgatcatttgaatttcaggctgatggctttgccaagaagcttggatatgcatctggattacgcggtggtcttgtgaaactacaggaggagaatctgtcagctatgaatacagatccttggtactctgcttatcactattctcatcctccccttgttgaaagattggctgtgctggacgaaccggataagaaggaagactaagcaagtaacttaaagatgaagagctgcaaaaattggctataccctaacttgctatgatttagtgctgcaatagctgtaatatctcaaaaggtgacatgtttatgtagcttaggtttcagtgatcgtgttttggtccaggaagataagattacgatagtgaagactaattgggacaaagcaaaaacgtagttttacgtatctctagatggcattttattactctgctttggtttatgtcccacttttgtttttgtcgatcttctttctttcatactacatttaaaaaatgttgaccttttgggattaagagtaaaatacattctctttctcttccaaaaaaaaaaaa

SEQ ID NO: 120965 - DNA, 435 bp, Glycine max
  Clone ID: PAT_MRT3847_80237C.1
gattaaaggaattttcctttctgtaataattggtccacctatagtggctgcaataattgtaatagtacagaaaggaggtccatacttggccatctatctttgggcttttacatttggtctttctattgtgatgatgaccctttatccagtactaatagctccactcttcaataagtttactccacttccagatggtcaactcagggagaaaattgagaaacttgcttcctccctcaactatccgttaaagaaactatttgttgtcgatggatccacaagatcaagtcacagcaatgcctatatgtatggattcttcaagaacaagaggattgtgctttatgacacattaattcaacagtgcaaagacgatgaggaaaatgttgctgttatttgcccatgagttgtgacactggaagctcaaccatactgtgtaca

SEQ ID NO: 120966 - DNA, 499 bp, Glycine max
  Clone ID: PAT_MRT3847_80238C.1
cggctcgaggatgcatcttaatactcactgttgctgagatttagcccctgaaaatttgaaaataaaatataggatttaactgttccatgttttcttctgatctattttcaggatttatgatattaatgtacatttttgaaacttacttggatgtgcgacaacatagggccctcaaacttcctactcttccaaagactttagaaggtgttatcagccaagagaaatttgagaaatctagagcctatagtcttgataaaaggtttgttcctgaatatatgtgaatttctttcattggatgatgctatcttattctcaaggttgcttctggtatatttttttcataattgtgtatttctgttattgtatcttgttagcatttttacaaattccttttttgttgttcagccacttccattttgttcacgagtttgtgacaatagtgacagactctacaattttgtactttggggtattgccctggttttggaaggtgaatttt

SEQ ID NO: 120967 - DNA, 410 bp, Glycine max
  Clone ID: PAT_MRT3847_80239C.1
ggacaacaaaaagctttcttcttgcgaatggactacaaaacttttgatggtacagaggcgttattccggtccagttccttaaatgtggtgtgcacatgcatgagaccttggttatccagtggcacttaccctcgggtctactgaactataaacaaccgtatgtaaagggacaagcgctcaagcgagttagcgctggctaacgtaggcatgcttagcaccagcgaccacttaccatgccctactagctaaccactaagctatggctatgatccagccatggacgatgacactgaatacgaacgtgacatgagttcctacaaaagcaacagcagactaaatgctgtgatcaactgtttccgatggaacgctactgctccatagcatgcatgatctggttccgatccagctac

SEQ ID NO: 120968 - DNA, 497 bp, Glycine max
  Clone ID: PAT_MRT3847_8023C.1
tacggacgacagaagggttatatatagcttggcatccttcaggccaaaacatgcatcataatcatactctccaatctattctccaacattgaatattatatttccatctgcatcatttttatttaattgcaagggaatcaatcactagtcacgaccgaattttggtgcaaaactaactacttgtttcgaattttcaatctgagaacatgcaaaacaatgacagagcctctgaatcacatgcggcacacactggtgaatatgcagcatcaacttcaactaattggtacaatttcagctccaatattccctacttgcttatacagagcaagggcaaccaatataattcttctcataattgcacgccatatccaaccacaaagaagcgtttaattctaagcaaaagggtttattcaactagaactcgtggtcgttctggtcccctacagtcactggctctaaaacttggtcgattcaaggtccgagcagtaattgtagac

SEQ ID NO: 120969 - DNA, 1583 bp, Glycine max
  Clone ID: PAT_MRT3847_80240C.1
ctccttttcagtatctctgtgggcgttctaagtgtcttatgattttctttgtcgtaaatcgattcttcagcaattattatcatggaaggaaattcgggttcggatcctgcgcgtcctcttctggctaatcgtgacaataactccgccgagaacggtggtcagagaagccggctcagtcgccggatatcggttagctcgctcagagcctctttcacgtccaagcttcccgacaaggtccgttctggccttgactccgagtctcccttcgacgttgatctctcctccaccaccgccttaagcaaaggggagaaagagtactatgaaagacaatttgctactctcaaatcgtttgatgaagtggactcggtggaatcatctgactgcattgaggaaagcgatgaggagcaagctcagcaagaaagagcaatgaagatctctaattatgcaaatgtagctctgttgatattaaagatttatgccactgtaaggagtgggtcaatagctattgcagcatcaactctagattctctacttgatctaatggctggtggtatactttggttcactcacctctcaatgaagaacataaatatttataaatacccaattggaaagctaagagtgcagccagttggaataattatttttgcagcaatcatggcaacacttggctttcaggtattaatcacagctgtacaacaactaatacaaaacagtcctgctgaaatgatgaccactgaacagttaatatggttatactctattatgatatttgcaacagtggtgaaacttatgctctggctttactgtagaagctcaggaaacaagattgtccgagcctatgcagatgatcaccactttgatgttgtaacaaacatggttggactagttgccgctgttcttggtgataaatattactggtggattgacccagttggagctattttgcttgcaatttacactattacaaactggtcccacactgtcatggaaaatgcagtttcactggttggacaatatgcccctcccgaagttttgcagaagctgacatacctcgttataaggcaccctcgaatcaagcgcgttgacactgtccgcgcatacacatttggggtcctatattttgtggaggttgacattgaactgccagaagatttacccttaaaagaagcacacgctattggagagagcctacagataaagcttgagaaacttccagaagttgagcgggcatttgttcatttagacttcgaatgtgatcataaaccagagcactcagttctcatcaaactgcccaacaatcagccttgagcacattattcaggtcccatatatgaagaatataactttaattaaaagagaaggatttatttagttcggaagagttctatccattggaataataaagagtgtgtttgaaagagtgtgttagagaatgagcaggtaacatttctgaattgaaaaagatcttgaatggaaattattttctgtgttacctgtgttgttctataaactttaaaggaaaaggtgaattacgctaaaaaaaacaaaaaagggggtatgtggacctactttttttgggg

SEQ ID NO: 120970 - DNA, 1698 bp, Glycine max
  Clone ID: PAT_MRT3847_80241C.1
ggttggggggagtcaaaaataaattcttattatgatggaggaaaccaacttacacaattgacatagaactaaatgctaaaaaaaagagattttaaaagacatacaaattgtcacactaatttaaagtttaaactgacaaccttgctttctctttacctattaaagaacccaacaactattattcttggaagaattaacatagcataatttggctggggcacaaaactttttaccccatcaatttattgcagcacagcggtgagccaattcttccacaaattctgcaatatttttatcagaatttcctccctcatcaacataactcttggccagattcttccatttgatggcatttttctttatttcatttcctttttcagtctccaatatttcctttatgcaatgtgtgattgtttctcttctaactatctctttctcatcagcaacagctttgactccaattttccacacatcctttagaagttttgcatttgtgatctggtctgtccacagtggcattgcaatcactggaactcctaagctcaaagcttccaatgtggagttccaaccacagtgtgtgagaaaacaccccaaagcctcatgtgttaggacttgtagttggggacaccatgagactattaaacccttctctgatgtgtcagcaaactcctttggaagctttcccttatcacaatctctaatcacccacatgaaataacttccactatctcccaaaccccaagccagttcctcagtttgctcctcattaagccctgccatgctcccaaaagagacatacacaactgacccttttggtttttcatcaagccatttgatgcaagcttctgagtttggattatacatgttaacaccatagtccttgtcatcttggagtcttttgtccaagtagatagatggcaggcatggtcctattggctttaatggccaaatcttcaccagccaatccacaaccccttgctccagttcataaaaactgtttgcaagaacccaatctgctttatcaatgttgacaaattgattcacaactacatcaaagtagcctggataggacccatatttgttcaagaaagatggcaagtccccagctgcaagttttggcaaccctggcaacaaatattctgcctgtgtaagaggcaactctgagccgattctataaacatggaagtatatgttgtttgttgtgcatgtctgagtgaagaaagtagcaccaagtagcccaaatttcttggcaacatcaagaacccaaggcatgaaagcatcatagataacacaatctggagggtggcttgaccctgcaagcttctgaacaagctcagcaaaagtttgtgatccaaccctccaaaaggtctctatgtaagcctcaagactctctgctgctgcaagccctccatcatcatagccatctgagatgctctcaacttcaatggaagtgaagtttttgtttctcatgttcttccaattggacacaacagttacaagtgttaccttcactcctctctgcaccaaacgcttggagaactgaagcataggattgatgtgtccttgggctggataaggtaggacaagacagtgagcagcatggtttttcctttgctctttcatttctgactccaacgtttgtttactccttccccacactgcatatgtccccttctgtcgtcttctcgcagccgtaaa

SEQ ID NO: 120971 - DNA, 401 bp, Glycine max
  unsure (1)..(401): unsure at all n locations
  Clone ID: PAT_MRT3847_80242C.1
gcgtcagcccacacgtccgacaggctgcgaagaggacgacnagacgagggtattcatatcatgtccattgtcattctataacataataacaacaaacaaaacaccattcaaacaataagaacttggaccgtcgtggataacatcggagcttcacaagcattgacggatcgaatgaaggtgtcccagtcgcaacatgcattgaggtcactgcagcagcatgccaggcgcactataagatccaaccctcaggacacgtgcatgccatctgctacctctgctacagtctcacctacagtcaataagaggaccgtggagtacaacatgatgatcgggaaaatcctctgtttacgtaacataatctcacttgcatcacagtgccctttcgccaacttgcgtacaac

SEQ ID NO: 120972 - DNA, 659 bp, Glycine max
  Clone ID: PAT_MRT3847_80243C.1
aaaaaaaccaaaaaaaaatatcaaccaaggggcccttaaacccaaaaaaaacaaaaatctaaaaaattggattttcagggggggggcccaaccaaaattatggggaccgccccaaaaagaaaacccaggggcctactttacaaaaaaaccccccccccgataaaaattcattagggaacccccctgggggggggggcccttcccccccaaaccacaaaagccacacaaaacgggcccccaaaaaacatcttatttttttcccacattaaacccaaacaaatgggccggttaattccacccggggtggggaatttcggggtttgggaatgggaaaaccaaaaaaagggtttttctttccactttttccccccaacccgggggccaggggaccccaattcaaccttttggggggccgggggggccaaagcccccccggaattcatgcttttacagggaaaaattgaaaagcggggggccgcttttggcccccaaaacaggggccaaagggggggcaccccttaaaagggggggggccaaatcccccaccccaaggggtaacaaaccttggtcctggggccccccggccgggggggggaaacaagcccccccccccggggggggggggggaaggcccccccttttccattggcactttgggg

SEQ ID NO: 120973 - DNA, 448 bp, Glycine max
  Clone ID: PAT_MRT3847_80244C.1
aaccccaaacccatccctgaagttaacaacgggacaattttattggattcattattacagggaattttaaaggggaagcacatgaatttccctttattttagcccttttccaaaaaaaaacattgggggaccccttttaaaaaacaaacggaatttcctttagggcctattattggaaatcggccccggggattttaacctggggggcaaaagttacggggcatgacaataagggggtccacccaataaaacatgccattcaccttaaacctaaaccggttttccccatttggggggttaggaaagtaaaacactgctccatagttccggtaaagggacttccattggcccatttgatacaattcaacagcggggacggcgggttttccatttacctgggaaatgcccaaagcaaagtacccggggggggggctagtttccttgaggg

SEQ ID NO: 120974 - DNA, 489 bp, Glycine max
  Clone ID: PAT_MRT3847_80245C.1
cgaaatgattatcaattatcaatttgaaaattaaatatccactggaagcacggcaagaggaaaatggaagcatgcgtcgtttgggtggcttggcagggtatgggtgagtgagaaaagccgcgccgtcgcggcacggcaatagcaggtatagttctggttacgaacaccgtcatcgttggacaagcaaaagagaagtgcgaggaagggaagaggaagaaagtcgcacagtgctcctggtcctggatgctacaatgaagattctcgacgacggcggcggcggcggcgcatagacccagcatctcccggatgccaagtcatcatcgacggcgttgttgctgccgcaaatctctggatgtagcttcgtggcgttgacacggtcaaggttgaaggtggagcggaagataaaatcgtagaaattagatttttttttcttagggtaaaatagacttttaacatattaaaaaataggaaaactaatgatttaccagt

SEQ ID NO: 120975 - DNA, 238 bp, Glycine max
  unsure (1)..(238): unsure at all n locations
  Clone ID: PAT_MRT3847_80246C.1
agcgcttgaattctctgtccaatcataaatgacgacaaactatgcaatcacaccatatgatagtaccttattcaagttggcgaagatacatcaactatcaaacaanaagaaaattgcagcgacaaaaatgatccatccaacttatgataaacccctcctggtgtggtggaccaccttangacttcttcactaatgggggccaaagctaggttcttctccttttttcacattttaacaa

SEQ ID NO: 120976 - DNA, 253 bp, Glycine max
  Clone ID: PAT_MRT3847_80247C.1
gaagtaaaaatgtggggggcatcaagtcaaaataatctatccacttgagatggaacaaaatactaataattttttgattgaggggaaaacaattccaaacaaaatttcctgttacttaatttaaaaacctgtacatgcaggtctgaaaccctcatacttcatttaaatttcttccccagacatgcgggaaaaccaatttgtgcccttttttcgctgcgaatattttttttttgcctttttttcaacccttttg

SEQ ID NO: 120977 - DNA, 729 bp, Glycine max
  unsure (1)..(729): unsure at all n locations
  Clone ID: PAT_MRT3847_80248C.1
agattgcaacagctctcgccatagttgacgggaacttcacaaccttctgcacaaaactgtgccgtcgatgataggggtgccgcccctagacaagcaataacacgaaaaggtactgtgacatgctgtacgtttccaactctgcaccatcgaaccaaaccgtgatggtcttgcggcttaccagccgcgtcgaagcagcctgctcccacaccgagctcctgcggcagcacggactgaacctgatcgaatgctttactctcgactctgcccagaatgcgatgaaaggcggctgccgcgttggcctgttgatcgtgacgcgggaagacgaactgtgcgaactggacaagtacgagtccttcgtaggcggcaatcgcatctcctgggtcgggctagtcgcgcaggaactgatttcgatgccgcgcatgcgccagttcatcggcgagcatctgttcaatttcattacgctaccagccgaactcgatcacatcgtgctcacgctgcgacatgcctggggcatggccttcatgcgtgacatgccgcagactgcagtacacatcccgatactgaataacgccgactatgcgatggtgngcaaaacgcccgagatgcagcgtctgttcggccagatccagaaggttgcgcgcacggatgcttcagtgctgatcactgggccgtccggcactggcaaggaactcgccgccctcttcatccaccaccagtccgcacgcagca

SEQ ID NO: 120978 - DNA, 156 bp, Glycine max
  Clone ID: PAT_MRT3847_80249C.1
atgggtcggaaatcactcatggatgttgggttattgactttatggatcaaggcgatggaggttttattgagttgggctgggaaggtgccattctcaagccggacaatccatagtggggatgcttgtgttaagggtattatcaatgatgattggtga

SEQ ID NO: 120979 - DNA, 1610 bp, Glycine max
  Clone ID: PAT_MRT3847_8024C.1
cctaggcgcgggtccggaaattgccaagttcggcgtctatgtcaccgctcatgtacactttcgccgacaatcccagcaacctccgcaagttcatgggacatgaagcaaatcagagagtttgattgggaagtatggtgtggaagcttttgggagcacgccctctctgctcatattcttcttctttgcttctcacacccctcttatttcgcagcaaaataagcttggttcatggccaggaacctatttttgggcacctctgttacatgaaaccatctcctttcttggggaacgtaagctttcattcatatccatttctaaagtttaacgataaggttgtagagcaacaacatcaggattctcaaaaggcctcaagtgctaatgttgatggtgatggtaatgccaaagtaaagaggaacaaattaaaggggaaaagagcagttgtaagatggctcaagttctttagatttaagaagaagaaagagtatgaaaggatgacagcagaggaaaaaaatttatacaaattgttaaaggctcgaaaaaaagaagagagactttgtgaagctctgaaaaagattgagcctgcagaatcttcagaaacaacccatgatcctgagatattaaccccagaagagcactttttcttcttaaagatgggcctcaaaagcaaaaattacgtgccagttggaagacgaggaatttaccaaggtgtaattttgaacatgcatctgcattggaaaaagcatcaaactttgaaagtggtggtgaagacattttcagcagaggaggttaaggaaattgctgctgagctggcaagattgagcggaggtatagtgcttgacattcatgaagataacacaataataatgtacagagggaaaaactactctcaaccaccaacagagatcatgtctccacgagtctctctttcaagaaagaaggcattggataaatccaaatacagggatgccctccgagctgtgaggagatatattccaaggcttgaacaagagcttgaaattcttcgtgctcaatttaaaagttcagctgaaagtaatacagatgctgctgaggcaatccagaacagtggcagagagagtattgagtctgggagcatctcaaatttccagctacagaattcatataaagaccgtgaaatgatgaatgttaacattgggagcacagaggatgagacagatatgaactctgaattggattctgattctgataagttatcagatatatttgagactgattcagatactgagaatttcgtaaaggaggagaaacctctttacttggacgagtttgataattttccagagcaaagcgatggagaaatgaatgattttgaggagcatatgcgacaaatgtctctgaaatcaaaaaacatggaaaaggacgataacttacctaagttggacgaagttgacaagatttttctgcaagctacttcctttttaaagaaaaagataaaatgagaaatatgcaaaagacaagtgtaatcattgtattggatataaacagtgtagtttgggagaaattacaacgtacaacaatgaagtaacattgtgtctgactcatttttaacccattagataaaaatttattga

SEQ ID NO: 120980 - DNA, 866 bp, Glycine max
  Clone ID: PAT_MRT3847_80250C.1
gagacaccaaacgggtccatcattccaccacacaccgtttacacaactttctttcttttattgcatcaaaaattcaaaatcaaaatcatctcttttatttatttttatatttttgtcttggtgactctcattttctgatctcacaccactttctctctcttctactctctagcaaccattccaaataaccccttctctctccttccacctctaaaaatcagcaacatggccttgtttgctcttgcagtgcttcttttagccttcactggctcttcaagtgccacttggtgtgtttgcaaggaaggaagtgatgcaatattgcagaaaaccttagattatgcttgtggagctggggctgattgtaaccctttgcatcagaatggcccttgtttccaacccaacactgtgagagctcactgtaactatgcagttaacagctatttccaaaggaagggtcaagcacaaggatcctgtgactttgcaggaaccgccactgttactgcatcagatcccagcactggaggttgttcctaccctgcaagcgccagcactgcaggcactgccacaaccagtggcaccaccacttcctttccatacagttccacccctggagtattgggagggattggcagtggtatgggcccttctggaattggcaccaattcaaatgatagccatggtggacttagacttgtggacactagtttcttcttcatgcccctcttttcagccttggtgatgatcatgcttctttggtggggctaaaaaaagtggttactagcttttgcatgactttgaccatgttaattatcatgatggacaaatgttgatgttgtattttactacgcataaatgggtatgcatgt

SEQ ID NO: 120981 - DNA, 265 bp, Glycine max
  Clone ID: PAT_MRT3847_80251C.1
ctgcaccgcaacaaaagtgataaagaaaagataattgatcattgatcatcaatctacagtatcatgggtatttggctgtactaggtaatgggttttgggtcttgctttctgatttaccttgattgtatggcagcgtatcactatacctgagattttggatgatgaatggttcaagaaagaatataaccctcccatttttgaggagaaaggagaaatcaacctctatgatgtagaagctgcctttaaagactctgaagagctccat

SEQ ID NO: 120982 - DNA, 409 bp, Glycine max
  Clone ID: PAT_MRT3847_80252C.1
acggctgcgagaagacgacagaagggcttgtagttacttaaccacaagattcatggcctttgctattgagattgccattagaatctttcaagtgttgctcaagtagttttggggtttgaggagtatcagctggagaaagagaaaaaaagaaaataatcaataaattttgtggtgcaatgatgataatgaaactttttaatattttaggcttaaataattttttggtacttataagatcggggtgtttggattttggtatctaacttttatttttgtttcattttaatatgggataaaattttatttttaaaaaagggtatttttgtttaattttggtatctaacaaatttttattgttggaaaatggagtttgctatattaatgacagggggtgtggtaacaattttaa

SEQ ID NO: 120983 - DNA, 446 bp, Glycine max
  Clone ID: PAT_MRT3847_80253C.1
ctctccaatcttaaaaatgataaacgcctgtattaatccaacaaaaaatggggcttcgaagctaagcatgcacaaagtgagattggcccagactgaagaaatacagaaaaatggcttgagatcaagcctaaccacgaataaagaagaaagaaaaaatgaccaggggcttttatggcggttcacatcagattcaccaaaccagaaactaaatgagtgatatccatcttcatggatatgtcaccacatctctatacatctaaccctgcctgccccgagtttaatgttgtataagaattgtgatacataagtcatagagttagagaccaatccaagaagtatgtttgcaaatgcagcatctaatgtcctcactgatctctcctccattgattaaggaaaaaaaatcaagcttggatattacacatgatatatagatgtctcttgaattc

SEQ ID NO: 120984 - DNA, 518 bp, Glycine max
  Clone ID: PAT_MRT3847_80254C.1
acacagcagagaataaagttattattgcctctgagcaaagacaagttgaggaagggaggatctgataggaaaagttaacacgttaatgaaatagactccatttataataatggtggtgtagtgtacctgcagaagacgccatggagaatcaggccaaaggatgggatctgcaacttgaacagaagaaatggttcccatgaaccagctgatcctagaagaatcctcagtctcaaagggcattttgaatctcatcccagaacaccactgaatttgcattgcagccttcacaacagaagccttaacacaaaactctggcgaactagcccttggatagtacacaacctcaaagggccttccattaacagcacaagtcacagcctcaacaacagattcagcagccactcttcccaccaacatctcatgatcaccaccactcatcaaattgctctcactcccacacaagaagccaccaccaaagagagggttattccatccaccagaagagaactcagtccctc

SEQ ID NO: 120985 - DNA, 549 bp, Glycine max
  Clone ID: PAT_MRT3847_80255C.1
cctgccagattacagtgagtaaaagaaaagtgaggagctccgaggtcaaccaggggtggatccatcaatttttctccccactatgtatcataacataagtctgtcagtgctggctaagccggccttacgggagaaagtcactcaaattcacctacaacaccaacagaggctgaattttagctttgattcaagcaatagccccgcaacatcatcttcgccagtgattcagaactctacttagtactactgacgtcacaaagtagcgataagggtgtgataagagacaggctccaccggtagatcagtcagacgctcaattactagtcctgaaatcctaatgcacaagtattatataaataaactaaaaagagaagggaaagaaaaaggtaatagaacaaaagaacagagaattatatgaaaccaagctcaagcttctgcgcttaaaaaaagccatctgttgctgagacagttcccgttcctagcaccaaactgttccagagtggtcaaactaaacccacaccatccgaggttccgtacggatttccagtc

SEQ ID NO: 120986 - DNA, 179 bp, Glycine max
  Clone ID: PAT_MRT3847_80256C.1
tttttaagtagcttgcaaggagcaaccggaggggggggacaaatatgccacctgaaacaagttacatatgatattggattcatttgccactttactcctcggcatgacggaaggagtataaaaatgctaggaattacaaataactttgtcctagaaaacattacgattattgtctgagt

SEQ ID NO: 120987 - DNA, 538 bp, Glycine max
  unsure (1)..(538): unsure at all n locations
  Clone ID: PAT_MRT3847_80257C.1
tcttctggagcgggagccatccaccgccaccatggtcgagctgatccgcggcatggtccagcacttcctccgcatcgccgatggtccggacctggaagaggcccagcgcctgcgactgatggccacgagtcatttggatgatggcgaattcgcgcgtttgctatatgccaagatcgagaagctgatcggggcggtcttcgtcgcctcgctcgagcgtgcggnntgccgccgggacgcgcggccctgcactggcgatccgctcaacctgttctggttcgcgcatcaaatcaaatataaagaaaggaaacaataaatgatagaaaaaataaagaaaagaaaaaaaaaaaaaagaaaatgaaacaataaataaaaataaaaaaaaaaattaaatatataaaaattatatagacaaaaaagaaaaaaaaaaaaaaaaaactcgagggggggcccggtacccaattcgccctatagtgagtcgtattacgcgccgctcactgccgtcgntntacaacgtcgtgactgggaaaaccctgcgtta

SEQ ID NO: 120988 - DNA, 386 bp, Glycine max
  Clone ID: PAT_MRT3847_80258C.1
caaccaaaaaaaaatgtccgtcccttgcaaacaaacctgtggggcacccaattattcctcaaaagaacaaaaaagaaagggggtcccccattttaaaaggctaaatttctacccctaaaaaaaacattgagcccgactcactatggctatatcgttttttgggggaaaaaaagcccccagttataaataagggttagcctaaaaatcaaggggcccagttttatttgacccaaaacaaccgccagatgggccatacaaactgccccttgaaccataaacgggggctggatttaaacattttaaaaccaaaaaccttcgtttttgcaattttatggaaaatgggggggcctccaaaatcacaggaacctgtgtttttaaccgggcaa

SEQ ID NO: 120989 - DNA, 821 bp, Glycine max
  Clone ID: PAT_MRT3847_80259C.1
cattttctctctcatggtcatcatccacttggagtcttgatcttgtacttcattgccatcacctatgtactactatatatagcccaacaaagtcgttgatttatcagagttcacacaaggtagtttcatggttcaaaccaagaatggaactgttgcagtagcttctgcgtttgctggacataaggaagctatacagcaaagggaccacaaatttttaagaattgctgttgaagaagcctataaaggggtagactgtgaagatgggggtccctttggtgctattatagtatgtaatgatgaaatagttgctcgatgtcacaacatggttctgaggaacacagaccctactgctcatgcagaagtcactgttataagaaaggcttgtgaaaagttaaaccagatagaactttcagactgtgaaatatatgcttcttgtgaaccttgccctatgtgctttggagcaattcacctctcacgagttaagaggttggtttatggagcaaaggcagaggcagcaattgctattggattcgatgacttcatttcagatgcattgcgaggcactggattctaccagaaagcacaattggagattaaaagggctgatggcaaagcggcaaacattgctgaagaagtttttgagagaaccaaggaaaaattccgaatgtattaattgaatctccatgtttcctaagccgttaggtatttacacctgatgaaatctgagttcacataaataagctcattgctctcgtgtatcctaaatcctaatgaataaattgtatggggagaagagaatcaaagtgaaatttactttgtga

SEQ ID NO: 120990 - DNA, 365 bp, Glycine max
  Clone ID: PAT_MRT3847_8025C.1
gccgccgccgccctttttttttttttttttttttttttttttttttttttttttttttttttttaggttaattcttttttcttttttccccaattaaatattccggtttttcggggccaataaaccaatgcttttttttagaggtacaaccctaatgccagccaaaccttaatttttaaagggggtaaaaaacaaaccccttctagccttagggggtgaaaaacttggggggccccctctcaagaaagaggcacccctggagaatccccccctgactatatcaagacctagagaaaatatacccccaaatgccaaacccaagtaggagatttggtccccccacctattgtcccaaaacaataaac

SEQ ID NO: 120991 - DNA, 806 bp, Glycine max
  Clone ID: PAT_MRT3847_80260C.1
gtcgacccacgcgtccgggtagtttcagttaagtgtaccaagttaataggtctttatatttagttgttgacatcaacagagtcatggaggaagttaatgtggttcaaaccaagaatggaactgtttcagtagcttctgcgattgctggacataaggaagctatacagcaaagggaccacaaatttttaagaattgctgttgaagaagcctataaaggggtagactgtgaagatgggggtccctttggtgctattatagtttgtaatgatgaaattgttgctagatgtcacaacatggttctgaggaacacagaccctactgctcatgcagaagtcactgttataagaaaggcctaaagctaaaccagatagaactttcagactgtgaaatatatgcttcttgtgaaccttgcccaatgtgctttggagcaatccacctctcacgagttaagaggttggtttatggagcaaaggcagaggcagcaattgctattgggttcgatgacttcatttcagatgcattgcgaggtactggattctatcagaaggcacaattggagattaaaagggctgatggcaaagaagctaacattgctgaagaagtttttgagagaacaaaggaaaaattccgaatgtattaattgaatctctatgtttcctaagccattaggtatttacacctcaggaaatttgacttcatataaataagctcgatgctatggtgtatcctaaatcctaatgaataaattgtactgggagcatcaaaatgaaagttactttgtaatataagatggcattctgttatta

SEQ ID NO: 120992 - DNA, 361 bp, Glycine max
  Clone ID: PAT_MRT3847_80261C.1
aaaaagccaaccacttaaatgcattgaatgtattgcgaattaaagatctccaaatcacacaagtggaataaaacctcacctccgaactatgttatcttctcttattaacaacatactgtaagaataaattaaaaatcacctcggacacacccttaattgtgaatactatacggctgaacactttgattcaggatcatgttcaaagaataattgcaaattaacacattaacgcttgaacctaacattgacttatttcttcaacattgtgacctaccaataccaacggaggccaaagatcacaacatgtggacttaaacattttctatactacgcgactaacgcatgttgctctaccaatcac

SEQ ID NO: 120993 - DNA, 1538 bp, Glycine max
  Clone ID: PAT_MRT3847_80262C.1
cccacgcgtccgcccacgcgtccggctttatgtgcagcaaccataatttgtgcaattattaggatttgtattttaaactcaatgatttcattttacaggcttgtgaaaagttaaaccagatagaactttcagactgtgaaatatatgcttcttgtgaaccttgccctatgtgctttggagcaattcacctctcacgagttaaggttggaaatgtcctgttttttctacgcttctcaatttatctataccttttattaattttacaagaatttaattaaagtacaattttgtgtacaatagttccattaaggttctaaccaagacttcatacatattatcccaaaccactatgcaaagtacatagtgtaaaagtttttcacattattatttaatcataaataatactgtattgtatgattactaacttttataatcaagtggagtctaatttagttagtttaatagacactgagttattgtaaattagctggtatttattttcatattttaaaaatcaaaagaaaaaaaattattgatttttataataattattttaaaaattaatttatgttaatatctgattattatttaaaaatctttaaagatagagtacatgaaaattaaatttattttacaatgcttactctcgggcacactttcttacaatattcactttatttatatagaggttggtttatggagcaaaggcagaggcagcaattgctattggattcgatgacttcatttcagatgcattgcgaggcactggattctaccagaaagcacaattggagattaaaagggctgatggcaaagcggcaaacattgctgaagaagtttttgagagaaccaaggaaaaattccgaatgtattaattgaatctccatgtttcctaagccgttaggtatttacacctgatgaaatctgagttcacataaataagctcattgctctcgtgtatcctaaatcctaatgaataaattgtatggggagaagagaatcaaagtgcgaatttatttattgaatctctatgtttcctaagccattaggtatttacacctcaggaaatttgacttcatatattttagcttgaggctatggtgtatcctaaatcctaatgaataaattgtactgggagcatcaaaatgaaagttactttgtaatataagatggcattctgttattaatatatagacccagtggattccagctgccaagttcgcttgaaatcttaatattttgttcattttattttatattctgctgctggatttgacaagcagattatattatgcataaggtatcaattcttgacttacttcaggctatctgtatcaattgaaattttcatatccaatctttgtgacgagttcaccatcatcttttatcaattttttgccttactcttctgagctgtggtttctgtcacactttataacatctttaaattccatgaaaacagaactgattgtacattactaaatttactttgtgaaataagagggcattctgttattaaatcttgtcccttggccctt

SEQ ID NO: 120994 - DNA, 626 bp, Glycine max
  unsure (1)..(626): unsure at all n locations
  Clone ID: PAT_MRT3847_80263C.1
cgtaagcctcggnnaattcggctcggggctcgaaggcgctacgagccactcgatcacttctggaggtggaacatacaagcacatattcatccaccggaatagatatatcatggctctgctggcgttgaacatcataccggggcgtttgcaacatattcttccccccgctctttaacaacccaccatgtaccaaaccgaccctgtccctgcacccaccgtttccactttcactttctcgtacttaacattaactccatcggtggtgccagttatgttaccctatcaactacgggcattggggccccaaccccgacccggaacttaacacacaatgcagatttctgactcatgcgacgacatgcatcgggccttaccgaattggccagctcggccactagggctaccgtttatcgacacggctccaccactcggtatgctccgtttggcacgtgctacccctcgtgccacctggcacacaggccaacgaataatgacccccctactctggcacacatgcgaatggtggcaacacgctcttgatctctctaagcgactcgaccaggatgggttgttggaaaaacacgagcttgctcaaccaatagatgcagagcgcgtgaatatctcac

SEQ ID NO: 120995 - DNA, 235 bp, Glycine max
  Clone ID: PAT_MRT3847_80264C.1
tatctggttcttatcaaatctatcagttcttcaagttgaaaatggggctatctttcaccaagttgttcagccgactgtttgccaagttagagatgcgtatactgatggtgggactcgatgctgcgtgtaagtccaccattctgtataagctcaagcttggatatattgtcaccagcatacccaacaattggtctaatgtggtcactgtggaatataataacgtcagcttcgctga

SEQ ID NO: 120996 - DNA, 376 bp, Glycine max
  Clone ID: PAT_MRT3847_80265C.1
gactaacttgccgttgatcaggttggagaagctcactggtgaggaaagaaacaatgccatgtaaagaattaaagatgcttgtaaaaactagagattcgttgacctaagggatcataacattcctcatgacatgttaaacactataagacaagtggaccagggagcgctacaataaatacataataagagaagttcaaagaattacgtacaaccaaatagtgtggatactgtccaaactaagatcaaagatatgaactatgaagaccacctgtccacttacatcaggtggctaaatcaaacatctcacagagccgtggatgtgatgtatgactacacaaaagtggggtaaaatttttctgtgacattacacaagatt

SEQ ID NO: 120997 - DNA, 1947 bp, Glycine max
  unsure (1)..(1947): unsure at all n locations
  Clone ID: PAT_MRT3847_80266C.1
ctcgagccgcttctccgaacctctccaactccctcccagagataaaattcctttcgccccacgcacactccaatatttaaatcaaaaaataattttaagatcaggaatcaggaatcccaatcgtttcaaaccctagaatcccaatcgatctctctctctctctctgcttattgcaataacctaacctggtgtcgtgatccgggcactggaactagggtttgcgctttctgtgttcaacaatcaagtttcaagaggagaggagaagagatggatgactgttgtgccgtttgcgctgagcctttggaatgggttgcgtacggaccctgtttgcaccgggaggtgtgttccacgtgcgtcgctcgtctccgtttcatctgcgacgatcgccgttgctgcatctgcaagaccgaatgcaacctcgttttcgtcaccaaggctctaggtgattatacgaggatgatcaatgatttttcgacccttcctttggaggcgagggagggcaaggttggatcatattggtaccatgaggatacaaatgcattttttgatgatgtggaccattacaggatgatcaaggctatgtgcaggctttcgtgcaatgtatgtgacaagattgaggatcaaccacaggatgctgcttcaaggcggcgagcaaagtttaggaatatagggcagttgaagggtcatttattccaccgtcataagttgcatatgtgcaatttgtgtttagaaggaaggaaggtttttatatgtgagcaaaaactatataccaaagcacagttgaatcaacacgtaatctcaggtgattctgaggtggatggaagtgagagtgagagaggcggtttcatggggcatcccatgtgtgaattctgcagaaccccattttatggagacaatgaattatacatgcatatgtctacagaacattatacttgtcatatgggccgaaggcagcatccagggcagtatgagtactataagaattatgatgacctagagatccacttccgtcaagagcacttcttatgtgaagatgaggcttgccttgctaagaaatttgttgtttttcaatctgaagcagagatgaagaggcataatgctattgaacatggagggcggatgtcacggtctaagcgtaatgctgctcttcagataccaacaagcttccgatacagacatggtaatgaacatgagcaacgccgtggaagaggtcgtacgtttcgtcgtgatactgaaaatcaactttctatggccattgaagctagtttggaaacagctaatgcagagcaaacatttcttgatcaatcgacatcaagtagtgggcaagttgccgttgatgatgggaatgatgatattgatgctctcattcagccatttgaatcattagctgcaggttctgaagcatctgcaagataccttcaagccttggggcatagctctaggaatgggcctctggaagattcttcctttccaccactacccataacttccagcaatggccaacaaaggtccaaacatgaactggaaggttcatctagtaacactatggctgcacgtctgcgtcggcatggcaacagaactgtatccgttatcaattctggtaatgcttggccagcagcaggtcgtggactggtacagtcatcaagtaatccttcacaatctaaactttcaacaaataatgtccttggactgtctcgtaacactgggcagatgaaaacagtaattaacagtggaccgtcatcatcaacttatgctggttctattcaggctacacagagaactgctcatggacaatctcctgctcatcgaggacaacgtgacatgtaagnttgttactctgcatctgctccaatctatggagacaattctgntgagtttcaattctgatttcctacagtttctgctgcacagtaagtagntacctgccagcagccagtcttcattgaa

SEQ ID NO: 120998 - DNA, 237 bp, Glycine max
  Clone ID: PAT_MRT3847_80267C.1
cgccatacgtggctgcaaattttatcgcggccagagatggcacgctggcagtgcgacccgactcgctgctgtggaatgtcacggatcgtgcccgtttcgcgcagttcggcatcgaccggccgttcacgttcctcgtgtactgtcctgctatgtatcagccagcggtgattgcgctgcagctgcgtatcgaaacccaacagtccatgctggccttcaactcattgctggcgtcgcggg

SEQ ID NO: 120999 - DNA, 1622 bp, Glycine max
  unsure (1)..(1622): unsure at all n locations
  Clone ID: PAT_MRT3847_80268C.1
cgcctcgtgaggtgcgcccctcctggcggtcctcccccgcggcccccgcctcctggtgctcccgtgcccccaccgccggctgccgcgcccctgccccatgccgtggctccctcccagccgttccctgggacaagcctctggaagaaagggaaacttattgggcgtgggacgtttggaagcgtttatgtcgcaaccaatagggaaaccggagcattatgtgcaatgaaggaagtagagttatttcctgatgatccaaaatctgcagagtgtataaagcagttagagcaggaaattaaagttcttagcaatctaaaacattcaaacatcgtacagtattatggcagtgaaatagttgaggaccggttttatatttatctggaatatgttcatcctggttcaattaataaatatgtccgtgaacattgtggtgccataacagaatctgttattcggaatttcactcggcatattctctcagggttggcttatttacatagcaaaaaaaccattcatagggacatcaaaggggctaacttgcttgttgactctgctggagttgttaagctagctgattttgggatggctaagcatcttactgggtttgaagctaatctttctttgaggggaagtccatactggatggctccagagcttttgcaggctgtgatacaaaaggataacagccctgatcttgcttttgctattgatatttggagtttgggttgtaccatcattgaaatgttcactgggaagcctccttggagtgaatatgaaggagctgcagctctgtttaaggttatgaaggagacccctcctatacctgaaacactgtcatctgagggtaaagattttttgaggtgctgctttaagagaaatccagcagagcggccaacagctgcggttttactagaacatcgatttttgaaaaactcgcaactgctggatgttttatcttccacccagctgtataatgaaacaagcttcatggacaaaccacatactccaagtaggcaatctgaaaatagttatgatcagttgtcaaccccctgtgcaaagattgcaaagggtaaagctgctgagaggcgaggatttctcatttcttcgtttgatattctccctgcatacttggaccaataatgtaatcctgttttcggtctatctttttggcctgccacgatctattgcctgctttttatgtgccattctttttctctgctgaagttgggaatcatctaacaataacttccgcatagcaggggtgtcatagggtgttcttttacttccttctactcttgaagcagttcccatgttgtaatgtaccgcacacacattccagtacctttgattgtctgtgactgtcaaacgaaaaacaaaatatgatctttaaaaatgactgtgctgagggaagttttcatcatttatgccaatgacagggccccattgttgtactatagttttcagggacgctcaagtagagacttgcagnnnnnnccannataggttctcttttgcttaggttttttttttttttttttctgaggaaagaaagtgaagagctttttcattgtgtaagttatgctggacgagaatatagcagcaattttagaataatattattatac

SEQ ID NO: 121000 - DNA, 277 bp, Glycine max
  Clone ID: PAT_MRT3847_80269C.1
gttattagtactgaaggcttttgcttgatagaactgagagggctaatcagagacatcctatgaagatacatgcactgcattattctgacatacttgcgccgcgtgatatgctcactccataggaaggatcaagggatcttatacaggaactgaacaatcatctgatacctctactatacaatattatagaatactattggattgatatgaaagaattatatgggattgaccggtacaagacaaatgagatctaatgtgacgcgactgatgagttcta

SEQ ID NO: 121001 - DNA, 398 bp, Glycine max
  Clone ID: PAT_MRT3847_8026C.1
tatacattaaatgtgtacatacagatctagaatttacaactgaagcatttgacatgcatgatagcgagaaacactcactcttctgagttgtgggttctggaagacctacaaccgctagatgcatgtggctcatcaacatagctagcatatactagagatccagcctctacctcgaaatacgcaattcatactgtctacctacttgaatatagcatccctcaggatcccattaaacagcttgataagctagaatgcacctcttaagctcacaaccagtgtatactacactttggtatggaagatgaacaggttcgacatttccttatcatgacaacaatagcattaacatgagctgctctttgtggcttccaagcataggcataatagatgattcttat

SEQ ID NO: 121002 - DNA, 1330 bp, Glycine max
  Clone ID: PAT_MRT3847_80270C.1
aaagaaagagaaatgccaagccctttaatgcatagtatatatagaggggaatttttcttctgatttgtgttgcttcctaaaacaataatttataccgtagcttccttaaatcatgacaaagttgcattcagaatcaatcatttaatttctttgattcattttcaggcagagactaacatcaacataagatttatatagttgtataatgtatactcaaattgaatttgacttcattgtcatgaatgttatgtttcaagcttcctggtatagcaacagtcagcaccagaattcttgttctttgacaacataactgcttccttcttcaacattgcattgtttaaaatcaagggtccatttctcaaaagagcaattagagaaattataatatcctccatgtagagaaagcaactcttttctcactctatcttgtatccaaggatagctgagcaagttcaataatgattggttaatagattccttctcacagaatttgcattgctgatcaaagctaagatgagctgtggcagcttttgtcctttgtttggcaagttttccattggcaacccacttgtgtatgaagtttcttgattctgcatcttcttgcatattcatcaaagcttcaattccagcgcagctactatgaccaatgactaatatattctcaacctgaagagtagttactgcaaactgaagagcagcattacattctgatggtccattcttcatcacaggaacaagattggcaatgttacgtatcataaagacttctccaggttggaatcctaatatgttagaggggcataccctagagtctgcacaagcaatcaccataaactgtttgctatcaccttaggaaattgagcttcagcaagagcttcaaaatgctccaactcttttctgtatatatttttggctcttgaaactcagaaacctctgtttcatcaaaccaaacaagttttgatagctatcaatttcagccatattcccttcatcaagacctttgatttcttgaccgagtctgacacgattactatgactttctggttgtttctctttgatcgaaggtaacgatgctgctgcacggcaacggtccatttgtacccaatccataatttttggccaatgccttgttatggaggagctggttggagcagaaaagcgtaagcacccacatgagtcatagatgtatgaaccaactaaaggtgccttagaacagagaagagaacttattctggacctaattggccaaaccatctcttctcctccaacaaattgtgactagtgactacaaaatgcaaactcccccttctgtcgtcttctcgcagccgta

SEQ ID NO: 121003 - DNA, 1203 bp, Glycine max
  Clone ID: PAT_MRT3847_80271C.1
atatatatgaattttgtatggtatctgaatgggaacaatggtaatgaaaagccagatgtaaagaaagagaaatgccaagccctctaatgcatagtatatatagaggggaatttttcttctgatttgtgttgcttcctaaaacaataatttataccgtagcttccttaaatcatgacaaagttgcattcagaatcaatcatttaatttctttgattcattttcaggcagagactaacatcaacataagatttatatagttgtataatgtatgctcaaattgaatttgacttcattgtcatgaatgttatgtttcaagcttcctggtatagcaacagtcagcaccagaattcttgttctttgacaacataactgcttccttcttcaacattgcattgtttaaaatcaagggtccatttctcaaaagagcaattagagaaattataatatcctccatgtagagaaagcaactcttttctcactctatcttgtatccaaggatagctgagcaagttcaataatgattggttaatagattcctgtcaaaaattgaatgagcatcaccttaattgccttcagaaactagaatttacttggtgccacagaactattctaagtacaaccgattttgtttcacagtattcaagtcaagttcttagtggcaaccttacatatagtgagtttagataatatacaagaatcaattctactcccacaaaatctctgtgataccatgaaaaaatagaactatttgttgctttatctctatcatgaaaaattaactgattatttctcaccatgaagctaatccaaacacactaataatttggctgagcataatgcagttacatgatggataccttctcacagaatttgcattgctgatcaaagctaagatgagctgtggcagcttttgtcctttgtttggcaagttttccattggcaacccacttgtgtatgaagtttctagaggatatgaacaaactctaatgagaattagagatataataacaactgttttaatggtgaaataaaagttttgaggtgtagcagttagcaataccttgattctgcatcttcttgcatattcatcaaagcttcaattccagcgcagctactatgaccaatgactaatatattctcaacctaaaacatttcaacaaccattttgaattttgcagttatatagggcatgccctaataaac

SEQ ID NO: 121004 - DNA, 372 bp, Glycine max
  Clone ID: PAT_MRT3847_80272C.1
gcaaaaagcaaaaccctttttttattacttatttttggcttgggggtttggttggaacccggggccagggtctttatggcttttacaaccgccaaacttttgtttagcctttacctaacccttttttagttcccttggccttttttggtttggttcaaacctccggcctggaaaattccataacccttaaaggtttttttaaaaccaaggtcaagggcctaatgctaagggggattaaaccgttttcctccttaaccattttgggcttaaaaccttccaatttttaaccaggggccgggcccagggttccaaaacacaggttggtttccaaatttattttttggaaggctaaaggggcccctaaaggttggt

SEQ ID NO: 121005 - DNA, 666 bp, Glycine max
  unsure (1)..(666): unsure at all n locations
  Clone ID: PAT_MRT3847_80273C.1
gaacgtcgcatgccacgccgttacgttaagccttggatccttctaagcggccgccctttccccccccccccccccccttgggacacaggaaaaacaataaccactacacaattctagtttaaatttgtctggcaacattgaagcattttacaaatatagaaagatgcaaaataaataaaaagacaactaagcacaggaatggtgacgtagtcattatttccgattaatgctccactaacatgctccattgagatgccaacaatctccaaaaccttttgttgtatatcacatttataaattcttagacttcccccatcaatctccactccattgtaaaccatgtcataagccaacgcacgagcagatgcaaggtcattcatgtctctagcctttgctctggatcattccactcaaacatcggaaaattaagtgatccacaaaactgaatgcctgccatggtcaaccaaacctaggtatgggctaataaacttaaacgctaaatttatttaagatgtgtgatgacccactgcaaaaaaatcagatcgcttggtcctgtagagcatcgccttaacaaattccctctgggtnggaggatccatacttgatactaaaacagagattccctcaatattcccatcatccaagaccttgagaaaggcaaaccct

SEQ ID NO: 121006 - DNA, 661 bp, Glycine max
  Clone ID: PAT_MRT3847_80274C.1
ggctcgagctagtcacaatttgttggaggagaagagatggtttggccaattaggtccagaataagttctcttctctgttctaaggcacctttagttggttcatacatctatgactcatgtgggtgcttacgcttttctgctccaaccagctcctccataacaaggcattggccaaaaattatggattgggtacaaatggaccgttgccgtgcagcagcatcgttaccttcgatcaaagagaaacaaccagaaagtcatagtaatcgtgtcagactcggtcaagaaatcaaaggtcttgatgaagggaatatggctgaaattgatagctatcaaaacttgtttggtttgatgaaacagaggtttctgagtttcaagagccaaaaatatataaaagagttggagcattttgaagctcttgctgaagctcaatttcctaaggtgatagcaaacaggttacctagcccatttaattttcttgtagtacaaaactatcacattttagcttaatttattgggtatggtggtctttaactgataaatccaagtacagtttatggtgattgcttgtgcagactctaaggtatgcccctctaacatattaggattccaacctggagaagtctttatgatacgtaacattgccaatcttgttcctgtgatg

SEQ ID NO: 121007 - DNA, 421 bp, Glycine max
  Clone ID: PAT_MRT3847_80275C.1
tgaacagaatttttttataaaatgaattctaattaaggacaccctaggtactacgccggtaaaaggtcaacaaccctttggctggtggggagtaagaacatgtgacattattaccatcaaacccaaaaacagttctcatcattatacacatcttagacgaaactgaccccaccttaaaataaacccagttgttatttgctacggttaccaaaaagaccggagtctctttaaaacttgactgggcacacttgcctctggcactgtgggaaaaaaaagtactgaacctgaacaagtattgtccaaaccacgttcttaatgacacgtcctaccgaaatggccaaaatgcatgaacactccttttggcaatcctcgttgtgacctttgctcaggcagcgacttttttgtcagcactctagaagac

SEQ ID NO: 121008 - DNA, 341 bp, Glycine max
  Clone ID: PAT_MRT3847_80276C.1
caccgctgaaatcaaataaaagcggaatttaagaaatcttcatctcgccggctcaccccacgacggcagatacaaattctggactaaacacgagaaaaatcttgctaagacacgaagaggaaacgacggaagcgattagaaacaaaggcattcctgctgatgcccttgcaaagcgagctcatgactttgaaaaacatgttgtacacgaaagcctcaaggatcaaattcctgctgttgacaagttgcatcctactaaggtcaatacgttcgcaaaaactatgaacccttagacaaagcgatgttggtgatctcaaacttctcactgatggcaagttgtctga

SEQ ID NO: 121009 - DNA, 416 bp, Glycine max
  Clone ID: PAT_MRT3847_80277C.1
aacctaaaaaaccaaaccaaaaccggcaaaccaaccaaaaaaccctaaaaagagaaaaaaaaaaaaaaaatttccaaatccctcataagaggggggtgagcaacccaaaatacattaacaggaaaaaaaacaaaagggggggggggcccgggctcccaaaataccgtgaccttgttaaaaagctaaaacccaaaccccgcggggcgcccgcgggccgctttacaaaccggaaacctgggccgcaccctgaaatacggaaccggcccccgcgggggaaaaggcttaccaaaaattgagacacaaagagaggttgtccccataccgagaaaaacgggcccaggggggaaacctccaacccccgaccccggaaaaaaaaaaacaagccgaacccccgagggtcaaccccgggggaaaaa

SEQ ID NO: 121010 - DNA, 291 bp, Glycine max
  unsure (1)..(291): unsure at all n locations
  Clone ID: PAT_MRT3847_80278C.1
cggctagagctcgagccgaatccgctccagcaataactgacactatatggactgacctttggcttcatgggcacagtcatttaagagcatatgctcttagatagtctcccaatgccccaacttagcatgattccgaanagaaagattgcctgcgcccaacttgattactttcatgggtataggctatgacaacccgaaggcgctgcctgatgagaggactccgcttctcccgaaggtacaataggtccacatatcccactgcccataaattgcgccgtttccagaaggggg

SEQ ID NO: 121011 - DNA, 118 bp, Glycine max
  Clone ID: PAT_MRT3847_80279C.1
tataataattcactcatcatgttcaattaactaagttagatctccttaactagtcattgtaaatagtaacaatttacatatatggagacaaaaataaagcaattatcactataaacaa

SEQ ID NO: 121012 - DNA, 354 bp, Glycine max
  Clone ID: PAT_MRT3847_8027C.1
gaattcccgggtcggccgacgcgtacggtggccattaaggcaatagtgttctggaagtaacatttttctatagcaaacttatttttgggtggcatctaatgtgggtgtacaaaccgttaattgattttcttgaagcataaaagaaattagttttgccgtatcgggatgaagcaatgctgtttcctgcagaagtaaccattaaatcagagtttgtgctttgtagtgtgatatttgtttatgtaagacgccttggattacatatttctaagagaatgtcattgtcatcagattttgtgccagttatattatttatacaacaattttctattaaaaaaaacataataatcacttatt

SEQ ID NO: 121013 - DNA, 445 bp, Glycine max
  Clone ID: PAT_MRT3847_80280C.1
gtcatattcttattcattcatattcagaaaacgcgagagtccaaggctcatgtacccacaatggaagaaacagcttgaaccatcatgaagggtgggctgtgcaccctcacaccttgccaattttcagatgttactggctagattgtttacgacaccaaccaccacgatggtcgtgtatgcttcatggtttacttcccagcggtcttctctttaacccttaatcatgttcacactctcacactacttcagaagaccctactaattgtccgtcacctactttactctctccacctactgaccgtcacgtgggcgtctgtgtacaccaccacacggcagtgcgacctggacgccgcgctgcttctacatatcctctgtgaaacgcacaagcacaacccacatgtcctggaggcgacgttctacgtgtggagaagaaacttgagcaaag

SEQ ID NO: 121014 - DNA, 344 bp, Glycine max
  Clone ID: PAT_MRT3847_80281C.1
cggctcgaggcctctactctcaaccttctctctctcccatactttcatacatagaggtggggtttctattcatcgcacattgcccactcttcgcagtaccatccgtaatgtctgtcacagcggcacactacagataaaagagctacagctatctctcattacacaggtgcgcggaaaagacctatcatgtgtcagacacccggcaaaacaaaggcagcccacttcatagaacctctccgagagcgggaaagaacacatcctttctaactttcaggggagcaatgacaatatctgagacggagctgtcatgaacacgcgcactctgcaaggcggctacacatctg

SEQ ID NO: 121015 - DNA, 1368 bp, Glycine max
  Clone ID: PAT_MRT3847_80282C.1
ggctccgtcccggtctcgtcccccccaccaccacgcgcctcgccccccggaagcggacccccctgcggctctcctccttccgcccccgggccactccgaattcggcacgaggcagattcagatggaaccacattcagggagtaccatctcttttcaacctcaaggtgtgacaccatttttacccagtcttggattcctcgctctcctagcaataccatcaggggacttgttattcttatgcatggacttaatgaacacagtggcagatatactcatttcgcaaagcacctcaatgctaatggtttcaaggtttacgggatggattggcttggccacggtggaagtgatgggttgcatggttatgtccattctcttgatgatgttgtttctgatacgaaaatatttttggagaaggttcttaacgaaaatcctgggcttccatgtttctgctttggacactcaacaggagcagccattattcttaaggctctgcttgacccaaaggttgaatctcgcatagctggtgctgttttgacatcaccagcagttggtgtttccccttctcatccaattttgctggcacttgctcctatagcttcaattttgctgccaacgtatcaatgtagttctgcatataagaaggggtcaccagtgtctagagacccagaggcgctaattgctaaatattctgatccattagtatgtactggacctcttagagtacgtactggttatgagattctcagaattacaagctacttgcagcgaaatctgagaaaattgagagttccattttttgttctccatggcactgctgattccgtgactgatcccattgcttcacaaaaattatatgtagaagcctcctcatctgacaaaactatcagactatacgatggtttcttacatgacctgctctttgaacccgaacgagatgctatcacacaggacataattcaatggctaaacaatagagtatgaatatactaagtaggtgtcagtgaaaatatatcatgaaaattgaagaagcacctttgtcttgggtgggtaatttctgcctctttgtagaggaaagaaatttgaagctgaagctgcataaattgaggcattcttttatcttgaaatcttaagaccatatatcagcttcttttatggttaggatcttttctccgatccagtagttatccatggagcgcagtaagtatataccttcagttagtttttttttcctttgtcaagtttgtccatagaaagtatgtaccattttctttgtcgatcattttttgtgatgattattagcatttgtgccaaccaacaagtgggccagtgcttgcactgtttaaattgtaataacaaagttttatatca

SEQ ID NO: 121016 - DNA, 444 bp, Glycine max
  Clone ID: PAT_MRT3847_80283C.1
ttttgataaacactcgggcgttggtgcaaatgttggcttcgttaatgatatctggagaccacaggttcactgagacagcaatgttgaattgccgagatttggacatgttggttgcttattatacaatagctacatagtttagaaaatatctaccacattacattacgtggtatttgcttaccttgctgatctacattctcccatcttttctgactgatgaaattatatataagcggcataagagaaatattcaaatctccgtcttatttcacgacggcagattcaggttgtggactttacaccagaaaaatcttgctttgacagaagaagaattgatggaagtgattagaaagagatgcattcctgctgatgttcttgcaaagctagctgatgaatttgaacaacatgttgctcatgagagtctcaaggatcaaatttctgatg

SEQ ID NO: 121017 - DNA, 152 bp, Glycine max
  Clone ID: PAT_MRT3847_80284C.1
ttcataaggctattagaatttcgcatcataagggacttgaatgggctgagaaaacatattggttcatgtgaactctccaaccaccaatctatggtgagagctacaaaacatgacaatttagtgacccataatggagcactcctggctattgg

SEQ ID NO: 121018 - DNA, 226 bp, Glycine max
  Clone ID: PAT_MRT3847_80285C.1
atttgaggtccaaaaatgttggtgtagtattaatgtcgtgatagtttgatgatacaagatggaagttcagtaatagcaggaggaaccgttgctcatataggtgtagtgaggcttatttaggtcgtgttatagatgccctggctaaaccacttgatggtcgaggagttatttcagattcggaatctcgattaatcggatctcctgctcccggtattatttcgagacg

SEQ ID NO: 121019 - DNA, 302 bp, Glycine max
  Clone ID: PAT_MRT3847_80286C.1
tacgctgcgagaagacgacagaagggtgccagtttaatatataaggaatgccaggatattattcctaaacattatggaaatgttagcatttttaatcttttccccactctagacattgatttatgcacatttatgtcaggatataatttctgaacatcaagtaattttgttaattatattacccttaagaccattgccaataaaactttcattgaaatcctatacttgatgttaactatcgataaaccttctattactcttttgtttgccaattatctaattcttctaacagtattatatta

SEQ ID NO: 121020 - DNA, 283 bp, Glycine max
  Clone ID: PAT_MRT3847_80287C.1
attctctctatgtatttccctaagtctcccttcactattcatttcttcctcaagattctcaccggtacataccactcaaccttgatgtggtcatctctgacagcatcctcaacgtaaaagccaatagtcatgtcaaagaatgaatcaccccggacgatcattgtctcattttcgccttaacgcaacttgttagacggtcgttcttcttgctagttacaagattcataatgtgagtactcttcagctcgtcctccgtctccgtggagtgattcacatcttcgtt

SEQ ID NO: 121021 - DNA, 715 bp, Glycine max
  Clone ID: PAT_MRT3847_80288C.1
ttcacttctaagatctcaacggactctatatctcaaattgtggagaaagatgagcttttgaaatcaacggtctccaaaattactgtgattcattcccagaaggatggtaaaaacatcacaggcaaagagaaaaataacttatctgacagtcttttgaagaaaaggcaacaacaagaaatacctccacctttggaaagagaaaatggcaacaaggattctatggaggtcagcaatgatgttaagttgaagaaaatgctgaaaaaaaggaaaagaggggtaaatattatatttgaaggagattctcaggcagcagagttggaatttgaaagactcagcaaagtgaagaggaaactagatagcatgaagcagaaattaaatgaagttcaaaattgcagagcaaagggttcaaatgaaccctctattatatatgtacccacagcccaattaagggaaaaggttgaaaaataattatatttttttattacatttttgcacagcagagtaatacataatatatgttgtaagtttgatgtacctaccttacattataaataaaaatgctacaatcttttttttaaagttaataatattagtatatgtccgttgctagatgctcttggcagagcaatgagcaattaaatagaaaaaaaaaaaaaaaaaaaaaaaaaaaaaaaaaaaaaaaaaaaaaaaaaaaaaaaaaaaaaaaaaaaaaaaa

SEQ ID NO: 121022 - DNA, 225 bp, Glycine max
  Clone ID: PAT_MRT3847_80289C.1
aactgagcaaaattagcctgcgcgcgatgcgttcacatggaagtgtggactgctaattaggctccctgtgtaagaatgacacctatgggtagagcccttaaatttgtgacgcttaatagaccacaagtggcaatatagtcccgcttcatatagttgacatagcactaatcacagaaaccatacttttagcctttttattcgaaatgtggagtcattaccccattt

SEQ ID NO: 121023 - DNA, 378 bp, Glycine max
  Clone ID: PAT_MRT3847_8028C.1
atgcaaaatgtataaatcttaacaccctatttatttataggagccattgttttggggcacgatttttttcgactggattatacaaatacttgatgatcatttaatgactatacttggtagaacttgttttaggtgaagaatcagccttggtatttggccggagagccagggcatgatacttgttattatttgggctaggggaaaaatcatcgttttcggcaatggttgattcggagggtaaagcataatctttgggaacacttgggcttgagataaacaaaatattttccgggacgcttgacgctgggtcaaaaggcaggacacctactaatgatgggggtcggttcaaaatcttcattgtaggaaacgcttgacctg

SEQ ID NO: 121024 - DNA, 742 bp, Glycine max
  unsure (1)..(742): unsure at all n locations
  Clone ID: PAT_MRT3847_80290C.1
ccacgcgtccggccgatctgaattctgagatccatttttgaaaatctgaaaacagttggggcagaggcgccctttcctttactggtagacaagaaatctttcctttgcaaacatagagagagagagagagagacatggctgataccaagtttgcgtcccttcttttggagaatttgaagctacaggatccatggcttccccccgacacatgggaatccataccttctgaaagtgggctactgctttcttctcctatacctaattcaaaccaacctctctgccacctctccactctctctgaatctagtttggtgaggttggccgtgaatgccatgcagggtgctaaatcttcccttgttattattcaaaacctgtctgccatcttttcttctgatccatctgtcaggtccttcctctggaatcgtgcttccaccactcgttctcttggaaatatacttatctctattggctgcaccggctctctgctctttcttctccgtgcttttgttgattattttacagacacttttccactcattcatcatgactctcctccctttactctcgttaatcaagcctttgctgtttctgtgggaaaagtcttggaaggctacatctgtggattggacactattcatacatctgtacttttaaggcgttcatctaaggatgtcgatttcactgtgcctggngtgtttgaagaatgtagtgcattctgaaatacacttcttgagtttacctg

SEQ ID NO: 121025 - DNA, 227 bp, Glycine max
  Clone ID: PAT_MRT3847_80291C.1
gggggaggaataaaattttttcttaaaaaaaaatacaggggttggtaacagtttccttttacaaaaattggcatgagattcatcaaaggccaggggggaacatcctatttaaaaattagaagtttgggggttgaaaacataaaagccaggaccagccttggttgtttgaatccccaaaaactgtttgtttgtcaacttgtgttaccaaaacttccccaaatgataaa

SEQ ID NO: 121026 - DNA, 285 bp, Glycine max
  Clone ID: PAT_MRT3847_80292C.1
cattacccaaaacactttccgccgttttatcaaatacaccggagaacaacatcaactatatctctaaacgcacactcaaatacaactacacttttaacacaaacccaaattctcatataactccccaattttcctcacctcacaatcattattaattccattatactcgtacaaactacaattacacccagccaacacttcctctaaatacctctttacttcatttcactaatcatatttttacacatacaaaatcactatgtaactacatacaataccactttt

SEQ ID NO: 121027 - DNA, 223 bp, Glycine max
  Clone ID: PAT_MRT3847_80293C.1
aacagcgtacgaatatggttttctgattcttcttaacactgttcattgaagggttcagagtattctcaacaagactcgcgctctgcgaggaatcgcctctgggataagagtcatactgcgatttgttaagccaggaatcccgctgcaggacatcatcccgctgactcttgatacataggctttcagagacttcatagacttgcatgtttggaggtaccgatgt

SEQ ID NO: 121028 - DNA, 278 bp, Glycine max
  Clone ID: PAT_MRT3847_80294C.1
caggcctaccaaaacgaaaggcgacttaaagcatacaacacttgaccgtgcccttaaaaaatcaaagagctgtgagatcataaatgtgtgtatgaggacaagctacataatacacatgacaaaaaggatcactagaagatgtaacgactgaagaaagaatagaacacaaatgtctattgctttggaagaacaaaactatttgaaacatcttcttagacttcactttaactaagcataatactaagaaataagggctttcagcacagagtgactaaaga

SEQ ID NO: 121029 - DNA, 376 bp, Glycine max
  Clone ID: PAT_MRT3847_80295C.1
ctaattatattcaacccccaggacaggttgacgacgggaaataccggaaacggacgcaacactagctagatttcacgaagactgcagtggctaagtacgtattggtgagcaacaactgaaggtgatgagaagtactttatgtgctgggcaaagagtttgaaaatcatgttgtttatgaatgtctgatggatcgatgaacagtagtctataagatgtaggatattgaggcaaattagtacgtattgtgaatgtaccttagacaaagggttaatagtgagctcaagcttgtgactgatgggatgaaggctgccaataaacatattggtgtaggtattattggagagagggagaaatttgtagcctaaattccactatc

SEQ ID NO: 121030 - DNA, 110 bp, Glycine max
  Clone ID: PAT_MRT3847_80296C.1
tcggctcgagacttagcacatggagatggtgctcttatctggagctctaaaagataggtcaaagagctaaaggaatcggataaggaactcgatctagaactgaaggaaac

SEQ ID NO: 121031 - DNA, 1165 bp, Glycine max
  Clone ID: PAT_MRT3847_80297C.1
ctcgctgatgagttttaattaaactatgctatggtaatgaaaccgcgtttttggtgtttcacactttgttcttgacagagtcacccccaaaacaagcctaaatcgccttcttcctctttccttcttctttttttttttttctctctctctctctcattcttttggccttcaaagttcgaagcacccattttttgtattttcatttccctaggagtttgattctttgtggagattttgcatttattcactttccttaaagtttgtttccctgtttgctttttcggattggttttgagattgaattctgaattctcgcaaattctcgcaccacctaccctttattctcctcttttgtaacatcagagattgttgtaaagttttgctctttctgggttttgaattttgtcacttccaccctgaaattctacaaggtgtttgatgttggtatcataataagtcaaactatggttttgagggtttctctgattctggttctccttgtgttacactgttcctgcactgtggaatccatttgggggcatcacaatgatctcaacaagaatggatcttctcttgctgcagtcaagtttcctgatcatgcacacttcaatgctgtttcttcttccacagaaactgggtgtagtttctccaagtcagagaaatttgagccttcagttgctaccatggcatcaaatgaagacactgatggtaaagagggagaggcttttgtggcagcaaaacagcacaagcaatctgtgaaactcaatttgagacaccactcagtgagcaaagattcggagcctaaaaaatctgtggttgattccacagggagagacttgaagagaattcagacccttcacagaagggtcatagagaagaagaaccaaaacacaatttcaaggttggagaaagcacaagagcactcaaagaagtcctataagccaccgacagtggctgcggcggccccgccggagtatttatccggtcagcttatggcaaccttggagtcaggggtcagtcttggctctggtgagtacttcatggatgtgtttgttggcacaccccctaagcatttttctctaattcttgatactgatagtgaccttaataggattcaatgcgttactctgtatgcttcgtgtgagcagaatggaccatattatga

SEQ ID NO: 121032 - DNA, 753 bp, Glycine max
  Clone ID: PAT_MRT3847_80298C.1
aattcggctcgaggaactggggcagtaactattcgggtggctggagttttgaaagactggttacttatcactctttcaactgtcttatttcctgaatcaaagattaccgggcttaatgttattggctatgctattgctttaagtggtgttgttttttacaactaccttaaggtcagggatgttcgcacatctcaacttcaaagtatccaagatgaatcagcaaaggagctgcagacggagaagaaagcagatgatgccatggacaacaaagatgaggcttcatggaatgattcagtttctgatactcatttagatgaagaagcacctctaatctcttcgcggatatctcattttggagttggaagaaagccagcttagtggcaatctagcttagagtctataaagaaaatctcatattggaagaaagccagcttagcagcaacctagcttttagagacaaagagcttgcaggaaccaaatcaaagtatctgtcttgacctttcttcccaaaaggaacacacaaacgcctccttccaaaagaagagggataaagctaggagaaaaaaaaaagagcggaggaaacatgcatattcttttggtagagtttattagtttcatgtttaaagtatatccagtagtaaatcgattcattttttagttgtcatttactagtgtagtgtagccaaaatggaaacgcagattgactactgttaattgaagtttagttacaatttgaaaatgatatggttcacc

SEQ ID NO: 121033 - DNA, 319 bp, Glycine max
  Clone ID: PAT_MRT3847_80299C.1
gggttgggttttgtttttttattttcattttttgtttgatgaaatgaacctttttcatactatgggagaattaacaagaggcgcagggcctcgtgacctgaacaacgataagggggccccacatacacacggggggagaaaaggcggagacccattaaacggtaggaaaaaaccaacagggggcccctcccgcccaaaacaaaaaaaaggcggggggggcgccaaaaaaaaaacaccagcggaaaacggaagggaatgccctccgcgaaggggggggggccaagaaccaacaaaaacaccctctttaggaaacaaaagg

SEQ ID NO: 121034 - DNA, 390 bp, Glycine max
  Clone ID: PAT_MRT3847_8029C.1
ggctacttaattgatcttacattattaatttaatcaaacatcattacaatgatcgacaacgatcgttctaagataaaatagtcctagctaggtcctttttcacattgcttattttccaagggcccacaaggcaggcttattcaccggggccacacccccaccccatcacgtttttgaccccaccgaaggatccaaacctagttagcgtatcaagaaagccactggtccatttttttaattaattaaataaaaatgtggccaacccgctggttccaaacctcacgggctttgccaaccttattattggcggtgtcaaacaaaatcctaaggtttctgttgctgaaagttggggatgccgttcaacaccgggtttacattgctcgggggccg

SEQ ID NO: 121035 - DNA, 710 bp, Glycine max
  unsure (1)..(710): unsure at all n locations
  Clone ID: PAT_MRT3847_802C.1
attcgagctctgtacccggggatcctctagagtcgacctgcagaaatggtgatatgcaagcgcacacagcaagaatgctaagaatagaggtggtaaagaaagagcaaaacagcaagaaaattatcgtggttcagggcaatttgatgagacccctacatccacattgtagccgattctttcttcattacttgatcacaactgcacaacatacaacagcaagacttctagggaagtttacaatagcctctcctcacttgcactcagagttttttatttgatcacaatgaatctaaagaatatgtcctacaagaattacatcagttgagacttatatacaccaattctagttacaaaaatgggtatcacacaactaataggtttacaacatatttctgttgcaaggctagagcttagctaactaactattgttgatccatcttcataacattctcattgggttattttgtggcttgaatttggtgagatcaatgttggattcgaagattaggagggggattaaaaatctaggtattgtttcatgatgatttggtcctaactatttgcaattttagtctttggtttttagagagagaaagtatcatgggaagggggggtcgagctcggcgatagggttgttagcttttcaagatattttctagaaagaggataatggaggaggacatnaggatgataattggaaaaaaaaatat

SEQ ID NO: 121036 - DNA, 277 bp, Glycine max
  unsure (1)..(277): unsure at all n locations
  Clone ID: PAT_MRT3847_80300C.1
gacccacgcatccaaccacgcgtccgcacttttcttgcacgttcgatcaacttgacatatcatcttcctgcttggtttgttaaactagaggagaagtttggtcatacctggctccttcactctgccgtgagcttggaattgtggtagtcgcaaccttgccattgtctgtctaagtctcaatagccaaccacaagcttggtcttcacttcgaccatcgtgcgggtgaggtaatcaatgaagggcaagtcatanggtatttggatcaatttggcactgg

SEQ ID NO: 121037 - DNA, 204 bp, Glycine max
  unsure (1)..(204): unsure at all n locations
  Clone ID: PAT_MRT3847_80301C.1
aaaaacccccgggggcgcttgaggaaagngggcctactaccgcaagcgacaacaaaacagcaaaggcgagaaaaaacagcaagccggacgcaaccgcaacgcacgngggagccacagaaaagaacaacgacagncncgcaagcgccgacagcaacaacgccggcgcagggctgacgggcgaaactaaagacaccaaccccggaa

SEQ ID NO: 121038 - DNA, 342 bp, Glycine max
  Clone ID: PAT_MRT3847_80302C.1
aggaagcctaagccgatagctgccaattgttttgagacaccaattctctcatacatgaggagagggacacatgcggagttttcaggggctacaagatcagcaagttgaccaactgcgctaccatatacgtgcgaagagcaagtgatggacgcaggaaaccggaaactactcactagtatatgacatccattatgaatagtacacaatagatcaggtggtgtgaagtgtccacttatatgacccccctcctctagtacgagagatttgcactcggatagcgtataacttgagtcagcgttgcaattagtcagtttgagtgtcacatagttcaatctactttat

SEQ ID NO: 121039 - DNA, 201 bp, Glycine max
  Clone ID: PAT_MRT3847_80303C.1
aattcccggtccgaccgactcgaacgctatttctaactccgccatttctgccaccacctccaccgtcacgtcatacttttttggcggccgtctcagcaacgccgcaaccttaaacaactgaagattccacacactcctcaacttcagcaaaaacaaagcagcggcgccgtcaccgaataaaaacgaagtgaaagctaaact

SEQ ID NO: 121040 - DNA, 322 bp, Glycine max
  Clone ID: PAT_MRT3847_80304C.1
ctttcgttctcgacaatatgtgggggctaaaaccttcaaatgtgatataattggggctggttcacattcttcagaagatttccctgcaagggaagagctataaacacccaacttgactgatgccagattgatacagagaatacatcctccatttaatgaggtacttgctcacatggaagcatatatgttggaattgtctcttgatgatgttgaaactcctaaaggatccatgttggatcttaagatttctgaatctaaaattgcacttcccaaaaacacaggtggaggaaccattctgcttaaagatctattgccaaatttt

SEQ ID NO: 121041 - DNA, 271 bp, Glycine max
  Clone ID: PAT_MRT3847_80305C.1
acgagcgacggtgttgcgaagatgaagcgtttggggctgatcatagcacaggaggcgtcacaattggctcgtgacgatcgctttcccataccatctttcttccgtggctgcgagcgacagcgagttcaactggtgtaagatttggtatggcttaacggctggtgcttgagccgcccggtagtgctatgtttattcatcatggtgagtttgaagctgtctgcattgtattggcatactatgagagcgatgggctatgccactgggtacgggc

SEQ ID NO: 121042 - DNA, 660 bp, Glycine max
  unsure (1)..(660): unsure at all n locations
  Clone ID: PAT_MRT3847_80306C.1
catgaagccctgttaacaaaaaaactctgcaataaaggaacaagaaagaagcatgcgtcttcgttatccccacactctacttcccttgttcacctccttaaaactcaccaccatgaacactcaaaccctcttccactcttctccattcccaaacctcaaaaacacgtttttctctcaaaggcgccgttttccctctcacagacccttcttcaccgtgttttgttccaaacccatttcaaggaaccctccatcgccactcagaaccaatggctaccacggttcctctcatgccagcatccctagaccagttcaattggagagccctatggagaagagtgtggagtttcagttaaatattttgaaaaagaagttggaggctattggaatggaaactggaatgtgtgagccagggcagtacaatcacttgctctgtccagagtgcctaggtnggcgatcaggaagaaaggagcttatctctttatattgcaccagatgggggatctgctgcatggaattgctttcgtggaaaggtgtgggtggaaaggcagtacacaggcctttgctgntaaacagttctgcaagacctcaagtagaccccggttaaaaagataagaaaaattacagaggnaggaaattggaactagaaaccactttgtgatg

SEQ ID NO: 121043 - DNA, 337 bp, Glycine max
  Clone ID: PAT_MRT3847_80307C.1
attatgctcccaaaaactgcatctttcaccaatgccgcacgagagcacttcaattctctctacaataagacaataacgggctttatacttcacaatggccggggagtactaccaatctaaaattactgttctgcaacatttatctattacagaatccatatttgcattgacatgaaccatcttttgcatctcgagcaaccttgattcgggtttcgaactgctttatagaaactgcggactctaaattattaaatttttgtctaatgacgaacatgcggaacctagattagactaactgtgacgcttctacaattgtcaaagttcgataactgatctt

SEQ ID NO: 121044 - DNA, 167 bp, Glycine max
  Clone ID: PAT_MRT3847_80308C.1
cccacgcgttcgacagtacctggatgccactggtgatgaaggtgactatcttgcggacgaggacgtgcaagagcatggccgacatgacatgtcacctagaacctggtaacgtatcgccgcggctcaaagacgtgtctcatgccacaacttcctgtcgcaacttaatt

SEQ ID NO: 121045 - DNA, 289 bp, Glycine max
  Clone ID: PAT_MRT3847_80309C.1
atatatcactgcatgagaactgcggtatccgtacccccaataatcaatggtgcacattgaaacatcactctggtgactaagaatgaacttatcgcatgtactgcctctgagctaaccaaagccaaggtcgttttaatcacaatggatcacccttgtaagaattttgggatgcaaattggctttgtatgaaacgacgccattccttctgatggcaatgtggaacatgtaccctgatttatttgactacatgagagaagggttctttatatgacattactggattgattgg

SEQ ID NO: 121046 - DNA, 492 bp, Glycine max
  Clone ID: PAT_MRT3847_8030C.1
ggaagatattccacattcagcttgggaccttttttgctgggacagtgagaaaactttgccaaataatttatctgcagaattgctctcttgcaaattggatactgttactggccaatattatcctgagtgggctccaattaattgtcgagttcatcgacaaccaattcacatcactgaaggaaattatgtcagaaagcacgatgccagcattgaatatgatgcacgcacaattccaaatgattgtggttcattggttgttgccaaggttggaaatcacaaacaaattgttggcttccatgtcgttgggagcaaaggaagactgggatatgcttcattgataccatatgttgagcccgttgtgcaagcttaaagtgctgaagtttaccttgactccttccctgaggaggttgttagtcagcaggacttgctcactttgtgatttgaaatctcgtgctattgtccattgcctctcaaactatttggtgaaactcc

SEQ ID NO: 121047 - DNA, 193 bp, Glycine max
  Clone ID: PAT_MRT3847_80310C.1
ggctccaaacctgtctgtatcacttcccatttcaaaacccaccaatccatcaccgcgatccacaccaaagatccaagcttacatacacatgcatgcgcggccgttctagaggaaccaagctaacttacgcgtgcatgctaccccatagctctcatatagtgtcaccgaaataaaattgactggccgcaactta

SEQ ID NO: 121048 - DNA, 314 bp, Glycine max
  Clone ID: PAT_MRT3847_80311C.1
ccgccctcctttttttttttttttaatagcacttattacaagtaagactaaatgttcgtacgaaacaatgatggaggagcccccggcacacaattaagtttagtgcagaggcggcatcaccttgcaaataaggcggcctaataataaaattggagatcatatgttcttatccaatcccatgctaaccaatcactaataagcgtgtgtgggtttgataaaaacgatagaaacaaatgtgcgctaaacactgatgaaatgaatattcctatactgctggaaggaactcttgtggatcgaaaacactgctgtgacaa

SEQ ID NO: 121049 - DNA, 659 bp, Glycine max
  Clone ID: PAT_MRT3847_80312C.1
caactctagatcttaaaaacttttgtcactgaaggtgtcttggagccaattgtagcagttggtaacatcaaacacatattcagacaatgaggcttgtcgtctcagctctttgtgttcttgtgttattctcttgtgcagttgcttatgatcctttggatccaaacggaaacgtaacaatcaaatgggatgtaatgtcttggacaccagatggctatgtggctgtggtaacaatgcacaacttccaaatgtttcggcacatcatgaatcctggatggaccttgggatggacatgggcaaagaaagaagtcatttggtccatgataggagctcaaaccacagaacaaggagattgctctaagttcaaaggcaacatacctcattgctgcaagaaaattcccacagttgtggaccttctccctggtgtaccttacaaccagcaattctcaaactgctgcaagggtggagtagtggcagcatggggccaagatccttcacaagctatctcatccttccaagtgagtgtaggccaagctggtacctcaaacaagacagttaaacttcccaagaacttcactctctttgctccaggaccaggctacacttgtggccctgcaaagattgttccttccaccaattttcttacgcctgacaagcgccgc

SEQ ID NO: 121050 - DNA, 221 bp, Glycine max
  Clone ID: PAT_MRT3847_80313C.1
cttgcacgactcacctacaatcgcgcttgatccctcttatcgtgaatcgctatctatgcaattcctcacaccttactacctgcagagtgccagtgatggcactccctcagtccatctctgccttagtgaccacactcacgctcttctcgctgacaaccaaaccccagatagttagcccctttggcttcttctcgatccataagacacgattttcaacgtta

SEQ ID NO: 121051 - DNA, 586 bp, Glycine max
  unsure (1)..(586): unsure at all n locations
  Clone ID: PAT_MRT3847_80314C.1
atctaaatcatgctcatgcagttgattccctacagaattctgagaaaggaggagctgctttacttggtgtttgtcgaggaaaggtttctgaaggaattgatttctccgatgataatgccagagtagttattattgttggtattccatttcccaatataaatgatattcaagttgcactgaagaagaaatataatgacacctacaaatcatccaaaaatcttttgagtggaagtgagtggtactgccaccaagcattccgagttttaaatcaagcagcagggcgctgtatacgacataaacttgattatggagcaattgtcctattggatgaacgttttcgggatgaaagaaatagggcattcatttcaaagtggctaagaagaccgttgagagtatatgacagctttgatttgtcattggagggactaaaatctttctttgaggatgccaagaaacattatggcataaatacagtacatgccacacagagtttgggtttaaatggggatgtcgtccaaatcaaggatcagaatgcatggttcaaaaanaaaaanaaaaaaaaaaaataaaaaaaaaaagggccggc

SEQ ID NO: 121052 - DNA, 588 bp, Glycine max
  Clone ID: PAT_MRT3847_80315C.1
actcacaccactttgttttaggttaatattgtgaaagagagatcatgagcaaaagagtaaggagtccaaggttggagcttaggctgaacttgtccccaccaagggcagcagcaacctcaattatatcttcttcggagctgtcgcccacagagtcatcgatgtcgtcgccggtgtcggttcaatcgttggagagctcgtgtgtatcctccgaggctgaagagacaagggcaatgcttctcgtgggctgtcctcggtgcctcatgtatgttatgttgtcggaggttgatcccaaatgccccaagtgcaagagtactctgttgcttgacttcctcaacaacgaggaaaacaacaataccaagaagagtagcagcgagtgatgatgagacatgtgaagaacagtagctacatgcatcaccgagaaaaagtttgttttctgttattgttggatttccgttttttggttaattagagcagagattggctttttcctatctctgaagttttaattttctgtgaaatttggctggttcttactgtacgtgtacaagacaaattaagggaagagaatttaaaattagttttatgcta

SEQ ID NO: 121053 - DNA, 279 bp, Glycine max
  Clone ID: PAT_MRT3847_80316C.1
gacagcgaacagagtttgagtgagtagtatggatcccgacggcgtggtcgcggcggaggcgcttatggcgtcgggtcggagttcggagaagctgagccttccatcactccaatccaaaatgaagtgcgatcccgaaggctacgaatcggagctactccttctctacaaccaattcaattcctcgctcgaactctttcagaaacaagccgccatgaacttcacctccatctccggcatcggcagcgaccccaccgtcgccaacgacctcggcgacagggc

SEQ ID NO: 121054 - DNA, 785 bp, Glycine max
  Clone ID: PAT_MRT3847_80317C.1
taggtagtagtagttgtagcccctgcctgagattaactatatactagttgttagttacttacttacatacatagagatagagtcaatggcaattgcagctgcaaactcatcacccaccatgagcctcagccatagccagagccaagaggatgccaccaccgcctccaccaccaacaagcccgtcgacgtcgacgataatgatgatcacgagcacgacatggtcatgcccggctttcgcttccacccaactgaagaagagctcgtggaattctaccttcgccgtaaggtggagggaaagcgtttcaacgttgagcttattactttcctcgatctttatcgctatgacccttgggagcttcccgccttggcagctattggtgagaaggagtggtacttctatgtgcccagagataggaagtatcgcaacggtgatcgtcccaatcgtgttactacctctgggtattggaaggcaacaggagctgataggatgatccgaaccgagaattttcgctctatcggcctcaagaaaaccctagttttctattctgggaaagctcctaaaggcatacgaaccagttggattatgaacgagtatcgcttgccgcaacatgaaactgaacgatatcaaaaggctgagatatcgctttgccgtgtgtacaagagagctggagtggaggaccatccttccctccctcgctgcctcccaacgaggccatcctcgtcaagggcttctcatgacaataataagaagcacaatgaaatggttcagcacaacatcaacatgg

SEQ ID NO: 121055 - DNA, 1022 bp, Glycine max
  Clone ID: PAT_MRT3847_80318C.1
cacgcgtccgtgcttgatttgttcagcattattaattcactgaccccactccgcggtccacctcagctgccaccgtcttctttcttacttattcttctgcttcctctctttctctctcgcacgcacaaacacgtagcaatgaccagaaaggtttcgaatttctccgatctgatccaaagggtcaccacctcctgcttcctccactcattcgccgacgatagggaggaggaataccacagcgactcatttggaaacaaaccccaagacgaacaaggttattacggtgaagaaaagatggtgatgggtttgaaggtaatttcaagagaggccaagatagacacgcgcgtccgggcgttaatggaggaggtgttcgaagcggtatcggcaatgaagagtgcgtacgtgagcttgcaggaagcacactgcacgtgggacccacagagcttgagggaggctgacgtggcagtggtggcgcagctgaagaagcttgctctgttgagggacgggttccatgggagtgtgagtactgttgaagaagatgagggtagaagaaggagaggagggaatgcgccctacgagacagtgatgaagaaggaagtgaaggccaaggacttgcacaaagtgaagcttgggtgtgttgctaccctcacaagtcatgaaaacaaagctcggaggcctcacccttacacaaagagaaagcttggttgcaatagtcaaatgcaagaggcagggtttgtagcagcaccatccccagaagtcttggaagcaacaatggctcaagtaaaggaagcatcaaagtccttcacatctctactcttgtcgctcatgcaggatgcaaaatgggacatggctgccgcagttcgttccatcgaagcagcttctgacaaatactataataatcctgccacctccaccactacggtctcaactcttcacgccaagtacgcccttgaatcctacatcttccgcaaaatgttccaaggattcgaccacgagagtttctacatggacaataacaccct

SEQ ID NO: 121056 - DNA, 415 bp, Glycine max
  Clone ID: PAT_MRT3847_80319C.1
gataagtaaattatattaggacaaacttagccaggattgaacgggagggcgctaaatcaaactaaaagctctacaacagatagccctcccttatctaaacagtgggatttagcgattgaattggagagggctgcgttgcttaagctcttcacgatgagacacgacaagctactgacggaaggaggagcctggatatattctttggaaagagaaggatggttgtaatgaaaggaccaaaccacctactcggatggacaagatcatcaaaacctacctaaacgctattatcatccgtccattctctgaaagctatccttctgattggcacggccttcctggtaatcatacttatgattcaccatagatacagactcctgagattgttcttcatgcccaccagtaggaccttccgcct

SEQ ID NO: 121057 - DNA, 496 bp, Glycine max
  Clone ID: PAT_MRT3847_8031C.1
tggatgataagcttgtgttggctaacacacaagaattctttgatggaaattttccagtggattcttggttaccaatttttgtgaattgtctctatcctgtaagtcaattaccttcagaagctgtcgttgtaaatgttacatgtggtagtggacctggttgtttttcccaccactgcttggattagttctgcagttaacaatcgctcctcagacatcaacaaaagggttcgcacaccacttgggaaaggtaagaaaattgtttttcttattagagatgatccttttccagtagcttttttggctgttcttttttgggggaagaaagaaaatattgagttttatcgcccctaaccctatgctgacgccacttctttggaactgtaagaggctcaaatatctgggtggtgaagggccttttgcttttgtggacctacatgtaaaatttttttcccttatataaaaaaccctacctatcttccatgagcgggtgagatat

SEQ ID NO: 121058 - DNA, 1442 bp, Glycine max
  Clone ID: PAT_MRT3847_80320C.1
ccgcgcgagttcgacgtaagggggtcaacgggacgggttctacaggggcttgaggtcaacggtcaatgtcatcgccgtgaagaggccgcggagaaggcacacggttattcaagcattaagagtatgaccattcaaattggctgttatacacgatagttgctctatgatctagactagaggcttagttagggttttctgttaccgccatggatttcgagagtaggaggcttcatttgctcatctccgtggttgccatcattgctcttagcttcacagctgaaaaatgcagggaacttgttggggaggaggggtcatcccagagtggaaagtttacaatcttaaattgctttgatatgggttctggaactgtagcatgtgctgtcaaggaaggtgtgaagctctatttttacaatattaggtcttctcatgctgaaagagcgaggagtcaagcaattgagtctgccctcgttgatgctgttactcaggggatgtccccaacagattcagcaaaacatgcacagaaagaaggtaagaaggcagcaaaattggcttcccgtcaagccaagcggattataggtcccatcatttcctctggatgggacttttttgaagctatttactatggtggtactgtcacagaagggttccttagaggcactggtactttgtttggtacttatgctggagggttccttggggagcaaaggcttggtagaattggctatcttatcttcttggaagtcacctgggcagttgggttggtggtagaataggattaatggtttatgatgtggtcaatggagtgcatttgttgttgcaatttgttcagacaggagaaattgaagttcatgaaaaatccaaacgatctgaaagttcctccttttttggggaaactcctgtttatgacagctctgaaggctctggtgtttatgagtcacctcccagtgaagaatcctatgcctatgaatctactgaacgtcagagctatgaaacatatgaagattctgaactgtgatgaaaatttgcagttcatatattgataaaatttcaggctgctccgagggcctttagtgttgacaaaatcatctctcagcaaagaaagaatccaatgcctattctactgaacctcagagccatgaaacattaaaagattctgaacagatgaaatttttaagttcatatattggtacttgctcaaactttaggtcgattattggtgtttttctttaatgtctttgcttcaatataacagggattgctaacccctggagactttataagtgctccacctcttgtaattggcgaatgtagaaggtcccaccaattattctattgttcaatgtatctgttgccttcagccttcaagaaactctaaatagcttcgcttggattcaatggataaaaaaatgaagtcacaaagagaagttggttgaaaaaaaaca

SEQ ID NO: 121059 - DNA, 551 bp, Glycine max
  Clone ID: PAT_MRT3847_80321C.1
accggctgctcgtggccgggggcggcgcatccaaccccggggactggccgtggctaagcgccgtgttcgtgtccacgtccctcggcctggagtaccactgcgccggcagcctcgtgtcggcgggccacgtcctgacggcggcgcactgcgtccaccgccacaaccccgaggccctgctcgtctacctgggccgccacaacgtgcgcaagtggaccgagccgcaggcgcaggccagagaggtggcggcggtgcacgtgcacccagaccaccaggccgccaactacacggcggacgtggcggtgctgcagctgtcggagcgcgtggcgtacgactggttcgtgcggcccgtgtgcatcgactggacggggcccgaggcgctggccgaggtggtgggccgcgtgggcaccgtggtgggctggggccgcgacgagcacgggcacgcgctcagctccgagccgcgcgccgctagcctccccatcgtgtcgcaagaagcctgcctgcgcagcaagaccgagttcctgcatgtcacttcggagcgcacgttctgcgcc

SEQ ID NO: 121060 - DNA, 268 bp, Glycine max
  unsure (1)..(268): unsure at all n locations
  Clone ID: PAT_MRT3847_80322C.1
catacattttaatatgtttagtcacgttctcaaagaantttgctgacctgggcatgtttaagatgatagacacgcgcattacccaccaattttgtgtgaggaaaatattacttattttgtaaagtggatggtccaaaaatgccagaagggtttgtctattaaatattttggagtttgggccttattattttggattggatttaaagacctacaacttaagttttgctaatttgtaggggggaaaacaaaggttttttttaaggaattt

SEQ ID NO: 121061 - DNA, 266 bp, Glycine max
  unsure (1)..(266): unsure at all n locations
  Clone ID: PAT_MRT3847_80323C.1
tatgtctaacttaaacaaagaagttcagattattcaatggcatttttccacttagccatgtgatatctatttgagatgatatcaaaaaaatcgaggtggatcaanttccaacaaataatcatccacaaaattgtctctttaccaatcttaataacaaattttcttacagggaatcttaaaatctttttatccaaacaaataattgccataatattattcaatcacgttcatctaatcatatacagaatgtttcctattcctctcat

SEQ ID NO: 121062 - DNA, 240 bp, Glycine max
  Clone ID: PAT_MRT3847_80324C.1
atttgaggcagggatggccaaatattgcgacagcctcgtaccgcacactcttgcattcagggttggtctactgggagcgagaaagcgaggtgtaagaaatgggactgggccgcgacatagacggtctgctcaagaacaacgccaagcaaactgacttgaccccgctatggttcttggaaagagcagctctcgtccaccccaccagaacttccgtggttcacggatcacggcactacacgt

SEQ ID NO: 121063 - DNA, 555 bp, Glycine max
  unsure (1)..(555): unsure at all n locations
  Clone ID: PAT_MRT3847_80325C.1
cgacccagcgtccgcctgtttaggactacagaagacacaaatcgctgaaacgataagaccaaggaatagagctaaataactgactgagggtcttcgttgataacataacttgatgaggacccacattaaatgtgatggcggaaaggccacagctaacgcgcatgctacatacattgtgtgtagcggaggaaacagtgcttcagggtaaggataaaaggagaacgcggaagttcaagagaacgataaaggaggccacatcgtttctacatacatgtggagaagtttgtggttgcgtgcaaagcacatggtttacaataatggctaatgcatgtactggataaaaggaagaggtcgtgactaatggggagagcgctgtaggactgaaggaggctagtgagatattaggctgtgaagaggagaaaggatatacttttttgatgggggaaagggagtaagctgggcgtggggcatgtgtccggggggggggtgtggcgtggggggggggcgggggggggggggggggggggggggggggtgggggtgggctgngggggg

SEQ ID NO: 121064 - DNA, 245 bp, Glycine max
  Clone ID: PAT_MRT3847_80326C.1
gaacgtcgtgatgcgaaggggcttcctcaatgatctgatgccgaaatgctaccagcgcggtcccggccggggccagcatggttgctccattcaccggcctcaaatacattgctgtgctccccacgaggaacaccatacttgactttgcctacattgctagcaacggttgaagagctcaatgcatgcatgtgtggccaccaattggcaagaagaaggtcgagactctttcctacttgccagacctt

SEQ ID NO: 121065 - DNA, 608 bp, Glycine max
  Clone ID: PAT_MRT3847_80327C.1
cggccgaattccgggtcgccacgcgtcggaaggattggtagatctatgaaatgtgctgcaggcatcttgctagtattcttgccaagaattgatttatgggctgtggaaaaacatttccaaattgctgaaaggactgattcgtgtttaatgatgggcaagtcgtgtttcacacgaaaccaagttgttgagaaggaaaatgagattagtactgagaaaaactcaactgagatgatcaaaggccaagccaacacaaaggcttcctatgcctggatgtcatttattgagcaggtggaatccattgatgtatccacatccttgatgattctggctacttcagaagttccctatacagaacttccgcacaaagtaagggaattctttaagagttatcaatctaaagatggccggtcaactcctttggagcagacaattcctcgattctctgtgcagattgatgagaattttgatcatgacatggtgatcaatctatccgcactagagctattgagaaatgtagttgagcagctggttcaattgattcatcagagatctcatgttcatatgggttccccaaaaggcagaagttatgaatcaattgaagtttctaa

SEQ ID NO: 121066 - DNA, 2547 bp, Glycine max
  Clone ID: PAT_MRT3847_80328C.1
aaagacgacagaaggggacgagaaaatagattgaaaatggcaatagctcacatgacataatagtcccggggtatttggaatgaggtagcgcttagtatatatataaatgaatgaatgaatgccgaaagcgcggaagaaatactaagagggagaagaaaacataagatatggcaatgttcacgtaccacgttgaaacggttcaatcatggttggcactgagcagacttcacatactgatccacttagtggcagtgttgtcgctgtgttactaccgcataactcacttgttactggaacctccaacagcgccatggcttctgatgaccgtagcggagcttcttctctcggtgctctggttcttcaaccaagccttccggtggcggccggtgtcgcggagcgtcatgacggagaagctgccgagggatgagaagctgccggggcttgacatcttcgtgtgcacgctggatcccgagaaggagcccaccgtggaggtcatggacaccatcatctccgcggtggccatggattacccctccgacaagcttgccgtgtatctctccgacgacggcggctgtgacgttactctctatgggatcagagaggctgctgagttcgccaaggagtgggttccgttctgtaacatttatggggtcaagtcaaggtgtcccaaggtcttcttctctccctttggggaggaggatcaacacactcttcgccacgatggattcagtacacaacgagacctcatcaaggctaaatacgagaagatgcagaaaaatatcgagaaatttggctcagaccctaaaaatcgtcgtattgtgagtgacagacctcctcgtattgagattataaatgaccaaccgggaatgccacttgttgtttatgtgtctcgcgaaagaaggccatcccttcctcacaaattcaaaggaggagccctcaacgcattgctcagagtctcaggtttaatcagtaatggaccttatgttctagcagtggattgtgatatgtatagcaatgatccaacctctgccaaacaagccatgtgcttctttcttgatcctgaaacgtccaaatatattgcatttgttcaattccctcaaatgtttcacaaccttagcaaaaaagacatctatgataatcaatctagaactgcttttaagactatgtggcaaggcatggatggactaagaggtccaggtctttcaggcagcggcaattacttaagtagaagtgctttactatttggaagtccaaaccaaaaagacgactatctgaaggatgcacaaaagtactttggcaagtctaccgcatacattgaatcactgaaggccatccgtggacagaaaagtagcaaaaagaatatttcaagagatgaaatgttaagagaagctcaagtagtggcctcttgttcctacgaaaataacacaaattggggcacagaggtgggattctcatatggcatattactagagagtactattactggctatcttcttcacagcagaggatggaaatcagcatatctttaccccaaaacaccatgtttcttaggttgtgctcccactgacatcaaggaaggcatgcttcagttggttaagtggttgtctgaacttttgttgcttggtgtctcctccaaatacagcccattcacttatggattttcaagaatgtccataattcacaccttcacttattgcttcatgacaatgtcatccctttatgctgttgtcttcatcctctatggcattgtacctcaagtgtgcctcctcaaaggaatcactgtgtttccaaaggccacggacccttggtttgcagtgtttgcatttgtgtatgtatctactcaaattcaacatttgattgaggttctatctggggatggctctgtggctatgtggtgggatgaacaaagaatttggattctgaagtcagttaccagcatatttgcaattatagatggaatcaagaagtggctggggttgaacaaggtgaaattcaacttgtcaaacaaagccattgacaaagagaagctcaagaaatatgagcaaggtaggttcgatttccaaggtgcagctgtgttcatggctccattggtcctattactcatagccaacattgttagcttctttgttggtatatggagactattcaatttcaatgtgaaggattttgaagaaatgtttggtcaacttttcctagtcacctatgtaatgcttcttagttatcccattcttgaggccatagtaacaatgaaaagcaaaagtggatagtgaaatttggtcataaataatcaggctcattcaagagtctaaattgctttttaatcttgagatggaaatgcttaatgccatcttgttcgctctgtttagattaatctaatagcttccttgcacacaatgaagtctctcctcttgattattttattactccgtttttttttatttttacaaattgattagaagattgagcatttcttagttaccctacgtattagtagtacatgtaagcctttttctataataaatcgaactccagggattgttacgaaga

SEQ ID NO: 121067 - DNA, 296 bp, Glycine max
  Clone ID: PAT_MRT3847_80329C.1
acccccccaggaaaacccctccctttctcgggggccttacccttaaggggaattttcccccaagaggagggggggcacaaaatacctttggttccttttctacaaaattccctccttaaaaacaaaaatcccttatgggggtgggcccccccggtggcccaatttggggtttaaggtggctcaaataaaaaaaaacctttttttttttcccctcccaaaggaaacagaacggccttcaacttttggtttttcaccggtccccgggaagggggtcaaaacttttttttaaaaggggg

SEQ ID NO: 121068 - DNA, 379 bp, Glycine max
  Clone ID: PAT_MRT3847_8032C.1
ggtaaagcttttccaaacaagattgcttttgatgataagcttgtgttggctaacacacaagaattctttgatggaaattttccagtggattcttggttaccaatttttgtgaattgtctctatcctgtaagtcaattaccttcagaagctgtcgttgtaaatgttacatgtggtagtggacgtgtggtttacccaccactgcttgcattaggtctgcagctaacaatcgactctaagacattaactaatggattcggacaggactctgaaaacgtaagaagattgtggttattactagagtatatcctttttcagaagctttattggctggtctcttttgcggtcaaaatgaaatattgagtactagcgccgcttaccc

SEQ ID NO: 121069 - DNA, 414 bp, Glycine max
  Clone ID: PAT_MRT3847_80330C.1
caggtgccgtgcacagagcccggatgcctaagcaaaacggaggggcataagtggaaccaataaaatgtagccatatggtgtggccgcgtgatagtaacaaacacatccaaagaaaccacagagaacgcacgcagagcaatcccccaccgcagggagagaaagccgcagcaagagcagacaacaaacacacacaaaaaggcacacgcgtaaggactgcggggcatgcgggaacgcggtagaaagtactaggttaacaaaaaacagtgggccatattgtgatgccacgtgatattaacaaacacagcacacagagcagaccgaagcgcagcgaaggcaacacacagacacccaaaggaccacgagtaagtaccggggacaatgcggaccgcgggagaaagggatatgctgggacgc

SEQ ID NO: 121070 - DNA, 385 bp, Glycine max
  Clone ID: PAT_MRT3847_80331C.1
aaaaaaaaaaaaaaaaaaaaaaaaactgccgtttttataacaatcctcccccctccaacaacagcataatactcatcaatgtctgcaaaatgcattgaaaatgatcgggcacagtcaaacttactatacttaataaccaatatcaatcaataaggtcaataggcacatccctatccttttcaaaacgccaaagatcctagggctataaataaaaaatacctgcgcgggatccttactccaaaatgtggccagatggatcaatttttccctgctcgaagtactccctctggacataaatgactttagaaggtcggaggagtacaatctttctcgccctcatgaataccaaaccagtggttaagcaatcggggcattaaaatgggga

SEQ ID NO: 121071 - DNA, 537 bp, Glycine max
  Clone ID: PAT_MRT3847_80332C.1
ggcacgtaagctatgcgaaaagcacttgcttaaatgaaactccgccgccgtgagcatgagcggtcaccgcctccaccgtgccctcagcaaactgaaactcatcgaagaagaaaatgaccaacgctcacaagatgcgcgtggcattcaccgtcgtcacattcaccgccgcagccgccgtcatctccgtcttcttcgccgcgcgaaggcgcaagcagtaaaagtccttgccgtgctatttacactccgaacagaaaccaaagtgcgcgttcaagcgcgtcttagcggacaactcctactctccgttcaatcatctcagcaacgacgagaatgctttgagttcgcatccatatgaggcagagattacggcattgttgaaaaatcctatgcctaaaattgagcttggaactgagatcgcagacttggaaatgaaggattcctatgtttgggttcataccgagttaaatgaactaattgatgttttgagcgaagagaggttctttgctgtggacacggaacaacatagcttacgatcttttt

SEQ ID NO: 121072 - DNA, 317 bp, Glycine max
  unsure (1)..(317): unsure at all n locations
  Clone ID: PAT_MRT3847_80333C.1
atatactcgctgaagnaaaaacttaatatacaatataggtagaggctacataaaaatattggaaatttgaattcattgccactaatttcataaacaatgttaaatatactacaagttaaaccatagtaccaacctaaagaacaaattctgtttatattagatattgagaaacatttgataactaaataagccatattaaaagaacacttatacaatatctgaaagattaagacaatgaactaagcctttaaagaatttagaatcctcaaatttataaactgccaataagatccgaattcaaagacattatttgatca

SEQ ID NO: 121073 - DNA, 720 bp, Glycine max
  Clone ID: PAT_MRT3847_80334C.1
aagaaagtcaaataatgtgaaaaactggatcccaagtctcaggtttagaaaatttagaagtctatggacatgaaattagaaaaaaagaatgatatataaaattaaaaaatgaaactaattaataaatgtttgtcacatgagctcaaatggatgaggaaaacaagagaagagagaaaaatgaagaagtcacaaacacacacacacacacacacacacaaatttatatttattatacaattatagtaattataatcataatttaaaaaagaatcatatctatggcacaactgttgttttggcttaaatgcatgaggtgtgacttaagctgataaagagaaaagcttactctagtcctaagtaacagtgggagccttaaacattatattttcgagcttaaatagtactagcaccatatttaagtggcagactagttagaaaattttcatgtgccttggtagcaatttttgttattagataataaatcttttttttattttgtgttttggtaaaaaaaactacagacatatgcattttcatgttccacagagtcgtgtgctgttctaactaaactcattttgtttgatcatatataacaacttttaaattttttaatgagccatttaggaatgtgaaaatgagcatttttagcctagaattttcatatatatgtggttctgtagcaacctgattaaagggttcttttgcctcctaattatgttg

SEQ ID NO: 121074 - DNA, 205 bp, Glycine max
  Clone ID: PAT_MRT3847_80335C.1
cattgccatggatccatataagatccggccaccgagcgccttcaattcacccttctgggctacaaattctgatgctcctgtatgatacaacatctcctctttacgcgttggagctagaggtccaattcagcataaggattatcatcttgtagcgaaacttgcaaactttgacagggaacgtacaccagcacgtgttgtccaggtc

SEQ ID NO: 121075 - DNA, 397 bp, Glycine max
  Clone ID: PAT_MRT3847_80336C.1
acctctaaaaagacgtgcgttttttttttttttttttttttggcggcccaaaaaacggctctttttttttttttcacgggccaccaaggaagaccagaaaactgtgacaataggtgctgccaccacaaccataaaatcaatggtaaatactagggggactagaatttatccgccagggtgggaacagcccaatataaaaggtttacaaaaatatcttggcttaagtaaaaaataaaagcatcacgtcacaagccccaaaggttatttcttgggcccaaaatcctcgagggaaaaaaactgttcctcacccataggacactcaacagacacatcaggatccttgccctcaagaaatccatgctttatctggggggccaaactctcatcagagggaagc

SEQ ID NO: 121076 - DNA, 315 bp, Glycine max
  unsure (1)..(315): unsure at all n locations
  Clone ID: PAT_MRT3847_80337C.1
acaaaacactagtccctcccttcttccttgtctctttctcttctcaacaacatgcagatcntcgtcaagactttgactggcaanangatcancctcgnggtcgagagtagcgacaccatngnnaacgtcnaggccaagatccaggacaaggnangtatncntnctnaccagcagaggntgattctgnnggtaagcagctggaanatngtngnactcttnntgatnanaanatacacnaggntcnacactncacttngtcttgaggncaggggaggacacatngatnatngtgaagactctaactgnagtagattt

SEQ ID NO: 121077 - DNA, 342 bp, Glycine max
  Clone ID: PAT_MRT3847_80338C.1
ttgaatatttgattaatatatttacaatcagattttttagggtttaatgtgttaaataaattttttatgtttttgaactagtataaatacccaaaaccaaacatggtataacattcaagaaaagacacgactacaacccagtaaagataggaaaacaagaagaagccaaccaaagaataagagacccaaatggaagaaccaaaaaacaaccagaaaaggcaaaaacaatagaaaacatacaacatggcaccaacagaaaggcacgcaaagaaaagacgatccaaacaaccataaacagacggaaaccaactgcaaaagagagcatcccaaaatatagcccaa

SEQ ID NO: 121078 - DNA, 214 bp, Glycine max
  Clone ID: PAT_MRT3847_80339C.1
tgcagttcatttgcctcaatttacaacggcaatgctgagaggattattgaggcaaatgaactgcatatattctcagcattgccgttgtaaattgatttgtatgtattattccaagaatagaactaattctctatttttggtgtaaataatatttgtatttcctttcaataaaataaagaagatgtaaactatggaagacctatagatgtaaaaa

SEQ ID NO: 121079 - DNA, 438 bp, Glycine max
  Clone ID: PAT_MRT3847_8033C.1
tctgacttagaggccaacaacaagccaacagtggaacttgagaaatgaggccctacattgcttggcatcgaatgtcccaaggatgagaaacttcctcgtcgcaaaatttttgacaaacctaagacgcgctgcttcactattctccctatggagtttaatcttgtggttcgtcagaagtttttaaattctgtgaggttcattatgaagaaaagggacaagcttagttgtcaagttggaatcaacccatacttcatggaatggactggtttggccaatagatcactgagcaagggcaacgatattctgcggggcgaatatgctagttttgatggtttgattaccaaacaagttatgagcaacgatggcagaaaatgataaaacagaccttggtggttggcgactgaaaaaattgcttgccctgaaaagggacacaaccct

SEQ ID NO: 121080 - DNA, 706 bp, Glycine max
  unsure (1)..(706): unsure at all n locations
  Clone ID: PAT_MRT3847_80340C.1
ccacgcgtccgaaaattgtggttgtggtagggtttactattgggaacaattgcggacaaatccagtagatgtagctgcaattgcagtcaggaagacttcaaaagcacccggatgctaaggctgcaattggttgcggaacatttttaaaaaccttttgatgtgctactgatcggttttggttctttgcacgggcattgcaactgagttgttaaatacacaatgaatgtttgaatatgtgttttcattctctaatgtgtgctggatttctattctttcgaggttttgaggatgttcttgtattagagaagatgttgggtatccatatgatttactgagcattgtagtgagttataaatagggctatatagtggcgatatagcatagtagtggagtgaagtgatcctaggctgctacagaattcaaacagctgagcggttttcaattgggatcgttgcagctggaatagtgtctttcacatactatagtagtgctaccatgatataagcttcaaagccccccatttttgcccctgaaacaaggttctttaggatttttttgggtaaaactgtggtttctcctccgttttcaaatgcattttttgctttaggaagatagtangatttgaaacccttcttcctggaccattccatcaaaagttatccctggtccttcactttacaggtctaatatgnttatcatgaatttc

SEQ ID NO: 121081 - DNA, 341 bp, Glycine max
  Clone ID: PAT_MRT3847_80341C.1
cgggaaatattatttattcaataaatttgattgattgatacgggttgattttctattacgataaatggaggaaacaatagccagtccgatagctgtttaagcagctgcaatagctataacaaaaattgaaaaaatatttccttttaattgccgactttcaaaaaaatcaaaaaaggttaccccttctgtcgttttttagaaaccgaacccttttgtcgttttttcgaagccgaacccttttgtggttttttcgaagccgtacccttttgttgttttttcgaaaccgtacccttttgtcgttttttcgcaaccgaacccttttgtggttttttgaaaccgta

SEQ ID NO: 121082 - DNA, 133 bp, Glycine max
  Clone ID: PAT_MRT3847_80342C.1
gtctaccagtaggagtagtcaatcatttgtctacgaagctcccctcggatacagcatcgaagacgttagaccaaacggcggaatcaagacattcagatctgctgcttactccaactgagctcgcgaaccttcc

SEQ ID NO: 121083 - DNA, 268 bp, Glycine max
  unsure (1)..(268): unsure at all n locations
  Clone ID: PAT_MRT3847_80343C.1
gtttttgcagttgctgcttcatctcctgcactacacactaaactgtgcgttttttaaccacaaaaatcgatggcttcttctcggctcgatttcttgttctgtaatttgtgtgggacaatgctcactgtcccttccactgagtacgcacaatgcccactgtgcaaaactcgccgaganatacaggatatttgtgataaggnaataagtttcacaatttctgntgaggatatcagaagagagcttggaaggaaataattgaggaacatgc

SEQ ID NO: 121084 - DNA, 325 bp, Glycine max
  unsure (1)..(325): unsure at all n locations
  Clone ID: PAT_MRT3847_80344C.1
anaanacantannacggancntaggaatgnggctcgagcaaaagaggngttnaaaanaacnnanntnagnagaatcncngaaagcgnggnnnncattntngnaaagggcngtnnntngtantcggcancgtnngggattatggtcctnncgcgcntnctacnactnanngnngntnnnannnnangncaaccccnnnangntgaatcctnggnaaggntnagccccntnggcgaaanggggngtttgnagnccaccngtgggnggaggngnantaagtctncatggnaangtgtnnncngaaaatngggnaaagttnttnnnnnc

SEQ ID NO: 121085 - DNA, 280 bp, Glycine max
  unsure (1)..(280): unsure at all n locations
  Clone ID: PAT_MRT3847_80345C.1
agctttcnttattatttttgttttttttttttgcagtataaanaactcacatttaaaaggacaaattgcaaccaatgggtccagggtcatagtggtaacccaaaaaagagtaaaagggatggacaaatgcatggggagacacatttaatccaagctacttaaacaagggcagagcaaacatggagtaaaatctaacgggctataccaaaaaataaaagcaaacaaaggcggccaacaaaaaactaaggccccaaatgaaaattggcctaaatgaaaatta

SEQ ID NO: 121086 - DNA, 728 bp, Glycine max
  Clone ID: PAT_MRT3847_80346C.1
catctctgattgtggattagggcccattactatcttctggctctactggtcagttatcaggacgcctccttacagcttatggttacagtgctccagaatttgagtctggaagttatacgcagcaaagtgatgtcttcagttttggtgtcgtaatgctagaactcctcactggacgaaaatcctatgacaagtcactgcctcgtggagagcaatttttggtcagatgggcagtccctcaactccatgacattgatgcattgtcaaaaatggttgacccctgcttaaacggagcctatcctatgaagtccttgtcacgttttgcagatattgtttcttcatgtatacagcgtgaacctgaattccggccggcaatgtcagaaattgttcaagatctcttgagaatgatgtaaaaggagatgtggagccgaagataagctttggttcctagatcttcctatctattttttctttgttaaattttgtgagccaaagatattttccttgtgtgtggaaaatctgcttactaatgtaattatgagttagcaggaatgttgtgccatagtttatacttcattgttctttttttttttttttttttaaattattaagataatagtcaacaagcatgttatgggctcagattcacgaaaatgtcctccatccttgcacacattggtgtagacactatgattttgggctatgtatcatatgtaaagtatgaacccctc

SEQ ID NO: 121087 - DNA, 374 bp, Glycine max
  Clone ID: PAT_MRT3847_80347C.1
ggttgggatttttcttttttttttttgggaaaaagggaaattgggtttatttttctattgaaaataaaaatccggtcccccaaaccaaacctgccagggcatgttattttcgggggggggggtgttttaaaaaggacaaccccccctttactggggccccatcccccaacaagcccaagggaaccctggtccctactttatccataaaaaggttagggaaaatttgccctatatcaaaccgctttatgctccccactaatttggaaaacgccaaatccgggactggccctggtctatcatttttaaaaggaggggcgccccccggctttaaatctaattttccgccatgtgatatgcaacagacctttgttggg

SEQ ID NO: 121088 - DNA, 1766 bp, Glycine max
  Clone ID: PAT_MRT3847_80348C.1
attaagagaaggccggagaagaaaaatgctaagaaacttgatgatgtgggtgtgtttgcgggacctttgattaaacctactcgacccacgcgtccggttgaaacagctaatcaagaggagaaaggtaaatgtgaagtaccacatagaagtacaaatttcattccaaaggttcaggaagaacaagacatatatgtgaaagtagtatctgcaacatcagaaggcaataatggtcgtgaatcaatcaacactggagggggttccaaactttcatccctgcagccaccaccacaacactttctcccaaccagtcctggtgagaaggtcattatcaatccggctataactacacaagtaaccaaaagacaagtcatgtcaaattccatcagagtttatactgttgcgttgcttcaacaatatacaaatagcttttcccaagaaaactgtattggggaaggtacacttgggcctgtttatcgggctgagctccctgatggaaagctattggcagtgaggaaattggatgctactgcttccatgggtcagagtcatgaacaatttcttcaattggtgtccagcatttcaaaaattcagcatgcaaatattgcaaggacttgtcggcctactgttgctgagcataaccaacgactatcttgctatatgaatattgcaagtaatgggtactctacatgattcactgcatgggtatgataatcaccgtatcaaactcccatggaatgcacgcattcaggtggcacttggagctgcaagagctttagagtatctgcatgagaactttcagccacctattgtgcatcgaaattttaggtctgctaatgttcttctgaacgacaatttggaagtgtgcatctctgattgtggattagggccattactctcttctggctctactggtcagttatcaggacgcctccttacagcgtatggttacagtgctccagaatttgagtctggaagttatacgcagcaaagtgatgtcttcagttttggtgtcgtaatgctagaacttctcactggacgaaaatcttatgaaaagtcactgcctcgtggagagcaagttttggtcagatgggcagtccctcaactccatgacattgatgcattgtcaaaaatggttgacccctgcttaaagggaacctatcctatgaagtccttgtcacgttttgcagatattgtttcttcatgtatacagcgggaacctgaattccggccggcaatgtcggaaattgttcaagatctcttgcgaataaagtaaatggatatgtagctatctgtgagaaaatgaactaccttagccatgaagtagagccgaagataagcttttgttcctagatcctcatatctattttttttctttattaaattttgtgagccaaagatattttccttgtgtgtggaaaatctgcttactaatgtaattatgagttaacagcaatggtgtaccatagtttatacttcattactcattttttttattaagataaattatatggggtcagattcatgaaaatgtcctaggtgttgctaggtgcagctagcatttttccattttttctaattttgcccttcactatggaaaaatttcttccataaactcttccgtaatccttccataagagtttttttttttttacggaaaaacttctttgtaagcattggtgtagactgtggatactatgattttgggctatgtaatatgtatcatgtgtaaagtatgaacctaactcatcaaaaattgctctacacta

SEQ ID NO: 121089 - DNA, 339 bp, Glycine max
  Clone ID: PAT_MRT3847_80349C.1
acgctttagggaaggatgaacgaacaactatactactattatccttattatctgcatcattgcaggtaaggctacttattataggtataagatgtcgttattatgcctcacatatggattcgatatgcctctccaacaactcagctgtttatcgattcaaagacccagcgtcccagttgtccccttccatgtctaggatatccagatccctcatcacagactcaccatcactacgcactaactgaacattcacaaggacatgaaccatgctgatcagcatcctttgtgtgcatgaacatctgccttgcttctacctgcgactggctgcacaccgtgctg

SEQ ID NO: 121090 - DNA, 389 bp, Glycine max
  Clone ID: PAT_MRT3847_8034C.1
atttttgtttattgtctttatcctgtaagtcaattaccttcagaagctgtcgctgtaaatgttacatgtggtagcggacgtggtggtttacccaccactgcttggattaattctgcagttaacaatcgctcctcagacatcaacaaaaagattcgcacagcacttgggaaaggtaagaaaattgctcatcttactagagttgatccttttccagaacctttactgggtggtctttttggcgttaagaaagaaattttgagttctaacaccactaaccctatgctgacccgactttttgagaactgttagagactcaaatatttgtttgatgagggttcttttgcatttttgaactagtttgtcatatttctatttcccttaataaagcg

SEQ ID NO: 121091 - DNA, 1336 bp, Glycine max
  Clone ID: PAT_MRT3847_80350C.1
cactttttaaaccctaatcccaaactcacttggtctgattgaaacgactttgcggtggctaagaggtcaatgttcggtggcggaggggaggacgcgctggcggcgcggctgggcatgatgccgccgtcgctgctgaatccagcgtcggtgatgtccggcgagatgtctccggcggttccggcggcgagggaggagagggggccggcgcagccgcagtggagccagcaggagacgcgggagttcatagcgatacgcgcggagctggagagagacttcactgcgtcgaagcggaacaagacgctctgggaagtggtgagtgcgaagatgagggagagagggttcaggagaagccccgaacagtgtaaatgcaagtggaagaatctcgttaatcgctacaagggaaaagagacatctgacccagagcatggcaagcaatgtccattttttgaagaattgcatgcggtctttacccaaagggcacataatatgcaacgattacttcttgaatctgaaactcgttcagctcataccaagaaaggggtgaaaagatcaagtggagatcggtcatcagaggaactctcagaagatgacaatgaggttgaatatgatagtgaagaggaaaaaccttccagaagtaatacccgcaaaacgaaagttgacaaagttggagtggagaagtcttcaagggcaagcaatccatcaaattctgccagtaatagtactagtattcaggaaatgctcaaggaatttttccagcaccagttaagtatggagatgcagtggagggagatgattgaaaggcgtgctcatgaaagacagttgtttgaacaggaatttatcaagtcactgaagaagcttgagagggagaggttaatgattgaacaggcatggagggagagggaagaacagaggagaatgagagaagagagtagggcagagagaagggatgctttgttgacgacccttttgaacaaactcattaatgaatctaactaacggaggcaatggcttggattacttgtagctgattactttgttgtttccatttattatatgattctaagtttagcacagaacgaactaatcttcaccgtagcttttgattacagagaatatgggaaaggagaatttggttgatgaaaggagtacttataggggtatatgaacaaaatcttttgaaaattgatacagaaagagtttttactatttagggatacttctgaatgataatatgttctgggacatgtaactaaagacgggtatggtatttaagctgtctgtatgatttttcttatatatgtacatatatattatattattatattgttgggatgcc

SEQ ID NO: 121092 - DNA, 123 bp, Glycine max
  Clone ID: PAT_MRT3847_80351C.1
ggagcgcccgcccacacgtccgaccacgcgtacggacacgcgtgcgtttgagaatactagcagatcggctcgatgatctaaaacaacggcgaggatgaaggagaacgaggtgaggaataagac

SEQ ID NO: 121093 - DNA, 410 bp, Glycine max
  Clone ID: PAT_MRT3847_80352C.1
atgggggcagagaaacaatagaggcaagttttagtgttacaaacttacaggtcatcactttatttttattctccaggggcggttaagacttattatcacccccctttcctttttaattgaatagaacaatgtgtttcaccccttactggttagaccacacccccaactcggtttttttttccccccccacccaattttataaaactgggcccctttgtttttttttttcggggggcccccggccccttaattcggtgatcccctctaaccattttttttttggggaaaaaaacccccctaactttaaaattggaggcattgcccttgccaaaaatgcctatcggatttgcatgggggagttcaaaacagtttccaaggggataagaactctccattcgaaaattactttt

SEQ ID NO: 121094 - DNA, 273 bp, Glycine max
  Clone ID: PAT_MRT3847_80353C.1
caagtgtatcgtttctggtccacgcgtccgcgtctctgtcatcggatatcagcaattcagtgttccaaaccgacccgtttttcttcctcttcttcaaattccccacttttcaattggttccagaaaacaacaggttttgacgtgttggattcgaacaatggacacccaaagtggtgaagacactgttgatattgatcttggaggtgtttcatccagtggagaagcgattggggatatgggtgatgacattgtcacagtgctcactgggctgga

SEQ ID NO: 121095 - DNA, 180 bp, Glycine max
  Clone ID: PAT_MRT3847_80354C.1
ctcgtgccgaacacactaccctaagcatcagctgagcagcctgtgcaagtgaagaaatggctcatgcgatgacgctgatgtctcagagttatagcagatatgcccaggatttgaagaaagacttggtcctccaattgctagagtaaatctttacgcctacattatatgagctgtcattcc

SEQ ID NO: 121096 - DNA, 268 bp, Glycine max
  unsure (1)..(268): unsure at all n locations
  Clone ID: PAT_MRT3847_80355C.1
acgagaagaagcaaaacaaaggaaaacagaaacaggaacgacgaggacgaacactgtgtgcanaaggcaatgggaaanaagcanaacgagagtcaganaacagggctaggtcgagccctggtgaggcagcacaccaaatnatccaacagagcaaggacaagtctcacttctacaagaagaagtttctcgaatccttcaccgaagtctccgncatcgacgccgtcgtcgagcaatccctcgnacccatccccgaactcgccgccgcatc

SEQ ID NO: 121097 - DNA, 593 bp, Glycine max
  Clone ID: PAT_MRT3847_80356C.1
gggctaaaatatgcactaggaaccataaaacctagggcattacactgaaacagtttggacttgattggaagagatactcaactgaactccgcttacaaaaagagccggccaaagaaggaagaagctccgggtaaaaatgaggaagaggagaggagcgccggaccactaacggacctcatgatgagtgctagaaagaatactcacgcacggagaacaggtggggccagcagaaagctcccgggacgagtaagggctcttgaccggcactgcaacaaggtgcttgaaaatgtcaggcagatgtaaactgaggagccaaagactggaaaaggaccgaaaacggcccagccagccaacaaggatagattcagcaaagatgtcgctacgtggacactctgtcctgattgttcttacaaaccccaaatcagatagtgtcatcaacttgtaggatgaaatggctaatgagaatttggccgtatcgtgatatatagaattctccttggaggaatgtgtagacattccgacctcgaaaaaatatcatgccacggaggggctaaaaacaaaaccccacagggaccaaaggaggggggggaacc

SEQ ID NO: 121098 - DNA, 336 bp, Glycine max
  unsure (1)..(336): unsure at all n locations
  Clone ID: PAT_MRT3847_80357C.1
cgcgccctttttttttttttttttttttttttttnnnaaaaacaaagatctaccatgcttgggagatagatacaccattgtaaaacaacggggaacattatagtcacataaccatactaaggtctactgatctaaaaaaccttcctaaaagtggggcttaaccaggagaatttacaataccaacatttttagggggctgcaaggatggctccacaaaagactgtttattgaaacactgggtaaagtgggccaaagtattggctgcaaaaaaattcagcgtggggaaaggttatttaaaaagacccttgaccattggatgcaacttttgggaatttt

SEQ ID NO: 121099 - DNA, 349 bp, Glycine max
  unsure (1)..(349): unsure at all n locations
  Clone ID: PAT_MRT3847_80358C.1
agcctgagggcttgtaagcgataaagctaatgcactgcacttggcaaacgttgtcaaatccaataatacggataaagccattagggtatacagtcttaacctcttaaagctccttcaacacctaaaaancatcgagacaaccaaacataagcaggttccacataatccaggagcgtgcatcgtantatcctaataacctatgatactcacgatgcacaaaaccatactccaactgtaattgcaagcaaagaatccatcccttcctaatataatattctacttcctttaccaattatgcatcatcaaagtctgngaggtaagaaatattctgaaacttcttcgtggcgac

SEQ ID NO: 121100 - DNA, 564 bp, Glycine max
  Clone ID: PAT_MRT3847_80359C.1
aattcggctcgagtacggctgcgagaagacgacagaagggggtgctttatttttgttcagcttgaaacatcaccagttgagagtagaagagggtactattattgcagaacactgcccacaatctattctagaccttacgtataactcctacctatctaatctaactgttcaaccaaacaaggtacaaccacggactccattgtgtttttctacatctcaatgtctctctggggctgacaaaaatgccacaagcttgaacaaaggtacgttcattttgtgccaaaactgtcaaaaatcattctcttattgggtcatcaactacaaggacaaaacagctggcagagtcctgctgttttttgtctgcatcactacaagaaacctggtggccagagtaattcttttatgaaggtacccagttttgccaatccaagcttatagctgttggcaatccattaagttcttgcacagttgcgattttcaggcgcctgctgtgtctactggtgctgctttcaacagcatttatgatgttagtacagtgcagttattctcttttctttgtagtct

SEQ ID NO: 121101 - DNA, 343 bp, Glycine max
  Clone ID: PAT_MRT3847_8035C.1
ttgcctttatcctgtaagtcaattacctccagaagctgtcggtgtaaatgttacatgtggtagtggacgtggtggtttacccaccactgcttgcattagctctgcagttaacaatcgctcttcagatatcaacaaaaagattcgcacagcacttgtgaaagggaagaaaattgtgtgtcttactagagttgatccttatgcagacgctctactggatgagatttttggcgataagaatgaaattgtgagttctatcgccactaaccctatgctgacgcgactttttgagaactgtataagtctcaaatatatggatgatgagtgtacttatgcgttggtgaac

SEQ ID NO: 121102 - DNA, 319 bp, Glycine max
  Clone ID: PAT_MRT3847_80360C.1
tttttgatttaactaattctatttaaattcgctcgggtttttttctaatccgtgttttttaggggaaaaagatccgtacaacagcgttttttttgaatgattgggctattttgcctttaaaaactgcgggcacaacgtgtgcacccccggtgacaacacacgtttttaaatgataaacatgcccgcggctaatttaccattgttaatcctgcccacagctcccccattaataaaattttttctggccatcggcccaccataattggaatctctcttaagggggcccaccaccttcttggctttaaatttgggcccctta

SEQ ID NO: 121103 - DNA, 1250 bp, Glycine max
  Clone ID: PAT_MRT3847_80361C.1
tgttttgccaactctggtgtatatgtctttgtgagaagagacctcaatatcatcacaactacaaagctggagctataaattcattgctaagagtctcttcaaggattagcaacgcaaaaatcattctaatcatagattgtgacatgtactcaaaccattcacaatcagtgagagatgccctttgttttttcatggatgaagagaaaggccaagaaattgcttttgtgcagtttcctcaaaattttgagaacctcagtaagaatgatttgtatgggaatgctatatcagcaactgtggagaagagacgctttatgtgggaagaagttcaattctcaatacaaaaatgagtggaatgatgagaatgagaaagaggtggttaaagcaaacttgcatgaactagaagtggaatcgaaggcactagcaagctgctcctatgaggaaaatactctatggggaaaagagattggtgcaatatatggatgtcttgtggaggacgtgataacagggttgtggatacattcgcaaggatggaaatcaatatactacaacccaccaaggaaggctttttttggtattgctccaactaacttgcttcacacactagttcaacaaaagaggtggggtgaaggtgacttccaaattttgttcactgagtacagtcctacatggtatggtgaaagaaagatcaatttaggcctactaatgggatattggcgctttaactattcggcaaccacttgtttgccaatactatattactccgtcatcccttcactttatatccttaaagccgttcccttggttgcaatgatgactagcccatggttcatacctttcgcatatgtctcactgggagtcggatcattctcgtctggttcacggttcgatccctcagggcccactccatgaaaggaacccgcacaattcgaaggatgtagatgggtttgttttgccaactctggtgtatatggctcgtgagaagagacctcaatatcatcacaactacaaagctggagctataaattcattggtggagctccatggtgcggatggttatggtggccctttgtttattggaacttgttgctttcatagaagagacgctttatgtgggaagaagttcaattctcaatacaaaaatgagtggaatgatgagaatgagacagaggtggttgatccattcgtgcttgcacccgacgtcgatgcggagctctagctgtgtcttaatctactcaatgaatctcttgggg

SEQ ID NO: 121104 - DNA, 510 bp, Glycine max
  Clone ID: PAT_MRT3847_80362C.1
agttgctaatcttgagaatttaaaggtggtggtatgccatgaagcagctatctctttatcggacgatttcaagcctatgcttcccaatctaaagatagatacttgttccttaattattgttaacctgaattggtttcattcaatctcttcctaatatcatgtagttcaggttgtcttttcaaggtgtgaattaccattctcagttgataatcttgagaatttaaaggtggtgataggcgatgaagagacagctgcttcatgcgaagatttcaagcctatgcttcccaatctaaaggttgtcaattcaagagctgttcaagtgtttctgttttaaaccgcaactgatgtaatttgcgggttggagttactcgaactccttgtgacttaactccaaccataataatgaatgttcttctgtttgctgttcaaaaaaagaaaatcacacccaaaaggaaaaagaataaaatgccatttttacttacgtgaaaaatgattttattcttttccttt

SEQ ID NO: 121105 - DNA, 363 bp, Glycine max
  Clone ID: PAT_MRT3847_80363C.1
aggtgaacgcacaaatttgcttgggcaaagaacaggtcagcatccacgaaagccagaactaattacttattcacaacattactctacctaccctttgattgattatttgacacctgaactgggggggcctacgcaccaacaccgactgaaccgtgatacagtccgtgtcatgctttgtgcacgtggaccccactgttgggcacttaccacccaatgccccccgccaccattattagtgtctattttcagccacgacaaagagctaggacagtgctcagcttcaacagaaaggtgccatgctctgcattgaaacttaaccttttttttaatgatttgagttggcgagaggacatggaataggat

SEQ ID NO: 121106 - DNA, 400 bp, Glycine max
  Clone ID: PAT_MRT3847_80364C.1
cgatgatcgcgtgttcacggtgtacgttcgttcgggttcgatcgtcgagggaggctccgattcagttattgctctgtagctatacgacatgtccggctacggtatatacatctccatcctcgccgcatgtggcggttttatggatccgggtcataactactacgaacggagcaacctcgacatatttagaggtagaggcccttgcttggaagcacccgtttgcgaggccaacctaacttctgacgggtcggcgccccatctctgcttgtacgtttattacgtataggtcaccaacactggggtacacgcgccttgttctcagcagcaattcacctttgagtcgtggctcgtcgccgattgcgtgccgtattagctttgggctgtcatgaacaactgttca

SEQ ID NO: 121107 - DNA, 478 bp, Glycine max
  Clone ID: PAT_MRT3847_80365C.1
gcacgaggcatttgtgggaaaaagaacagtggtttctatctatcagaatgtggccaaagtcttactttatatgcttggaaattatggtgtgcaggaaaatgtttggaactattggatccagtgctggaggaatcttgcatagagagtgaagttgtgaagtgcatacacattggtctgttgtgtgttcaagaagatgcagcagatagaccaactatgtccactgttgttgtaatgctagcaagtgataaaatgccccttccaaaacctaaccagcctgcattttcagtcggaagaatgaccttagaggatgcctctacatcaaaaagttccaagaatctttccattaatgatgtaacagtctctaacattttaccaaggtaatggaaaaggcaatcagtgtagttctatatttttttttttcctggtgaaacccgtatattgtataccttgtaacataatgaagagcctctggcaaatc

SEQ ID NO: 121108 - DNA, 223 bp, Glycine max
  Clone ID: PAT_MRT3847_80366C.1
tcccgggtcgagtcacacatcggatcagtcgtgcgtccagatgggaaaagaaggggatccggttgagttgttagaagacgaccatttcgataccggcggtaagatcatagggtacagatcttgttcgcgatgcattcgaccttgtacctcctccacatagccaccttccgtcactgcacaggacgtcgttttcatggatggcgatgggaacagaccggcgttc

SEQ ID NO: 121109 - DNA, 354 bp, Glycine max
  Clone ID: PAT_MRT3847_80367C.1
gcaacgtggtcacacccactagcagtattattacaaccatccataactttattcatacggggtatatgaacattcggggatgaaaccacctcatgaggtattgctgctaccatgaacctaactctatttacagaagcctgcctcttattgccgacagctgtcgaaaccttgatgcatgactggaacctagaggcgaacatattgcatctaaccatcagaaacatcactttcaggattgactgatatagcttctcagggatgcacacaatataatccgctgatcaggcactactttctatacaatgaatagcttaaacaatgcaggagaggttgccagactcagacgaagaagat

SEQ ID NO: 121110 - DNA, 488 bp, Glycine max
  Clone ID: PAT_MRT3847_80368C.1
attcattccatcttaccttttaatggctgggaatcaaataggtatatctatatatcaattttgaaaaaaaattacgaaaaaaaattttaagaagaaaatttccacatgccattgatagtggtggaaacacatgctgttgattcttaatcaggccagaatcttaacagtagtgaccaaaattgtacctttcctttttcctgtgtttcattgtaggtgtaactcttgtactggggaatctttgtgtctggcccttagctttgtttgtctgttttgcttggccagactcagagaccagaaatttcttcatttaatatgtttttcttttggaaactgttaagttatgaagcatgaagacatagttatatcccccatatgcaaggagacaattaattaattatgttgaaaatattagttatttttagtagtatcttatgtcacgtggtccaatacagtttttatttgtaaaagcttctaagatatataatggg

SEQ ID NO: 121111 - DNA, 686 bp, Glycine max
  unsure (1)..(686): unsure at all n locations
  Clone ID: PAT_MRT3847_80369C.1
attgcagtgtgcagaacaacagtttttgatcacctgtaaatgggaatttggattgnagggcctcaatttgtgaataattctgagaagtgggttattttagcancancgatttataacagagtgatattatgaaatattggattggtcattaagaaaaagagaaaggaattgctcggataattcagatgcttaacgtgaaacacaaattgactccatccctgaaaaaggattgatgtatttgatatgagtaatggaaggaagtgatcattctttacatggtgctcatccgaacttagatatacagaaaattagttctggtaattcccttagtgtcaatacttcccgagagtggaatggtgtctcttcagctattatttatgcttagtggtgaatacctgatagttaatagcatcttcttttgtttttaaaaaaagtaggaaaagtaaggaagacaaaattgagagtccatttttcttttctatcctttagttaaaaataaaagaaataatatggggtgggaagtaacttcaagtatgattcatgattgtatccaattttccatccattcccacggccatgttggaaaaagagggaaattctctacaatactttaatgcttgctagggcattagaaaggaaatttcgtcgcgatcttattttcttcaatataaattttggttttatgc

SEQ ID NO: 121112 - DNA, 379 bp, Glycine max
  Clone ID: PAT_MRT3847_8036C.1
aacaaattgacaatggtgttgttattccaccatctgggtggaaatgtgctaaatgtgacaagactgacaatctttggctaaacctgactgatggaatgattctttgtgggaggaaaatgtggggtggaactggtggaaacaaccatgctgttgagcattaccaagagacaggcttccctgttgctgtaaagcttggaactatcactgctgatcttgaagcagcagatgtttactcttatccagatgatgaaagtgtcttggatccacaattagcgcagcatctggcattttttggcattgacttttcatcactacgaaagactgaaatgacaactgctgaaagagaacttgatcaaaatacgaattttgattggaatcg

SEQ ID NO: 121113 - DNA, 539 bp, Glycine max
  unsure (1)..(539): unsure at all n locations
  Clone ID: PAT_MRT3847_80370C.1
tanggtcacttctaactcttttgatcatacactaggttcacaaatctgggggggttgttggagctattatgattcacccttcacttgcctgaagccggaggatacagggatttcaaccaactgtggatttacaaacggggctattcctcctttggccgtggtaacttgaaactcacaggatgtatagtaccctgcatccacatttacatgagttgttggacccttgcttttcatccccttctaatgagggtgggaactataccctggaaacattcccagatcattggtcctgcaagatgcttgccgatgcctgctagcaaacagctatcgcctattctcttgttgactccgttggccctccgcaactttttatactgctaatcctacgctccatccgcagctatcaccggatggattccccacgtctgggcggtttgtctaatgatcccagtcagccaccattaatgctacaccctgcacctagtgtgagcctctggatggcctgccttgtaggatcactcttgcttgttcacccctgc

SEQ ID NO: 121114 - DNA, 751 bp, Glycine max
  unsure (1)..(751): unsure at all n locations
  Clone ID: PAT_MRT3847_80371C.1
ccccgcgtccggggagagagaaagctgtctcgtgaagcagcaggtgaagctcaagcaaaagaaaataaaagctcacctctttcatcctttctttctttctttctcttccttcttctctccattttctctctctctctgcatagctttcaacacttcacaacacaacacaccccattttctctctctaacaattcattcctcactttcacgagatccccatcaccgcttgtgacattgctgctgcaaattcacagagagagaaagaaagaaagaaaaaaaattcaaaaatttaaaacaaaagagagattttagtttttaagatacccttcttgttgtttcggttagtgagtgagtgagaagaaaaagaaaaacgatgtcacattccaggaaacccgtgtcgtccgagttagggttcaccgagcggttccgcgactcactgagttgctccgacgacaacaccaacaagcccgatttccgagaactcgatttgggttcaccggtttccacattgcggccacgtcactaccacagtgcacccactacaacgagtagcactagtacgagcactagcagcgggtcgaccgggtcgggttcgggtcgaagcggaaacataacgcggtttccaagagatcccattcggcgagttgtctgggtcgagcgagaccaatagtccgaccccgtgtttccaaaccgggtcaccggagatcccaattcgggtcagagccagagatcttnccgtcgtcttcctcct

SEQ ID NO: 121115 - DNA, 570 bp, Glycine max
  Clone ID: PAT_MRT3847_80372C.1
cagcaccaccttcttcactcactagtccctagtaatggcagatgccaagagcaaccccaatgcacaactccttgaagaactggaagctttgagcgaatccctttacaaacaacacacctccactaccacagccagaagaacaacttcccttgcgttgccacgaacttcagctccgcctatcgaagatgccaaacatgatgatggaaacagcaacaaaactcggcggcgcatgtccatgttcccatggcgatcaaggtcaaagcctgatgatgatgccactgccaaggcagaaaccaaaaagcttgatgacaacacatcaacaatttcttcaggtgaaagcaacaggaaagggatttggaagtggaagcctattcgggctttggctcacattggaatgcagaaactaagctgcttgtctgctgatgacgtggtcatagctcatggccttcctttttccatgaatggactgatactattcgattgtgtgcgaaagaatgaaccaatgatggagcggctaagaccatgccttaagggttgcactaagagctgcagatttggaagagacccttt

SEQ ID NO: 121116 - DNA, 958 bp, Glycine max
  unsure (1)..(958): unsure at all n locations
  Clone ID: PAT_MRT3847_80373C.1
gtagctcggaancggctcgaggagaaaaactcaaagtcatcatcatctaccatggcaaattctgtggcattttccgacgagattcctaacatgagcatgagcttccctttctcccctgctttctctagtagcatctttgacatgatgccaccaccaccaccttcctcatctcacgatcctaaagctcccaactttgctaatagcttcatggacttgctcgctgtccctgctgattattataccccttctttattcgactggtcccaaaacaccgcccccacgtcagcaccaccaccttccaccacccaaatcaaccaccctcttccgtcgccagccagctccaatgtccccgacggctccgaggttctcaacactccggcgtctcccaattcttcgtctatttcatcatcgtccaacgaagcagcagccgccaccaccgccaacaaaacaacgggaaatgataatgaagaggaggaagatgaaacagcaatagatgcaacagcaggcagagaagaagaagatcatcaagaccaagacaagactaagaaacagctcaagccaaaaaagaagaaccaaaaaaagcaaagagagccgagatttgcgttcatgacaaagagtgaagtggatcacctcgacgatggctatagatggcgcaagtacggtcaaaaagccgtcaaaaacagccctcatccaaggagctattatcgttgcaccaccgcgacatgcggcgtgaagaagcgcgtggagcgttcctcggaggatcctacggtggtggtgacaacctacgaggggcaacacactcacccgtgtcctgccacgtcacgggctagcttcgggttcatgcactccgaagcaagtgggttcggacccaccagtggactaggttcggcacactttatgctgcaacaacaacaacagtttcgggaccaagcacaagcacaagcagcaatgttgtata

SEQ ID NO: 121117 - DNA, 312 bp, Glycine max
  unsure (1)..(312): unsure at all n locations
  Clone ID: PAT_MRT3847_80374C.1
ggggagaagcggaacctttaaaaacggcggagggaaaacgcgaaagaaancccggcgaccaagggggggagaaagaaggagngcaacagagcaaacaaggctgcgagaataggaaaggggcttgatgagtggccaaatgagtaccagaggcaggatggcacaaccgatgcgcattggatagaaagagatggtggcctcatgctgctgaatgctcagcttctacttaccaaggagagctttgagaattgcaagatgcaagggtgttgcatcgcacaagacgatgcaaatgcagcggggctgatagctgatgtg

SEQ ID NO: 121118 - DNA, 253 bp, Glycine max
  Clone ID: PAT_MRT3847_80375C.1
cttgaccatggagaagaggatgacatgtttacagctggatgaatttcatgcagagtgtcttttgccatctaatttacttctttgcttgataaagcattaaggtatattttacctcaggaataaaggtgtaaggagtactgtcttcctcaaagatgcttatcttttttttttctggagagagaaggggacgaaggggcaagtttatgttttttttatgccactctgtgggagaggaaatattgatctgtgtgac

SEQ ID NO: 121119 - DNA, 258 bp, Glycine max
  Clone ID: PAT_MRT3847_80376C.1
aaacataccaacattcatatttcaaaccacatttcccaaaacaaggcttcgtgtcatttaccacaccacacatttcacaccacaaataaacatccctcacaactcaaaaatataaaaaaacagtttcacttcttcaacgataccaacccatttaaaaacattatacaatcaatattatcctaaaccatattctatttctcacctaaactctcccgtaacaccacacaaccaacacattctagcaacaaccatgactta

SEQ ID NO: 121120 - DNA, 574 bp, Glycine max
  unsure (1)..(574): unsure at all n locations
  Clone ID: PAT_MRT3847_80377C.1
cggtgatgaccctgataggttggcattgaacatcacaagctcagggaaccaaagtgaactttgacaaccggntgttgttaacaccacagttggtggcaagtgtttactctgatcaccaaagctcgatattcggctcgaacaaggttcttcttccgagggatttcttcgttcccaagcctcctccaccagctcctgcacctgcaaaggctaaggcttcttctgcaaagaaatctactgagggtccttcttctgcagcggataatgactctgctgctatcagcttgaatggaatttggctgtccctttcagtggctactattgctgcagtgttttccttgtgacaatgatacgagttattggtacatcaagtgtgctacttggggtccgatgttcttgtgctttgttaaaattttctacatgctttgttttgggaatggttggattaaagggaaatcatgaactttttgtagcacttttcaattattttcttcttttcttttttctttttgcttccttttgtattgattaatccagtttgtggtgaattatcaagtatgtattcgattttgaaggt

SEQ ID NO: 121121 - DNA, 539 bp, Glycine max
  Clone ID: PAT_MRT3847_80378C.1
ctgtttggtggggtggaggggtgggggggggggggtgggggggggggggggggggggggggggtctgggaggtaataaatagggaaggaagaataaccataacgggataggggggggggttattggatagagcgataaggctaactaagtctatcctggcacacgtagagaggtattttgttaggtggtggtagctgataaatgagaggagagggaaggtttatagggggcggggttggggggggtgaggcttatgcggatcgatatgggctaagaaaaccaataataagaaggagcaaacttgacacttaaggaacaggcagggggtgtgaatgactttaaactagagcgggaagtggaagtatggctacttattactattaaatttaaggtggttattattaatagtagatataattgtgaggcagggtgctgctatcggtttagagagacgaatagtatgagtcgtattagggctactaaaacttaactaaatggctggcctatgccttatcgacacgagtttggctcctccaact

SEQ ID NO: 121122 - DNA, 2743 bp, Glycine max
  Clone ID: PAT_MRT3847_80379C.1
ctaatttctggaaaaagaaccagttgcggggatgaagatcctgattactttggagtttctaaaggaaaaattccttttggtgaacaatcttctagaacactttttgttagaaacatcaatagcaatgtagaagattctgagctaaaggctctctttgagcaatatggagatatccgaaccatatatactgcctgcaagcatcgtggatttgttatgatttcttattatgatataagggcagcacaaaatgcaatgaaagcacttcaaaataggtcattgagatctaggaaacttgatatacattattcaattccaaagggcaattctccagagaaggatattggccatggtacactgatgatatccaatcttgattcatctgttttggatgatgaactaaaacagatttttgggttttatggagaaattagagaaatctatgaatatccacaattgaatcatgtcaaatttattgaattttatgatgtccgggctgcagaagcttctcttcgtgcattaaacgggatctgctttgctgggaagcacattaagcttgagcctggtcttcccaagattgcaacatgtatgatgcatcagtcacacaaaggaaaagatgaacctgatgttggtcatagtctgagtgacaacatatccttaagacataaagcaggagtgtcatctggatttattgcatctggtagcagcttggaaaatggatataatcagggatttcattctgcgacacagctacctgcttttattgataactcaccgtttcatgtgaattctagcattcacaagatcacaagaggggcatctgcgggaaaagtatctggtgtttttgaggccagtaatgcttttgatgctatgaaatttgcatccatttcgaggttccatcctcattctttacctgaatatcgtgaaagtttagctactggcagtccttacaacttttcaagtaccattaacacggcttccaatattggaactggatcgacggaatcatctgaaagcaggcacattcagggaatgagttcaactgggaacctagctgagtttaatgcaggaggaaacggaaaccacccccatcatggactttatcatatgtggaatgggtccaacttgcatcagcaaccttcttcaaatgccatgctttggcaaaaaacaccatcctttgttaatggtgcatgttctccaggtcttccacagatacccagctttcctagaacaccacctcatgttcttagagcatcacatatagaccaccaagtgggatcagcaccagttgttacagcctcaccctgggatagacaacattctttcttgggagagtcacctgatgcttctggttttagattgggttctgttggaagtccaggctttaatggtagctggcagttgcatcctcctgcttctcacaatatgtttcctcatgttggtgggaatggtacagaattgacgtcaaatgctgggcagggctctcctaagcagttgtcacatgttttccctgggaaacttcccatgacttcaatgtcaaaatttgatgcttccaatgaacgtatgagaaacctttatcaccgtagaaatgaagcaaacaccaacaatgttgataaaaaacaatatgagcttgatttaggtcgcatattgcgtggggaagacagccgaactacacttatgataaaaaatattcccaacaagtatacttcaaagatgcttcttgctgcaatagacgagcaatgtaagggaacttatgattttctgtatttaccgattgatttcaagaataaatgtaatgttggctatgcattcataaacatgattgatcctggacaaattattcctttccaccaggcttttgatgggaaaaaatgggagaagtttaatagtgaaaaagtagcagcactcgcctatgcccgaattcaaggaaaagctgctcttattgctcattttcagaactcaagcctgatgaatgaagataaacggtgccgtcctattctcttccatacagatggcccaaatgctggtgatccggagcctttccccttgggtaacaatattagagtgaggcctggaaaaattcgcattaatggtaatgaggagaatcgcagccaagggaatccttcatctttggcaagtggagaagagtccgggaatgcaatagaatctacatcgagctcttcaaaaaattctgactgatttagcatcatgatctaacagttcaatgttgcatgtgatatcaactccaagactgtatatttacattatctttttgttcgatcgagcaagaggagttggagctggtaggaaagggggctcaaaattttttcctatagaggagccttgcaagagtttttggaagttgaggtacataacccgaatgaagtcactgattctattgttttccgttattttcctaaaattttgcatggagtactgctaccatcctacaactttagagaatggcctaactgaagcttaaaattttggctagctgtgaatggacaatgtgacactttgcagtttccttgtgataatgtgcatcattgtgggtttcaagggttctttgctgattttgttttcatggtcatctttgttgttcatatgtaattttgttcccttatattcccgggcattggtatccttatgggttttgttgtctatataatggatttttgaggaaaaacatttaaatgaaacattttcttcggtggtggtagtattccagataaaaaaaagaacgaag

SEQ ID NO: 121123 - DNA, 416 bp, Glycine max
  Clone ID: PAT_MRT3847_8037C.1
tttactttttcgtggcaactggatctaccttgtgacaaaatttctagtgtcttgactacaactgatgagagattggtaggcacagaacatgagggatatgatccttttcttggtggaattcaaaaatatgccactcccatgatgcccctagatgaagaaattctttttaaggttgctcaagatatggttgaggaatgtgttgattgtgttgatgaggaggatttctttgaggaagtttttttaagtgcatcactcaatggtgttgagggtttggataatatggaaaagaatttctcttgccacatttgaaggattttcttatgtgcattcacgcaaaaattggttaaatatgctaaaggtgtattttttttgggaatggtgataagattacatttattactaataactattgaata

SEQ ID NO: 121124 - DNA, 196 bp, Glycine max
  Clone ID: PAT_MRT3847_80380C.1
gtacagcggggaagaatctaccgaagagtttcaggtacatggtattgatgcagaggttttggaagaggattatcctcgttgtacaggtatgtgcgtcgcttcattatccatgggtatcgttacacctgcacttctgcctctgactctcatcagtggtgttcagacaaccagttgtctctcccacgattagacacat

SEQ ID NO: 121125 - DNA, 4445 bp, Glycine max
  unsure (1)..(4445): unsure at all n locations
  Clone ID: PAT_MRT3847_80381C.1
atttatttatggtcaacaaaccatttctaagcatgatgattctgattataatttctttttcaatgtcagaagacctctatgggtgttgcgttgtccgtttttttcttcttctctccaaaccagagagcgaccgccggcgagcctcacctcgccggaaattcgctcttcttcgccggaacctccatttttcccgatttgcccttctaattgcgcttgctttttttcttccaaccgtctccttcaagaagagcctttccgcgcaataattatttttcttttttccgtttttctgagccacctgagattgcaatgcagatggaaggaggtttctgttgctgcaagaagcgagggatctcttatttctgaaattcctatgctgtggagcgtacgaaatgatcaatatttttttattctctttctctttgttctggatgactagcgggctgtattttttgtaggttaagtatttgtgagacaggaggtgtggtgaaattcagtagtttttgtttatggtgtgaattgccatgttcattgtaatcagtcctttctcttgtcgagcgaatgaccttgaatttcgcgcatatgtcacgggatagagcctgacgaaaactagcaaggagggaggttttcagtattttctggacaagctgcaggatgccttctgaaatcatggagaagaggggtgcttctgcctcatctcgctttttggatgacatttcctatgtttctgagaagtatactggattacgaaagccaaaatctatccatgaccattttctacacgggaagagtgaaatggcggcatcacctggcatcatttttaatacttcgtcaccccttgaaacaaattcaaaaacaggcttgtcaatttctcagactactctatctcgggaaattacagaagacctacattttggcagagaaacaggcaatacagatatgctgaaggattccaccacagaatcattgaattatcacaagagatcatggtctaatgtgtataggcagtcagcatctggctcatatggtctaattgggagcaagattgtcaccaatgctgcctcacgtgaaagcagtctgttttcaagctcgctgtctgacatgtttagccaaaagttgaggttattggggaatggagtgctgtctggtcaacccattacagttggttcctttcctgaggaagaaccgtacaaatctcttgaagaaattgaggctgaaactattggaaatctccttcctgatgaagatgacctgttttctggagtcactgatgagttaggattcagtactggcactagaatgaatgatgattttgaagattttgatttgttcagcagcagtggaggcatggaattggaaggagatgaacatctaatttccggaaaaagaaccagttgcggggatgaagatcctaattactttggagtttctaaaggaaaaattccttttggtgaaaaatcttctagaacactttttgttagaaacatcaatagcaatgtagaagattctgagctaaaggctctctttgagcaatatggagatatccgaaccatatatactgcctgcaagcatcgtggatttgttatgatttcttattatgatctaagggcagcacaaaatgcaatgaaagcacttcaaaataggtcattgagatctaggaaacttgatatacattattcaattccaaagggcaatgctccagaaaaggatattggtcatggtacactgatgatatctgatcttgattcacctgttttggatgatgaactaaaacagatttttgggttttatggagaaattagagaaatctatgaatatccacaactgaatcatgacaaatttattgaattttatgatgtccgggctgcagaagctactcttcgtgcattgaacgggatttgctttgctgggaagcacattaagcttgaacctggtcttcccaagattgcaacatgtatgatgcagcaatcacagaagggaaaagatgaacctgattttggtcatcgtttgagtgacaacatatccttaaaggtatcataaagcgggagtgtcatctggatttattgcatctggtatcagcttggaaaatggatataatcagggatttcattctgaaacacagctacatgcatttattgataactcactggttcatgagaattctagcattcaaaagaacacacatggggcacctcaaggaaatgtatctggtttttttgaggcctgtaatgctattgatgcgatgaagtttgcaactatttcgagtttccatcctcattctttacctgattatctcgaaagtttagctaatgaccggcctgaaaacttttctagtactattatcatgtctgccaatattggaactgtttcggcggaatcatctgcaaacaggcacagacagggaatgagctcaactgggaacttattatagtttaatgcagcaatgaatggaaactgcccccatccaggactttatcatatgtggaatggggctaaattgcatcagcaaccgcctttagattctatgctttgttgcaatatacttttctttgtgaatagtgcttgttgtccaggtgtttctctgatacttttcttttcaagaacaccgcctcatgtgcttagagcatctcatatagaccatcaagtgggatcagcgccggttgttgcagcctcaccctgggatagacaacattctttcttgggagagtcacctgatgcatctggttttagattgggttctgttggaagtccaggctttcatggtagctggcagttgcatcctcctgcttctcacaatatattttctcatgttggtgggaatggtacagaattgacatcaaatggtgggcagggctctcctaagcagttgtcacatgttttccctgggagacttcccatgactttggtttctaaaaacctctattctcgtagaagtgaaccaaacactaacaacaatgctgataaaaaacaatatgtacttgacctaggccgcattttgcgtggggatgacaaccggacaacgctcatgataaaaaatattcccaataagtatacttcaaagatgcttcttgttgccatagatgagcaatgtcgaggaacttatgattttctgtatttgccaattgatttcaagaacaaatgtaatgttggctatgcattcatcaatatgattgatcctggacaaattattccattccaccaggcttttcatgggaaaaaatgggagaaattcaacagtgaaaaggtagcggtactcgcctatgcccgaattcaaggaaaatctgctcttattgctcattttcagaattcaagcctaatgaatgaagataaacgttgccgccccattctcttccatacagatggcccaaatgctggtgatccggagcctttccccttgggtaacaatattagagtgaggcctggaaaaattcgcatgaatggtaatgaggagaatggcagccaagggaatccttcatctttggcaagtggagaagagtctgggaatggaacagaatctacatcgagctcttcaaaaagttctgactgatttagcatcatgatctaacagttcaatgtgcatgtgatgtcatctccaagactgtatatttacattttctttttgttcgatcgagcgagagaggagttggagccggtaggaaagggggctcacaatttttttcctatagaggagccttgcaagagtttttggaagttgaagtacataaccaagaatgaagtaactgattctattgttttccgttattttcctaaaattttgcatggagtactgctaccatcttaccactttagagaatagcttaactgaagcttaaaattttggctagctgtgaacggggacaatgtgacactttgcagtttccttgagataatgtgcatcattgcggttttcaagggttctttgctgattttgttttcatggttatctttgttattcatatgtaattttgtttccttatattccttatattgctgatttattgtccatatactttattgattagaaaaaatgcttaattcagccttaaaaaaaaaaaaaaaaaaaataaatcaagcttgttctttagttatacttattaaccctccccctatgagctagttggggttgagttagggtcaaatccaaattttaagatacttactatattatccacacactaggcccattaatactatgcgtgagggggtgcattagaaaaaactcaaatctcacgtcaactcaaagatagtgtcagggttacatatataagtgggggacaatgctcattctttgagctaatttttaggttgagttaggtccaaacttatgtacaggtgagacatgcctaaggttcattgtgacaccctctacccttccaattataactaactaattaaataaatcatacanaaatttatttaaaagnattataacccctatatttttt

SEQ ID NO: 121126 - DNA, 478 bp, Glycine max
  unsure (1)..(478): unsure at all n locations
  Clone ID: PAT_MRT3847_80382C.1
gttggaattgtgttaagatgaatgggctctaatttcaacagttcatcacaaggtgcataacatccaaaatagaaacccctcttttttgcacaattcccaccgaacattaaaccaatgggctctaaggggggccgcccgaaaattgggatgaattacccggaaattaaaacccgtccggtgcccgaaagggaaccaacttttccttttttgaatcgaattgggggccggccgaataaggggccttncaccccccggttaaaaaacgggaccgcgcccccaagcccccccacttttcctcctgggagcctaattttaaatccccgggggccctaggaaagggcctcccccccctaaaagggggggcccccccaacccccctccccaaatggaaacccgagccttccagtgtttattattggggggcccaaccgccggggaaagggcgcttgttttttgggccccccgggcgtgttttttt

SEQ ID NO: 121127 - DNA, 1372 bp, Glycine max
  Clone ID: PAT_MRT3847_80383C.1
ccacgcgtccgctctaggagcctatggtttggcatggtttggcatggtttggcattgagtgtgaaacaggctaataaatgtgagtggttcaccgtcgcaacttccaatgtgcgagcacttactcgtctcactgtcttgctatatttgggtgagaacacagaggatagtggagttcaacgagatggagcaaataaagcacagaatagttgaagtgaatggcataaaaatgcatgttgcagagaaaggagagggtccagtggtgttgttcctccacggcttccctgagctctggtactcatggcgccaccagattctctctctcagctccctcggctaccgcgccgtcgctcccgatctccgtggctacggtgacaccgaggcaccaccttcaatcagcagctacaactgcttccacatagtgggtgatctcgttgcgcttattgactctctgggtgtccaacaagtgttccttgtggctcatgactggggagccatcataggttggtatctctgcatgtttcgccctgacaaagttaaggcctatgtctgcctcagtgtccctttctggcccagaaaccccaaagtgaagcccgttgatgccatgcgggccatatatggagatgactactacatctgcagattccaggagccaggcaaggcggaagctgagtttgccaacaatagcattgaacaagtaatcaagaacatactaacaagtcggagacctggaccaccaatcctgcgcaaagaaggagcaggttccaattccgatccttcaaggcctcttcccacttggctctcacaagaagatgtcacttattatgcttctaaatttactaagacaggcttaactgggggcctcaactactatagaaatctcaacctaaattgggaactcacagcaccatggactggagttcaagtcaaagttcccgtgaagttcattacaggtgatttggatgcagtatacaattcactagggatgaagaactatatagagagcggcgctttcaagaaagatgtgccatgtttggaggaagtggttgtgcaggaaggggtggctcacttcaacaaccaagaagctgcagaggatgtcactaatcacatttatgattttatcaacaagttctgatgctatcagcttagttaattcttgcgctagctgctcaatttgagtttagttaaataatgatctctgctactcgccgtgtttcttagttgagtttgcaggctcattggtttaagctctatttgtactatcatgattgtgccattatagaaatatgttttcgtgagaatgttcgcagtttgccacatagacggtaatccctgtactcccgaagctaattgaaatgttggttttgtttttgtt

SEQ ID NO: 121128 - DNA, 1257 bp, Glycine max
  unsure (1)..(1257): unsure at all n locations
  Clone ID: PAT_MRT3847_80384C.1
ccacgcgtccgggctactcgagtagttttatcgctctgcaaagagagagggagatggagggaatagagcacaggacagttgaagtgaatggcataaaaatgcacattgcagagaaaggagaaggtccagtggtgttgttcctccacggcttccccgagctctggtactcttggcgccaccagattctggctctcagctccctcggctaccgcgccgtggctccagatctccgtggctacggtgacaccgaggcaccaccttcaatcagcagctacacctgctttcacatagtggctgatctcgttgcgcttattgactctcttggtgtcgaacaagtgttccttgtggctcatgactggggagccatcataggttggtacctctgcatgtttcgccctgacaaagttaaggcctatgtctgcctcagtgtccctttcatgcccagaaaccccaaagtcaagcccgttgatgccatgcgggccatatatggagatgactactacatctgcagattccaggaaccaggcaaggcggaagctgagtttgccaacaatagcattgaacaagtaatcaaaaacatactaacaagtcggaaacctggaccaccaatcctgcgcaaagaaggagcaggttccaatcccgatccttcaatgcctcttcccacttggctctcacaagaagatgtcacgtattatgcttctaaatttgaaaagacaggcttcactggaggactcaactactatagaaatttcaacttaaattgggagctcacagcaccatggactggagcacaagtcaaagtaccagtgaagttcattacaggtgatttggatctagtatacacttcactggggacgaagaactatattgagagcggtgctttcaagaaagatgtaccaaatttggaggaagtagttgtgcaagaaggggtggctcactttaacaaccaagaagctgcagaggatgtcagcaatcacatttatgattttatcaagaagttctgatcttatcaacttaatttgttagttgtcgctctgctcacttgagttaattggtcaaataatttgcttgtcatctatgctacttcatggtgtttcgtttgcaggctcgttggtttaagttatatttgtactcataatcgagacattatggaaaatatatttcgtttggatgttggcaccgtagactataactcttgttctcctgaagtcacagaattaattcatttttgcttctgttgctagaattggcngttcg

SEQ ID NO: 121129 - DNA, 255 bp, Glycine max
  Clone ID: PAT_MRT3847_80385C.1
gagaattgtattcgcacagtccagaggaagctcgcctattgataaggaaagcttctcttctcgtatctgaattggcctgctaataagtctgattgtgcctgaccatatgcacaagattgtaagagcgtccatatcgattgcagaatgatgactgcaatgcttcctgcattcaaattgataattattgatcctcatgctgagcttttgactatgcctgggttcacaagtgagcagataaaagctttcccaaacaag

SEQ ID NO: 121130 - DNA, 282 bp, Glycine max
  Clone ID: PAT_MRT3847_80386C.1
tatctctcttcgcctggtcttggcatctccgcagcaccaccacccaccacactgcttagaccaggtcctctatctctctagagagaaagagaaaaaaagaaaagaaaaaaaacaactaacattaagctttaaatagtaagacatggctaaacccagttcaaagggggatctaaataataaccagcagaagggtcaggttcagcaacaacagcagcagggtcaatgggcggcggcggcgcaccgatccggtatgagcagcaatggatggatatgcagtacccg

SEQ ID NO: 121131 - DNA, 303 bp, Glycine max
  Clone ID: PAT_MRT3847_80387C.1
tgagcatcgtctagctatctcgatcgaactgtccaaggtcctgtcactaaaatatgtagaatataaactataacgtaaactgtagttggcacggaaaaaagcctactactggtggttagcctgtgtgtagttttagttggccatgcctaaccttgccaaatgcccatttagtacttttacaacgcccaacccgcactagcaccaacattcgtattacttaccgtgttgtaccacctttagccgatcctttacatttacgtaacgatggccctttaggtgtgcgtcacatttttcgttgattga

SEQ ID NO: 121132 - DNA, 1404 bp, Glycine max
  Clone ID: PAT_MRT3847_80388C.1
cgagaagccaacggggggcgagatggctttgatctagacaaagtctgaaaaacaaaaccacaaaagaacagactccagggtagtgggcagggaggacgccatgccgaagaacaagtgtccccgagaagcagttacagaatggacacgtggtagcggtgccacaatctgcttccacttttcaacaacacttgttcgctgtcatgttcttctgcttctcgtctttgttcactcttccagtgcaaacctaacaaacatgggaagtaaaaaccaatgtcaattatcagacaagaaaggttatgtttccagcctaggatgtttctttggactgcttgatgccaacttcttcgaggataaacagattggggagattgccgagggtgaaaatgagttcaatattccaatcataagagctaatcgaaaacttgtagcttctgagaatggggagctgcattatccctctcctttagtcttcaatgctgattggaactctcaaccaactcattttgaaaaaaaaaagcttcaactatccttccatctctgggatacaaagacctgaatctgaagaagatattgcctttatgagtgttcttgagtttgctgaactcatcaataataaacaaattacttctctggagcttacacaaatattcttgcggagactgaaaaagtacaaccctactcttgaagctgtagtcacttatactgaagagttggcacacgagcaagcaaaagaagcagataagttgctcggctaaggaacttatctggggcctcttcatgggattccttatggattgaaggacataatatcagtgcccaaatacaaaacgacctggggatcaaaatcattcaaaaatcaagttattgacgtagaagcttgggtctataaaaggttgaagtccgctggggcagttcttgttgcaaagcttgtttctggatcattggcatatgatgatatttggtttggtggtagaactaggaacccatggaatattgaggaattttctactgggtcatctgctggacctgcagcaagcacctcagcaggtatggttccatttgcattcggtacagaaacagctggatccataacttttcctgcagctcgatgtggagtgacagcgttgcgcccaacttttggtactattggacgaagtggtgtaatgagcatttcacaaagcttgatcttgatgatccctcatcaaaacatagctctctggatgatccattcctggttgacattacaaagttgactgttggatatcttgatgatgctgaaatggaggttgttcatgttcttgattcacaaagtgacaagatggtccctttcaaactgaattacacagtggattgcgttcaaggtatcttaaatgtcacaatgaatgttgacatgctggcccactt

SEQ ID NO: 121133 - DNA, 167 bp, Glycine max
  unsure (1)..(167): unsure at all n locations
  Clone ID: PAT_MRT3847_80389C.1
cttcgancccgaganagccttggagttcattgcaaaangctggaatgtttgaangangttganagagncancgnttattccgntcccaagcattcgggcattgttctcttcttcaggacagcnaaggagaatttcgagcttgctttggaagcngataatancaatac

SEQ ID NO: 121134 - DNA, 493 bp, Glycine max
  Clone ID: PAT_MRT3847_8038C.1
ctggacatgcacgaagcttatcttgtctatctcgtatatgtgtggcgagaattgcattagcacagtccacaggaagctcgccaatcgagaaggaaagctctctctcgtattgaatggctgcataaagctgatgtgcctaccatagcacagatggaacagttccattcgatgcgcacgatgatgaatgctcctgagtcaaatgataatattgatttactgctgagcattgatttgttgggtttacaaggagcaagtaaagctttttcaaacaaaatcgattttgatgataagcttgtgttggctaacacacaagaattctctgatggaaattttccagtggattcttggctaccaatcattgtgaattgtctctatcctgtaagtcaattaccttcagaagctgtcagttgaaaagatacatgtggtagaggacgatgtggtttacccaccactgctaggattagttctacagttaacaatcaatcctcaaata

SEQ ID NO: 121135 - DNA, 246 bp, Glycine max
  Clone ID: PAT_MRT3847_80390C.1
ggggaaaaaaataatcctttcccttgcgacttctttatcatccccaaaagaaatccgggaaaaattattctaagtttgatcccgggggaattaaactattacctgcctacctggggccgggtttggaccttttccacttcgagttgggaaaggtttacctggcccccacccattttttttggcatcgctgatgcaaattacccaccctttcaaaccccatgaagggggacttgttttttgtccctg

SEQ ID NO: 121136 - DNA, 491 bp, Glycine max
  Clone ID: PAT_MRT3847_80391C.1
cttttcttttttttttttttttttttttttttttttttttttttttttttttttttttttttttttttttttttttttttttttttgggaaaaggttttcgggaaaccaacgagtggccaaaggaggagttggaattcgaagtttaattacaacccagagatcccaacggagcaccccgattcgttacaaaagggtacagggaattaaacagggggctatggaaacaaaaattggatttttttttttaaagggaaaaccgaggggggaaaaaggagggtcccaaggggggggggccaggggccacccaagggagcacccaagttccccaaagggccagggccgggaaaagcggatgggggaacacaaaatcccccaaaagccaacaaagcaggacggccattctaaaggtctttgactttgaattcagggaagggttaagggcccttaaaggctcccaaaggaccaaaagcccccccaggggatttctttt

SEQ ID NO: 121137 - DNA, 356 bp, Glycine max
  Clone ID: PAT_MRT3847_80392C.1
aaggaagaaaaacaggttattttcaagctccaacaaagcaaaacccgaattcaaaaaacactggtttacaatgcccgcatccaactggggatctaccccttagcggctatggggggtttatctacaacaatggtcacttttttggaataaaaatctacgggggggatagcatactcctttggcaccacggggggtttattaccaaagatgggccacaaattgggcacaatggatggtggcaaagcttcacattcagccccaaattttattgcgggaagaacccttaaaagggaaaaactcctttaatatttcactggggggggtttgggctttttaacaagaaactttgggtcccg

SEQ ID NO: 121138 - DNA, 426 bp, Glycine max
  Clone ID: PAT_MRT3847_80393C.1
ttctaatcgcagggccgctctttattttttttttttttttagcaaccttttctgttttttgatctggttctatcaatggccgggctggaagttttcctttttttaactaatcttttttttaagccctttttccacattgcaaattcaataactttatgattggtgccgtggtttcaaagtttggtgacaagagtgtgtacttagatttgtaggatctgggcaacactacaaaaaaaaaaacttgtgtggtttatatgcaccttcaccctacaaccatattaagagcttgttcttcgagacattagctgctccattcacaaagaggggattgttactcaagtttctgatatttgaaagagtttcacccttgcatacttcagtgcaactgtctaagggacattctaccaatcaagaaaggaccacaac

SEQ ID NO: 121139 - DNA, 355 bp, Glycine max
  Clone ID: PAT_MRT3847_80394C.1
caaacaccacttccaccaccgaaccctctttctcgctctcattctcattcccccatggacgacgcctcctcctctccccctcctcctcctccccctcccgatcctcctttcgccgaaaacctctccctagtgtaccctctaaccccaacataaatgggctgctttacccctcccccaaagtctgtaagaagataaaccccccccctctttaaaggggccaacccgttaaaaaattctcgacaaaaaaaaaacccccttttaaaaaattctttttttttttccaaaaccttttttttaagaatcccccccggggggtttttttaaaaaaaaaaaccctggcaaccccctttttaaa

SEQ ID NO: 121140 - DNA, 175 bp, Glycine max
  Clone ID: PAT_MRT3847_80395C.1
ctgtcttgctttgtgctgtatgaatgtcatctttcatgctcagacctcctgtactcatgaccacttctgttagctcttcgctctgctataatccctgtctgcctgtggagcaaagtttccgtctaggctctcctcgccccctacgtgttgtggtctgtagaacgtgatctgctta

SEQ ID NO: 121141 - DNA, 351 bp, Glycine max
  Clone ID: PAT_MRT3847_80396C.1
ccttaaacgccaacacatccatctcgtaacggaatctgaaatttccgtcgtcgaagaatgaagacgaagaagcaagacacggcgaagctgatcaccgccgaggatttcgaattcgtcatcgacaaagaaagtgcgacggtttcacataacattcacaacaattttacctctccaggtttctactttccgattagggttttaggattagcattgttgaggcatattatgatggaagatgattcataaagcaaccaaaaccaatcgagaatactttgattccgagtgaaatgcggcattggaaacaaatgggagaggtgctggtggcagcttttatcaccaacacgctatcca

SEQ ID NO: 121142 - DNA, 423 bp, Glycine max
  Clone ID: PAT_MRT3847_80397C.1
gtggggttccagttacttatctttaaacactcaaccatcaacgatgttttttaaagcggtaagacgatacaaggcagtgtggaccatcgcctatgtacggtaggcgggcaaagctgctaagcgttggacctccgcctggacgtctaagcgacgccttaagaacagtgcactgaacaagtcaacaatatccttggcacgaaacccaaatgtgtgcatgcaccttacataggccgtctttggcataccactgccatttacatataatatgtccagggcagagtaaaagcacagcgccactaagcctcaagacgattcatgggggctgctttcccaaatttctaaacttgccctttagatccaccgatgatctgtactaaaagacaccagggtaagctaatttgatatcttgcaattcccctatgc

SEQ ID NO: 121143 - DNA, 251 bp, Glycine max
  unsure (1)..(251): unsure at all n locations
  Clone ID: PAT_MRT3847_80398C.1
tttccgagtgatcacccccagagagagaaacgaggggntgtacanttcggttcagatgccaccacatcccccgactgactagagggacacctggctccccacggatgaccccagagcaagattggtgcacctaactgaaagcacaaatcaaaacccctctatccatatgaagacgcgactacgcgagagctgaaagacacatacaaatgaggttgatgagtgtcctaaagcaaaaagagaactacaaatgc

SEQ ID NO: 121144 - DNA, 179 bp, Glycine max
  Clone ID: PAT_MRT3847_80399C.1
tcgcaattcgactcaagcttcattttgttgttcgaacccaaaaccctagcagccggctagaatcgcagacgttcacgttgatgccgcagcacgggcacaggcagcacaccgaagaagagaacgttcaagaggttcagcttcatgcgcgtggatctcgacgcgcttctggacatgtccac

SEQ ID NO: 121145 - DNA, 439 bp, Glycine max
  Clone ID: PAT_MRT3847_8039C.1
cttacttgtccggcagcactcaatggtgttgtgggtttggactatatggaaaggattcctcttgccacatctgagggttttcctcatgtgctttcacgcataaatggtgaaaaaggcaaaaggagatttgcttttggtgatggcgaagagatgacattgattccgggaacctgtgttgaagaggcttacaacaagctaatagttgaacttgtgaaaagttgtcctacattgtttggcattgaatgtcccaaggatgagaaactttcttgtcgcaaaattttttgacaaacctaaaacgcgctgcttaactattctccctatggagcttaatcttgtggttcgtcagaagttttaaaatttgtgaggctctttattaaaaaaagggacatgcttagttgtcaaagtggaataatccatactccatgtgatggactgtttt

SEQ ID NO: 121146 - DNA, 647 bp, Glycine max
  Clone ID: PAT_MRT3847_803C.1
taaacaattgatcatcttatatgataaaattatcatgagaaaaattattttggtacaaaataataaatatgataacaatgatttcatatattgcattttctaaacagaaaacttcatttgcaactacacacaagagttggaattctatattataaaaactacacacacaaaaacaatattcaatatgaattgttacaggagcgagcagccccttttttttatgttggatctactatcttgaccaaattttcttcttagtgtccctctctttgattccttgaacctgatctctgcttgtgctacctctcttgtgagacactggggctggattagcagtgactggccttggtgttggcctcacaccccttactatttttggtggatcagatttccttgcgactcttctatcatgtaataatgatgatggcatgacaaagttgttttcatcattgcttcttttgcttcttatcttatgagtggaatcattctctttgaacaaagaaccttggcttatcttatgagtggaatcattccctttgaacaaagaagaaccttgacttatctggcggtttaccgagtctgaacaccttaaaatgccagtctcaatctcacttggacattttttcctcatgcagcttttacataca

SEQ ID NO: 121147 - DNA, 250 bp, Glycine max
  Clone ID: PAT_MRT3847_80401C.1
ctcgagccgttttcttgttaggttttatgtggtaactggtatgaatctcaattgttagatcatggttattgtgtattgaaaattgaaacttcaaatttgcaaccagttagattttctgcaagtgttttctcttttacccttttgttagagggtgatgattttctggtaaagttgggagaaaattgatagcttagctttcgagagagatgaattgttttcctgttgaggtgattgggcacatatttggttg

SEQ ID NO: 121148 - DNA, 481 bp, Glycine max
  Clone ID: PAT_MRT3847_80402C.1
gtttggcttgattttagggtatgatggcatctacatccacatttctttggcttatgtgttaactctcgaccgagtcatcggggccatatacgttggagtcggagataattcctctatcgtccccacttaggttactaaagtggtaacctatattctgctaatccatttctaactatttcttgtttaaagtcttaacctcgtttgaatctgttgctctcgtttccatgctctgttttttcttcttcgattacatgtgcaccatataatattaaccacatgttgttgcggcatatacaatccatcttactgcgccttttcacacccaatcttctttccccttttctcccattttcaattttgctatgcgtcttaaatgtgtatgcctttattataaatattaaaaatgtggcctaatgctattagaaaaattaactagaaagacattccttgacaaggtatactttttgcttctattgcgaat

SEQ ID NO: 121149 - DNA, 1612 bp, Glycine max
  Clone ID: PAT_MRT3847_80403C.1
gaacaaaaagcacattacatgagttgacatttttccatgtactcatgttaggtatctgcagctgaactcaagtttcaatctttcacctatccatggcttcctctctctttctttgcagtaactacgtcttccccacttcccaaaaccccttcagaagcaaccatttagctcaattcagaccaaatgggccctccaattttcactcaaagcttcggtttcagagaccccacttggtcagagccatggtttctgattccaacacttccaggagacaaatagagattgtgtatgaccccgaaggaaggattaacaagttggctgatgaagtggacagggaaactcccctttcaaggcttactttgttctctccttgcaagataaatgttttcttgagaataaccaacaagagggaagatgggtatcatgatttggcatccctttttcatgtgataagtctaggtgacataattaagttctctttgtcaccttcaaaaaccaaggatagcctgtcaaccaacgtgtctggggtgccccttgatgatagaaatttgattattaaggcgcttaatctttacaggaagaagactggcagtgacaagtacttttggattcatcttgataaacgggtgcctactggggcagggcttggcggtggaagtagcaacgctgcaactacactatgggcagccaatcaatttagtggctgtcctgcctctgagaaagaactccaagaatggtcaagtgagattggatcagatattcccttctttttctctcagggagcagcctattgcactggtcgaggagaggttgttcagaatattcctccaccagtatctctagatgttccaatggttctcataaagcccccagaagcatgttcaactgccgaagtctacaagcgtctatgtttggaccagactagtaatgttgaacctttaacattgctggagaagatctcaaagattggcatctcacaagatgtttgtattaatgatttagaacctccagcatttgaagttctcccctctctcaaaagactgaagcagcgaattagtgcagctggtcgtggagaatatgatgctgtttttatgtcaggaagcggaagcaccattgttggatttggttctcctgatcccccacaatttgtttatgatgatgatgaatacaaagatgtcttcttgtcagatgcctattttctcactcgagaggaaaatcagtggtaccaagaacctgcttcaagtccttctgcctctccttcagttgtttcggagtctgtttaacctacggtcttataagataagaagatagtaatgtaaaattgcattatctagtcttttttcctgcatcatttaatgatgtaaaaaaaaataagttttgctgctttaactgctgggaatcaataaaattaaagaaagaaaaatgaatgaataaatattaggccctgcctctgagttgttacaatgcccgaataattggtcttgtagcatgcatctcgggactgatcaaagacccaaaaataatgttgtaagtttaaggttttctaagttctgtttcaaagttggataaatttgattttaaaccattaaatgtaattagaatgtgattccaa

SEQ ID NO: 121150 - DNA, 424 bp, Glycine max
  Clone ID: PAT_MRT3847_80404C.1
cgagcagagaagttgggattaaatcgagacatttggtcaaacttcaaggcagattatggtcgcttctcatccagtcttaaagggatgtttgcagctggaggttgtcgacgtggtcaggccttggtggcatggtcacattcagagggactacatgctgcagcacaagttgacagtttcctcacaaatgaagattcagagcacaatggtgccgggagtcctgacgaacttatcaagaagaagcagctactgtaggactctgttgcattggcaaactcacagtgataacttatgaaccttctgtgcgttttctattcttaaaagatggaataattatatgatgactgctggatattcattgagcattcgtggttcgtaattggtgccccatataaatgttagggggaaaataataaagaagcgttct

SEQ ID NO: 121151 - DNA, 694 bp, Glycine max
  Clone ID: PAT_MRT3847_80405C.1
tacggctgcgagaagacgacagaagggtacggctgcgagaagacgacagaagggtacggctgcgagaagacgacagaagggggagaatatgatgctgtttttatgtcaggaagtggaagcaccattgttggaattggttctcctgatcccccacaatttgtttatgatgatgatgaatacaaagatgtcttcttatcagatgcccattttctcacccgagaggcaaatcagtggtaccaagagcctacttcaagtccttctgcctcaccttcagttgtttcggagtctgtttgacctacgttcttataagataagaagatagtaatgtagaattgcattatctagtcttttttcttgcctcatttaatgatgaaaaaaaagttttgccgctggaaatcaataaacattaaagaaagaaaattgaatgaataaatataaggcagggcctctaagtccttacaatgcccgaataattggtcttgtagcatgcatctcgggactgatcaaagacccaaaaataatgttgtaagtttaaggttttctaagttctgtttcaaagttggataaatttgattttaaaccattaaatgtaattagaatgtgtattccaattgaagtctcgtaaattttacattagaataagtgtatagtgtgagaaattattcttgatataaaacaaagagtactttgtctc

SEQ ID NO: 121152 - DNA, 327 bp, Glycine max
  Clone ID: PAT_MRT3847_80406C.1
tttaaaagtataatttgatcaaaatttggtccatccatcccatcagcaaatttctacctcactgtttgaaaccccaaggccatcacttttctctgccttggcttttttgtcatcaagataatgttgatacacataagacagaaagccccacactgctaacaacaaggctacaaacttcaccccattgatcttgtcatggaagaatacaattgccaggatgggaacaataggcaatgccaaggtacctatcacatttgaaaacaatgaagacacctcaaaaatcaaccctagcataccaattgaggatatttgccatgtcacagcaat

SEQ ID NO: 121153 - DNA, 573 bp, Glycine max
  Clone ID: PAT_MRT3847_80407C.1
tcgccttttcgtccgcccacgcgtccggatgaatccaaaagtacttgtcactgccagtcttcttgataaacgggtgcctactggggcagggcttggcggtggaagtagcaacgctgcaactacactatgggcagccaatcaatttagtggctgtcctgcctctgagaaagaactccaagaatggtcaagtgagattggatcagatattcccttctttttctctcagggagcagcctattgcactggtcgaggagaggttgttcagaatattcctccaccagtatctctagatgttccaatggttctcataaagcccccagaagcatgttcaactgccgaagtctacaagactagtaatgttgaacctttaacattgctggagaagatctcaaagattggcatctcacacgatgtttgtattaatgatttagaaccttcagcatttgaagttctcccctctctcaaaagactgaagcagcgaattagtgcagctggtcgtggagaatatgatgctgttttatgccaagagcggaagcaccattgtggagttggtcttctgacctccacatttgt

SEQ ID NO: 121154 - DNA, 361 bp, Glycine max
  Clone ID: PAT_MRT3847_80408C.1
gttggtttaccaggacctccttacaggtgatgagcttctctctgactccttccgttacaatgaaactgagaatggaatgctgcgggaagttgaggggaagtgggttgtttaaggagcagttgatgtatacattgttgcaaacccatctgctgacggtggatgagaagatgatggagttgatgatgcagctgttaatgatgctgacatctgtgacacattcagactttatgagcaactcgcatactttaatatttattttgttaccttcatgaagattctgatcaagaatttgacttccttgttcgatgcagatcaccacgtattgtttaagatgctcttcgagcgatctactcataatctg

SEQ ID NO: 121155 - DNA, 329 bp, Glycine max
  Clone ID: PAT_MRT3847_80409C.1
ctcgagcctattcggctcgagtaagatttgaaatgtgggtgaaccgcgatcacaggttgccgcaccttaaaaccgggaacaaaagcaatcggtacttgatctcaagaatttctcaatttcttcctactgctacgtgtacgattttttaagggaaagaaaatcactctatgcgctggttacagacttaatgaatcatcgtcttctccactcctagcatagtggctgaactccttactatttattttaggactccctgatttatgtgtaacccgaactgccgcttccgtatttactatgatcgcctcaagaccttgttgacctaccggagc

SEQ ID NO: 121156 - DNA, 509 bp, Glycine max
  Clone ID: PAT_MRT3847_8040C.1
cccacgcgtccgtcggctgcgagaagacgacagaaggggatattagggttttaatttaacgcagcttttgttttattagtatctccgtccctttcattacacaatgagcagaaacagcgatgaacctgcgatgactgaagaagcaccaaccaaacagtccctagcgaacatcttctctttgttccgcaaaatcaattttcaactccctttcctcccacccaaacctgaagaaccgaagcttgaggctcaggctcagcaggagggtccgaagcctggccgtgtacagtttccgaaaagccaagtggcgctgattgcttcttcgcctctgcaagctgaacctgatgctgaccactctcccgctgccaagacaaccaatcctcttattctctggcagatttatgcaataggagcgattgcgatttcatcatgggtttgggcaaggtggaatgagaggaagggccgaggggggtctcccagtgatgagaggggtgaaggaagacattctgatg

SEQ ID NO: 121157 - DNA, 2854 bp, Glycine max
  Clone ID: PAT_MRT3847_80410C.1
cctttgtaaggtcgaccatgcataggagcctcttgtacctgttttcagctattcataccaaattatgcgtagtcttcaaaggaacatgtgtgataatgagacaggccatgttctttatgagaccatgtttgtttggaatgagttcttaactcgaggaattaggaatcacctccagaatactatttggacagttgcgctagtgtatggattttttaaacaggaaatgctaatgatatccagacgggagttcacacttacgctcattgcaagacgatcacgtcattatgctggcactaggtatttgaggcgtggtgttaatgagaaaggaagagtagcaaatgacgttgagacagaacaaatagtctttgaggatgttgcagaaggtcttcccatccaaataagctctatcatccagaaccgtggttcaatccctcttttctggtcacaggaaacttcaaaactaaatattaaaccagatattatattgtcaaaaaaggatcagagttatcaagccactagatatcactttgaaaaccttgtcaaaagatatggaaatcccataattattttgaatttaataaagacccatgagaagaagcctcgcgagtccatacttcgtcaagagtttgctaatgccatagatttcattaataaagatttatcggacgaaaacaggcttaggttccttcattgggatctgcacaaacattttcagagcaaagctacaaatgtcttgcagcttctcggcaaagtggctgcatatgcattgacattaacagggtttttctattgccaaacaacaccaaccttgagaccagaagaatgtctgaaatggccaagtaccaaggttgacaacagggatgcagatgaaaattattctgtcaaaccacccatgttgcagaggggggtgctcaggaccaactgcatagactgcttggatcgcacaaatgttgcacaatatgcatatgggttggctgctcttggccaccagctccatgctctgggggttattgaccacccaaaaattgatcttgatgagcctgtagcagatgatttgatggggttttatgagcggatgggtgatacacttgcacatcagtatggtggttctgctgcacacaacaagattttctctgagaggaggggccagtggagagctgcaacacagtctcaggagttttttaggactcttcaacgctattatagcaatgcatacatggatgctatgaaacaggatgcaatcaatgtattcctggggcattttcagccacaacagggcaagcctgctctatgggagttgggttcagatcagctctatgatgcaggaagacatggagatgatgatgcaaggtcatttttcaaaagatccttctcagatggaaacattcttaatgaaagttctacaccgatgtcagccccaaaggccaagcacgaaaaattcccaagccaaggcggcttaccagatcgatcagaagaaggaagcaagggtctttgtgagtcatcaccagaaatatccactactgacagtgacatctcattttcaaggtacactccctcaatgcctcggagacagctctttggagatatgcaaagagagcgctgccttgaaagtgaacatatttactattctgatcacggggattccttcagctgctccaactttgttgacctggattggctctcttcttcaggaaattcatgcgaagaagagccattcgagaggtcatcaattaccaactctccaattgctggagtttcttcagaaaatgttatcaatggaatgatggtaggtgaggcaactgcctccactagtgattggggggcctccagcctaaagggaagggaacaaactgaatccgagttatcttacgatgatgcacggtccaacacaccagaagaatttccagatacttttgtgaactgggtgacttatggacaaacactttgccattgaactttgcatatgatctcttgcactaatgtataattgatatttttttggcttggtctaaagatgcttattagaagaaactagagagaaggaagcggcgaaagaaaaagaatcaggcatttgggtaggcttctgtttgtgtttatgtggtggtgctaatctaagaatcatcctgaggccaatcttggtattgacatgcagcattaattctgttgtgaagatctcaatcaaatcctcaaggcatagtagaaaatagtgcatagcaaagcaagtgcttgtaaaattgtttgttgtcttttcctttcttttattattttattattattattattttctgttgttattgtcttcttggagttcagtgttttcatttttctttcagcagttataataggtgcactttttgtaaatattattaccctacttgtgggagcttcacttttagaattgtagataattgattcttttaaaagactttgcttgttgtcgtgtatagtttagaacagcgtggagcggtagttgaagtaggggtcgaactcgtggatcatggactcgtagcggagcacgctgaagaggcgcgtgatgaaggcgaggacgtagatgagggagagcgtggcgacgcggatcagaagctcttgctgcttcgtcttgagctttagggttttggggagagtgaaggaggttttgagatctagtgccattggagaaggtttggatgtaacaaccatggctgaaattagggtttcatggagaaattgggaatgtgagagtgagtgaaattggacgagtgcagtgcagtggatctgaatctgaattggtggagatggaagggaagagagcgagaaagtgaagaagagtcaagagtcaacggtttgttattccagggtaggatttggaaagtgg

SEQ ID NO: 121158 - DNA, 319 bp, Glycine max
  Clone ID: PAT_MRT3847_80411C.1
caccaccccaaattatatcaccaaataaaaaaaatccaattaacccgtattactatttcattctctataaaaactcagcaggcagaattataaagggtcaatggggaaaataaggccccgaaaacaattttagggataaaaaaaaaccagtaccgaacagggaagggaaacattttgctaatacatcaatacatattggaaaattaaagcaaggtgggattttgttcttaaaaatcacaaaccggaaggatgcatgcttcattccaaggaggaggcaggcttcattccaattggtatataaaaccctaaaaaagcagca

SEQ ID NO: 121159 - DNA, 694 bp, Glycine max
  unsure (1)..(694): unsure at all n locations
  Clone ID: PAT_MRT3847_80412C.1
agctaaaaagaagccggccggaagtactcttgtttggaattagaattaagagaacagacacagaagtcactaattaactctacaaagtacaaacaccaaatcacatttattcaaccatacatcatataacaacaacaacaacaatactagaactagaagtgagaaattcaagacttttttttttccattttctttttttacaataacaagatttaaatctatgatctggtgcatattacccaaaccccactactagaccgagaataaggactcaattaaggtcttatttagttgctttgtaactactttttgaagaagcctccagccaagtttgcaagaccacctaacccaccaccactttcttcacctttagactctgcaggctgtgaaggagcagtggtattatcaccctggtaattatgcagataatcagcagccttgtcaacatattgccctatgccttgtttgtcatcaagttttccatacttccccgccgcgtcgagaagatcgccggcagcgtcagccaccttggccttgtccactttgtcgctgtcgctcttcagagccgactgcgccgcctccgccaccagcttcgcgctcgtgatgagttcggtagtggactgctcgctggggggcttgttctgggattcttcggaagccattgatcttacntanttaagcttctgccggacgc

SEQ ID NO: 121160 - DNA, 363 bp, Glycine max
  Clone ID: PAT_MRT3847_80413C.1
gcacgcatacgccgacgcgtgggcggctgtgatgggacaacagacgggcaccctggtcagattggaaatggctatgcccctgtcttcaagagccacacttactactcggtgtgagattgcatgaactcatgatcaagattgacaggcgaaccggactagagcttgagaaggagcccaagtactggaaaaacggtgatgctgcctatgttaatatgattgcaaccaaacccatggttgtcgaaactttctacaactatcatgcacttgccagagcttgctgttaagcacatgcgtaaaactgatggtgagggagacatccccaacgtcgagacaaaagatcctaccggagccaaggttaccaac

SEQ ID NO: 121161 - DNA, 2777 bp, Glycine max
  Clone ID: PAT_MRT3847_80414C.1
accaaattcagattcagatccactccactgcactcgtccacactcactcactctcacattcccaatttctccatgaaaccctaatcccaacaatggtcgtcaccaccaccaaatcctctccaatggcgcaagatctcaaaacctccatgagctccttcactctccccaaaaccctaaagctcaaaacgaagcaacaagagcttctgatccgcgtcgccacgctctccctcatctacgtcctcgccttcatcacgcgcctcttcagcgttgcttctcccacaaaccgcatgagttctacattatacattacaacaagcaaagttatttaaaagaatcaattatatctacaattctaaaagtgaagctcccacaaaacagggtaaataatatttacaaaaggtgcacctattaaaactgctgaaagaataatgaaaacaccgaactccaagaagacaataacagaaaataacaataataataataataataatagtaaaagaaagaaaaagacagtgaagaattttacaaacacttgctatgcactattttctactatgccttgaggatttgattgagatcttcacaacagaaatattaatgttgcatgtcaataccaagattggccccaggatgattcttagattagcaccacataaacagaagcctacccaaatgcctgattctttttctttacccggttccttctctctagtttcttctaataagcatctttagaccaagccaaaaaaatgtcaatcatacattagtgcaagagatcatatgcaaagttcaatggcaaagtgtctgtccataagtcacccagtttacaaaagtatctggaaattgctctggtgtgttggaccgtgcatcaccgtgggataactcggtctcattttgtgctcttcctagtctcttctttaggttagaggccttccgatcactccgtggcggttgttgtcaacacccaccattattccattgagaacattttctgaagaaactccagcaattggagagttggtaattgatgacctctcaaatggctcttcttcacatgaatttcctgaagaagatagccaatccaggtcaacaaagttggagcagctgaaggaatccccgtgatcagaatagtaaatatgttcactttcaaggcagcgctctctttgcatatctccaaagagctgtctccgaggcattgagggagtgtaccttgaaaatgagatgtcactctcagtagtagatatttctggtgatgactcacagagtcccttgcttccttcttctgatcgatctggtaagccgccttggcttgggaatttttcatgcttggcctttggggctgacatcggtgtagaactttcattaagaatgtttccatctgagaaggatcttttgaaaaatgacctagcatcgtcatctccatgtcttcctgcatcatagagctgatctgaacccaactcccatagagcaggcttaccctgttgtggctgaaaatgccccaggaatacattgattgcatcctgtttcatagcatccatgtatgcattgctataatagcgttgaagagtcctaaaaaactcctgagactgtgttgcagctctccactggccactcctctcagagaaaatcttgttgtgagcagcagaaccaccatactgatgtgcgagtgtatcacccatccgctcataaaaccccatcaaatcatctgcaacagggtcatcaagatcaatttttgggtggtcaataactacccagagcatggagctggtggccaagagaagccaaggcccatatgcatattgagcaacattagtgggatccaagcagtctatgcagttgatcctgagcacccccccgctgcaacatgggtggtttgacagactgattctcattgtcatcattgtttccttcacttggtttcctcacttaattatgactatccatcactatcatcattggctagatctttcaggcctaaggttggggaagcttcaataagtaagtatcaatggcttccgaagaatcccagaacaagccccccagcgagcagtccactaccgaactcatcacgagcgcgaagctggtggcggaggcggcgcagtcggctctgaagagcgacagcgacaaagtggacaaggccaaggtggctgacgctgccggcgatcttctcgacgcggcggggaagtatggaaaacttgatgacaaacaaggcatagggcaatatgttgacaaggctgctgattatctgcataattaccagggtgataataccactgctccttcacagcctgcagagtctaaaggtgaaagaaagtggtggtgggttaggtggtcttgcaaactttggctggaggcattcttcaaaaagtagttacaaagtcaaatagatgttacataaaaggagtccttattccagctatcaatttgataaaactattgattgttttttttttttccttgttatgggatttgaataatatggacgatggtatcagattctgtaaaaaaaagtcttttaacttttcgttttaggtctagtgggagtgagatttggataatatgcatatcaaattaaggattcaaatcttgttattgtagaaaaaagaagtctttaatttctcacttctagttctagtgctgttgctgctgttgttcttatgtgatgtaagttgaataaatatgatttggtgattgtactttgtagagatagtgacttttgttcgttctcttaattctaattccaaacaagagtactttcggctggcttccttttagct

SEQ ID NO: 121162 - DNA, 195 bp, Glycine max
  Clone ID: PAT_MRT3847_80415C.1
gctggaggaacactgctgacgtgcaatcgccgcccgtactgctcgaaagaccatatgtgagtaacccactcgcactatgcgtatctgcgcctgtacactaggcctggaccactctaaacacctaaattcacctccaaacacgcacacgatacccagtgattgatgcatctatgcatataccaaaacttgtgattc

SEQ ID NO: 121163 - DNA, 163 bp, Glycine max
  Clone ID: PAT_MRT3847_80416C.1
aaaccaaattaaaaatttgcattcgtatgtttggagagcaaacaccccagttttcacttgagaagggtttacgcctaaaaaggcgggaacccccccccttctgaaaccggtgggttgcttttcccacccccattcccaaagggaaggggaggcgtttttttta

SEQ ID NO: 121164 - DNA, 577 bp, Glycine max
  unsure (1)..(577): unsure at all n locations
  Clone ID: PAT_MRT3847_80417C.1
accagttttttttttttttttttttttttttttttataaaaaaaaatgattaaatcattcaaaactcgaatttcaaagtcaaaacatcaaatgctgtgtgttctcaaaataatatttcaaaaaatgaaccaaaaataaaatgacagcaaaattaacggtaccggcggaaaaacagggtgttgtttctcttccacattgccctgcagaatggacctgctttataatataaatttcctctaccacataaacccctattacttttcccaacaaaagtaaccccacccagctctctatacttatacactgaattaacaacccaattaattctaaaatcatttctaatagcagcataaccaacatccaccaaaatcacctcaaantatttataagtagaatcctcattcacccagtaagaattaaagaccctaantccacccagcttgcgtgcagctgactcctgaacaactaacctcttacttcgctaaaattgcantggagtaactccctaatttggaagcttcccatagacggtgcgcttgggaactaagggtgtggcgcgccccgtcctaacccgaac

SEQ ID NO: 121165 - DNA, 693 bp, Glycine max
  unsure (1)..(693): unsure at all n locations
  Clone ID: PAT_MRT3847_80418C.1
ccacgcgtccgcaaacacccagggcaaaaccaaaaccacgctaaaaggatctcctttccaccctttctttttctcagattctccgatcaaaggttgtaatttgtaaaagtcgaaaatgatgccattgacgcctgaccagtctaacaagaaagttgggtcgggcatggcggcttctccgtcaccgttcctgacgcctcgcccggaacggcgccgtcccgattcaaggggttccgattggggctccaaccgtcaggacaaggataaagagaccaacgtccaagttttgcttcgatgcaggccattaagcgatgatgagctcagatcgaacgttcccaaggtggtgacatgtaatgaaaacaaaagggaagtctcagttatgcagactctagctaacaaacaagtagatagagtgttcacctttgacaaggtattcggacctaaatcacagcaaagatcaatatacgaacaagccattgccccaattgtcaatgaagttctcgatggtttcaattgcactgttttcgcttatggccagacagggactggtaaaacttatacaatggagggtggaatgagaaataagggtggtgatttacctgctgaggctggtgtcattccaagagcagtgcgtcaaatttttgatattttggaagcacanaatgctgattatagcatanaagtgacattccttga

SEQ ID NO: 121166 - DNA, 257 bp, Glycine max
  Clone ID: PAT_MRT3847_80419C.1
attgaatctcagaattctctaaaagagatctttcactgctctatgaagacagaacgggctgtgcttgattttggagatgtctctgctctcagatctcctcaaccttaacctctccgataccaccgagaacgtgatcgcagagtacatgtggatcggaggatcacgaatggacctgatgagcaaagcagggactcatcgaggagcagttagcgagtcttcagagcttcccaagtggaactatgatggttatcagtcac

SEQ ID NO: 121167 - DNA, 409 bp, Glycine max
  Clone ID: PAT_MRT3847_8041C.1
cgtccgcccacgcgttcggatttttttgccacttccatgactttctcctagatgaagaaattctttctaaggctgcacaagatatggttgaggaatggtttgattgtgttgatgaggaggattcctttgaggaagtttctctaagtgctacactcaacggtgtcgagggtttggactatatggaaagaattcctcttgccacatctgagggttttcctcatgtgctttcacgcaaaaatggtgaaaaaggcacaaggagatttgtttctggggatggcgaagatatgacatttgttcccggaaccactgctgaagaggcttacaacaagctaataggtgaacctgaaaaacatgtgtcctacatctggcgggcattgaatgttccaaggatgataaacttcctcgttgc

SEQ ID NO: 121168 - DNA, 372 bp, Glycine max
  Clone ID: PAT_MRT3847_80420C.1
caacccaatttggggaaaataaggggaaaaaccggggaaaaaaaataaaaggggggttgggatggttcctggccgggggcaaaaaaaaaaataaaactttaattcccccccgccccttcaagggggaaaaaaaaagaaaaaaaaaaccttttttggtttaaaaaaacgggggcaaaaacggggggctttcccaaactaataaataaaggggcaaaatttcccttggttcccccaaccgggaaaaaggtaataaaaaacccggggaggatttcggttggttaactagccaaggccaaatctctttaacaaaataaaaacccgacaaaaatggggggctttaaaaaagcaggggacaaaataactttaggaaaa

SEQ ID NO: 121169 - DNA, 571 bp, Glycine max
  Clone ID: PAT_MRT3847_80421C.1
gattactttaggcatttgcgagaaattgggggacaggatgctgatagagaagatgaaggggacagaaatggtgctcgaattgctagaaggcctcctggacaagttaatcgtaacatcaacaatggtgaggggaatggtgaagatgctggtggagtgcaaggaattgctggggcaggtcaagtaattagaagaaatgctgaaaatgttgctgcaaggtgggagatgcaagcagcacgacttgaggcacatgtcgagcagatgttcgatggtctggatgatgctgatggagcagaagatgttccctttgatgaacttgttggcatgcagggtccagtttttcatttggttgaaaatgcatttactgtgctggcaagcaatatgattttccttggtgttgtaatctttgtgccattttcattgggccgtatcatactccattatctatcctgggtcttctcaactgctagtggccctttgttgtcagctgtggccccacttgcagacacatctttttttctagcaattattactttgaagaatgccttaacagctggtaaaaacatgtcatctg

SEQ ID NO: 121170 - DNA, 351 bp, Glycine max
  Clone ID: PAT_MRT3847_80422C.1
cccacgcgtccgcccacgcgtccgcagagactcaagaagttgccgaagtgaaaccaactgagggctctgtcaaccgagatgcagtgcttgcaagagttgcaactgagaagagattgtcactaatcaaagcatgggaagaaagtgaaaaatcaaaagctgaaaacaagtaagagtctacactctttggttcagaagctagaatcttcaattgaatcaccttaatcatggtgattaatcgacctaacatcaagctttatctaaaaatgctcaatctaacatcaagctttatctgaaaatttattggttggtttccttgtttatcttgtgctgatctttgatattttttgcaca

SEQ ID NO: 121171 - DNA, 117 bp, Glycine max
  Clone ID: PAT_MRT3847_80423C.1
caacggcaaccaacgaagggtgcatatgagctgttgtgttatcagttatcacgggaaggcagcctaaagagcagtggaaatctcaattcgcaagtgaatagcacacggacgcaccca

SEQ ID NO: 121172 - DNA, 204 bp, Glycine max
  Clone ID: PAT_MRT3847_80424C.1
gtacacaacttttctcagattcactaattcggcatccatttttatgttaaggacattccccaaaaaagtaaaaaacgaaagaaacaaagaaagttatttcaaggaaaaaacgagagaagaaaaaaaaaagtatggtgcgaactttatgcaatttccacagaagaaagttggcaaattttttcatcaaaagaaagttgtcttaca

SEQ ID NO: 121173 - DNA, 385 bp, Glycine max
  Clone ID: PAT_MRT3847_80425C.1
atgaaagactgaagaggatattaaccacagtggttctttttttaacctcccaaaagatgagtggcctctttgcgattgatagaattcatgatcataataacccaccctacaacctaggatttcttaaagggacagaccggattcttgctcctcttgaagagaggaagcgtctacaaaaggaaaagccaacacgagttcttttacacatagctggatccaccctggaaggtaggtgttcacgccgaacggaaggccggttccttccttggggagcatgtaaacctccaaggccttggatgggcccaacatggatgtggcactgtgccctgacatctaagatggccctacacccaacttgcttgaggtgttttgatccacagaaaaa

SEQ ID NO: 121174 - DNA, 404 bp, Glycine max
  Clone ID: PAT_MRT3847_80426C.1
ggagaaaaaattaaaaacagggggaatatttaataaaagaccgaacccggaaaatggttaagttttttttggtggtgaaaaaacgcttacaagttacaagggatctttaggaaaataacacaataatcttatttttttttttacatagatggaatagagatctcatagttgaaaaagggggtttttacattgaaattgggcaattgatgctttttgtatttgttcgggacaaattgaaccttaataccctttttttgggcaccattatatgacttttaaacattctgatttgccaccttttccttgggttccttgggtttttcctttgaaactttttggaacttttaaggtggggaaggggcccttttttccataaaacggttactaagggttccagttccatt

SEQ ID NO: 121175 - DNA, 369 bp, Glycine max
  Clone ID: PAT_MRT3847_80427C.1
tactcaattgtcgatattgagaaaaaagcaaagcttcgatcctgtgcctagtatcgtcctatctatgtgcgattgcaaactccaaaacaattcctaaaatatatattttaaactttaagggcttaaagaggctcaagttcaacacacaaggactcacctaccttatacgatataaaatcggcttaattgttagggtgagagatttaagaattaaaagtaaagaaagggaataagaggtagtagatttaaatttttactaacattctaataaaaattaatatttattaacttttaaaataattattttataataatttaaatagtgattttgtaataaatcacaattataattgttttacaatgtgaata

SEQ ID NO: 121176 - DNA, 297 bp, Glycine max
  Clone ID: PAT_MRT3847_80428C.1
ttgcgctcacgcgttcgcccacgcgtccggagattgctggtaatactcttatgccagctttttctgttccacaggctactgccagatcttctgaaaatgcggaatgctcgtgacgatctggaatttgtgattcctttcggttgatcgctagattaataaaataaaggaaattaggcatgaccctgttgttgagtatgctctggctatcagaaaatatccacacctcttttaattgacgaaatgacgtgcgaagagcagagttatgttgaaccaattctacgtagttgatctattggc

SEQ ID NO: 121177 - DNA, 257 bp, Glycine max
  unsure (1)..(257): unsure at all n locations
  Clone ID: PAT_MRT3847_80429C.1
attccccttgcgtatgtagaagctagnngcatgcgcaggcaaagtttcttaccggagaagttgggtgacctagttgagaaaggatgacaccancagcagtggtgaacacatctgtttcgtcatcaaaaggaagancaaattaaggaagctgcaagacctggaanantggtcatagcttttttttaaactgtaaaacctgatccggatttgtntccctnaanattggcnncgcgaaacacatcgggggggnnnacacc

SEQ ID NO: 121178 - DNA, 1118 bp, Glycine max
  unsure (1)..(1118): unsure at all n locations
  Clone ID: PAT_MRT3847_8042C.1
gagaaacaacattggtcattaataaaatgaagataatatattttaatggaataacttgtcccactctgcccaaaccccagacgaattagtagttgtgtttgttcgtgcatcgagtattcggttgtacgtgtgccataattgaattgttttgtgttgttttcttgaacatgattggctaattaaaccaaagctttgtttctgatgagaaagactttggctgggttgtttataaattgtgaaacaggcaagagctagctagtcaattatttttattcagtatttctgcacagccctttttttggtgaattattctgcacctacaccccttggtgaagaattataattaagtttgcaggccttccaattaacatggagccacagtgtgcaatcaagaaagattccactgatcagttttcatgctgattatataattacctgtttttgcagatgggaatttcatcaggagccgcagctgcagctgccataaaattggggaagagaccagaaaatgccggaaaactcatcgttgtgagtttctaatctttgacattatgtcctaatcgataatgataaagtaggatattttctttgttggtggtcataaattcatatatgaaggagtgagaagatttggatcttagacaataaaggtcattccattctccagcatgttcaattgtccttcccaaattcctatcctgaaacacacaacaattgtcatgaacaaaccacattacatgacaaatcttgagtaagtttttgtataaagacgttggtggacaactttggaacatgattgacaattttcaagatcattgatgggacagttatgagagttcaatctgctatagcaattttcttattgatggggcatgggatcacaggttaataggtagagcattgatcataacccttcttcacatttgtcaaccttcctgtcaatgaccatagctaaggttttcagtttttcactgttggaaaatttagcattagactcctaatttcttcacttggtacaacaacaactancttcattaatggttggtagctcttctttccccagatttgaatnctgactttgatcaattcagattcaagcgatggaaatcatattcata

SEQ ID NO: 121179 - DNA, 634 bp, Glycine max
  unsure (1)..(634): unsure at all n locations
  Clone ID: PAT_MRT3847_80430C.1
ataacagatctagcatagaattttatatcatctcattattagattgatcctatgtaatcaatactgaccttatttgctgattataaggtcattcttgacacataacattatggtaaaacactgttatatggtatctagagcttaggttataataaaagttgttctcaaaacaccgccaaagactgccacactgtccatggggccccacatagggccctgacacgtgaagttcacacacacgatgcgtgacgcatctctagcgaaccgcctttagtttctatcgggttgaccacatttgtaactgttagatttcaacttaaaaaccaattactaagtgaagttgctcaacagatatataagctgcaccccaagaacagatgcagacagtgtgggacttcctaacacccctctccacagatgcttgccaatacaggcgagcctactagaacagttaagaactaagatgggctacagactctgatactatgttagatttcaacttaaaaaccaattgacacttatgtatgtgatctcaatctcaaatacactccaaataaaacttgaccatcaaaattaaataaaaattaaaaagcatatnntagaagttttgtcacaattacttgctcaaatacac

SEQ ID NO: 121180 - DNA, 569 bp, Glycine max
  Clone ID: PAT_MRT3847_80431C.1
gagacttcataataaattactagaatactagattttaaacccgtgtggttcatggaattgcacaagtttttttttttggtgcgaaatacatgaaataaagaataaactaaacaaaggactacatagcagccaaggagtacctatgaaggatttcgagcacttcatttgggggagtggccaggaaagagttgactttgtcatcctagcgccccattcggccaagaaatcgacaactgaattcaccttcgtattcacgtgacaaagagaaaaggaccaatccctcttcatgaagctcctaatagaatgaattagtatttgcatgagcatacatgcttatctactcatttggccaatcaataagcaactccaccatgttcatacaatatgactcctaagagatgcttctaaagcaaagagctcagaaagaagagggttgcccaaaccacaatgacgagcaaacctgaagagccatcttccaacaccatctctaatcaacccaccaacctccatcacatgtggctcataatgaccactcccatccacgtttaatttcacttcattcaataaag

SEQ ID NO: 121181 - DNA, 1657 bp, Glycine max
  Clone ID: PAT_MRT3847_80432C.1
ggctcggcccccgtctgttcccaactcggcttcggtgttggccccaggtgcgtctctcatcccgcatcaggtatgtctggtgtgggggcggcccacgccatcccctagggtgccgagcggggtactgccctccgggctgccttcccggtggggctgtttccctgtgtttggttgtatatttggtgcccctctccctgtctttccccttcgtgtgcgcaccatggggtgcgtcactttcccgtggccgccccgtcccacctgcagccgcatggcctggtccctcttcaggccttccccctgtggttgccagccttgcccctcgttccagcctccgggccttcccttcttcttttccactcgagggaatggataaagctcaatgtatgtcattaatcccgcatcaggaaagactgttgtttaggctattcacttcatcctactaaaattataagttggatattttaatgtggtcatccttcccgatttgggtgataaccatttttatgatgtaaataagaagcctctatccctttctattggcaacgagtgcggaaaaaaggtatggtgactatcttgtggactacttgaccgacttggagcatcataacctgatccttctaaagaagttaccacagaggttgccagccaagcccctcgttttagtcttcaagtcgtcaattatttttaaggacttgaatggtatgttttctttctctttagcatttcttgattaatactacaatgttatttacttagtttattttgcagctatactcaaatctgtcgggatggatgcactcaattttgccaacatatgctgagagaagcatgtgtgaatgccaaaaatgccttttataaatcactttttgaatgatattttgtgtgagtttttctaccatttacgtgcattttcttggcaaaaatcacgtttgaacactagttttgtattgcaagagtataaccgctccattgagtgaaagagttgaaaattacatgattttatgaagatctgaagactttgcacttgataacaattgtggtacatttatcacgaccgtggtaagtagcacaaccatggcaaaaggataactgccctccaaacaacaccaaccttctgacaatggtcgtggtaaattccatcatggtcgtagtcaactcataagggccgtagtcaatccacaacgccccagagcttcaacgtcatgactttttgcccatgtcgtaatggatttcatcacggacatagtgtgccttttctgattgacatctttttgagaaattataaatatgggtcgtatcttgtatctttagtaccttttacctagttttgaatttgagaacttttgagggttttgagagttgtgaagtgtagacaaccccgtaaggacaaatcatgatcattgtttcttccttattggtatgtctatgtctatttcatataggattatgagttgtgctctgatcatgagcgactagtcaccctagtctatgggttatgatgtaactattcaattgtatccctttccttgttcttaatgaaattccttaatcttttatgttaattaattctcttccttatatctattttttaaaaaaaaaaaaaaaaaagggcggcgcgctctctatagaggatgcgagcgtgcgcgcgcgtgcatgc

SEQ ID NO: 121182 - DNA, 220 bp, Glycine max
  Clone ID: PAT_MRT3847_80433C.1
taccgctgcgagaagactacagaagggggttttacgagagattcatgggaaggaagaggcaagaatcaagaatgatttgtttttgtgaggatatatgcatacgtgccatcaccatacttgaaagcccctaacagtcctctcctgctttccattgtttctcttctcataactttttaaatactcccacttgcgcataatcactcagcactgagattaaatt

SEQ ID NO: 121183 - DNA, 109 bp, Glycine max
  Clone ID: PAT_MRT3847_80434C.1
atgccattgattcataatgctttattcttacccatcggtaaaggtaacaatcctcaatcacaaggaattttcacggctatatcatttgtgactactaatcaaacgaaaa

SEQ ID NO: 121184 - DNA, 337 bp, Glycine max
  Clone ID: PAT_MRT3847_80435C.1
cattactgctttggggagtataactagcacgcctcaagctactgcagtgcatgtggttgctatagagcctataaagggtggcaacataggaaactgtctgcatcataattggtgcactgcttttgggtgatccttatcataccaatcctgaaaatgcagttcgatttatttatgctgcgcctttcaaaggtccaatgcccattggggagggtacatttacggatcccattgagccgatctaaccagacatgaagtcaaggtttgagcttttgagtaccactaccaagggtgattccgttctatgaatgcatcactcaatggttaaggtttatgtagc

SEQ ID NO: 121185 - DNA, 653 bp, Glycine max
  Clone ID: PAT_MRT3847_80436C.1
gtgagagaggcgcgcacatcaccggcacttgttttcattttcagttcatcttagggttcaattctcaatatcctcattccccgttccctcgcctttgcttcctagttcctactgtgacctgtgagtctccccttcccggcctcgccaacgggaaattcaacggagttttaattctcgtgtttcttcggagcgagcagaaggacttcagcatcggagaccgaatcgttagggtgaggggagtaaataaacagggtgaaccgactcaagcccccatgttgaacggataattagttgcaattgcaaaagattgtgattgttgggattgcagagagaagggtggttagtgttagaatagattgagtgtggatggggaaagaggaggaggagatgaggggtgagattgaggaacgactgataaacgaagagtacaagatatggaagaagaacagtcctttcttgtatgatctggtcattacgcatgccctcgagtggccttctctcactgtggagtggcttcctgaccgccacgaaccacctggcaaagactattccctccagaagtcatcttgggcacccacacttctgagaatgagcccaattacctcatgctggcccaggtccaactccctcttgatgatgctgagaatgatgcc

SEQ ID NO: 121186 - DNA, 173 bp, Glycine max
  unsure (1)..(173): unsure at all n locations
  Clone ID: PAT_MRT3847_80437C.1
aattctctcgggtcgatcccacgccgtcttcgcccacgccgnntccgaaaaaactcgacacccatagatgctacgtcctaagctaagaatcaatacacggggccgagtctcacgcttcatagaacacaatgcgccatgtgcaaaggaaactttgcttcttggtgccctttttg

SEQ ID NO: 121187 - DNA, 594 bp, Glycine max
  unsure (1)..(594): unsure at all n locations
  Clone ID: PAT_MRT3847_80438C.1
tacttaggggaccacgcgtccgcttgttttcattttcagttcaccttagggctcaattctcaatatcctcattccccgttccctcgcctttgcttcctagttcctactgtgacctgtgagtctccccttcccggcctcgccaacgggaaattcaacggagttgtgtttgcgaatcgccttttattatctcatttctcttgccattcacacacttcttcatttttgcgtttctcttttcttacgctcttttgctttcattttcatttaagctaaccgcgttttttttcttttcttttcttttcgttttcctcagttaattctcgtgtttcttcggagcgagcagaaggacttcagcatcggagaccgaatcgttagggtgaggggagtaaataaacagggtgaaccgactcaagcccccatgttgaacggataattagttgcaattgcaaaagattgtgattgttgggattgcagagagaagggtggttagtgttagaatagattgagtgtggatggggaaagagaggaggagatgaggggtgagaattgangaacgactgataagcgaagagtgcaagatatgggaaaagaaca

SEQ ID NO: 121188 - DNA, 341 bp, Glycine max
  Clone ID: PAT_MRT3847_80439C.1
gaaggtccaaaaatgagcagcatgaaggtagcgaaagggcgtatcctggttggtaaatacgagttgggaaaaacaattggagagggaagctttgccaaggtgaagttcgccaggaacgtccagaacggtaactatgtcgccatcaaaatcctcgaccgtaaacatgtcctccgcctcaacatgatggaacagctcatgaaagaaatatcaaccatgaagttaatcaatcaccccaacgttgttagaatacttgaggataggtgttggcaagcaaaacaaagatttacattgttctggagtttgttgatgggggagaactatttgacaaaattgctgcaaat

SEQ ID NO: 121189 - DNA, 577 bp, Glycine max
  Clone ID: PAT_MRT3847_8043C.1
gtcgatctatgctagcaatgtaccaggtgcctgtgcacggtcgtgcaagggtgacgtaggcactgtagtagtagtacagctacaaggccacggtggaaccaaaacataacgactggcccaacaagttggttcccattgtgaggatagctggtcaaacaatagggcaccttgggtggagcggactatgctttacgggcgccgcagcggtatgccgccccatactgtgcccaaagttaaagcggtcgcttagctggagagtgtgtacgtaatttacccaggaacagtaggcggaacacactagcagtgtgccggtgtgagcttgtgggcttaggtaaaacgccaataacgggtaatgcaccagtgacggcacggcatacacagacacaactaaaatggatcatacatgtcctcaggaaccgtaggtgtgcagcggcagaagactttacaagtgggctgcctggggacgcctaataataagcgatagctgggagagcatgggggatgaaaggataccgggtgtggcattgtatgcgtgacgcaccatcgattgcgtggagctgtgctgcgcttagggtaa

SEQ ID NO: 121190 - DNA, 1919 bp, Glycine max
  Clone ID: PAT_MRT3847_80440C.1
cgcgcgcacatcaccggcggcgcgcacatcaccggcacttgttttcttttcagttcatcttagggttcaattctcaatatcctcattccccgttccctcgcctttgcttcctagttcctactatcgtgaccttaattctcgggtttcttctgagcgagcagaaggatttcagcatcggagaccgaatcgttcgggtgaggggagtaaataaacagagtgaaccgactcaagcccccatgtagaactgataattagttgcaattttaaaagattgtgattgttgggattgcagagagaagggtggttagtgttagaataggctgagtgtggatggggaaagaggaggaagagatgaggggtgagattgaggaacgactgattaatgaagagtacaagatatggaagaagaacagtcctttcttgtatgatctggtcattacgcatgccctcgagtggccttccctcactgtggagtggcttcctgaccgccatgaaccacctggcaaagactactccctccagaaggtcatcttgggcacccacacttctgaaaatgagcccaattacctcatgctggcgcaggtccaactccctcttgatgatgctgagaatgatgcccgccactatgatgatgaccgccctgacattggtggctttggctgtgccaatggcaaggtccagatcatccagcagatcaaccatgagggtgaggttaacagggctcgctacatgccccagaaccccttcatcattgccaccaagaccgttagtgctgaggtttatgtcttcgattatagcaagcatccctctaagccccctcttgatggtgcctgtaaccctgatttaaagcttacgggtcataacactgaagcctatggtttgtcctggagtaagtacttgcttagcggttttgttgatgcttctgatgatgctcagatttgcttgggggatattaatggcactcccaagaataagagcctagaggctatgcagatttttaaggtacatgaaggtgtcgtggaagatgtggcttggcatttgaggcatgagtacttgtttggttctgttggcgatgatcaatacttacttatatgggaccttcgaacgccggctgccagcaagcctgtccaatctgttgttgctcatcaaagtgaggttaactgcttggctttcaatccctttaatgaatgggttgttgctactggttctacggataaaactgtgaaattgtttgatctgcggaagatcaatactccactgcacatctttgattctcacaaggaggaggttttccaggttggctggaatccaaagaatgagactatcttggcttcttgttgtctgggtaggagactcatggtgtgggatcttagcaggattgatgaagagcagtcaccagaagatgccgaagatggtccaccagaattgctctttattcatggaggtcatacaagcaaaatatctgacttttcctggaatccatgtgaagattgggttgttgctagtgtcgctgaagacaacatacttcaaatatggcagatggcagagaacatataccacgacgaagatgatctgccagaagagtcaacgaaggcagcggcatcctaatgtaattgatggacatgataattagtgtagtgttgaatacaggttcagtgttgtggactcggggagctttttccatatttaaattcgtgctgttacttcgttttgcaccttagttgtagctgtgttttgtgaggtatgaactatgattgccttcaccagtagcatgctgaacaaccgagacctaggtgtatctttcgatggtaaaggtttcccttttatcatgactgattgttattgttcataatccatcgtagttacagctgtgcattgtcccaaaaaagtctttattcccctttaatctatattttgtc

SEQ ID NO: 121191 - DNA, 414 bp, Glycine max
  Clone ID: PAT_MRT3847_80441C.1
attatgtcccgactgcaacatagtgtggtgcaatgcttttggttgatccttatcataccaatcctgaaattgcggttgggagtgttgttgttgcgcctttcataggtggaaggcccattatggtggtgacatttccgaatgccatggagcaaattgaaccgaacgtgaattcagggtttaagctttcgagtaccactaccaatggtgatttggttcaaggaatagatctcgcaatggttaaagttaatgtaacatgtgctgctgttgactggacatcaggctacactacagcttccttgttggaatctggtttgcaaaaagacagcgggctaattgtggaggactatggaaggatgtacttacactgctgataacgttaattaccctcaagagaaagatttgttggagggaaat

SEQ ID NO: 121192 - DNA, 267 bp, Glycine max
  Clone ID: PAT_MRT3847_80442C.1
ggctcgagatgtttcttaatgccacaacgcttcattcatcgtatacaatatacccttcgtttctctccatggacactggcgtggatgcctcagcaccactctgtaggaaacctaacgggtcccaatccgatcatcattcctccaatcacatgacactctgtagaccatgtttctgtgatcgtgacacctgcacgcccatttgcccgaatcgtgacgcactgcttcacacgtgtagccggagtctggacactacctgtgcatgaatca

SEQ ID NO: 121193 - DNA, 2540 bp, Glycine max
  Clone ID: PAT_MRT3847_80443C.1
cggaattcccgggtcgacccacgcgtccgtcatcttctattattaattcacaaaatactcagcaacagaacagtaaccacatctctctttcttcactttcttaaacctcttctccacatctttctagacacacaccccaacccaaacaaattatccccttcattttttttcttctttcaaacgttacaccgcataacttgctcatctagaactgaacacccttatcctcttccaaatcccgctgctaccttttccttatatactatagaaatctctatctactcattcccatcacacaccatcttgttcctaccagtcccactgggtattcttttttactttgcatcttcttcatcatacatgcatgatgaagattttcaacccctctgaatgctttcttcggaacgtggtatgtccatccgataccatcttcctgaaaagcatcaatctttcccatctgggtgtttcccatctctacctattcagaatgtccattctctcctggcccaattagcagctacactacaccccaatacaacactatacttcttctcctatggatccacaaaaccaacacccccctaacccgagaagcattatcttcaacaagtacgagatggggcgggtcctggggcaaggaaacttcgccaaagtctaccacgcccgaaacctcaacaccaacgagagcgtcgccatcaaagtcatcaagaaagagaagctcaagaaagagcgactcgtgaagcagatcaagcgcgaggtgtcggtgatgagactcgtccgccatccccacatcgttgaactcaaggaagtcatggccacaaagggaaaaatcttcctcgtcatggaatacgttaacgaagacctcaaagtctccgacttcggactctccacgctgccggagcagcgccgcgccgacggcatgctcgtaaccccgtgtgggacccctgcttacgttgcacccgaggtcttaaagaaaaaaggttacgacggttcaaaggccgatttatggtcctgtggggtaatcctcttcgctttgctttgtggctatttacccttccaaggtgagaacgttatgagaatttaccgaaaggctttcagagctgaatatgaattcccagaatggatttctccgcaggccaagaatcttatttcgaatctcctcgttgctgatcctggcaagaggtattccattcctgatataatgagggatccttggtttcaagttgggttcatgaggccaatcgcgttttctattaaggagtcttacgttgaagacaacattgatttcgacgatgtggagaacaaccaggaggaggaggttacaatgaggaaacctgccaggccgttttacaacgcgttcgagataatatcgtccttgtcgcacggctttgatcttaggagtttgtttgagacgaggaagcggtcgccgtcgatgttcatatgcaagttttcggcttcggcggtgttggcgaaggtggaggcggtggcgaagaagctgaactttagggtgacggggaagaaggagtttgtggtgaggatgcaggggacggaggaggggaggaaggggaagctggcgatgacggtggaggttttcgaggtggcgccggaggtggcggtggcggagtttactaagtctgccggagatacgttggagtatgttaagttctgtgaggagcaagtgaggccttccctcaaagacattgtttggagctggcagggtgattgatactaataataactccaacagtagttactaagtcatttctcatttctgtgtcttttttttttatagtactagtactttctatgatccatcatggtcgtggtttaatttagtttgtctttgatttgcttaatttgatttcatacatactatgtaaatttggactgtggagtttgtgacggtgtttgatttgaatatactacactacagtagtatatatatatactagcaaaaataatcccgcaaatcatggaaaagtgaaaacattgttgttcactttcacaatccgtttgggtttacatttattacccatgtaatgtaatattattagtttttattacctcctccaagcttatttatttatgactttcttttgtattccttaagccaaagggcaccctgcggcgccgaaaaatgtcaacttaagggtgaaatctacctagatttttgtcgtttacacacaagatgtataaattaacaaacaagacaacctgccaatcatcgtgtcggttttccaggtcgtggggctggtgccggctgtcaagttacactagtctcgcggagatacgatgctgagtattaggttctgtgatgaccaagtgagcccttctctcaaagccattgtttggagctggcagggtgataccccccgttaatagtcatttgatttctgtgtctccttttatgggactagtcctttctatgatcatggtcgtggtttagtttagtttgccttttagttgttgaatttgatttcatacgtcctatgtaaatttggagcccgccctcgagtttgtgccggtgtttgatttaaaaa

SEQ ID NO: 121194 - DNA, 507 bp, Glycine max
  Clone ID: PAT_MRT3847_80444C.1
ataaggtactctattaggaatagaacaaacaaaatataaagcttcaccaaagtgtttattttattgtttttatgttttatcaatgagttataaataaagagacaatcagtcaatatgtaacaacaaaatacttgcagcagtaataataacgttaaacaataaaaattaaaaaccaaacaacaaatgtcctgattttaaagacttgtgttcacaggatcatttgaccaagtaaaggatagttttctaatcatatatgaatgaaattagaagtatgcttttagtttttcacataaactaattctaaaagcattttctcttcaaaaccatcattaatgaagaaaatatattttaaattttaaattataagaaaatatttttcaacaatctctcacttatgtaaaatttaaggaaatgaaatactatagtaaaacattgttaataaagcataatacattgtgtcttcatccattaatttgtcagacttacttaacagggaactcaatcata

SEQ ID NO: 121195 - DNA, 626 bp, Glycine max
  Clone ID: PAT_MRT3847_80445C.1
cctcaaatcaaacaccgtcacaaactcgatccacactccaaatttacatagtatgtatgaaatcaaattcaacaactaaaaggcaaactaaactaaaccacgaccatgatcatagaaagtactagtcccataaaaagagacacagatatcaaatgaccattaactgttggtatcaccctgccagctccaaacaatgtctttgagagaaggcctcacttgctcatcacagaacctaacatactccaacgtatctccggcagacttagaaaactcgaccaccgccacctccggcgccacctcgaaaacctccaccgtcattgccagcttccccttcctcccctcctccgccccttgcatcctcaccacaaactccttcttccccgtcaccctaaagttcagtttcttcgccaccgcctccaccttggccaacaccgtcgaagccgagaatttagatataaacatcgatggcgaccgcttcctcgtctcaaacaaactcctaagatcaaacccgtgcgacaaggacgagattatctcaaacgcattgtaaaacggcctcgcaggtttcccctcgttgtcttcaacaacgttagactccttaatagaaaacgcaattggtctcatgaacc

SEQ ID NO: 121196 - DNA, 265 bp, Glycine max
  Clone ID: PAT_MRT3847_80446C.1
gaaacaaaaaggacaaccattgatataaggcaggtttttaacatctgacgatcatttattatatatcgcactttgccattcaaactataataactttatacatcctcaaaaacacttaacaactacttatacaatcaccatttcttcattatcatttaacatctaacacaaaaacattcaattaccttaaatacataaattatccttacacctgtagacaaaaaaatcatattccccctatttacttttattcaaaaccacctaa

SEQ ID NO: 121197 - DNA, 789 bp, Glycine max
  Clone ID: PAT_MRT3847_80447C.1
ctcatccagaactgaggtgagacacacccttctctcttccaaattccgctgctacttaatttttccttcttcgtcatcatacatgcatgatgaagattttcaacccttctgaatgctttcttcggaacgtggtatgtccatcggacaccatcttcctgaaaagcataaatatttctcatcgtctccatcctctcctggcccaattagctacaccacaattcacttaatttactgtaccactatacttgttctccgatggatccggaaaaccaactcacctctaacccgagaagcataatcttgaacaagtacgagatggggcgggtcctgggccaaggaaacttcgccaaagtctaccacggccgaaacctcaacaccaacgagagcgtcgccatcaaagtcatcaagaaagagaagctcaaaaaggaacgactcgtcaagcagatcaagcgcgaggtgtcggtgatgaaactcgtccgccacccccacatcgttgaactcaaggaagtcatggccaccaaaggaaaaatcttcctcgtcatggaatacgtcaatggcggtgaactcttcgccaaagtcaacaatggaaaactcaccgaagatctcgccagaaagtacttccaacaactcatcagcgccgtcgatttctgtcacagccgcggcgtcacccaccgcgacctcaagccggagaatctcctcctagaccaaaacgaagaccttaaagtctccgacttcggactctccgctctgccggagcagcgccgcgccgacggcatgctcttaaccccg

SEQ ID NO: 121198 - DNA, 434 bp, Glycine max
  Clone ID: PAT_MRT3847_80448C.1
aagactgctgaagatacagcggcatttgttaatgtgataacctaccttgaacaaacacgacacatgcgcatgatgttatttacaaagattacagggcattaatgactaaaatgatatatatgttgccatagatagacggacagttggtgttaaggatcgtactggacttatgtggcaagctactagtggtgaagcctacaactttggtatgacctgatctgcttctacagcttggacctgatttacataagctgatgcatgcacttcaagtactggtctaccagaaggatcaagggagatagaccatagccaataccactcaacagcttgggctgggatacatgacaacactgggtcctgcatgaacactaactctggatgagttctgggggaagaaccctcaagattttatccaatagtattatggtctgttg

SEQ ID NO: 121199 - DNA, 498 bp, Glycine max
  Clone ID: PAT_MRT3847_80449C.1
tacttcgtccgccctcgtccccgtcccatttcaccttgattgatttcccacacatctctacacaattatgctcctttgtgagttatcagcaacagatctcaggtccgaattaccatcccttcttcacaaggttcgccttttgaccacaaatgttccatctttatatgcgtgggacatgcctgtgttacaagcacaagccgttttcgttttggtcagggtactgaggggtctgcaacaggggaacttaatgctcaacttgatgaagtgcgaaacccaaatattttgccagagaattgcgacttgaagccagacacccttgtcaggccacaccccagtggtgtgcagaagaattcaaggggcaatgtaagggttatgaatcttgagagtcctgtgaagactgaagtggaggaagcctatgaaggggaagatgagcatgaagaatcaccttccatcaagagggagctctctgattttgaactccagtcctcgtagttgctg

SEQ ID NO: 121200 - DNA, 344 bp, Glycine max
  unsure (1)..(344): unsure at all n locations
  Clone ID: PAT_MRT3847_8044C.1
tttaacagataaggggataacattaattaatatagatgttattttacaacacaccatactgttttgtgatcgctaaacactttggtaacaaagcaacacagcccatcaaggaggcaggagccatgcccatcattcatgatccttaaaatgagcatggcacttctatgctagccaagccaaatttgattcatccacactgcttacacttgcttttaaatagtatatatacagcagagttaaaatactatacttgctttcatccacactgcttacacttatatgctagtncaataacgggcacaccacttgcaaacatgtataggtttatgaattattcatattta

SEQ ID NO: 121201 - DNA, 404 bp, Glycine max
  Clone ID: PAT_MRT3847_80450C.1
gaacacaatatcgcgattatgcagatacagtcttaaggattaacaacattgggaatcgatgtagaagaggcacctttattatttggaagattgaacagaacatcaagcaaactttacactcagggaagcgggcacatattgagactatagtataatgattactttatggatgaaaaaaaaaatttctatcatgtatagtggagctacataggctatatataacgtttgatatgagaatttagagacgggatctcgattgataatcggatgccattacccatggcacccttggcaacaatatgaccattagatagggacctcccaccgcaccagacctcttattataacttaaatggagaatactgccaactgcaccacttggtgctgggaatgtgacttacaca

SEQ ID NO: 121202 - DNA, 486 bp, Glycine max
  Clone ID: PAT_MRT3847_80451C.1
ctcgtctggaattcccgggtcgaccgacgcgtccgtccagatgaccacagactgcggatatgggaaacagtgagagataatgatgatagagatcagtgactcactcttaagggccgaagcagatccagatcaattgcttatgtaagatgtatcttctggaacttttcactctcctcctttgtatcaatcagaagatactttgaactccaacaacataatataatgctaagactcacacatcacaccacaacacatcacaacacagaaacacctacttcctctttccttatttgctcaaacacatagcaccataactagttctaatttaatatacacatcacaatacaacttttcctctgtatcttttattatcattttcatagtaattataatcgaagaagatttaagaagcgtatattcaacattattccaagagactttacctctctccatcgatatgtttaagtgttaaatgcattaaatggg

SEQ ID NO: 121203 - DNA, 339 bp, Glycine max
  unsure (1)..(339): unsure at all n locations
  Clone ID: PAT_MRT3847_80452C.1
ggggccgnaattcccggggtcgacccacgcgtccgctgacgcgtggacaagaatggaactccgttgcttactgttctccatttctgttcttttcgctgtgcaataatcatccttactcggcgcgcgagtgctcatatacatatagaacaacagcataccacgccttatcccactacgtggggcgactacatggatcaacttccgccataatgatctgataactcggccttgcaagagaacggcatgcccatgcatcaataccagactaacatctctgggatgctgcctggccaatgcacttccattcccagtgcacagccagagcttctacagcctggc

SEQ ID NO: 121204 - DNA, 168 bp, Glycine max
  Clone ID: PAT_MRT3847_80453C.1
accacgcgtccgcggacgcatgggtgtttttcgagataacctggaacagtgtgatgggggtgaacgtcctcgcttacatccgggctaccattgcccgagcatatcgcatcaaatgcgtacgaaatcatcgctatacttatgaacactggctatagccccagtacttta

SEQ ID NO: 121205 - DNA, 539 bp, Glycine max
  Clone ID: PAT_MRT3847_80454C.1
ctaaaaacagttggttaaagaaaaagttttagtttcaaatccaagggttcaatcctaattttccccacatcccatcctatttggggcaaaaaatttcccctaaggggtttggccttttttcccggataaactcctaaaaatttttaaaattttctaacagaaatttttgtccccaggcttaaaagataagataaatttgacctcacattggttctttacaagaaaacaaaaattttttgtaaaggcccatgactttttggggggaaaggaaattctcatttgggagctccttgaaacaccttggctaaagggcttgcacaatcggatcaattatttaactttagggagcatggcaacttcctttagggttttaaaatgggaactttttttaaaaaacccccttatagttattttctaggtcctcaaaagggtttggaaaattatttttttaaagaaattcaagggagggttttgggtgaaaaaagaaggggtcccaaaaataattttttcttttttaacccgaaaggggcttttttttt

SEQ ID NO: 121206 - DNA, 539 bp, Glycine max
  Clone ID: PAT_MRT3847_80455C.1
tgagagaattttttattttgagtttgagatgatgattgtttcctacattacttgtcagggattaattttattcgtgccatgtaattaatattttctaagaaagaaaattttatgtacagtagaaatcaaatacgagatcaacggctaaacaggtcgattatacctatacggttatacgtcattgtgaatcctttgtgataacaaatgattcttatatgttattaggcacacttttttaattaaattaaataacggcagatgaatatttttaaacattatttttttattaaaattatgtttttgaatctgaaaaagaacacctacatgttacaatttgattgtagacattaaataaataaagaaacttgattcaagttttgtccaaaaatgaacaatatatgtttgcggaacgttttgctttcctagaaaacgcataatacacataaacatcgttttttaaataagtataattgtaataaattaaaggttaaattattcatttagtaatttacattttaattcttttttagttcctctag

SEQ ID NO: 121207 - DNA, 199 bp, Glycine max
  unsure (1)..(199): unsure at all n locations
  Clone ID: PAT_MRT3847_80456C.1
aattccagctcttacccggggatcctctagagtcgacctgcagcatcagcatttttcaggatagcttcccttggatcttcctccatccatgtctccttgatcataccacctttctgcnattacattaaaatgtaagtaccttccactgtcacaatctaaagcatgaaaacttgcaattcaggaaaaataagacggagga

SEQ ID NO: 121208 - DNA, 518 bp, Glycine max
  Clone ID: PAT_MRT3847_80457C.1
cctcgtgccgattcggcacgaggcaggtaaggaaaccccatctttcatgttcttcttatgctatcattctttagaactgcatgtgttcgtatctcttctataaccttaatatttatcatttgatgaatttatttatttcaaattgagattctaacatagtaggagatgaacatgaatataagcaagtaggagatgtatcatcaaagttaactacagtgacacatgcaatgaaattatgggctttttgtttccctagtatgtatacccactaaaaaaatcctacttgtacatgagactttattttcttaaatttttcatattattgtttcattattttgctgaattatccttttattttgttatgtcaatacatgaaaagttagaacaccagttagttgtgtgattgcgatgaccttagtttggacaaatcttacgagaaaggaaatagacaattcctttcttgctggatgaaaactgagcaaaattagtgaaggtcatgctttatgctgctggtgctt

SEQ ID NO: 121209 - DNA, 304 bp, Glycine max
  Clone ID: PAT_MRT3847_80458C.1
tcatctcgccatactacctaacaatgtcacatgctaagattcaagatttaaaaaatgaataagtaagttaatgattattctcctaggaacgaatttgacagtgaaaaatcttcagactatctgaaacattcggataactattaaagctatggaaaccccatgccctcatcccatcaagatgaaacagctgttaagaaaaagtattgatgtatgttaccaaagaagcctacactaatatcgaatgatcattaacgttcttacttagactctgctgactgcactttatcgaatcaatgatcacata

SEQ ID NO: 121210 - DNA, 1465 bp, Glycine max
  Clone ID: PAT_MRT3847_80459C.1
catcagaggccatcaaaccatgctgctgcagatcatgatcataatcatcatcattcataaagaatattatacaccagtaaatcaatgcagacaaacaagctgcaataaaaaaaaaaatgcaaggtcgggaatttttgagttagctgaaacaaaacatggagcaatgcttttccatctccatgtttatcaataacttgattctacacttttgaaagctatttttttctcagttacatatgaaatgaaaatatcctccagcttcaaaccttcaaactttgcagtgaaaaaatccaatcccagagcccttgcagaaagatatgtccttagatactagtcattggcttcccatggtttaatatagtcaatgctgcaactgcacttggagtgtaatcagcacaagttttcaaattttgttgtagaaggttgagctttattctctctgaaggccatagaagcttgagaatcttttgggctgcaattatttgttcttctcgacaaccatcatcatgtaataaatctttgagcaacaaggctaagttaagtggtttgcaagattgaaagagtgcttcaggaataatggctttgtccaaaagaatattggtaagtgatatatactgtatcttcgctttgtaccaaatataccattctgtcaaaatatgggcacgatatgccacaacacagggtaatcgtgcaagctgcagctccacagcaactgtcccagatgtgcataacgcagctctacttgcactaaaagcatcatatctcagttgtgttgttccacctggtatcaatacaactggcacaggccatctgtgaacagcatcagctatgaaattttccacatgctcattaggtgcaacatgaatgattgtcatcaactgtggaaccatgtctttcatcagttccccacgcgtccgcggacgcgtgggcatccgactgacttcttgcattctgcttccaggaagcaagctaatgatagtggctcctgctggcactgcatgcttaattcggaagtcttcaccatttccttcagccttccattcatgaatcgaggaattgtttctcaaattcaattccagaacatcttccaggactggatgcccaacaaatgttgcacacaatccatttaatctacagattttgtcctcatttggaagtatgcacaataaatgatccacaaattccgctagtcctctgagtcttgtttcacctcctttccatgcccagaatgatggagctacatagtgaaagtgtgctggcgaatgcaacttcttttgtctaattcaggttgtaagctgtttcaagaaccgaaatgaaaagcccttagaatcaatagttaatacaacatgaggttcaaatagagcagcagctttgacagtttcattcagtttcactctgattctatacaaatgtggcaatagctcccaaagtcccattacagaaatatcctcaatgggaaacaaag

SEQ ID NO: 121211 - DNA, 115 bp, Glycine max
  Clone ID: PAT_MRT3847_8045C.1
cttccaacatattcctcaccaaagacaacaacgttcggcttggtgacttacgtcttgcaaagctacttaatgcattagaccttgctttctcgcatggtgtaacccaaaattacat

SEQ ID NO: 121212 - DNA, 182 bp, Glycine max
  Clone ID: PAT_MRT3847_80460C.1
gtcggcggagtaacactatcaaattcagagcagctgcagagagaacagaggattctgtcttctctgttttctcctcacatagttacctacaaaggctgcaacataacagaggacaacaacaccctttggttcaacctcttcatggagtacatgccctttggtactctctctcaggaaagtca

SEQ ID NO: 121213 - DNA, 613 bp, Glycine max
  Clone ID: PAT_MRT3847_80461C.1
aagacatggtattatgctctgcattggcccttcagtctaattttctgcttggcaaatgaattacaaccaaagacaacattgaccattccaaaatgcattgtcaagtggcaggttagaagctgccccacacaaaatttactgggtggcatcaagctgcagtgagggattggctgcgaactaccaaacctctaaattgatcacttaatgagtcacctcacattcaaattttttttttctaccactcacacaggcccagtcatccattttggacacttctatgccttctaagaatggtgaatatctttcaataatgtactggacctacataaaacacagcggcaatgggtgcaagatggaattgaaaagcactttccccaactgcattttgaataagaaaatctacatgatttaattaaattacctgctccgataagataccggagagaccaacaactgctccgggctttgcatgagagataatttgatcagcaagatccaataaaggatttaagagtatatttgcaacgaccacatcaaacttttcctcatcagtgactggatgtatctcacaagtattttctccctccataactccaaatgtcaagtctttttg

SEQ ID NO: 121214 - DNA, 143 bp, Glycine max
  Clone ID: PAT_MRT3847_80462C.1
taactcttaatttttatacatgaatacggaaacgcaaccaggggcggcttcctattggggctgcaggctcacccattaatttcacctatctgtccaaagcaccattatatgaccccactgtaaatactgtttctttaaataaa

SEQ ID NO: 121215 - DNA, 395 bp, Glycine max
  Clone ID: PAT_MRT3847_80463C.1
ccacgcattgcccgtacatgcaatcatgcctcacagaaaaatataaccccacaatccgagcaatcacaccggccgctttgaattgggtgaaaacaatgattgaactccaccctgcggtggcaacatcagcacggatcgtggttgcaacagcagtcacggcgtaccaaggaggtggatgtcgcgtgcgaacagggacacgctctgaaggtgcacaatggagagaacgacactctgcctgtgcacagaggctagagctctgggtcggagctcaacaaccagcacagatacggcaaactggacacgcatatcaaacgggtccctacaaatgccgatggcaccgtcacgtggaaaggcgcacgcttcgaagggacaccggcgaagagagagacacaccc

SEQ ID NO: 121216 - DNA, 495 bp, Glycine max
  unsure (1)..(495): unsure at all n locations
  Clone ID: PAT_MRT3847_80464C.1
tggtctggacctttgggctgatttatgtgcttgtttatgtgcttgcatggtcgtgagaagatgcatagaggggtaccaaaaaaaaaccagaaagtaacacagacatgactccccacttcacaaccccactaaccacgtagacaagaaagatctacacactcacggacacagactttcaccctaagcaaaaaaaaattaagcgaccctcctcaaccataatatgcacaaaaagaaccaccggacactacagacaactcttccactaagaaccacacactggaagacgtgacctcagacacggaaaaaaacacgcacagaaagcaccccgaccggacgggaactaacagagaaacatcaaactgccttacactgaacttagaaccccggcctcccctaaaacccgcgacaccccacgatgtacacaggggcaatctgtaggccacattaactaaaccatcccccccctcctcaacgcanactaaaacgccagcgaaa

SEQ ID NO: 121217 - DNA, 308 bp, Glycine max
  Clone ID: PAT_MRT3847_80465C.1
gctcgagcaaaaaacaaactaacactttctttctcttttcttgcgtgacgcacgaatcctgcggggggctttaacgcgatcggcgggtgaaaatgaaaaacaaacgaaaggaaagcgaggccagtgtacggtcgaacttgccggatgaagattccaaattctattactcccttgagcgaccttcgcggttgatcaaacagtgcagggaagactgtctcgtggcgacggtgccaccgtcacgcggcgcatccttattcctaacgccgtcgcggtgcttgaagcggaagataagttgcatcgacaaggcc

SEQ ID NO: 121218 - DNA, 409 bp, Glycine max
  Clone ID: PAT_MRT3847_80466C.1
acttgattttgatccactcaagagaaattgccaggatgtgagtttggcttagcgggagactcctgacgacaaggcgagttactggtcacaactaaactgtgggttgagtgataatcctggaaggcaagatgcttaggtagagaatatcattaatgtgtcacgagacatgcatttgcacagaccaaaggaagcacgccaattgaaatggaaagctacatttcgaattgaatggctgactaaagctgaagtgcctaccatagcacagattgaatatgatcatgctaagcataggatgatgaactgctgcagattaaatgaaaagttagatctactgtatgtcattgatatgttggcgtgacaaggagcaagtaaagctcctccatacaagtatgttattgatgataggcca

SEQ ID NO: 121219 - DNA, 353 bp, Glycine max
  Clone ID: PAT_MRT3847_80467C.1
agcgctcgctctatcttttgattgcagacacatggcttacgaccaaccagcttatccgctgtcaccccagttctaacttggtcatggaatgggacgagcgctcaggacagacattcgttggagagaacgcttgtcactggagtcttaaacaaaaagtctgagccgaccattgcatggaaacgccaatacgaggagagtgataactaccagccttctgatgctaatatatcgtcagaatactgctaggcagaagagatagagaaggctctgactgatgtatcatatgcagaggcgctgagcgatcattataatggaacacacgcatcgtttcacatacccgaatgtgactacct

SEQ ID NO: 121220 - DNA, 316 bp, Glycine max
  unsure (1)..(316): unsure at all n locations
  Clone ID: PAT_MRT3847_80468C.1
tggngaagntntttttggtntgaaaagtggangaggtggtngngtnatttggatggtttttttcaaggngaagntnattaattgggagggagaagtggagtttgaatggnnagatgatgttttaattgttganaaggnagaggangaagggattgaatttnnttattngngnagggnnggntnttgggtttnttgtgttggnaaaattggggaaggtaangngganaagnnagatggnngnttnnttggtgatgagnaaatagataggggntgggntttnanntgtgttggtnaanttaggtaagaagttgnnatt

SEQ ID NO: 121221 - DNA, 2227 bp, Glycine max
  Clone ID: PAT_MRT3847_80469C.1
gagaggttcaatgtgatgcttcatgaactaaagattgaacacccaaaaggaggaattgctaggagtgaaactgatgcacttgccattgcagcagatattggatacccagttgttgttcgtccttcttatgttttgggtggtcgagcaatggagattgtatatactgataataaactggtgacttaccttgaaaatgctgttgaggtggatccagaacgccctgtattaattgacaagtatttatctgatgcctgtgagattgatgttgatgcactggctgactcacaaggtaatgtagtcattggtgggataatggagcacattgaacaggctgggatacattctggtgactctgcctgctctattcccaccagaactgttcctgcttcttgcttggagacaatcaggtcgtggacagtaaacttggctaaacaattgaatgtttgtgggctcatgaattgtcagtatgcaataactccatcaggggatgtatttttgctagaggccaaccctcgagcttctcgtacagttccatttgtatcaaaagcaattggccatcccttggctaaatatgcttcccttgtcatgtctggaaagaccctctatgatttacagtttacaaaagaagttatccctaaatatgtgtcagtcaaggaagctgttcttcctttttcaaagttcccaggctgtgacgtgtttttaagtcctgagatgcgaagtactggtgaggtcatgggtattgacccttcttataatattgcatttgctaaggcacaaattgctgctggccagaagttaccactttctggtaccgtgttccttagtttgaatgacttaacaaagccacatcttgagaagatagcaaaggcttttgttgagaatggtttcaagattgctgctaccagtggaacagctcatgttcttaacttagctaaaattccagcggagcgagtgctgaagttgcatgaagggaggcctcatgctggtgacatgattgccaatggggacattcagctgatggtggtaaccagttcagatgatgcacttgatcggatagatggtctggccctgagaaggatggctttggattacaaggttcctatcgtgacaacagttaatggagctctggcaactgctgaagctataaacagcttgaaggccaactctatcaaaatgatcgcacttcaggacttcattgatggtgaatttaatgagtgagaaagttttttgcagacaaccactttctttctgaattggttaaggcgatacacaccacttaccgtgagattgtacaagttgctagatttgggagtggcagatgaattgctatgggatgctttcatttgtaaagtttccagatgagatatgtaaaggtcatgtagtctgtgtcctgactcctgatatatagcatttgtgtttttgtgtaaacggttttgtagtatttggatatctactgcttaataattaaactcattttttttgaatcgttttggattgctctcctccactaagaatatatacgtattgttatcatctatggttttgtatattgactgggctattgctgcttaccgtgagattgcacaagttgctagatttgggagtggcggaagaattgctttgggatgctttcatttgttgagtaaagtgtccagattagatatgtaaggtcatgtagtctgtcctgactcctgatatatagcatttgtgcttttgggtaaccgattttgtagtatttggatttctactgcttattaattattcccatttttaaaatcttacagcatgcagttgatgctgatgctgcttagccatttcatttataaggctttcactttcatcaacccttataattgatttgtagaagaaatccagctatcatcatccttcaacttcaaaattaaacaatcataaaaataaaatacctttttttaaaaattattttagatttttaaatcaaaagtatgcttgtttgagctaacaaacatctattgttaattatttaattgtaaaaaattcagctcctaaacactgtaatgaggctgaatgatgttatttattgtttatttagatttttaaccctttaaaattattaatttaaggtacaacttactcttgaatcttcaaccccttgtcttttgcagccaattcagcaactccattagatcatatgggtctttcataaaattcctttaagaaaactttttatggctttcaaatcattagt

SEQ ID NO: 121222 - DNA, 105 bp, Glycine max
  Clone ID: PAT_MRT3847_80470C.1
ggaatcaccagaaattaaaatgttgtcatactctgaagtgaatagccgttaaaatgttcatgaatacttgcctatgattataaatgcatccttatttaatacatg

SEQ ID NO: 121223 - DNA, 375 bp, Glycine max
  Clone ID: PAT_MRT3847_80471C.1
tcagcgggatcatcccgacattcagttcataatttctgcggacttcatatatatttcgtacataaagcatggcacgttaggtgtgaaagaatgaagagtcactgcagctgaaagtcgcagggacgactcatgttcattcataagagaatattggaagacaggatgtacaagtggtcatcatatgatctctctacttggcctctgactacaagcagtagctcttgatttacatgggtaaagatttcgagggcatggtccatcaactcacagttggacttgcactggtgctgaaggagttccaccaacttgcaggcacgttatggatatatgaaaagtgggtgttcagactcaagtatgatgatcacatgcatggtg

SEQ ID NO: 121224 - DNA, 273 bp, Glycine max
  Clone ID: PAT_MRT3847_80472C.1
tacggctgcgagaagacgacagaatgggggcaaaagttagtagtagtgaagagaatgaaagtcctcgttttctttgttgctatagttctagcagcatggcattgccatggctcagaccatgaccatgaccatggccacacctaccaaattttccctctcgagaatgaaacttggcaaggtggccactaaaatccggggggtatcttcccaaagttggaggcttggttgggaagcccacaacgtcattgactggaaaaccgttcctcaagattg

SEQ ID NO: 121225 - DNA, 745 bp, Glycine max
  Clone ID: PAT_MRT3847_80473C.1
tcgcgatctagaacttaacaattatttagagtttcttagacaagggtatgatgtagtagaaggaagttttgtacctgtattatgtatgcattgtttcttctgcctgatttggcttaagatgtagtttttttaagatatctgtaaataagccatctgagtgtatccattaaatacagaattgtcaaggttggccaaacgtcggttgtactcttcttctgggggcattcgttttttgcttcttcagctccaacttcaaacgcgcttttggtagaagaagcttcaccgggatcactggggtgtgtgtgagagagagggattacggattagtgagttttttgtcactaagttagagctacgtcgtttcatgattgtgggctggtagcagtttggtattgagattgaaagtggtggggctttatttggattctgtgtttgttgaaggagctgggaattgtagtagctgttgcctcagaatgcagcaagatcaaagaaaaaagggttcaatggagatggaatttttctccgattatggtgatgtcagcaggtacaaaattcaagaggtcattggaaaaggaagctatggtgttgtttgttcagctattgacagtcatactggcgaaaaagtagcaattaaaaagattcatgatatctttgagcatgtatccgatgctgcgcgtattctgcgtgagataaagttgcttagacttcttcgacatcctgatattgttgaaattaaacatgttat

SEQ ID NO: 121226 - DNA, 718 bp, Glycine max
  Clone ID: PAT_MRT3847_80474C.1
cagagagagagagagagagagagccaccctttcttacaacaaacaacaactcattctgacgacagaaggggaagagaaactttcatagtttttcactccttctcccagtgtcggtgtgctcttcttctggggcattcgttttttgcttcttcagctccaacttcacacgcgcttttggtggaagaagcttcactgggatcactatggtgggtgtgtgagagagggattacggattagtgagtttttgtcactaagttagagctatgtcgtttcatgattgatgggtggtagcagtttggtgttgggattaaaggtggggctttatttggattctgtgtttgttgaaggagctggggtaggtggggcgaatgtgcttgagttttttttttaaaccaaaattgaaacttacctttctatgagtttcttctgtttcgtattggtggcttaatttggagtagctgttgcctcagaatgcagcaagatcagagaaaaaagggctcaatggagatggaatttttctccgattatggcgatgtcagcaggtacaaaattcaagaggtcattggaaaaggaagctatggtgttgtttgttcagctattgacactcatactggcgaaaaagtagcaattaaaaagattcatgatatctttgagcatgtatctgatgctgcgcgtattctgcgtgagataaagttgcttagacttcttcgacatcctg

SEQ ID NO: 121227 - DNA, 453 bp, Glycine max
  Clone ID: PAT_MRT3847_80475C.1
gtgagctttatgcttattcgatacatactgaggcgcgggtacttcactacctgtttttggcatcatggatatgtggagagatcctatgctgaggaggcataaacattatggctacagaagaccgatgcatgtaataaatattgcacgtgtcagaacgacagactgctatccctaaccgctcatgcaacgatacagtcgtgaggctccgagttcggaggactatgacaaatgaaaggcgttgggcaaatatacatagcattaatccagggggggagatgctggctcttaggagaaataagtactcgatgaggatgacggtgtgccaaacgcagctcatgggagtactcgtactttagtctaactcgcactagcgtagggagatgcaagagcattcacacttgcgaagatcgaaccatactccgttgagattgaaatgcacatgtatactgttag

SEQ ID NO: 121228 - DNA, 468 bp, Glycine max
  Clone ID: PAT_MRT3847_80476C.1
ggctcgagcgtgcatctgcttttgctaaccagtcaatctatctaaacgtagccatgcatgggacatcaatgtaatgagcgaatgagataatgagatgccggtggcgcgggcgactcttgctggtgcgagacctcaagctggctatactattaagcgtgagcttgatactaatctagaagcacaacttgctatgggccataactagaacgctgcaactgcagcatctgactatcaccgaggctgcaacttcgatgcatctgatagacatccaccactacgcgacctctcagaatgtacctgaacattctcttatcgagatgacaatatccttcgacgtgcttcaaacgctgcaccgcctagccgactgaactgcgtgtgtgctgggccgcgagactctcatgtgggccagccttaacctacacggtaccacgctgatacttgaggaggaccctgtatggtttgggatcg

SEQ ID NO: 121229 - DNA, 399 bp, Glycine max
  Clone ID: PAT_MRT3847_80477C.1
cgcgcagagattattttcttcatggctggagagctagacctagcttcatatcactgcactcaccatgacatgaggtcggaggcgaatgctgccaacaccaactcatgcgaaaatggcctcaacattggatacatgagtgctaacgaccgcttgaactggggtgcggtggtggaggctatggacgagagccacactaacgaggacaagcgcatgctaaaggagctccacaagtccgtggtctagctcgggggtgagacccggaccactttgcaagactgggtaatggccgtccaccaccagacagtgaaagccgagctaccggagcccttgcaaagccgctttaaggacagccttgactgggcgatagagagcccgaacgaaggcgctggcaggttccgg

SEQ ID NO: 121230 - DNA, 357 bp, Glycine max
  Clone ID: PAT_MRT3847_80478C.1
caatgtggagatatttcgagggggaggctttattttgaagtttctaagatttacttccccaacacaaaacgtaccagtcttattttttttatagcaattggaaatttggctgatgacaccattaattttgaggcttattccctacaagctggtgcagctagtagagatctacgaaaaagtagttttgaaattttcacaaagatgaatttctttacaggtttggacaactcaggttgcgtacctgacaaccaacctcttgtttggcctgtactggtgttgttccattatttctgtaatgtctactggttgcattgaataagtttcaagtgttctatctaattacctagtgtgattttt

SEQ ID NO: 121231 - DNA, 262 bp, Glycine max
  Clone ID: PAT_MRT3847_80479C.1
ccctagaaggattgcggatttgacgaagcaagagaacctctatgcatcaaagggaggacctattgtttcgtcccagaccgcaaatgagtatgggaacattgccgcggatcatggtcctgatgctaaagtccacctccaaagggccgtatcaatggtaacatctcctggtacaggggttccttggggaatgagccaacacgtagaagtttcggcaaccctccttaccgcctgtcatggatcctacagccgatcttactaccca

SEQ ID NO: 121232 - DNA, 601 bp, Glycine max
  Clone ID: PAT_MRT3847_8047C.1
gctgtctgttacgggccggtcaagtaactataaaaacggagagccaaaccaaaagcacacaacaatggggaaccctgacggcagtacacagaggctctagatggagcccctaagggagaccactgctctcgttactggaggaacgcgaggaaatgggcacgcatcgtgagtggaggaactatcggaggttggcgccacatttgttatcttcgtgtgacgaatgaagaatagcaaactgcatgcatgaaggagaggaaagagaagggaatttcgggtcctggagaggcatgtgatgcgtcttatgcaccccatacagagaaccacattaaacaagaagggctctgctttcaacggcaagctcaacatactagtagacaatgcaggatcaaatgtgaagaagccgacaaatgaatatacagccgaataatatacaaaattgagggcaactaacttggactgcacataccataaagtgccaactagcataacctctatttaaagcatccggaaacgcaagcatagagagcataggctacgcagcaagacatacaagaggaaggtctggatccatttactcatcatcgaaagcagctatatgatc

SEQ ID NO: 121233 - DNA, 2328 bp, Glycine max
  unsure (1)..(2328): unsure at all n locations
  Clone ID: PAT_MRT3847_80480C.1
tgctaattcattgaaacagacatttacagggtccaaggaattgaaatgaaattaaaacacaatgatttttctttgctagtatcacaattttgatgaacaagtatgtttttgaacattgagatggatcaattaattgtttgctttaaaatctgaaatatgatcaactgatcaagtatgctgttggtatttttgctatctcatgattttgtatttggtgtttctgaattctctttatttgatgcttttgaaaccctcgctccgctcatcccattcttgcaaaacctaaattctgagcggctccatatccgtcacttatctcaccaaccataaaatatactcatggccgagcacggttttgatggacatgatgtaggatatgtgcctgaggaccctaattttcctcagaatcattctgatgaacatgatgtagggactgtgattgatagctccggatttcctcacctgctacctgatgaagatgatgcaggcaatttgatggaggacgccaattttcctgaaaatgattttgttgggcatgaacatgatgttggaggtttggctggggacgcggattctccaccggaggagcatgttgaggaagttcatggtgctggagatgtgcctgaggattttgattctctgccgaaacagggatccgagattgattcgaagggaaatgaaataaaaaagtggccgggatggcctggagagaatgtcttcaggatgttggttccagtgcaaaaggttggcagtattattggccgaaagggcgagtttataaagaaaatcacagaagagactaaggcgcgaattaaaattcttgacggtccacctggaatctcagaaagagcagtaatggtttctgcaaaagaagagccagattgtcccataccacctgctgttgatggtttgttaagggttcataagcaagttatcaatgttgatcgtgaccttgcagatagtgcattggctgctgggcgatcagttgttaccaggcttctagtggcagatactcaagcaggaagcttgatcgggaagcagggatcaaccataaaatccattcaagatggctctggttgcactattacgtgttcttggatcagaaaacctgccaatatttgctttgcgagatgatagtattgttgaaatacaaggggaatctgctggtgttcacaaggcagttgaacttattgcagttcatttacgcaagttcttggttgaccgcagcatagtaggagtttttgaaacacagatgcaaaggtcagatgttagagttacaaagaaactccgcccgcatcaaaatgggggttgacctcctcaagagtggacttctaagaatggtggataacccgaattacaatgaacatattacatctattaaactcatttccccccttcaaaccagtcagataattattatcatccttattatgtgactctgctggccttgctcggtgctaggagtcaactagagctaagcgaaagggaggcttctatgggaattcattcatcaagtgcacaaccacaacaatctgttgtaactaaggtcacacagcacatgcagattcctcttacatatgcagatgctgttataggagcatcgggcacaaatatcagctatatacgtcgtgctagtggagcaagtattacaattcaggaaacaaggggtgtgccaggggagatgactgttgagataagtgggacttcttctcaaatacaggcagcccagcagctggttcagaatttcatggctgaagctgcaagtgcgacacaggatcctatggggggatcagtcagccaaggttacagtgcctatccaacaactgctccagtttatgctcctccacccactagcgctggtggtcatacaggccatgcgccttctgcagattatggccccgtatatggtaccaattatgggtattaagatgcttcatttaattttggtcaaggagctttgtgtaaacaatatactgtaaactttacgttcttatagtatttcttttttcttttttatttttggctagtaggttatcatactgttggtcatcctgttttgacttcatttatcaaacgattcgatttttctaacctacgttttgtaaacattgagagtccaatttcaggtctagggctcggatatgattccaacgaacagccatttgagataagtgtcatacctatatttggcctgtttggctacatttcgcataatgactgaattttatttagtgcatggtcttatacctcaggttgtagtgagaccacaactaactnnttatagggttttttttattcctaaaaaagatttccctgctttgatcctta

SEQ ID NO: 121234 - DNA, 664 bp, Glycine max
  Clone ID: PAT_MRT3847_80481C.1
gtcttgataagattccggtgtaacagaatctttgtaagttatagtattgatttttataaggataattgttagttatgatcctatcaattaggtccccttaggaagaaactatttcaaaaaattatgttactctagggggagctcttgttaaggacaagtttgcttcttggtttcactataggtctcacaagaacaagtttttgtgtctaggccggtctgtgacttgatcctacacgaatgttcataacaggttgccatagccatcataatggaaaattaagggagagttttgttcgtcgctcctcaaccactcgcttgtggagtagtgttgatgaatcttcagtatgcccagtttatgttaatctacttcagaggttttggttcaatctctatgagattctcagtgtgcttgtcctttaagttaactagccatgagacaagatagaagatggtgaaaacttggagctttcactgattggtccatcagtgatactcaggagtagtttgatttgagaaaacatttttcattttcactttctcttttgcgaaaataactttttataattgcttacaccatttcctgcccaaaactttaaaacaggaaataaagaaaatacaaggtgacatttttataatttaaaaatgaaaataaaaatgttttctc

SEQ ID NO: 121235 - DNA, 356 bp, Glycine max
  Clone ID: PAT_MRT3847_80482C.1
agaagggaccccaatttccggtaaaatcaaaccctttaaaaaaaaaggccccctgggaaaaatcaaaaacctattttttttaaataaaaaattccttacaaactaactgttttttaaagggggtcaaaaaaaaatttttttccaccaaaaggggtaccaaagggggggggaaaactcctttccccctcccaggtaaaaaaatgggaattgggattttgccgcctcccaaaagaaagggatgggggctttcatacccaaaagagggcccctttttcttttccagacaggtaaaagaaaacccaattgttcggggggccaaaaatggctttcccggttacccccagaaaggggaaggg

SEQ ID NO: 121236 - DNA, 320 bp, Glycine max
  Clone ID: PAT_MRT3847_80483C.1
cacccctacgtaagctcggaattcggctcgagcttaatatggtgaggcagtgggaatcacatcggggataggtggatgaataaggaaagctcgctctgactagtccatactatatgccctgctatcccacttctctctgagctcttctctacaactcctttgctagctaccctctcttttgggagattccaccctcccatccctcatgaactaatcaaattatcttccctcttctgtgcctcatcttcttcccactggccaaaacatctctgtgatccttgctcatctcgtgcatttcctaatccctctattacaaaccc

SEQ ID NO: 121237 - DNA, 399 bp, Glycine max
  Clone ID: PAT_MRT3847_80484C.1
atggatatctgcagaattcggcttaagcagtggtaacaacgcatagtactttttttttttttttttttttttttgtgcaatttggaaagatttcagaaaagattctctattcagcagttaaatacaaagttaagcaaactgcacacgtgtttagttttatcttgtctaatacccaatgatcagcaactcagtcattacgaattcacagtacattaaaacgaacatagcttgatgttttccttcctttcttccattaacttccaactttactaatgaccatacttctggaactcccactcactgttgtcaagagggcacacttgacgagtcttcagccagcgactgatgcagtgaaagtgaaaagcatggtttcagacaccccaagcaacagttcacttc

SEQ ID NO: 121238 - DNA, 400 bp, Glycine max
  Clone ID: PAT_MRT3847_80485C.1
tacggctgcgagaagacgacagaagggcatcaaaagatcgattcagaaacgcacctgagtcgggcatttccttttattattcgatcaaattttaaatatttgtagtcatgcaactgcgcaacacaagatttaacccaaaaacaaaacatatcagtaaagagctgagaaaacgagtacaatatttgcttgtgaattgttataaaggtaagtggaaatttaaatagtcaaacatcagctctgcttcttaatattgcccttaaaaagaaggtacacctaaatttcccaagcacactcttcaaaaattgtgtcaatacctgatggaaagcacaacaatatcaggtaaggaaaatctactataggatcacaattaatttcagaatgaacagaccatcccaagcaa

SEQ ID NO: 121239 - DNA, 338 bp, Glycine max
  Clone ID: PAT_MRT3847_80486C.1
acccaaatggaaacaacgttttaatttatttcaatgggctctttgttccaaatgggaatttcgctttcatctttattacatactttttttccaagggcagttttttttgtagcaaaatgtccaattccaaatgctgtaacaaaaacccccccgtttgcctaacaacaaagggatccgtcaatacaaaaaaaatccgtgggggaagataacaagaatccgtttttaaaaaaaaagaaatgggaaaagcccgtttttagatagcccctaatttttgcagggggccgtgcaaaaaccgattgtttttttgttggacgggggtttctttaaaccccgacggg

SEQ ID NO: 121240 - DNA, 396 bp, Glycine max
  Clone ID: PAT_MRT3847_80487C.1
gggcccgaaaacttacaccccccataaatttaaaccctgaattttaaacattggcatcggggggcgatataataatcacccctgaaggtctttttaaacgggctaggaaagatggggcaagggattatgccgcgaccccatgcatgaagttactaacaaaatttgggccaacaaacaaaacagaaaacaaaacactttttgactaaagctgggcataccaaatgccccggattttgacatccttgggggcctttggtcccaaaaaagggccaaatgggtgaacaattttgaacacaccgataaccttacccgtttaaggcttgggcttggggaccctcaaggggatttcgcccttggaagaagagggccttttatgggctcccttgggaaggtctt

SEQ ID NO: 121241 - DNA, 228 bp, Glycine max
  Clone ID: PAT_MRT3847_80488C.1
aaaaaagttaaaatggttttttatttttaaatgttaatataaaatattttccaatttttatttttttaacattaaactcgatttttttttttaattacatgtacaaaacaacccaaacaattgagggctaaaaccccattccacaaactttcgataaaaaaacttttaacacccattttactcctccctgcccattacaatagttggtgttttcaggaaatgtctcaa

SEQ ID NO: 121242 - DNA, 440 bp, Glycine max
  Clone ID: PAT_MRT3847_80489C.1
gggtcgacccacgcgtccgagagaagtggcattggttttcattttgaagatctctttaatagacttttttgttttggaaaatttgtttttccacgaaagtattatttctgttaccatataatgggttattctttttaaataaattttccaaaacaaaaaagtctattagagaagtggcattggttttcattttgaagatctctttaatgtcttggcttaatcacagagctggattcgtttatgtgcttctgcattcagtctgtcgcactattacaggtcacagaacgctggaaactgcagtgtccactcctgaaagaatgaatgaaaaagctaaataaagtcttaatattgttatgaaaaatctttatgaccttgtggaccccgcgaaagggtctcaagaactgcactaggggttctcagaccccacttagaaccattac

SEQ ID NO: 121243 - DNA, 427 bp, Glycine max
  Clone ID: PAT_MRT3847_8048C.1
cagggggtcgggctctagctccgataggcccctgtggtatccgggcgccaaggcgcccgagtacctgtatgggagccttgtcagaaactacgggttcgacccatttgggctaaggaagcccgccgagtacctgcagctcgagatggactcgctggaccagaaccttgctaataacgtagctggggacatcattgggaccaataccgaactcgcggacgtgaagtacactccgttccagccctacatcgaggtgttccgactgtagaagtttcatgagtgcgaactcatctacaggatgtgatccatgctctgcactctcggagctatctctgcagagtggctcactggtgatacgtggcaatacgcccgaaaggggaagctattggactgtgtatctatactattggaaccacttccattcttaatc

SEQ ID NO: 121244 - DNA, 515 bp, Glycine max
  Clone ID: PAT_MRT3847_80490C.1
gccaggtaagcacaaccaaagcaacaccccaaatggcttcagcttctgttcccatggctgttggcagctgagtctctgttaccaacaacaacaagccttcatccgaagccttcttcatgccactacccgtacgccaaccaaagaggacccctcttcaccacgaaggcagtgtcaaactacacacctcagatcaatgcctctgtgaaggagaaggcagctgccggactcacagcagcttctgtgacagtatctatggcggctccggaactggctcatgctgctggatatgagtactgcccttccctaaagaactttctactcagcaggatagctggtggagttgttctaccactcatatttggagccggtactggggatgccaagtttgaaccggttgagagaacttaaatactgcgtgctccagtgctttgcattggctctctctctttttcactcttctgctagctcgcagattcaggcaatgtataggcaactggtgctgttatatgcatact

SEQ ID NO: 121245 - DNA, 277 bp, Glycine max
  Clone ID: PAT_MRT3847_80491C.1
gggtgtgtgttttttatgttttggttttttttttttttttattattattgttttttttatttttgttttttttttttttaaagtatgaattttaaaaaatataggatttttttttttttaaggttatatttttctgaggcgggcgaggaagtaaaaccataaaaaagcacaagcctcgggaagcaaatcaaggccttgacaggaagatgacgcccagggatataccggctagacaattgagctgacataaccaaagctcggtcctgaatggtaacac

SEQ ID NO: 121246 - DNA, 329 bp, Glycine max
  Clone ID: PAT_MRT3847_80492C.1
cctctctctcttccttcttttagactgtgtgtgcacccattaatgacaatcaaccccattgcatggaaccctaagacggggacaacaccaagaggacaagggtgacctcaactcacctcttctccaccttccttctttacttctcgtttcatctttttaacttcagaaggtccataaaaaatggaagttttcgtcggtcccgctttaaccatcaacgttccctcttctcctcctcaacatgccgcttccgattactccatctttcttaacgtgtcacccgaagaacgtgatcgttcaaactttcttatttcacacccacccaacttctt

SEQ ID NO: 121247 - DNA, 204 bp, Glycine max
  Clone ID: PAT_MRT3847_80493C.1
gtgtcttcccttttccaaatttggcatgtagggtttaaggaggttgaggttagtttctactaattaggaaagatatgagatgacatggtttcagctgagaaaactacctttttgatatatttatcaaattcaatatagccttttatggtttgaactttgaagtgtattttaccttcaagtttattgtagtttgtaatgcataat

SEQ ID NO: 121248 - DNA, 401 bp, Glycine max
  Clone ID: PAT_MRT3847_80494C.1
attttatgagagactgtcacctttagtcccactgaatgttcctcttggatctttctctaatgtaagaaatggtgattgcattgtaaccttttcacgtcaggagatatacaaattgaagaaaagaattgagaaagaaggaaagcatctttgttcagtggtttatggatcactgcccccagagactcgaacaagacaggtgtgagctcctacctctgtccaagtagtgtttggctttccgtttgaattacacttgtttcgtgctaatgtaatctttagaacttaacatttatggctcgtacaaaaattatgccatttgttttgttcttttgtgatttttgtgttttctcattcattggcagaaaggttcttgctgaccataaccgtttttatgtgatttcagt

SEQ ID NO: 121249 - DNA, 344 bp, Glycine max
  Clone ID: PAT_MRT3847_80495C.1
cctaacggtaatgactacatgggctgaacggacaccaactcatcaagagacgccagctcataagttgtggctgtcagaatgatagggatgtaacgcgctggatcttctaatggtcacccagtttgtgggaagcggtcaaaggcgaaaatgcgctttagctgcgcatgcgccatcctgaagagattagggctgtctccattcagccatgaagctcttaggaggagcctgtgggtaattgttacacgttcacatgcgcacacaacattcgagggccgaatgcttaaagtgcaaatgtctgagagcgccctaaccgagagaggaaactcacattaatggggttgcgc

SEQ ID NO: 121250 - DNA, 327 bp, Glycine max
  Clone ID: PAT_MRT3847_80496C.1
aggtaaagcaggaaccccagcaggaaccggaccggaaaaaccgggacgacccacgctgtacgatttgataagcagcgcactaatagaactaaaggaaagattaaaaaggcggccacagaaggtatacctgagaaaacaggtatagaaaaggccagagcaaagaaaaagaaaccaatagggggacgtgccagacactgaaattaaacaaccatctgctactcaagcactgcagaataaatggaaacacagcttgcacaaaaagcaaatgacatatgtacattaaataacaaacaccgccgttactgaacgcataggagatatggaaaa

SEQ ID NO: 121251 - DNA, 262 bp, Glycine max
  Clone ID: PAT_MRT3847_80497C.1
atcatatattgcatttgaaagctatatgtacctgtctaatctatccatatgccctacttgaaaggaaatgttcgttaaaatacacccaaattcttctaaacaaactgagatccaggaatggactctaaatcaaccttaacacacattatacaattcttattgcatgaaaggatgttcgcatcaaaaactgattgcgcttctgaataagccactatgaatgatctatgttccactatatttatgcacctaattgaaccttaac

SEQ ID NO: 121252 - DNA, 434 bp, Glycine max
  Clone ID: PAT_MRT3847_80498C.1
tttgtctggctgtcgccgagccggtactgcttttggagcaccagaatgctgtgtatgatcggttcgagttggctaacacacgaaacctcgctggtggaaacccaccagggcattcttgattaccaattttggggaggtgactatatactggaagtgaataacctctcacactctggtcgggtaaatgttcacaggtggcaatggactagaaggatgaccgaccacgtgcaaggtggaatccctccgggatttccggtcactgagatttgcacaagcgtatttaatgagcagctcataaaagatagatatgagaaattactgctccaggctaaagcttcaaggatgtttttacaacccttcaaaagttggtacattgtgagtgtatggtgatgagcacttaatcagtggtcatgaatattcaagcctactttagt

SEQ ID NO: 121253 - DNA, 1434 bp, Glycine max
  Clone ID: PAT_MRT3847_80499C.1
acacggcagaacacacgaatatttccttttagctccaggatagtgttgtgcagttttttccttagcatctctccttccataacttgaaattctatatctgccaatcgatcctgtagttcacggataattctcttctgctcttcaaacattgttcttgtttctaaagaagataagtcagcattcttaaacttttccttttcagcaaacaactgctgctgcagtatatgtatttgctctttttgagatgaacaagtctcctcaagagcatttgttttaatcatcaacgtatccaattgtgtacatgttttccctgtatattctttgtactttgctatttctccagttaaagcatttacttgacccaattggtgatcacgatcatctctaatttgttttaactcttcacgaaggcatttgagctcatttcctaaaatttctttctgctttatagcctcgtcttgtgaaactttaagagataccaattgatcctgcaatgccttattgtggcctcttacattgctaaggctctcaacaatggttgctttctctgattcaagtcgtttatggggcttcattagcagtttcaagatctgactgaagacgactattgtactgctgcaggctcatattatactcttgtgatcgcttgtacaagtcctcatttgaaatggccttcttcacagcaactgatttctcatcccgaactttctcaagctcagctgatttctcatcccgaactttctcagcttcagttctggcttccttttctttaccataagaattaattgcttccaatttatccgattcttcctttacaattctctcttctagagaagaaattgtcttcctcaaatcagatacagtctcttccaactcctcaatcttactcttcatctcagtcccagtatcagtgcacttcttctcagcagtctctagctcagattgaagcttttccttttcttgcatatacccttcttcaattctcttaaaccaccgaacgcagagcttaaggcgcttaataagatccatcatctgctcaatctttttcttattatcataggtgttccccttcttctcattgagcaacgtctccacctcatccttcgtgaaatcgacgacgacggcggcgccttcggccggcagtcactcgttgctgcggtgttggtgacgacggaaaacggcgttctgaccctactaccgcctgctgtcggtccatcttgtcagctccgaggatcctgcgacgcttgtcgagagaagcttcttcgggacccacctttttgctggtgctgctggttgcgagaagccattatgtgcgtggcttcggaatttgaagagtggaattggactgattaggtaggttaggcgacccaagagagtgagagtgaggttcgtggagcgtggaattttgaatttggatatggcggcggacgcgtg

SEQ ID NO: 121254 - DNA, 264 bp, Glycine max
  Clone ID: PAT_MRT3847_8049C.1
gtcattcagcgcctcctcgtcgtcaatcctttcgttaatctcttagtcatcgctctcatctgaataatctagatcgcttggggcgcttttctccgtcacgcttttcgtgaccggatctgtatggatttgatccagatctacacgtcgatagtggttttggccgggtcgttcatagatctggtgcgtagaggctcagatctacggtaccgaggtacaatcgagaagcgatgaccagaacgcagattcgacggtatatccagccga

SEQ ID NO: 121255 - DNA, 247 bp, Glycine max
  Clone ID: PAT_MRT3847_804C.1
tcgggtatgatctaataatgaggtaatggaaatgccgatcagaaacatgcgcgaaggcctgaagactaccgcacgtgagcgtggtgattattaaccttatttggtcgcggtagctcgatgctacaacagtacgcacgctgcccctgcgctattcgctctgccatctcgctttgcgcgctcgcgccacattcgcgcacgtaacccgcgcacttggcttgcgcgacatacttctcggatgttacgtatg

SEQ ID NO: 121256 - DNA, 249 bp, Glycine max
  Clone ID: PAT_MRT3847_80500C.1
cggaaaacccgggcgggcccacaccgtccgcccattataaattttagaaattggttgtttttttttttaatcaagcccagtcgttgtaaggggggcttattctgttaaatgcgaggcttctaaagccctacctgtttaaacccttgggaattaacaaggatcggtccaaatccaagttccgtcttttgccggtgaaaatgcattcaggtaaggcaacgaatccgctagaggaatttcagaatttttttt

SEQ ID NO: 121257 - DNA, 731 bp, Glycine max
  unsure (1)..(731): unsure at all n locations
  Clone ID: PAT_MRT3847_80501C.1
acacggcagaacacacgaatatttccttttagctccaggatagtgttgtgcagttttttccttagcatctctccttccataacttgaaattctatatctgccaatcgatcctgtagttcacggataattctcttctgctcttcaaacattgttcttgtttctaaagaagataagtcagcattcttaaacttttccttttcagcaaacaactgctgctgcagtatatgtatttgctctttttgagatgaacaagtctcctataaagaaaccccacattacataaatcggtggatttatgtaagaaaagaacaaaattataaaaggtagaaacagaacaaaacaaaacaacaaacctcaagagcatttgttttaatcatcaacgtatccaattgtgtacatgttttccctgtatattctttgtactttgctatttctccagttaaagcatgtacttgacccaattggcaatcacgatcatctctaatttgttttaactcttcacgaaggcatttgagctcatttgctaaaatttctttctgctttatagcctcgtcttgtgaaactttaagagacaccaattgatcctgcaatgccttattgtggcctcttacattgctaaggctctcaacaattgttgctntctctgtttcaagtcgtttatgggcttcattaacagttccaagatctgactgaagacgactattgtactgctgcaggctcatattatactc

SEQ ID NO: 121258 - DNA, 284 bp, Glycine max
  Clone ID: PAT_MRT3847_80502C.1
cccacagcgttcgaaaaaaaaaataatttttaataaaaaaaaaggtgaattgatatcatggatccacagagacgaatggatgcattctacatcatagctctcatatagctatacgtactttcaatcatataggcaatcgttttactaacagcagtgactagcaaaactatgggatgaccaaacttaatgacttttgtaatattatgaattttgactgcttgactaagatcgtagagaaaagcattgtcgagcattacctgtatctgttcaagatgaacgatgta

SEQ ID NO: 121259 - DNA, 796 bp, Glycine max
  unsure (1)..(796): unsure at all n locations
  Clone ID: PAT_MRT3847_80503C.1
ccacgcgtccgcctgcttttaccatcattgcatccaacccttctttcactattattattcatgtcctttgcatcctacaaagggttcactgttctaaaccatactcatcaatgagattttaattggcatcttagagttcccttttaagattccaagttgaacaatttttattttttccttcaggaatacaacattcctttctcatgctatcttctacaaatggtcttgtgatcactttcataaacaatattcctcttttaagtgcctcttaccttttctgtgttaacattgtgagaacaattatggctgtttccattctcatactatttacttgatattattaattatgatcacatcaccaacccacgtagccaacctcaaggacccttctttttccatgttgtgttcttgtgatacttatcatatttgattactcagtgttctaatggaattttgcaactagtacaattcaaccctttaattagtctcatgtgttgtcttcatatgtatgctttagtgcttttctacatttctcacatgtgaatattttggttccctttatactcacttagttacttgttcattgccataattcccatgtaagctttcttgggctgtattagttttctatattcctcactaggtccagcttccatactcttgttttgtgctatatcagttccatcctcaattactctttttctttccctttccctttcaccttttcaatcattagtttcagtgtgaggttgagntgatcttagtttgttcttctcggtttcaattattatctgct

SEQ ID NO: 121260 - DNA, 1538 bp, Glycine max
  Clone ID: PAT_MRT3847_80504C.1
ccacgcgtccgggcgaagatgttgtgttgctggaccgcgcgtctcgagcgacgaggggaaagagattgacgaagctcctcgacgacgaaatccaagaagacgaattgttctggaaccaggacgctctcaaagaggacgaagaggacgataactaccaagaggagcccgaaatcgccgacgaattcgactccgacttcgaccaagacgagcccgtgcccgaggaagaagaagaccctaacaaaaatgacgatgatgaaaggatgcataaaaagaagcgacttatatttcctgggaagactctagcgaaaaagaagaaaaagaagaaaaccatatccaaattggagagttctccaaaggagaatgaggacgaggagcattccgggaaagttgtggaggacgagggtggggagagaatgatcaggaagtccactaggacttctgtcattgttcgccaagctgagagagatgccattcgtgcagccctccaagccaccatcaagccggtcaaaaggaagaaggaaggtgaggagaagaggatgacacaggaagagatgcttttagaagctgctcaaacagaaattatgaacttgcgaaatttagagcgtgttttggctagagaggaagaggttaagagaagagcaattgtgcttcggctcgagagacgacagaaggggatacggtatatttcaaaaaatggtacttcctatttagagtttattaaagggtcgtcattttcacgcggacattcccacagcacctgtacaatatccagagcaacctgtttgcccgattactggtttgcctgccaagtaccgtgatccaaagactggccagccatatgctacaaaagaagcttttaaaataattcgagaacgctttctgaatgaaagtactaacagtagaaaggacatgagcatgggaggcttatatgattcagtttctggatgtggtttttcaattaagcgaaagagatcgataatgccagataaaaatgccaacccagatggtcggtccttagctcgttttcgtagaattccggattttgaggatgaagattattctgactagctgcctgaggctgatagtgaaagatgtcatggtggttgtactacatgatcatgatccagacttcaggttgagataatataagaaaccgagtatatgaccagtgcttgcaaggaaatgttgggtcgtgtcttggagcttggtatgcatttttgaaaaataacctatttaaattttttcgctaaacttgagaaagatatatgatgtcaaatattccatcgcaatttgttagaagttatattttgtatatctttgccaacggtttggttagtcatcatctgtttgagttcgttcaagttatgccttcatgagaattttgggcttaatttatcaattgcgttaatttttgtttatagctagcccccccctttttttttttaaggtaagctagcacacccctgacaatggttatgtcacagtgattatccttatgtttgagttgtataaagaattagaacgttgaattatatctc

SEQ ID NO: 121261 - DNA, 232 bp, Glycine max
  unsure (1)..(232): unsure at all n locations
  Clone ID: PAT_MRT3847_80505C.1
ttggggnnttagggggaactcaatgaccttaaagaagaggttttccacatttttagggccaaatttgaaaccgggtaaacggttttcaggtgggacaaaaaaggtaaaaggggcccccaataatttcagggggaaaacctttttccctgaatttgccaaccttaccaaaatttagaaaaaaaatccccttattggagctaaaacccttacaaaaaggtttttttcccttttt

SEQ ID NO: 121262 - DNA, 262 bp, Glycine max
  Clone ID: PAT_MRT3847_80506C.1
cccagacattcgtttcaccctttctcagattctctctctagaaaaaccaaaacctggctcctttttgtagctctttccttatttagccttgacacactccaaactgtgaaatccatttttagcaaagtaaaaaaaagacagccaatgcgagagagagtggtcatcagacatcaccgatgattgattaaaaagcaccactcaatccgctctgattcgacgactactatggagcagagcgcgccgtcccctgccaggccatcac

SEQ ID NO: 121263 - DNA, 796 bp, Glycine max
  unsure (1)..(796): unsure at all n locations
  Clone ID: PAT_MRT3847_80507C.1
cttgctgcctgcggtatctgtttcattcatcttttccaccagcagccccttgtacttgtttgcttttaatgcttctctcattaaacctgttaagccctcagccacaatattaaataagagaagggctagtggatccccttgtcttattcccttttgtggaataaattcagctgtagggcttccattaacgaggattgacatagaagctgttctgatgcagccatccatccatttgatccatttaggacaaaaggccatcttcctcagcataaaagtcagaaaatcccagctaactgagtcatatgctctttcatagtccactttgaatatcaaactgctcttagcatttctcttcacttcctccaccgcctcattggcaattaaaacaatatgaagcatgtgtcttccttcaataaaagctgattgttgttcatctatgatctttggcatcaccttcttcagtcttcttgctagcactttggccactattttatatatgcaccctatgagtgatataggcctgtattgattcaggttttgaagttccagcaattttgggattaacgttatgaatgatgcatttgtgcccttaggaaatctgccttttacgtagaatttgtccaaaaatctgagcacttctggtttcattagatcctagaactctntgataaaattgaaattcaaaccatctggtccggggcttttttgactcccacaatcccacactgcatctctgatctccttctcatcaaaaggctgcatcagaaattcattntggctttgtgaaattgtctca

SEQ ID NO: 121264 - DNA, 245 bp, Glycine max
  Clone ID: PAT_MRT3847_80508C.1
gtttgaaaacaattccacatgacatattagactaggagtcttttctttgtgctattagtgacactgcatgtgctctggaatatcttagtttggcttcatatgctaattacccatcacccacttttcatactcagagtgtgattgctcctacccttcctatgggtaactgttttcttgttaaccaacaacttcatctcttgtatggttaagcccattttgtctcccaaaaatcaaaattctaagtt

SEQ ID NO: 121265 - DNA, 294 bp, Glycine max
  Clone ID: PAT_MRT3847_80509C.1
aattggaggactggtatatgctttactgctaccatgtgttcgaccagttgagggagcgaaaagcgctctatgtgactgtcacttacttcctgaggaagttgattgtccagagtgagttgattagatggacactctgctatttgatgtctgagttccagtgactacaaaacctaatctggctgtaactcacaaggatgggcaactgaagctacactggtgacgaaatctcgaatgagtactctccctctgctaagagattgggagcacagaacatgacggatatgatccttttct

SEQ ID NO: 121266 - DNA, 672 bp, Glycine max
  unsure (1)..(672): unsure at all n locations
  Clone ID: PAT_MRT3847_8050C.1
atgcttgtcaagattctaataacgacaaaaaaggatggctcaatatcgtgctctctaaggaagaacagaagatcttctattgctggtgaggaggataaaggtggtaaaacctcaaggcagctgagaaaacaagcagctcgtaaacctgcaaacagttcattcaatgaggatgttgaagatttggaaggaactaacctgaacttattattggaccatggaatgttttatgcttccaactcattttttgactatgccaagaacagaaggatattatggggatggtcaaaggagtgtgaaaccacacaagatgattatgagaaaggatgggctggtctacagtggccaattgaagaggtagaanaactacatgacaaacaagttagcataatgggagagaaactggttagtgaatcaactattgaagtctctggtatccctgcatcacaagtcgatgtagaagtgtggtttgagctacctgaactagagaatatggagtggctaaatgaaagtgaagttgatccccacttgctgtgtagtgaagagtatgcatcaagaagtggcataataggtatgtggccgctggttgatctcttgcattggatacaactattggctcggcataacaaagcaatatctagggacacatggtctcagcttttggagtttgcaaag

SEQ ID NO: 121267 - DNA, 130 bp, Glycine max
  Clone ID: PAT_MRT3847_80510C.1
ctctgttctcgttttgtacaatatctttgttggtttcagatcagggacacaaaggaagatattttacaaaacgagaacagagtccctacattagaggatcagaatatctttctttgtttcttagatctgc

SEQ ID NO: 121268 - DNA, 594 bp, Glycine max
  Clone ID: PAT_MRT3847_80511C.1
ctttttttttttttttttttttttttttttttttttttttttttttttttttttttttttttttttttttaaaaaaaaaaaaatttttttttttgggccaaaaaacctatggggtccaaaacatagaaaacaagactaaaataagttcaacggcctataccccaaacaaaaaggacttaacctttcaaaacatcagctatgacacaaggaaggcgggcgggaatccttgaaaaggcaaaatcttttaaaccccttggccttggagcttaaaaaattttttttttccgggggtaaaggggaacaggcggagcttccttcagtttctaaaaaatcttcaggggttcagctagcttcctttttttacgggacaacaaaactttacccagggcatcaacaacattttcttgaacaggggggggggattcaccaggcgggcccaccccaggaaagggttttttaaaacccggggaagtatatgaaacacccttgaaggtcttttttaaaaacatcacggggtggggggcccaaaacaaaaacttggggtttctcggagcgggaaaattagcctctggtcgataaaggaaaccttcaacc

SEQ ID NO: 121269 - DNA, 420 bp, Glycine max
  Clone ID: PAT_MRT3847_80512C.1
cagagggttgtggttgcgtgatcaatacttaaaaaacctgaatttgaatcgccattcatttgtaagccagctcatgctcgttggatactgatgcgacctgatcatgcaataggtagtggtaacgcattatctgtctgtatttatcaactaaacaagactctacggtagctctacttaaaaacttaccaaaattgtcgttaaaatgaacatgtaaccctctttgtagccgataacacgtagaaagtgctatgcacatacataaagtgacaattttttcaattgataacaaaaaaaaagaatgggcacacaacgactaatgatccaaggggacagggaataaatatcgaaactaggcctccatgccgatctgtcatagctattgtgagtttatttagcgaatgagccatcactagagacaga

SEQ ID NO: 121270 - DNA, 203 bp, Glycine max
  Clone ID: PAT_MRT3847_80513C.1
ctcatagttgccactcactttatagcacaaacgtattgtttttctctctatccgcgggctagatctgaacatgagggaaaccgtaactgctctcaccaacgacatcaccaattttgtcgaacaactacctatttcgacagacctagtcatcggaggaattgcacccgggggatcacagattgacgctcgccaatatgatacca

SEQ ID NO: 121271 - DNA, 428 bp, Glycine max
  Clone ID: PAT_MRT3847_80514C.1
aaaaaccaaaatttaatttttttttgggcctggggggtttttttgggaaccaaaattatttgggggaaggccaaaacccactttttgggggactttttttccctttgggggggaaaaaaaattaagaaagggaaaggacttttttttttttgggtggggggggaaaacccccccctttttaaaccctggaaatttttccgggggggaggctatgggaaaaacccccccttggggtttttttgggccaaaaagaagggaaaaggggaccccccttggggggttccccaatgggaatagggaacccattttggggggctttaaagcatttttttccttttttaaaaagctcctttgaaccctttgttggggggaatcttccttgttttgggaaaataatgggaggggcaacccttttggggaaaaacaaa

SEQ ID NO: 121272 - DNA, 150 bp, Glycine max
  Clone ID: PAT_MRT3847_80515C.1
acaaaattaacttccttgattatcctaagatgccaacgaagcaggtaacttattgcaatgataaagcggcgttagtgaaggtatatgttgagaagcctaggaagaagagctcatcatcaattcagcatcagcaccttcattatcatattc

SEQ ID NO: 121273 - DNA, 440 bp, Glycine max
  Clone ID: PAT_MRT3847_80516C.1
acgagctctgaggacaatcaacttatctaacaacttaatgtcaccgtataaatcagagcttccattactgaaaaacatcaaagttgtggttttaaataatactggtgtagattgggagcaggttccctctatcttttgtcgacttgtgtttctagcataaatttgcctaatgtataaataggatttgctaaatattttcttttgaattgggcaagttgagctgcttagacaatcattgacaacaattgaagagctacatataatggcaaacaatataagcagaacactggtatgttgtctttgattcaataggcttgctaaatatgttagaagctgtaggaatatatgtcttcccccaaatagcctactggctaacatggagagcagtttaataaacattggaatgtcacaatcttttaagtacctcaagatgttcattt

SEQ ID NO: 121274 - DNA, 245 bp, Glycine max
  Clone ID: PAT_MRT3847_80517C.1
gtcagacaaactagctgatgttgtccctgaggctttggttctcttctttagccactcacaacaccctttcatgttcttcgcgaagatccttgtttttggttcctcatcaaatactcaacaacaacaccctaataagcaacacctccaaaattcttagttgctgctatgagaaacccattaagcaaaatgggattttttcagttgccagtgacctccaatcttcttctttttcttcttccttcccc

SEQ ID NO: 121275 - DNA, 611 bp, Glycine max
  unsure (1)..(611): unsure at all n locations
  Clone ID: PAT_MRT3847_80518C.1
nccaagcgtccgcccacgcgtccgacggctgcgagaagaagacagaaggggttagtacgtactaaaataaattttaattttagtcatttcctactatatatacaatgagaaaggtgttacacgatgtattaatataatgagaagttaagcttataatttagctcgtaaagatttttacattttttattgggtagtagtgtatgatttataatatacactttataatataaaataatctacatgtaatgtaggttttatgaagttatggtgagatcttgaaagcactcgttaatacggagcatatacatggtctagttgtgcacaatgattataacgaggactcgggaaggtgtagagtaaactacattacatgtaccaagtatcttaaaataaaaatttaggaaacttttttgagataaaaggaaaattgtcataatcattcaaaactggtgataatatatttgtatttaacaaaatatattgntgtatttgagaattcaaaaacttaactacaaaccaaaattaaaaatatatatgaaatataaactaaatttaaataataaaaatataaatattttcaagtaccaaacttttatttaaaatactattta

SEQ ID NO: 121276 - DNA, 395 bp, Glycine max
  unsure (1)..(395): unsure at all n locations
  Clone ID: PAT_MRT3847_80519C.1
ctggctagttggggttcatcttcttcccatattacttgtactgatgtggccggaacttttgggtgtgtaacatccctcttgttcctcctttggcttgtttaccttagcttttgatttgttctgaacaagttttgtctggcagatacctcgcacctgagtactttatgcacggtagagtgactgataaaagtgacgtatatgcttttggtgttgtactccttgagcttctctcaaataggaagcccattaacaatgaatgcccacagggccaggggagccttgttatgtgggcattaccaattttggaaggtgggacgttttcccagttgcttgatccaagcctgngccgcggatgtgacgattgcccgatcacgagaatgatttttggcgctgct

SEQ ID NO: 121277 - DNA, 1154 bp, Glycine max
  Clone ID: PAT_MRT3847_8051C.1
acggctgcgagaagacgacagaagggggagttggaataccaattttggcgctctctctgtatttctcttccttctctttcatttcccctctcttgttggttcaaaattatactctctctaagttttaaccttatgaatatggatatgtgccaaaatgtatcagtttccggtgagtgccaacaagtgcaggtttttgccccttcttgctcaagcagccttgatgacctcttctctgctcagaacacggaagtggatgttgagttggagtggctttcagagtttgttgaagactgtttttcaagccctccaagctgtgtcttggtacctattggtgtcaagactacaagcacaagcaccaacctttcttcaggcacattgaagagaccccaacaacaaaatgagtcacctttgcaaaactttgctgtgccagggaaagcaaggagcaagagaaagagaaagaggctttcagcccctagaacaacaaaacacaccctaagcacatggtcgcaacatttcagcacacagaatgatggggtgagttctgaccctcctcttttgaaacaagcttattggttggctgatagtgaactcattgtgcctaagaagaaggatgttgagcaagaagaggaggaaggggttgttgtggttgtgaagaaggagaaattgggggattattgtgatgatgatgagggtgatgaaattaacaataataatagtaataatgatgataatgtgcagcacccaattccaagaaggtgcacacattgtctagctcagaggaccccacagtggagggcaggaccattgggtccaaagacactatgcaatgcatgtggggtgaggtacaagtctggaaggttgttgccagagtataggccagccaagagccctacttttgtaagctatttgcattccaattcacacaagaaagtcatggagatgagaatgggtgttggtgttgctgttctttctacagacaagaagtagtgaaaatcatgtgttactaaggttttaaatatcggtcgcagtcgcatgcgatttgttgacatcatggaaaatcacagataaatgtgactgatgcgatctcgactgcgatcatcaacaattaaaaaatattgatgttgtgatccaaatctaagtcgtgggcctttttt

SEQ ID NO: 121278 - DNA, 139 bp, Glycine max
  Clone ID: PAT_MRT3847_80520C.1
gggaacattaaattatctacactaaagtaggaaaggaatcttggcgtacctgtctacattaaagcgtgagaagggatgaagaggtacttcccaacaatcttctgctattaacaagttttgaacttctcttttttaccct

SEQ ID NO: 121279 - DNA, 1132 bp, Glycine max
  Clone ID: PAT_MRT3847_80521C.1
acaacccggctgatttgcacaaagggggttttggagtgtgtgttcgggtcttggccgccaccgacgaagatgttcacttcaggattgtctccatctctcctattccccgcatttcatcacaaactttattcatttctcttctctattcgcaatcatcgctgttaactggtgcattctggaacactggctggttaatgattcatagtgttctaaaagcaagtaggtttcaaaatccacgtagagaagcccgttgatttgaccattgctatcaaaaagcgtgtttgttgtttagcatttagctcaatgaaagaaatcaattgtaaagtggattctagttcatgtactcttgcccccaatagggaaccctgcatcacagagtccttatcagttagtgggaatggtactactacttcatctatgagtgtaaaatccacccctgaaattgaaaagaagtttgttcatcatgtatatgatgctattgcgccgcatttcagtgccacccggtttgccaagtggccgaaggttgcagcatttttgtcatctttgcctttgggatctcttgtcctcgatgccggatgtgggaatgggaaatacttaggtttgaatcaggattgtttttttataggatgtgatataagtccttccttgattaagatctgcttggacagagagcatgaagttctggttgcagatgctgtgaatctcccttacaggactggtttcggcgatgtggcgatatctatagctgtgttacatcatttaagcactgaaaatagaaggagaaaggcaatagaagaattggtcagagttgttaaaaagggtggccttgttctgattacagtttgggctgtagagcaagaggatagtaagctgattaccaaatggacaccactgaatgagaagtatgttgatgagtgggtaggaccaggtagtcctcgtactcgggcgccttcatcctcatcattggaaagtatccccgaaagtgaggcgagtcgctctggtgagcacatggaagtctgcaatgagccacatgtatcaagagatttggaggaagaaaaaaataaagaatcaacaggaatactttgttcctggcatttaccttattatcgtgctgaaatcagtggtgcttttg

SEQ ID NO: 121280 - DNA, 950 bp, Glycine max
  Clone ID: PAT_MRT3847_80522C.1
tttcctcccttcttaccaggaaagatatttatcagacaatttacgcaagggtgacaagagcttccattcaattgcactaaatatctaggagtagtaaatgttattcagtttaatatgaattctcatgatgttttgaaaactctggtcttgcagtttgttgcttcgtcgggagtgttgttcctttagcaatggagaatatttgaaggcaggtttacatgagttggaacaatggtgtcttaaagcaacagaccagtttgctgggtcatcttgggctgaactcaaacacatacgccaagctgtgggctttctggttttgcatcaaaagactcaaaaatctttggaggagatcacaaatgagctctgcccggtgttaagtattccacaaatatatcgtataggaactatgttctgggatgacaagtatggagcacatggattatctgcagaagtaattagcagaatgagagtgattatgacagaagactcaataaacatacacaacagctcattccttctagaggtggattccagcataccattcttaatggaggagatgttccagtccatgagtgacatccgcctatcagacatggatgtggatccaccaccaatcctcaggcaaaggtctgacttccaattcttgttacaacaaatggatagtgactctcagtgagctagcaaaagtttggtgctgatattagttatagtttctgatttgtattgatttaatttgggtttggagtggagagagtaattgagtgatgaggtgaagaattgtaattagtttatttatttattctaattttttacatttgtttttgggaagatcccaatattgtttattattcttgtaaggcttcttgtcaaggaaggccacagtgaatttttccgttgttgtatacagttacttcgaaaagtaatgaaatgaaggaaagtttggctttagttta

SEQ ID NO: 121281 - DNA, 772 bp, Glycine max
  Clone ID: PAT_MRT3847_80523C.1
gatcggccatcatgaagtcaggtggtagagagattgaaggagataatcttagattctgatgaagagcagcagcctgcagatgataaaagtattgaggtatctgaaaatgatccggttgaagctgaagataagacaaatcaatcaggctctacagagtgatggaaaaagaggatggaacatcttgcaaaacttggtgaaagtgtggagagtgctagtagaagaagatttatgatccttcagagagccaatgtgtcttcatagtttcatccctagcaaaatttcgttcgtcctggactcctgggtgtaactaactgggaactaggtccatcctaggagaaattgttatatgggtctatgtggtctcggtcaatctttacatgatatgctttaactctttttcataaattgaaaaatgtgattatatgtcccatatagattcatcgggaccccatagttccggaccatgtaacaatttctctctttctcagccaatgatgatggatagacaaagcaggcaaagttctatgtggttgatgtatagaatggggaacactaacagcaatacattgctaatgatcttttgagtggccatatattttgtttgatttgaatgagagatataaatattttagtggcctttgtattgttaatatagaaactagaaagtgattctatggtatatagcttgtaaattctctttctttttcttttcaaaagtatttgatccatcacaacttgttctctgtatatcatcattcagttttattttgtc

SEQ ID NO: 121282 - DNA, 418 bp, Glycine max
  Clone ID: PAT_MRT3847_80524C.1
aggttttgagtcagacctgagcacttccataggtttgttgctgaagacaataaatttttggaggaagcctctggtcatgtgtggggaaacctaacaatgtttacaggtgaatccacagggttttgagaatgaggatgtattatttttctatattggggaagccctgagattttttttccccggctgtaattgattgtctttataattttagataagtagtacaatattcaactcttgtgattaccgtttcatccccttataaaataggggtcccttgaagaactggtgcccaattcccaattccccaacatgggtttcaactatcaatataagtaaagagggggatcaagtctcggaaatgaattttgtatgaacatctgaatatcattcttatctgcttccttaactttttaatgat

SEQ ID NO: 121283 - DNA, 476 bp, Glycine max
  Clone ID: PAT_MRT3847_80525C.1
acggctgcgagaagacgacagaaggggatggcaaaaccgcgctttttgatttcgacgattcctctgtgtctgtcagtacaactcccgtgaagttagaattggagtgaatgctaagttgacctcactaacagggttgagtggatgtgcaatgtcataagggtagtctcaaggctctgtttggcttccagtttgaaatgcttacacatcatggctgtatctaatctttttgtttttatacaaacatcaatgtccattgaagcacaaccatttataatcatttctccacctgccaaatagtccacattttagaaattgtgcttgtccttttactagatgatgcttgtatatagtattggtaccttatcccttagctcagacaagtgcccaagaaatgcgtgaatcaattgaaacccattattcttttctatgaggtaccaccagctatcgaaattttctctccaaaactcttgattatg

SEQ ID NO: 121284 - DNA, 722 bp, Glycine max
  Clone ID: PAT_MRT3847_80526C.1
acgcccacgcgtccgtacggctgcagaagacgacagaaggggatggcaaaaccgcgctttttgatttcgacgattcctctgtgtctgtcagtacaactcccgtgaagttagaattggagtgaatgctaagttgacctcactaacaggtttaggttgcgttcattattggttgctattataactaacaattgctctgaccttggaaattggaatgaaataaccttcgtttttacttaaaacatctttcctcactctcaaaagcagggttgagtggatgtgcaatgtcataagggtagtctcaaggctctgtttggcttccagtttgaaatgcttacacatcatggctgtatctagtctttttgtttttatacaaacatcaatgtccattgaagcacaaccatttataatcatttctccacctgccaaatagtccacattttagaaattgtgcttgtccttttactagatgatgcttgtatatagtattggtaccttatcccttagcttagacaagtgcccaagaaatgcgtgaattaattgaaaccccatattcctttcccaggggccccaccaatgcgcgaatcaattcaaacacagtattcttttctatgaggtaccagcaccaccagctatcagttaacttatcaaaattttctcttccaaactcttgattacgagccttgaaagattttgcatgcaaaagatgccaccggttatcattc

SEQ ID NO: 121285 - DNA, 608 bp, Glycine max
  Clone ID: PAT_MRT3847_80527C.1
gaacaatgaagagattgcctgatgtttggaaaaacacaagtactggtgtctggagcattcttttgtatataatgaatggcggtgaatgaagttgctaaaatgctgtgatgctatatgaagctgtaaaaagaacttgttaatcctttttttccctacatcttttttgccgcaaggttaggttgggactatggattctaaagtggaagttgaattttgaaacaacttaaatgaaaaggaaagagtggagctaatactgtgatttaatgcttaatccctgtttttcggagatccaaaatgagaatatgggatgaaatatgtgcttcaatccgatctgttccagaaggtacatcatataggggcaagaagtgtatataaaacctcttgtttgtcatcaaaaatagatactgaaatttctcatgtatttttggcggatgtagtggggtttgggatgctctctctgtttctttctttatttgggtgtcgtcctgcagattgccttgctgtcaactgtgtttgaaaacaataaagttgttatttgattaactttgaatcatcggatgaaatgatactcatctaagtatatacctctgccgttcaggtcaaaaaaa

SEQ ID NO: 121286 - DNA, 238 bp, Glycine max
  Clone ID: PAT_MRT3847_80528C.1
ttaacaggtagtaataagatcttatttattctacggggcattatacaccccatatatagacgatttcctctaacctaagtaacatcttgacaaaagtataccgaaaagaccctatctcacttattgttttattggattatctggattacatcaccgttgttaaatggctagcttcacctctacctgtaaatggctcaaggggcaaatatactgtttacccttgatcaaaatgtacgtt

SEQ ID NO: 121287 - DNA, 425 bp, Glycine max
  Clone ID: PAT_MRT3847_80529C.1
gttctgttaacctggcttcagtctacattatcgaagacaattctatcgctggtgcttccatgcactcattcctatcaagtctgggagaaaattcttgagtacttccatttgcaaacacgagctcgagctcagcaattgcgcagagaactgcgtcgcacaatgcttgatgataagacgatgaaagagtttcttctgagaatcaaagcgatctgtgattcgcttaatggtgtcagagatccggtgtcacatcacgaacacgtcggcatcatccttgaaggccttccgacggagtatggtcctgtaattgcagtagttgaaagcaagtttgagtctcctctgattgctgatgctgaagcgctttactagcatgtgagtcacgtattctgaagttgtgtaagaggatgattgaatcttcttctttgatt

SEQ ID NO: 121288 - DNA, 397 bp, Glycine max
  unsure (1)..(397): unsure at all n locations
  Clone ID: PAT_MRT3847_8052C.1
cttggggcttgtggcccgcgttggccttcctgtgctacatgcgcgttgggaggagctcatgatctggccactggtgacctcgtgagccttatcgagcatcatctcgcggaccgcgctcacctgtgtgatcccaaagaataaggcacgggtgactcatgctgtgatggtggctacgctgctcaaccacatttgggttcacactctagtttgggggagtttaggctgagaatgtctatgcactcaccttgcgatgataccacctgcagacttgacagaacggacagtggtgatactgattctacatacagtgtggggtgccttgatgatgaaccaattgctagccacctagagctgaatggccctgttgcagttcctatcaatgcatnttctatgcatt

SEQ ID NO: 121289 - DNA, 2071 bp, Glycine max
  Clone ID: PAT_MRT3847_80530C.1
cacccaaccaaaaactcaacgcaaagagagaaaccacgacacaacacaaaacctccttagacttggtgtattttgtttttctgtctgtgttgttccttcacaaccacagagccaaaaacaaaaacatctaaaacctctttctttctctgtgtttgtgtttttagtttttgtttttgtcctatgaaactcccaacaacgtttgcagacccggaatccttgtcttacctttacaccttgctccaatcttccttcgaccaaatgaatgatcccaccaacaacaacacttccaccactgggagaaaacgccgcagaaaaaacgaggatgatgatgatgatgatgatgatggtgatgatgatggttcatccaacaacaacaacaacaacaacaacaagaggagcaagaagaagaaggaagagctaaagggtatcctcacttcaattctcttgttagacgaacaagagaaacttgagcagcaacagaacaataaggtctcagaggaagagaagttttcattggaaaccaatcacaagaagaaaacaaaagccatgcttcactactattccaaccttgatgagtattacagccacgtggaggagtcagagagggtgaagaggaagaagtcacgcggcatggcacgtgcggtggcggtggcggtggcagcgtgtgaaagagaaggtgagggtggtggtggaagtgctgaaggggggaaatctggtgcgggaggctcacagagaaggttgtgggtgaaggatcgttcaggagcatggtgggatgaatgcaacaaagaggattttcctgaagaagattttaagaaggcttttaggatgggaagagaaacctttgacatgatctgtgaggagttgaattcagcaattgtgaaggaagacaccactttgaggaatgctattcctgtgaggcaaagggtggctgtgtgtttgtggagattagccactggggaccctcttaggattgtttctaagaggtttggtttggggatatcaacttgtcacaagcttgttcttgaggtttgcaccgctattaagtctgtgcttatgccaaagtacttgaattggcctgatgaggttgcattgaggagggtgaagagtgagtttgagggtgtttctgggatccctaatgttgtaggctctatgtacacctctcatgtgcctattatagccggttcctaagattagtgtggctgcttatttcaacaagaggcacactgagaggaaccagaagacttcttatagtattactgttcaaggggtggtggatcatagaggggtgttcactgatgtgtgcattggttggcctggttcaatgcctgatgatcaggtgttggaaaaaagtgccctttttcaaagggctaatggggggcttctgaagggggattggattgtgggtagttcagggtaccctttgatggattgggttttggtgccttatagccagcagaatctgacttggactcagcatgctttcaatgagaagattggggaggttcagaaggtggctagggatgcttttgctaggttgaaagggaggtggagttgtctgcagaagaggaccgaggtgaagctgcaggacttgccagtcgtgctaggggcgtgctgcgtgctgcataatatatgcgagttgaagggggagaagattgaccctgagctgaaggttgatctgatggatgatgagatggtgcctgaggttgccttgaggtcaatgagctccatgaagacgagggacgcgatcgcgcataatcttctgcatcatggtttggctggcacttcttttctgtaaactgaaagggttgtgttttggtaatggtgtataccgttttgctgcttgagataatgatgattcttttgcttgtttattattattacatggtattgaagtaagtcactggtcattgtttgttgaagagtctttgtatgtaaaagatgtattggccctttcaacagatatatgattatagtctgcacagggttagatcctgaatttgtaacccccaattccatactttaattgccaaataagatattgaataataaaattagaacattcttttgtaac

SEQ ID NO: 121290 - DNA, 243 bp, Glycine max
  Clone ID: PAT_MRT3847_80531C.1
tacctcgagccgattcggctcgagctaaagtcaaactcaatcactctacttctctcccaaccactcttcgtctacgtcaatcacttcagccctcgccagaagatctctgcagatttcatcgggctcctcccattgctcgcctcattgtgaccagcagtgctggaaccgaccacatagacttggttgagtgcagccgccatgatattcaggttgtctctgttccaggagatcaagccaaggatg

SEQ ID NO: 121291 - DNA, 288 bp, Glycine max
  Clone ID: PAT_MRT3847_80532C.1
gcaaaaattaaagggcttttttcaaaacccttttcccattgttaagcccattccaaaaccaattcccattgtttatccaatactaaacccggtgcctgttgttaaacctattcccattccagaatacaaggccctaccaaaatttttgactattgttaaccctgtgccaaacttaatcccgggggtcaaacccttaacaaaacccatacttacttttgacccaaaattttttttaaagccgaagccttcttttgaaaaacctgttcttaaattgcccctggaccccaa

SEQ ID NO: 121292 - DNA, 473 bp, Glycine max
  unsure (1)..(473): unsure at all n locations
  Clone ID: PAT_MRT3847_80533C.1
ccacgcgtccgaaatgtctcatgaaacttttatatgataaaacggttgtttatgctacccatcaactggaattcttggaagctgcagacctcattttggtaatgaaagatggaaaaatagtggagtcaggaagctataaagatcttatagcatgtcccaactctgaacttgttcaacaaatggctgcttatcaagaaacattacaccaaataaatccatgccaagaagatgattctgctagctgcagaccctgccaaaaaaatcaaattgaagttgctgaagaaaatattcaagagatcatggagngattggggaagaagtaaagaagaggaagcagagacgggtagagngaaatggagngnttactcaacttttgtcatatctgcttataaaggagtgcttgttcccgttattcttctctgccanattctcttttaagntatgcagatggnaagnanttattggattgtgtg

SEQ ID NO: 121293 - DNA, 118 bp, Glycine max
  Clone ID: PAT_MRT3847_80534C.1
gcggagcctttcaagccccaaggttttcttcaacgcatgaccctcaccagctcacacggtcgcctgagaaggcgcatgtccactcatccaatggatacaactcggtagtgtcatgatt

SEQ ID NO: 121294 - DNA, 2070 bp, Glycine max
  Clone ID: PAT_MRT3847_80535C.1
actgatgcactttctgatgtaatgtttatttctttcaatgaactttaccaaaaattggaaattctgagcagaaatgtctcatgaaacttttatatgataaaacggttgtttatgctacccatcaactggaattcttggaagctgcagacctcattttggtaagctattgtattgaacactaatctttagctgaagaaatttctttacaagtgttttgggccttcactattaaaatactttttggcaggtaatgaaagatggaaaaatagtggagtcaggaagctataaagatcttatagcatgtcccaactctgaacttgttcaacaaatggctgcttatcaagaaacattacaccaaataaatccatgccaagaagatgattctgctagctgcagaccctgccaaaaaaatcaaattgaagttgctgaagaaaatattcaagagatcatggaggattggggaagaagtaaagaagaggaagcagagacgggtagagtgaaatggagtgtttactcaacttttgtcatatctgcttataaaggagtgcttgttcccgttattcttctctgccaaattctctttcaagttatgcagatgggaagcaattattggatttcatgggctacagagcagaaaggcagggtcaacaacaaacagcttatgggaacatttgctcttctatcttttggtggcaccatcttcatactgggaaggactgttttaatggcagctgttgctgtggaaactgctcaacgcctttttcttggaatgatcacatcagttttcagggcacctgtttcattttttgacaccacaccttcaagccgaattatgagtagggtcagtttcactattatttctttatttgatatattattgctatcttttgattattatcagctttaatcagatttcaaccattctcttcttgatgattacagtcatcaacggatcaaagtactgtagacacagacataccatacagattagctggactagtgtttgcacttatccagttattgagtatcattgtgctaatgtctcaagttgcatggcaagtcattctcctcttttttgtggtgtttgcaatttccatttggtatcaggtaagaactatatcaatctttgacaatgtacacaaactaaatcatatcattttcccgtcaaagtcttatcagcatgaactaaaaagataatagcattagctcgtgtcatgatgaatcctcctcttgtcataaacatttgcatgtgctaactcttgcatggctcgatctagttttctagtgatgaagttatttgttttttataggcttattacatcacaacagccagggaattagccaggatggttgggattcgaaaggcaccaatcttgcatcacttctcagaatcaattgccagggctgctacaatccgctgtttcaatcaagagaaactattcatgaccaagattaaggctctaattgacgattattctcgggtagcctttcacaattttggcaccatggaatggctgtctgtccgaatcaatttcctcttcaatttggtcttctattttgtacttgtcatcttggttactcttccaaggtctaccattgatccaagtaagctccttcttcccctattcatcttatcagcagtggtagcagttacatgcatgtgtgtgagaaccacttttctactgcattattttaaaaagctctaaagaaggacttacacattattgattaagcttgggttacaactttaaaaccaaaaaagaaaactaattttgcagaaaagtagcttgtttgtattagatccttctggttgtaactgtaatgccatgatactcacatactagtggtactttaagattgatgcatgtggcagtactcagtaattgacatatgcttctctttcctctctcaccagtctccgtaattcccactaacaagatccactaacgagtatatggaaatgctaagttgcttcttctgattttcaggcttggcgggtttggtagctacttatggtttgaacttgaatgtccttcaggcttgggtgcccttctgtcgtcttctcgcagc

SEQ ID NO: 121295 - DNA, 309 bp, Glycine max
  Clone ID: PAT_MRT3847_80536C.1
gggcatgaaaagtaattttttataaattcacttgcccccgggtggttgggggggaaaaaattaacaggcaaccaaatccaatttccaatttgttttcaagttcaaaccataaacttaactttttttgttcttttgcccactagttttagattttaactttagcatttgctgggtttaaaaaaaaattaagcgggcatttgggttacaatgaccattatttttattttttggggaaccccccccccgagtctttttttggaaaatttttgggaaataaaggggtaattccctccttaaaaaaaccctttt

SEQ ID NO: 121296 - DNA, 346 bp, Glycine max
  Clone ID: PAT_MRT3847_80537C.1
agcttttcgtgtcttttaagaccgagatcacacgttgccgatccctaaaatcggtcacaaaagcaatagttgctggagggaaagaatctctcagatattaactactgctcggtgttcgaaaaagttagggctactaaagcacactttgtgatgggcacaaccttcaaatatgatataacttggcgactgttaacatatttgatgaacactctctcattaggaataggacgaaaaacccaaaaagaacgttgcctgattgttactcagaattctgcctcatttcaaggtcgagcaggctaaaatgtggacaaatgcgtccactctgctatctgatgatggacaaact

SEQ ID NO: 121297 - DNA, 148 bp, Glycine max
  Clone ID: PAT_MRT3847_80538C.1
gacttgagagaatattcttccgaacctagtgaagctgatctatgtgcaccatctcgccctctttatctctgatggcgagagtatacatcgtctcactatatccgtcatggcgttgtaacaattttcaggtcacacaccaagttataca

SEQ ID NO: 121298 - DNA, 381 bp, Glycine max
  Clone ID: PAT_MRT3847_80539C.1
accactcgtacaagccgacgcaaggagacgcccgaaggggaggatgtgccacaacaggtggatcaaaggtgccaattgggcaatgaagatgcatgagataagtgagttgaacggcattctgctaaagctaattcaagtaatagaggaacagtgcacgatgttactatgaagcagggcacatccatgctctaaactattacacgtatacactgctaggtcacaggacgatggtgatctaacacctggatctagtatatgcaactaacctagtgtgaagcagatgatggtcacggtccatgcttgtgatacatggtgcacactgagagctttacggtatgacatagaatgttgccgagacttcatggacgtaatacatgatta

SEQ ID NO: 121299 - DNA, 419 bp, Glycine max
  Clone ID: PAT_MRT3847_8053C.1
caaggcaaaacatgggaatttcaggattatttttcgaactcctaaattaacatcattaaaaggaaaacatcctcctttcaacctaagggaattctgctttattttggcaattcaagctacaaaaaatttcaaaatccgacctattacctaccaaagaaaccggagataaacctccttaaaacttcaaaattaaaaattataaggcaaaaaggggggacagatcatctccatttttttggaaaatctttcctcggggaaaatacccaagggacaaatattgcagctacaagggcaacaattgttaaaaaaagcaaagcttagctgaaatcttcagttagggaatcgaaagccctaaaaggagcaatctgagaaaaaaaaagatcaactccataggcaaagacaagagaggtaaactccag

SEQ ID NO: 121300 - DNA, 646 bp, Glycine max
  Clone ID: PAT_MRT3847_80540C.1
aaaaaactggtggaagtgatgaaacatataggaaaggtccaacattctttggctggatcagaagctggtggcaattttggaaaggcaatgcaaaatctggtgattcaactgctcatcagaacaaggtggttaatcattttgaggattctaactcatctgaactggtagaccagacagtccagactgttagtgattttgaagataagtcatcagaactggaccagaatgctatttgttctggaaagcctgagttgttttctagcagttccgtttgggatgacatggaatcttttattttcacccgcagaggatcagttattgtttacgagtcaaaaaacagggaggatatggcacgtaaattacggaagaatggacccccagtttttagatctctgtctaaaaaagatatccttcaattgttggagttattaatatcagaaaaaaagtggttggaggaaacccccacccaaacatttccttttcagtttgactcagtgaaatatatagtgaggttatatgggtctagatatgatatgttaaaagattgtgagaaacttgtaagggagatattgagggaacacccagatggttttagaatcagttcttttccaagattttttgttgttaggtatggctatcatcttga

SEQ ID NO: 121301 - DNA, 274 bp, Glycine max
  Clone ID: PAT_MRT3847_80541C.1
acacatacataagctcaaaattcaactcaaggggtctcttccattcacaaccttaaacctttctttcttataaactttattaattaattctaagaatagaactaagagggtatagacatagctaacacaattacaacttcttttttaattctacttctaactttccccactatatttggaactgaccatgaagttggtgacactagtagataaaccctcgaaattaattacaacacctaaacctctaggaaaactttcacaattggtgacactt

SEQ ID NO: 121302 - DNA, 2313 bp, Glycine max
  Clone ID: PAT_MRT3847_80542C.1
ggctccttgatttttttacaataacccaatcatagtctcactcgggattggttattcttattctaagagataatccaaatccaaacccaaaagaacaacacaatgaaaggagaatacgtagagcaacagcaacaacatcctaagagtgaaacaccacctagtatgttctcaaagcttcagcctcagcaccatcctttcccgcaccaccctttccaactctccgccgaggatgccaccaccatcaccccgagcaccgctcagaaggccaactcctccggcggcgacggcgcgaccatcgaggttgttcggcgtcccaggggacgtccgcccgggtccaaaaacaagcccaagccaccggttatcataacccgtgacccggaacccgctatgagtccctacattttagaagtgtctggcggaaacgacgtcgtcgaggccatcgcgcagttcagtcaccgcaagaacatgggaatctgcgtcctcacgggttctggaaccgtcgctaacgtcacgctccgtcaaccttccaccacgcccggcaccaccgttacttttcacggccgtttcgacatcctttctgtttccgccaccttccttccgcagcagtccggcgcttctccggcggttcccaacggattcgccatctcgctcgccggaccgcaggggcagatcgtcggaggacttgttgccggcgggctgatggctgccgggactgtttttgtgatcgctgcctcgttcaacaacccggcataccacaggcttccgccggaggaagagggcgcctccgccggagatggacattcgccgccagtctccggcggcggagacagcgggcatggacaggcggagtcgtgtggaatgtccatgtacagctgtcacttgccctctgatgtgatttgggctccaacggctagaccaccgccgccgccgccgccgccttactgatcgatcaatcacacgtcgagtttctgtttctttttcttctgaggttaactttgtggttattgtaatcaattctactatatgttgctctgtttaatttgatttagttggtgtagttgatatatctggtattagtttaactattattattattattataattaggttaagtttataaatggaaacattagtatagtatagttattatgtagctagggtggtttatttgcggcgctaactgtattatgtcgatggctctctaccttgttgaagagattttgtttatcgaccattatgactagtgagcttgttgtttattttagatttaaaatttttgtaatggattttataataatgataatgagtaatttgtgagaaactaaaaagctgctggagctggagcgggcgctggcaagggctatgcttgtaagaaaaggaaagtgagaaatgggtggaatgcatcgctggttaggctttctctatcaacgttgggaatagacggattatgatggggaatcctgttcacatttggtcacaatgtggggattggttagagtagataaacatagctatcagctactcaaaacttaagcatggcctccattcttcaattgctgatgtttgcttttacaatgatgttcacgttcatgggagagcgagcagtagctgggggaatatttcgacccagtcaatgggctcttgcccatgccaccttttatggtgatgagactgcttctgccactatgggaggagcatgcggatacgggaatttgtttcaaaatggttacggaacagatacagtggctttaagttcgaccttgttcaacaatggttacacgtgtgggacttgttatcagataaaatgctaccaatccagtgcatgttacaaaaatgtggccttcaccacagtaactgccaccaatctttgccctcctaattggtctcaaccctccaacaatggtggctggtgcaatcctccacgagtgcattttgacatgtccaaacccgccttcatgaaaatcgcgcagtggaaagccggaatcgtcccagttatgtaccgcagagtgccatgcatgaggaggggagggcttcgattctctttccaaggaaatgggtactggctgttggtatacgtgatgaacgtgggaggtggaggagacatatcaagcatgtgggtgaaaggaagcagaagtggatggattagcatgagccacaactggggggcttcttatcaagcatttgcaactctaggtggccaagctctttctttccgaattacttcatacaccaccagggagactattattgcttggaatgttgctccttccaattggaacgctggactaacgtattccacaacgttaacttccg

SEQ ID NO: 121303 - DNA, 493 bp, Glycine max
  Clone ID: PAT_MRT3847_80543C.1
tacggctgcgagaagacgacagaagggcgatgtcaaggagtcgccgaatgtgtgcgacagcgagctcttccgtgtagtcctctgataaaagaaacaccaaaatcagtgagtgagtgagtgagcagtgatcgtctacagaaggttcaggtttagcggtgttcgttaccttggacgatggtcagatggcagggtttcaaggatacgatttccaccgtgtctttcagcctcgtgcctcgcacctgttcaagtcattctgttagccgtttttccgttatttttttttttttgtttaaatgctcattttggtccatcatattttaataagtgacaatttagttcctaaacaaccagcaattctgactcagcctctagatacgtataattatgttttgcccccaaaaactttgggatttatcttgtattaagttataattttacatatttttgaaggattaaattgacacttaaattgacaccttcttatattataaaa

SEQ ID NO: 121304 - DNA, 760 bp, Glycine max
  Clone ID: PAT_MRT3847_80544C.1
gtgagacacaacacaagtcatagtccattggtaatggtatggttagttagttagtgagtggaaaatgaagtttggtttggagtttggacacactatcttttttgtttggtggaagcttcataacttgtgccagctaaccccattaaattattcttttgctgagaagtcttttcttttttctttttgtgcttttccttccttctcaattattttatgaactctaactcttaactctgtctgcttcattccactttggccctcactggaaaatgagtagtagtggtacttaaatgccattaaaagttaagtgatcttttgaagtatgatacaggtggtgtgggtgtgatctatctatctacaacccctggactttttatcactcttgttttcttgctttgtcttttgatgattgggggttatcatttaagacttaggagtttgcacaaagtacaaaaagcagataaatgatgccccttactgcggaaaggtgagtggggtgggaactgaagttaaggagagaatctgagaatgagtgctctctcactctcacaccacatgcacatgtccctcttatacctttactcatcatttgctgcaattttttacaagtcttctttttgtcccattgtggccttttttagtcctctttccatttccattgagatccacagaatgattgtttttcccactgctgcttctttccagggcatgcctgtgtatctttgggggttatatagggtttttggctgagcagcaattt

SEQ ID NO: 121305 - DNA, 543 bp, Glycine max
  Clone ID: PAT_MRT3847_80545C.1
ggaaaaaaaaaacagtttttacccagcaaaggaatatatcagggaaaccaaaactaaacccgcgggactagaacggcaaaacagttggccaaataaaaaagttattcatacgggaaaccgggggccctaagccactaataacgaagcaaaaaaatctatcagggaactggggggggattacataaaaaaaacccccactcaaaaaggggtcaggacgggccttttttgccctattttatccccaaaaagaaaagaccaagttttcataacaggaaagctaaaaaaaaccgggtcagggaattatttttatatcccaaagggcatcggggtttaataggaaaaattaagaaaaacagctccccaacaacagactaagcttcagctttgggggaacatattaaaaacaccccagcccttcagtattggccaaaggacaaggacgttttttccaaaccctggtctcctttttacaggttccacggaaagcctctaactaggcgaggggagatacacccttaaaaaatctttcgcaacaaccttttt

SEQ ID NO: 121306 - DNA, 558 bp, Glycine max
  Clone ID: PAT_MRT3847_80546C.1
gcgacaccagcgaaaagaaagaaagcacccccaatggtaatagccttatagagggacaaaaaagtactcgaaatgaccccactggtgaccctattcacgctgagcccccaacctcagcgggaaaatctcggatctataaacccaagtaacgggcccggacccaatccagaaggtggccacgtagtgagtttttcttccaacaccattcaaatctcaaatataccattcaatctttattaatttcaacattattcttaggtataacctatacgaactgaccatgcatgcatgtagttccagtaagtctcaactcgcattattagtataaagatttaatcaattggactaataaatcaattattttaaaaaaataattaatattattatatataacattaaaatttttcatatatatttaatacatatataagtttatataataatatatttttttacattggtaatacggattgtaagagtatgaagaaatatgctctcagcggaaagaaaattcctcacgtaggacaataccgcaccgatgctgagcccagccgccca

SEQ ID NO: 121307 - DNA, 110 bp, Glycine max
  Clone ID: PAT_MRT3847_80547C.1
atgcagcgaaaacgaaaaacagagtttcaggagttagttcagaagttagttctgatgaacagtgcctcagagattgtgaagagcacagaagttctgaagcaacttctgag

SEQ ID NO: 121308 - DNA, 345 bp, Glycine max
  Clone ID: PAT_MRT3847_80548C.1
gacaggcaaacaaacaatttaccagctatacttgttccttttgagtgttagaagtgctacaatgcaagcaatggcagctactgaggaagatctgaagcttttgcctattgtgggaagcccagttgtgtgcacggtccagattgcccttcagttgcggggacttgacgacaaatttttggaagaaaatttgggcaagacgagtgatttgcttctcaaatacagccctgttcacaagaacgtcccggtgtctgttcacaatgagaagcccatagccgactctcttgtgattgttcgatacattgatcagacatggaagaacaaccgcatcttaccttctgatcctta

SEQ ID NO: 121309 - DNA, 752 bp, Glycine max
  unsure (1)..(752): unsure at all n locations
  Clone ID: PAT_MRT3847_80549C.1
cacgcgtccgagttttgtgagtctgaaaaagctatgagctacaggaatttagttgtagaaaaaattgtggaaattctgtcacttgacgatattactctgtctttttcacttaaagtggaagcattgttgaatataggcaagacgggaatgaaaaatatgctaacaattcttcaagggttgggaagagcagtatttgccaatctatctaaggtttatgtccatagaaatttaagatcttctgaaattgctgttcagcttttggaatgctattcttgccagttgctcccatggatccatgaaaatggaggttcagaggactttgtgatgcaatttgctgtggacatttggagtcaagctggaaattgcatggatttgagtaccccattcgagggaaagggtcttcttgacgcaatgatgaaagcgatgagactttctgtagggagttgttctgtggagagccaaaaccttataattcgcaaagcttacagtgtactgtcttcacacactaactttcagcttaaagaagttgaaagattaccactaactcctggaaaatatgacatttcccttagagatgaagggataatttcattatttgcatcagtagttattgcagtttgccctaaaacatacattccaaatataagagtacttgtgcatctatttataataaccctnctcagaggtgttngttccagttgcacaggccttgggttccatacttaacanattagtttcacatcaagcactgc

SEQ ID NO: 121310 - DNA, 245 bp, Glycine max
  unsure (1)..(245): unsure at all n locations
  Clone ID: PAT_MRT3847_8054C.1
gaaattgcgcataaaccgcgatcacaagccgctgcagcttaaaaccggaaacataagcaatctcttcatcatgtcaataatacgggcaatttcttactgaaattgggggtcagaaatcgttggggaatggttatcactctctgtgatggccattgactacgtgaatcatcttcttgtccacacaaattgcaaacagntgnatcaaggtgaagacttgtatgactacgtgacagtattacactgga

SEQ ID NO: 121311 - DNA, 348 bp, Glycine max
  Clone ID: PAT_MRT3847_80551C.1
acataaaatcattgctggtgctataataagtaataatcaaattgaaacagaatattagtgctccttaactccgagcatgcaagaaacagatgaaatctatgatcctcaccaaccacattatccccatatcatatgtatacaatatataaaaaagcaattactgcatgtacttttcactcctctctcttaacaagaacatgaagacaacttcttcatctctgcaatttccaattcagcacctgagattacatctatttttgaccctttaagagtggcaacattgttgtcagcattggccttcccattatcacattccaaggacctttttgagataaccctatggatctt

SEQ ID NO: 121312 - DNA, 292 bp, Glycine max
  Clone ID: PAT_MRT3847_80552C.1
atttccgggtcggccccacccttccgcccacccttccggcatgttttttttttaggaaggggaacctttttgtctaaagcaccttagggggcatccaacctcaaaccatggtggttattccaacaggtttttggttgcccatttagaggggctgcttaacccccttatgggcacctggggctccatcctcctttaaagaatggccccttttttctcatattggcctttttccatggccgaaaaaaaaaaaaatggtgtcctgaagattgtccagtcccaccattttattttt

SEQ ID NO: 121313 - DNA, 229 bp, Glycine max
  Clone ID: PAT_MRT3847_80553C.1
ccgaacccgtcgaccactcccactactcttagttttcgctctaccctttgggtctaaagccatgaccacgtctttacttaacatcaaccatcaccactatctcaaaatctagattatcttggggtcaactacaatgcacaacgctcccactggacttcgcggccttacctccatcaattggcacaaccgcaggaccactgctcatcttaatcacatttccacccacaat

SEQ ID NO: 121314 - DNA, 218 bp, Glycine max
  Clone ID: PAT_MRT3847_80554C.1
cgggtcgaggctgactctttctattacgctacctccatcgttatcatttttcacccttaacctaatctataggtgcgaggctctcgcatgccatcgtggacactcctacttttccccaaaactcctttacccattgttatggtgctcagctaaaacccttaattaaccctcgcccaattacactgaaaccctacttttacaagaagcctctatcgcgc

SEQ ID NO: 121315 - DNA, 232 bp, Glycine max
  unsure (1)..(232): unsure at all n locations
  Clone ID: PAT_MRT3847_80555C.1
cctcttgaaggaccgccttgatgccagaatgcctgaggnnngtagcaagaatggaagaaaagttgaattaaatctgaacttaaaattgcctgttaccgtttttagaaacccaatgattggagaaaacaagtctttttacttatgttttaatgtttttttgaatttttcgaaaatttttggaacactttgccttatttaaggtcccgtaatgtaattaattttcttttaatgg

SEQ ID NO: 121316 - DNA, 648 bp, Glycine max
  Clone ID: PAT_MRT3847_80556C.1
atggcaacaacaacaccctcaaaccgatcatcagaggcgtttgctctcatggcaatcctcagcactctgctttgcacggcggtggcggcgaaggagagcgtgtacgagatactccccaagtacggcctcccgagcggtctgttaccggacaccgtcaccgactacacgctcgacgaggacgggcaattcgtcgtcgttttggcgaagccctgctacatacagttcgattacttagtttactacgagaccaagatctccggcaagctcagctatggctccatcaccaacctcaagggcattcaggtccagcgcctcttcatctggttcaacgtcgatgagatcaaggtcgatttgcctccctccaacagcatctacttccaggtcggcatcatcaacaagaaactcgacgttcaccacttcctgctccggtcgatgaaattcccatgcttctcacggagtagatccagtttcatactagctgttgtatggcataatggaatatatgacgttttaacctgtcactgtccctctattgccttagcttatatctgtcaaagtgttaagactcgcaaaacccagtctggttacgttatattatatccacgggagacctttatgaacatgatattatgtacatatttaagttga

SEQ ID NO: 121317 - DNA, 1251 bp, Glycine max
  Clone ID: PAT_MRT3847_80557C.1
aaaaaatgtaacaaccattacggggataattccctgaatgcgaaacaggggacccgcctttgaaaatccctataattttaattaacattaacatggtagtaggctagtaggtagtatttgagtatgaaacaattaatttgaagttgaacaagatgagtaggagagaatagacagagatgaatacggtcagagaggaagaatgaggtttgtagcgagcagcgatcctctgcgggagcacccaggcacatcctggaagtcgctggcgggtagcgtctgggacaaagctccaacgaagaactctaacatgccggaatcctggtggaccttaattccggtaacagggagccagaggaagagtttctgggcctgaatccccgacacgtgcgagacggaaccgtaggtgagagtgccactgatttggctgtggtagtagactaattggtcgtcccagtggacgtagcagggggcatcgagctggacggtgaagaagccatcgtcgggggagagggtgtaggagaccgcgttgttgggaagaagaccctttgggaaaccgtactgagggagaacatcgtggatatcatctggtgctgttgtgcttaagacgagatctccatggaagaggattatgagtgctgagaacaatattagggtttgtgggaacatgtcttccctcggactcagacgcttcctagctcccttgtcccagacatcctcctttgtcaccgtgaggtcatcaacccacacccaagcaagaagcaacactccctcaccatcacaagtagggtcggaataagttgtctctacgatttgagccatggcaacaacaacaccctcaaaccgatcatcagaggcgtttgctctcatggcaatcctcagcactctgctttgcacggcggtggcggcgaaggagagcgtgtacgagatactccccaagtacggcctcccgagcggtctgttaccggacaccgtcaccgagagaccaagatctccggcaagctcagctatggctccatcaccaacctcaagggcattcaggtccagcgcctcttcatctggttcaacgtcgatgagatcaaggtcgatttgcctccctccaacagcatctacttccaggtcggcatcatcaacaagaaactcgacgttcaccagttcaaaaccgttcgctcctgccgcaaatccctctcttgcccaccttgccagttccttggttttaagcagtttctgcctaaatttaaagtcggaggtagccat

SEQ ID NO: 121318 - DNA, 1034 bp, Glycine max
  unsure (1)..(1034): unsure at all n locations
  Clone ID: PAT_MRT3847_80558C.1
tacggctgcgagaagacacagagcgagagagaatcgtaacagaaacggtcgcttaaaattaaaaccgagcctcttccccaaaggagacacagagcgagagagaatcgtaacaaaagcggtaaccggaataagttgtctctacgatttgagccatggcaacaacaacaccctcaaaccgatcatcagaggcgtttgctctcatggcaatcctcagcactctgctttgcacggcggtggcggcgaaggagagcgtgtacgagatactccccaagtacggcctcccgagcggtctgttaccggacaccgtcaccgactacacgctcgacgaggacgggcaattcgtcgtcgttttggcgaagccctgctacatacagttcgattacttagtttactacgagaccaagatctccggcaagctcagctatggctccatcaccaacctcaagggcattcaggtccagcgcctcttcatctggttcaacgtcgatgagatcaaggtcgatttgcctccctccaacagcatctacttccaggtcggcatcatcaacaagaaactcgacgttcaccagttcaaaaccgttcgctcctgccgcaaatccctctcttgcccaccttgccttccacgtccaattcagcttcctgctccggtcgatgaaattcccatgcttctcacggagtagatccagtttcatactagctgttgtatggcataatggaatatatgacgttttaacctgtcactgtccctctattgccttagcttatatctgtcaaagtgttaagactcgcaaaacccagtctggttacgttatattatatccacgggagacctttatgaacatgatattatgtacatatttaagttgagacttcaacttcatgtatgttgctgaactttcagttgctggtaaggtgtaaacgtgcttaataatgaatgccaaattagggtcttgctaaaaaaaaaaannnnaaaaaaaaaaaaaaaaaaaaaaaaaaaaaaaaaaaaaaaaaaaaaaaaaaaaaaaaaaaaaaaa

SEQ ID NO: 121319 - DNA, 824 bp, Glycine max
  Clone ID: PAT_MRT3847_80559C.1
atggctcgagcagagcgagagagaatcgtaacagaaacggtcactggaagttgtctctaccaccctctcagccatggcaacaattccccctagccgatcatcatcacacgcgtttgttgccatggcaaccttcacgactctgttgttgtgcacggcggcggcgaaggagagcgtgtacgagatactccccaagtacgggctcccgagtggtctgttaccggataccgtcaccgactacaaactcgacgaggatggccaattcgtcgtcgttttgccgaagccctgctacatacagttcgattacttggtttactacgagagcaagatctccggcaagctcagctatggctccatcaccaatctcaagggcattcaggtccagcgcctcttcatctggttcaacgtcgacgagatcagggtcgatttgccaccctccgacagcatctacttccaggtcggcatcatcaacaagaaactcgacgttgaccagttcaaaaccgttcgttcctgccgcaaatccctctcgtgcccccctttccttccacgtccaattcagcttcctgctccggtggatgaaatttccatgcttctcacggagtagatccagtttcatactagctattgcatggcataatggaatgacgttttaacctgtcactgtccctctattgccttagcttatatctgtcaaagtgtccgagactcgcaaaaccgagtgtggttgcgttatattatatcctcgggagacctttatgaacatgatattatgtacatatttaagttgagacttcacttcatgtgtattgctgaactttcagttgctg

SEQ ID NO: 121320 - DNA, 294 bp, Glycine max
  Clone ID: PAT_MRT3847_8055C.1
tgggacacacagtctcttcttcttgcaattccttcctcgttatggagtcccgagtgctgtcactcgccgtgaacttgtcctccctggctcaggtccggaaggtgccgcgggaagacgtctcgatcgtctccctcgctctccgtgaatgacgtgggctccgtctcggacggcagaaacatgatttgggggaagcagcttcactcggatctctgatcaccagtgctgaagagtgatgctgtcctcctccggcaatgctactccgcagcctcttcgcctagcacgaaggtagtgatt

SEQ ID NO: 121321 - DNA, 171 bp, Glycine max
  unsure (1)..(171): unsure at all n locations
  Clone ID: PAT_MRT3847_80560C.1
tccacttccacattgcatctggtnncnttnntcttctactatagctatctttcattctctcnctagctacacacaacctctgnatattctccgcgcgcgcttacgatcgatgctatnatagtgttccctanctacctnatggcncnctcttcatcncaatgcaaatgcttc

SEQ ID NO: 121322 - DNA, 156 bp, Glycine max
  Clone ID: PAT_MRT3847_80561C.1
gacctccctctttcttttgttgggaacatccgacctcatgcattcgttgataaattgccccttcacctttcattttcattgcaatctcgattcccgtcacaccaactcaggatgattaattctcagacatcccatgcaaatgggaatgggccttaa

SEQ ID NO: 121323 - DNA, 178 bp, Glycine max
  Clone ID: PAT_MRT3847_80562C.1
cgaaccaaaacccttcattggtttcaccttaatagtggttgatttggtggataaattggtggtgaagttcttgtatgattctttactgccctatcactatctaactgttaattttgctcccgtgagttagacccctcctaccaatgaccttcctgtcaatggataccttatgtcttgt

SEQ ID NO: 121324 - DNA, 293 bp, Glycine max
  Clone ID: PAT_MRT3847_80563C.1
aacgtgtaccctggtctccaaccctcttcaactcaacagcatctccaccacgcattcacggaacgttgccgatcaggcgtgtgatcccagtggcctgggacgatgacgagagagccactgggtcgttgccttccaacacacccgtggcttcatgtgggacgcaccacacactgtcgcacgcatttacagcaacaagttacacgcgtacttcgccaagacgcctgacttcggcaattgatgtatattaatccaatctcattgcactgctatagcaaagacttggttacagtatc

SEQ ID NO: 121325 - DNA, 686 bp, Glycine max
  Clone ID: PAT_MRT3847_80564C.1
gaagagctgctttaatgcacaagaggttgcagtgtttttgaggaagattggttttgaaaaggatactacaatctatgtgacacaatcaaggtgggatgaaagcctagattctcttaaagatttgttccctaaaacatatacaaaggaatccatcattcccgcagataaaaagaaaaagttcctagactctgaagattctgagttggagaaagtgattgacttttatattagttctgagagtgatgttttcgtaccagcaatatcaggtctattttatgcaaatgtagctggtaagagaattggctctggtaaatcccagatactggttccggctaatattccagattcatctgcttctgcctccagtttcttgtcccattatgtctccaagaaaaaccactttgcctattcttgttactgttagttcgaagtgaagacattcgtagcatccagtagcaaatgttgtgtactaattgtcctgaatgatgatgctttccaaaatgtaccctttcgggaatttcagttatggcctaaggcttcttgtttgactgttcaccaaaaaaattgaagttactgtcatttgacatgtacacagggctttctgaacggatatttagtttgtaaaattatggttgcccccatatttatttttcataactggtgaaaacattgataggccatttatt

SEQ ID NO: 121326 - DNA, 1971 bp, Glycine max
  Clone ID: PAT_MRT3847_80565C.1
ggctcgagctgagcttatagatcccttgtttacacttacaaactagaactaggagaggagaccataattgctttcaataaaaatgctttatagtttgaacctcttctgcaccggttattgattgacttcaatatctgaacttggcagtcacggctgcgagaagacgacagaagggggacgtaagattttagtattgtcaggggtagtgtcggtgatgaagtaactatgattaaatatcctctataactattaacttccatgtttcttcatgattcacttctgctttaagtttgtggctttctactttctctttctagagtaggactaaactcatacactgatcatgggagtggatttaagacaagtggtggcgggtgtcctcaccctcacaatgttcgtcatgcttatacacatgatcaaaagagaccattttgatgctgttgatgataaacttcctggaacggaggatgtcagctttgaaagtacaaactttgatactactcatgttagaaagaacatcgggatttggaagggagatggtgatgagttaaaaccatgttgggttaagccatctgaagataatgtggatcagactgaggggtttgttaccttttctttaaccaatggcccggagtaccatatatctcagatagcagatgcagtgcttgttgctcgtagtcttggggcgacacttgtcatccctgacattagaggaagccaacctggtgacaagaggaactttgaggacatttacgatgtcgatgtgttcatgaaaagcatggaaggagtggtcagagtgttaaaggatcttccttctcatgtatcaacacataaaattgccgccgtgaaggttcctaatcgggttacagaagactacatagctcaacatgttgaacctatttatagatcaaaggggagtgtaaggcttgctacttattttccttcaataaacatgagaaaatgcaggggaaaaaagtgatgctgaatgcagcaagaaacgcacgaacttgttgactcaatgagtgacagaatgaagactatgagctggatgacagaatggcagtaagtcgctgtagatttgggggaaaggctgatgactaagaaaggtctctaagtctgtgatttgagatgtgggaaaagcagggttgacaaggaagagatagtgaaaaagagaaggaatgattcaatgcgaaaaggatactactatttttgtgaaacaatcaaggtgggatgaaagcctagattctcttaaagatttgttccctaaaacatatacaaaggaatccatcattcccgcagataaaacgtatacgaaggaatccatcattacagccgatgagaaaaaaaggtacctagactctgaagattctgagttggagaaagtgattgacttttatattagttctgagagtgatgttttcgtaccggcaatatcaggtctattttatgcaaatgtagctggtaagagaatcggctcgggtaaatcccagatactggttccggccaatattccagattcatctgcttctgcctccagtttcttgtcccattatgtctccaagaaaaaccactttgcctattcttgttactgttagttcgaagtgaagacattcttagcatccagtgggtaatgttgtgtaccaattgtactgaatgatgctttccaaaatgtaccctttcgggaatttcagtgttatggcctaaggcctcttgtttgagtgttcaccaaaaaattcaagttactgtgatttgacatgtacacagggctttctgaacggatatttagtttgttaaattatggttgcccccatatttatttttcataactggtgaaacaattgataggccatttattagggttgtcttagataaaaaaaccatttaggggagggtattgatgtttcaaaaagcaaataaacatgggcaatggacccaaaccaaaaaaaagaaaccagagtttttttttgtccc

SEQ ID NO: 121327 - DNA, 181 bp, Glycine max
  Clone ID: PAT_MRT3847_80566C.1
tcacttggattctatatatgctgctgttgatgcacattcttagaggtcctttaagttgtttgatatggctttgaggtactccaatgcacacctggaggaagacccaatctgacacatgcacctttcatactctgtctatacccttatggagcgcaatctttgcagattgatcagagccttt

SEQ ID NO: 121328 - DNA, 1652 bp, Glycine max
  Clone ID: PAT_MRT3847_80567C.1
tcccgagccctgtcggctcggcgcgggccccgttggatggatgttcattttccgagtgtgttgttggatggatgttcattctccaacttgataccgcgttcgctcactctctactcaacttcaattaatcaaatccctcactttctctctcttgtcttcaaatctcaattctattttggaaaatcagaatcaaagacagttaaaaatacagaacaaacatctcactcaacatcaacacttcagatctacgtttccactctcacaacaacgaaaaaggaaagaaaaaccgattctacagcgacaacaaggaacgaaagaacgatcgatttctcgaagcgccctcaaaatggcgcgtgcacccttcacttctttccccttcgtcctcattatccttctgtcaatcgtccacctttcgcactgcaagaccctcaaacgtgacgttaaggctttgaacgagatcaaggcttcgcttgggtggagagtggtgtatgcgtgggtcggtgatgacccttgtggagatggggatcttcctccttggtctggtgtcacgtgttccactgtcggtgattatcgtgttgttaccgagcttgaggtgtatgcggtgtcgattgttggaccttttcccactgctgttaccagcttgttggatcttacacggcttgatcttcacaataacaagttgacagggcctattcctcctcaaattggacggttgaagcgtcttaaaatactaaatttgaggtggaacaaactacaggatgcaattcctccagaaattggtgagcttaaaagtttgacgcatctgtacctaagcttcaacaatttcaagggagaaattcccaaggagctagcaaatcttccagaccttcgctatctatatctccatgaaaaccgtttagctggaagaataccaccggaattgggcacactgcaaaatcttcggcacttggatgctggtaacaatcatttagtgggtaccataagggaactcattcgtattgaaggttgctttcctgcactacgcaatctgtatctaaacaataattattttactggaggaatacctgcacaacttgctaacctaaccagtcttgagatcttgtacttgtcctacaacaaaatgtctggagttataccatccactgttgctcatattcctaaattgacatacttgtacttggatcacaatcagttttcagggagaattcctgaacccttttacaagcatccatttttgaaagaaatgtacattgagggaaatgcattccggcctggtgtcaaccccattggtttccacaaagtgcttgaagtttctgatggagacttcctcgtttaatgaggctctaaatatttatatatatttttttcttcaggaggtgtacttgtataattattgaaacaatcgttcctctaattatctcaatgaaatagctaaataggtaattcaattttgtctaaatctatcttgtcagagtaaacagttgttttaagtttgctattttaagagctttccacgctccaaacagttgtattattgatagtcttgaactcttgatatcagcttcaaaaattgaggaatgatattacatattttttcagtgaaaagtaatattactgtgcaaaaaatgaaaaacttaaatatgattttaatc

SEQ ID NO: 121329 - DNA, 603 bp, Glycine max
  Clone ID: PAT_MRT3847_80568C.1
aacatacaaaagtaacgcttaactatgttaacaaatatcatggttcacaccttcaagtggaaattctcactcatgtatatagtgtaaaaagttagtaagaaaaagaagaagaagaagaagaagaacagaagtcttcataattgaggaagactgccctgaatcagttgtatcaactgttaccatgctgcggcagatgatgctcttgttgtctttgtaagtgatgttgtccttcatcttcctgtccctgttgttgcacatgctcacgatgctgctgctgtgtcctgttaacattctcaatggaggattgaacccgcctgctagttctccatccaatgaattccataatgagagaattcatactgactgcaatcccaaatccactgaatgaggaaaggagaatggagagaattgcattaaaattgagaatagtataaaatacatgagataacaggatgagaattgcaaactggaagcaagcataaacccatacgaaactcctgctcaccatggttgatgcaatcatagataaaggagacctaaacacggagatggtatgaatgcaaagctgaatccaattgaactgtaacagagtgcttaaaacaa

SEQ ID NO: 121330 - DNA, 606 bp, Glycine max
  Clone ID: PAT_MRT3847_80569C.1
ggctcgagctgtcgccccctttctctctctaaatccctttctctctctacctgactcaaattcgaaattgggaaagaagtggggcgagggcattttggtcatacttgctatgctaaggggaagaagggtgaactcaaagaccagcctgttgcaattaaaatcatttccaaggccaagatgaccactgcaatagcaattgaagatgttcgcagagaggtgaagatattaaaagctctatctggccataaacatctcgtcaaatttcatgatgcttttgaggatgccaacaatgtgtacatagttatggaattgtgtgaaggtggggagcttcttgacagaattttgtcaaggggaggaaagtattctgaggaggatgccaaggttatagttttgcagatcctaagcgtagttgcattttgtcatcttcaaggtgttgtgcaccgtgacttgaaacctgagaatttcctctacacttcgagaagtgaagatgctgacatgaagttgattgattttggtctttctgacttcatccgaccagatgagcgattgaatgacatttgtgggagtgcgtattatgttgcacctgaggtccttcacaggtcatat

SEQ ID NO: 121331 - DNA, 249 bp, Glycine max
  Clone ID: PAT_MRT3847_8056C.1
tagcacttccatatcctatgtgctgtgttgcccattctagataagtgcgagagagagatatagtgagtgatagtggacaatatctcagcagttgtcggtgctctctattgcagtctctatcgtcggttatgcgatcacgcgctcagaagatctttgctgtcaagacttagcgggaaggtgagtcctagatttacatcagactctcttttagcacgtatccctctaggcaatgcatggggttaagtctca

SEQ ID NO: 121332 - DNA, 762 bp, Glycine max
  Clone ID: PAT_MRT3847_80570C.1
ctgagtttcaacactagactcagtgcagtgttactcaatgcattagcttggtataacataaatttgaacaactatcaattaatatacataactacaccttattactatggtagtgaacaaaccatatcccaattatcatataattaagcatgaatgtacaacctgatcaaagcataagagtcatgaactaaatataaagatgcccaactccctaatatgttagttgttgtgagcatactgtctgcaccaaagtcagtcatgaaagagtaagtacggaccacacttggtggaccacacatagattattatagggagttgggtttgttacaatctagaacgggctatggtatgcagtggctagaatgtgctgagaacttaatgcagaacaactcaatccctcaagaaaatttaaggttatgttgtttgattttttggcaaagtgagaggattcaactacaaccaagaaatgaaataaaataaaacatcgatatttttctggcataagataagttatgatttgggtgtttggatgtaaagaagcatgcagaaaaggcacaataaattgctttttgattcttaaagtacctgtagaaggaagcaaggcaagttaataataaattaaacaagaaaatacccgatttttctttcctttaatggcagtatgctagtgcatgacaaatattccagattgcaccaacagttctagagaacatgcctttcaacatcacacaagccataagaaccttcccggggcaaaattcc

SEQ ID NO: 121333 - DNA, 290 bp, Glycine max
  Clone ID: PAT_MRT3847_80571C.1
aactaaacacggtacatctaatatttaagagctaccaccttgcaatgaaacaaaacaattttttttgcctaggtccaagattttcggaaggctaatgcttacccaagcattagttgtaaaggaaactggataataacaatagtcccgctatatgaaaaattcagcctagctgaattacaaaaaaggaccagtgttttgaaaaagaatttttatggacatcaagaattgattaggtaaaactacacgtttagcaatagacaagtgacaagaatcagtgacaattatactga

SEQ ID NO: 121334 - DNA, 224 bp, Glycine max
  Clone ID: PAT_MRT3847_80572C.1
cagatgcaaaatgtaacaagtgcaaccagatagggcatgaagcggtgatctgccccaacaaaaatcaccatgatgagggagctcagattgctaatcaagaataagaggaccaactgtttgtggccacatgcttcttgagtagtgaatcaacggaaagttggttgattgatagtggatgtacaaaccacctgacatatgataagaccttattcaaagatctccaa

SEQ ID NO: 121335 - DNA, 340 bp, Glycine max
  Clone ID: PAT_MRT3847_80573C.1
ctcacgcgttcggtcacgcgttcggcagacttaatttgcaagtacgaccgaggctacacgcgggaggcggcacatactgcacagaatggagcccatcgacaactacgacatctcagaaaggtgtgtcccccgacgtcagagactccgcgaagcaaaccatttccaccatgcttggattggtcccatgggaccacttttctgacatagacactgtatataaacaccctctataccgactaatctgctcctgccacaagacaaggtgaatacagaaacaatgtgaattatgacgatcattctagtggagtgcctggaacatatcgagaatcgacgacgacgt

SEQ ID NO: 121336 - DNA, 223 bp, Glycine max
  Clone ID: PAT_MRT3847_80574C.1
tttgcaacttgatatgatttcatcccactgaaacttttggaccttcacatattttcaagtttttccaaccaaaaaacttgtgttacatctaccctaacatattgacatgaccagtggaccactatggtgtaaaaaagggcttaatttcaacgggctcctttttgaagctcctctcccaaaggttagaactttatttcaaagtcccattttttaaatcaaaccc

SEQ ID NO: 121337 - DNA, 500 bp, Glycine max
  Clone ID: PAT_MRT3847_80575C.1
gtacgcaagcttttaattcggctcgatgattttggttatttgcatagttgttccctccctcagaatttgcgtagcaaatgattctataaacgtgctccagtctatgagtgatggggagagattggtgtcaaaaggtggaaattttgaacttgggtttttcagcccaggtagttcccagaaacgttatgtgggaatttggtacaagaatatcccaactcagacagtggtttgggttgctaatggggcaaaccccatcaatgattcctcaggcatcttaacactcaacaccacaggcaatcttgttctcacacaaaatggttctattgtgtggtacaccaacaactctcacaaacaagcacagaatccggtggtggagctcttggacagtggcaatcttgtcataagaaatgatggagaatcaaacccagaagcgtatttgtggcaaagttatgactatcgccttcatgcactcttgccaaggatgaaacttggcagacacc

SEQ ID NO: 121338 - DNA, 179 bp, Glycine max
  Clone ID: PAT_MRT3847_80576C.1
tccactcgttctctcacaccttctctaatgacgaaaatgcacagacacgaatcaaccatgttggctcggatgcttagataggtactcaagtgagctctttccgacatagcaggtaacagggacgaagcatgtacgctagagttcgcatggtcgaagaagaccataggtgtcgagaaaca

SEQ ID NO: 121339 - DNA, 252 bp, Glycine max
  Clone ID: PAT_MRT3847_80577C.1
ctttttaatccaattttatttcatcaaaaatctacccaatatatggggcgggataatttcccatatgcgtctaatttttgcaccaatagctagcaatcataattcccacgtgatacaaaaataatgggattggtatatggtgccaattaattacttttagctccattagacactatgattggattaatagccttattcagatacgtacaaaacctgtcgaatttgcaatggcttgcgctcattcttacggat

SEQ ID NO: 121340 - DNA, 268 bp, Glycine max
  unsure (1)..(268): unsure at all n locations
  Clone ID: PAT_MRT3847_80578C.1
aaattcgtgtttttttttggatttttgtgggaggcccatacaaaacaaccaaaccggtagaaataccgaccgttattacgacaaatgcccggtgaaggcacaaacacactcctagggctgggcaggncctgggttcgtaatggaacaaatgaaggaaagggaggggggaaaaaattttgctgttttacanngangncgaggaccaaaaccgggccaaaggcgggggccccacccagcaccgcggcnaaaagacaggaacccgaccaag

SEQ ID NO: 121341 - DNA, 279 bp, Glycine max
  Clone ID: PAT_MRT3847_80579C.1
tcaatgatatggtctatcaactttcctaatttgatacttctacaagatgttctgttttttgatagattaaaattcgctcaaaaaaaacgcgaaaatattctaatcgtaacttataggattagttacgtagaaaatgaatgatagattcatattcccatacatataaattatatatgaacaaataaaatcttggattacttcttgaaaataaagtataaatctatttttttggagtaaaaatactattccaattatcataataagaaaaaaagtataatt

SEQ ID NO: 121342 - DNA, 525 bp, Glycine max
  unsure (1)..(525): unsure at all n locations
  Clone ID: PAT_MRT3847_8057C.1
aaaannngccannaccatgatgcccctcgatgaagaaattctttctaaggttgcacaagatatggttgaggaatggcttgattgtgttgatgaggaggattcctttgaggaagtttctttaaagtgcagcactcaatggtgtcgagggtttggactatatggaaagaattcctcttgccacatccttatggttttcctaatgtgctttcacgcaaaaatggtgaataaggcaaaaggagatttgtttctggggatggcgaagagatgacattgaatcccgggacccactgttgaagaggcttaccacaagctaattgttgaacttgagaaaagtgttcctcattggttggcatgaatgtcccaaggtgagaaacttccttgtgcaaatttttgacaaacctaagacccgctgtttcactatcttcctttggaagtaaatctggggtccgccagaagatttaaaatttgcgaggttctttttaaaaaagggccagcttagtttcaagttggaacacccacctccat

SEQ ID NO: 121343 - DNA, 288 bp, Glycine max
  Clone ID: PAT_MRT3847_80580C.1
ccattcttgaacaacatgccaacatcaggtgtgtacggtcacgcatggcaatttgtaagaaagatgtttggagagttgaatgtggaatcccttctggatttccgctcacaggtatttgtaatagcatttttaatgagatgctcattagatatagctatgaaaaattactgcgccaggagagacttgttcaggtgccaagcatgccacgccgttttgatgcatccttcttacggtggagaacagacgactgtgcataatgtgaaattactcgaccaggattgcctccac

SEQ ID NO: 121344 - DNA, 2373 bp, Glycine max
  unsure (1)..(2373): unsure at all n locations
  Clone ID: PAT_MRT3847_80581C.1
cttttattctccgtctctctactctcttattctcaacgtcaaacccaaaaccccttcttcttcttcttcttctctcgcgccgcaataataatactaaaacatgtccaactctgatggagccactaacgccgtccctcccaacgacgccaacaacaacacaatcgttgagtaccagcagcgaaccaccaccaccaccaccgccgccgccgccttttgtttggagaaccctatcgcacagacaccgccattgacgggaaatgttcacatcagatcgttcctgaaaaggtcaagaaaggattagggggaaaaaggtgaacgccgaaatggaggcagtgcaggccatacgctcaagttctctgagtaaggttctccaacagacgcccccctaccacgcacctgcacacccaccgaaaaccccgtaagacagggtcgtccagcaccccccggctccttacgctccattgctttcacttccttcacatgtcgaactccgacgccaccagcacggaccgctatcggcgcaatctcagagacgcagagacagcacaggcaatagggggggaaggccttcgccgtctaagaaaccgccttcaaaggatccgccacagcaaggtcgacggccgcgggcgccgcattagcatgccaatcatctgcgccgcacgtgtgttccagctcacgcgcgagcttggccacaagtccgacgggcaaaccatcgagtggctcctccgtcaggcggagccctccgtcatcgcctcccccgccagcttttactctgtttcccttggctgcaacaaaagatgttctgccctgttctcatgctccgcccccaggccccagcaactcgctcccactcccttcatcctcggcaagcgcatacgcaccgacgaagactcttcaaaagacgaagatggttcagtgggcccctctctcgtggggccgtatgcccctcccggaccaggggtcgtcccggcctggcccgatttcggacaaatttggagttttgtcgccgccgctgctgctcccgaaatggtgtcggtgccgcagcagcagcagcagcaggcttcgttgttcgctcatcaccaccgtcagcagcagcagctggccatcggagaagctttggcggcgagggtgggaaattaccttccgggacatctgaatttgctcgcttcattgtcaagtggacctgggaattctggtcggagagacgatgagccgtcgttgattgtgacatctcttcaacggtggcggtgaggatggttgtggactgtggtggggtggtgactatgcaaagaatgtgtttttttttcttcttctcgtgttgtggacttgctttagttgtgtgtcagccaagcaagagattcttaaggatatgttttgatcaacctttgatttatcttacattgaaattagggttttttgttttacttctgctggtttggaaaacttaactaggtttttagatgttggagttttcaccttggttcccgtgattttttttgattctggtgctgtattggaagagaggagtatgaaaaagggagaatgtaatgaacggatgatttaatttgtgaaattgtgatggagagagagagttgggagcttccggttggtggaagagtgggagtggttcttcgatgggtctggagaggatgagcgtggagcagctgaaggcggtgaaagagcaagccgatctggaagttaatcttctccaagacagcctctccaacattcgcaccgtcaccacccgcctcgagatcgcctcctccgccctcaacgatctctccctccgcccccagggcaaccacatcctcgtccccctcaccgcctccctctacgtccccgccaccctccacgatttccaacatgtcctcgtggacgccggcaccgctacttcatcgagaaaaccatgcccgaaggaaaagtgttgtgggcacgttttatgagattgcggttcttgtaaggtggtcatgttgtgaatttggtgcacctgcgggggacttatgctctctgaccctatctcctccactttcacactccttgatggtctttgttgttttcagaaatgactggtgagtgaaagatgaaaaaaagaagaagaaagctctggttgtactccgtatgacttctgttttgagatttttatcttcaattcttagccatttattagattgatcagcgtgagaataatgttttcttgtatgtaagtggattgttttgggtgccagtgatttgaataaaaaactcatcttttcttcaaaatacattatctcttattcgagaagactgttgctgttcccgtaagaagaatcaattatttcagtgtgctttctgttcttaaaaaaaaaaaaaanagannnnngaggggtaagggga

SEQ ID NO: 121345 - DNA, 293 bp, Glycine max
  Clone ID: PAT_MRT3847_80582C.1
gtgctctctactcttttcttcctaacatgtttttctctcttctcacgcattgtttctctctcttaaacagaccgaacaacccgcgacggaggctccgacccgaatcggacgagtcgactccagctccgaacactttcaggtgcttgtgcgccaatcgcatttcgctcccattttcgccgatttttcttcttctcgttttagccattgacgccgaatctgtgagtcctccatttccctttcgattgatgccgcaatcgccctggacgaagctcccaatcgttctctctcttttt

SEQ ID NO: 121346 - DNA, 375 bp, Glycine max
  Clone ID: PAT_MRT3847_80583C.1
ggccaaataccctgccgggatttatatggctttcatctctttgaccttctcaagaatgatcaaatttaacgttctcccggtcaggaaaacccaaatctttaatttttaaacacaagcatatcagattaccgtgattataaaggtcacacagattattcagaaacactaacaatcaaaggattccttgctacttaaaccatcctagaaaataattgcaaagagtacacaggttaatgtgtccacaactccgacatgaatcacattccactgactgtgccatttgtacactctaaaccaattttatctttacatttaatgcattgcacaccaaattgcaagattctttttgtgtgtgtttatcaagacatggtaact

SEQ ID NO: 121347 - DNA, 320 bp, Glycine max
  Clone ID: PAT_MRT3847_80584C.1
cggtcccggaaattcccgggtgcgacccacgcgtcccgaacctattgtactatacagctctctttctatctctgcaccagatggcagcacctgcgtacctcgagcaccatgtgtcagaaccagcagtctgtcattgtcgagcggcaaccaccggtgacatattaatcaaccggtgtagcgcccacacgcaaatggggcctcacaggctgaagcctcaattggcatcgcccgaacagtaggcccagatgaacccgactaattagaagcccgggcgatcaaggaagcactcccctgccgagcaatgactcgccgagaagaaa

SEQ ID NO: 121348 - DNA, 623 bp, Glycine max
  Clone ID: PAT_MRT3847_80585C.1
gcagaggagaatgacaaagggagcttattaatttataaagcatgcggatgttcatagccttagcattaacattaacattagcattagcattagcattagcatcctctttccttgatagacaacaaaaacaataccactagatagttgttctgtaattcaagacagcaagacatcaaacacacaaaacagatataatttctcaagcaacactcactgtacatatgacacttaagccccttgatgcaattttgctttccaccattgatgaacatacacaccattgcttctgagacctttgtaaatatccatgcatcgttccctgctgctcatagtttcgctttcaccatttccactctccgagcaactaagaaacaactcatcaacagagcatatagctccattctcaaatatatccgataggaattttatttcagcttccccagcattcatcttcagaaccacaaaatcagcatgctgcacagtttccatgaaccacactaggaaatcaaactcttcctcacccaaaaaaggttccatttctccatccacaccactctttgtgtgcaatattcccagccaaacccggatgataaataaacgtgacacgagggccgtttcacata

SEQ ID NO: 121349 - DNA, 376 bp, Glycine max
  Clone ID: PAT_MRT3847_80586C.1
atttagtggaaaagaagatgcagatgttgtcacaaaacagaggaaatcagggtatcttacaacattcttgctgtgtaagagaacattttttgggccaaaagggtaggaaatcatgatagatggtaacatgtgaatcatactgccgaccaattagatgggtgcttggttgaattcattgaattttattctgtagaaatagtcgtttgagaaagtgattattttgcataattaatttgatacgcaagacccacggaaatatgaacggattgttcaacactccaacctggtagaaaatgaatccttgtaagtccaaaatgtgtgtttgacttttgtaaactcccaacctaaaattggtgattgttaattgtgtttgttt

SEQ ID NO: 121350 - DNA, 506 bp, Glycine max
  Clone ID: PAT_MRT3847_80587C.1
tccagatcttgcaaaaaaaaaaaaaacacaagtggcgagcgatgcgctcccacctccacagcgaaagagttctgtgtacactgtgcgaatcctggcgggagcacggcccgagccgctacgagagagataggtgggagttcattggagaaggtgctcccgcctccgccggagagcagatgagcctgacccgtgggaggaggcgcaatccttcttcttcgtgaggctacaatgaacagtaattcgggagctccgcccgcgcgcttcctgagcgcattcatcttccttcacttgagcaaaatggagagagaggccgcggcaatcgaggaccacgtcagccgtcattccgtgactaccgctgccaagatcgagggccgagctctccaacatctgcgacggaatgctcaagctcctagacacgcgcctggtcccctccgccgcctccggcgactccaaggtcttctacctcaagatgaagggagactaccacaggtacctcgctgagttca

SEQ ID NO: 121351 - DNA, 291 bp, Glycine max
  Clone ID: PAT_MRT3847_80588C.1
accacgcgtcctgattcacttgctggttgaatccggcctctcactatcgacatcatctcgagagatcactgttgatccataacagtctacaataccttattatgagaagcctgcgacgacatacgtaatcctatgtgcaccaaatatctgattggaccaattctacacgcataccttgacttcatatgctcaccgatccatccaatacattctccttagacgattcagcaatcgttgctgctctacctacagatgcctcatattgtgccatattgtctacatccactttct

SEQ ID NO: 121352 - DNA, 470 bp, Glycine max
  Clone ID: PAT_MRT3847_80589C.1
acatgagcatcgtcagctatctcgatcgaactgccaaggtcctgcctctcggtggcgcgtggggatagtacagccacgtgtacgcaatatctatgcggcgtaaacgaacccgtgatgccagttcacatacgcatttacggacagcaacgggtgcagcagtacaattcgtatagtagcaccaagcggaaccattcgcacacaacacataggtgatttgatgcacgtcaacccaactgacaaccgcgtgtgaacacccgtgggtgggtggcagtgggaccgacggacgtcgctgaaaccggagcgtatttgagtggcgtggccagtgaggggtaggtcaaggagcctggcacggggctgcggggcacgtgaactggtaacggcaacgagcggggcctggaagagagcaggggaaggagcgtggcacggggccaggaagagcaaggccgtggtgagagacgcagaggttgctg

SEQ ID NO: 121353 - DNA, 384 bp, Glycine max
  Clone ID: PAT_MRT3847_8058C.1
gaaacatctaagtgagatacacagtttttaggtagcaagcgtgagtgggtcaccttcgagacatatcagctacatatcgggcgcatatgggaattgcgccactaaaatactgttcatagatgggcggcttagctaatgctgtgcagacaatccttgcaaaccctatgatccgcattttcagtgggtctagggagaaccatattggcgttgctgcttatcacatgaaagggaatgttggccggaaagttacgtccatggctgaagaaaaaccaccaagatctgctgcgaccccagttgcaccacacaccagcagaacccaagccacaggactgactctacttcttcagcaaaggagatcaccaagctttctgatgtgttggcttt

SEQ ID NO: 121354 - DNA, 500 bp, Glycine max
  Clone ID: PAT_MRT3847_80590C.1
cagcaatcggcgaagacagaagcctaaacggtattcggagaaagagtttgttgaagcactgtcggataatgaggctgactatgacagcgatgatgatattgttggagaagccgtgtatgatgaagagtatctccagaaacgtaagcagagaaagaaggcttctagtagctctgggtctgaaggagatgaagaatatcattgggatgaagataatgttgaagatgaagaagacgatgacgaagattccttgagtgccagtgaggaagtgacaagccccgtaaattcaagcaactggcaggccgtactaggaaggaaactaaactcaggtctgtgggtgagattcaatcaggtctaagacgtagtaagagggcaaaaactaaaagccgtataaattaccgaggtacgagatatctgattcagagacagagttcattaaatctgacaagtccaatgcatcagacgatcactcagatcctactgagaatggggagtatatgatg

SEQ ID NO: 121355 - DNA, 153 bp, Glycine max
  Clone ID: PAT_MRT3847_80591C.1
cgggagtcaaatgataccgacatcccaaaccacatgggtgtgctctgttgaccgaacagggtgacgaacaaccgctaaccaccgtcgcattgctgttgaagcagagtcataactctcatctataccttgatcgccctcttcctatcaatcaga

SEQ ID NO: 121356 - DNA, 1502 bp, Glycine max
  Clone ID: PAT_MRT3847_80592C.1
acgatccatacccatatcatatcgcattcttcaaacttactgcattcaatttctctctgtctacaacgcaaaccgccacacacacacacacacaaagagaacttttcagcttcactcttcatttcagttcaattttaaacatgctttgcgtcaacactgccttcacccagcttcactcttcaattcagttcaatttcaaacatgctttgcgtcaacactgccttcacctctttcttacccagaaaatcaacttgcgtcttttcctccaaatcaaccaccccaatttcctgcaccctccaaggaacagttgcagaaccaaaatctacagctgctggtgaacctcttttgctaaatgcagttcgtgggatagatgttgaaagacccccggtttggctcatgaggcaagcagggaggtacatgaagagttaccaaaccatctgtgagaaatatccttcattccgtgaaagatctgaaaatgttgatctcgtggtggaaatttctctgcaaccatggcatgtttttaagcccgatggagtgattttattctcagacattcttaccccactttctggaatgaatataccctttgatattgtgaagggtaagggtcctgttatatttgatcctattcacacagctgcccaggttgatcaagtgagggagtttattcctgaagaatcagttccatatgttggtgaagcactgacaattttgaggaaagaggtggataataaagctgcagtccttgcttttgttggggcaccattcactctggcatcatatgggtcctgcacgctggtccatcaaaaaacttctcaaaaataaagagattggctttctctgaatccaacattctgcactcattactgcagaagtttacaacatcaatggccagatacattcaataccaagctgacaatggagctcaagctgttcagatctttgattcatgggcaacagaacttagtccagtggattttgaagaattcagtttgccttacttgaagcagattattgatactgtgaagaaaagtcatccaaacctccctttgatcctctatgcaagtgggtctgggggtttgcttgaaagactagctttgacaggtgtggatgtagttagcttggattggacggttgatatggctgatggtaggaggcgactgggaccgaatatagctgtccaggggaacgtcgaccctggtgttctttttggttcaaaagagttcatcactgatcggataactgatactgtgagaaaagcaggtagagggaaacatatcttgaatcttggacatggcattaaagtaggtacgcctgaggagaatgttgcacatttttttgaggttgctaaatcaatcagatactaagaagctaattatgattaattaattcttttgtttaattgcacttttagtttctttactatgatcggtgtttggttttgattctctaatgcattttatcagagcaactaaatttcccaatttttctaattgaaaaaa

SEQ ID NO: 121357 - DNA, 1015 bp, Glycine max
  Clone ID: PAT_MRT3847_80593C.1
aagaggaggaggtgttgagctttgaataaggtgaacgcttccgccgccattaccgcacttctcaccatgtccttgatgcccaattctagggttcctcttctcctcttcatctcttccatattcttcacctcttttcccgggttgacgtttggtgcaattgtgtcgctgagatcaattgagatttttaaaacgcacgagtggctgaaagccactacaacggtgtatttcctatgcaaaggggagaacgagacggtgcttccagatgtcaagaaaccccacgccatttatgctttcaatggtcaagaatcttggcagcctttaagcagcttttcaagtaaaaaatgcaagcggtgtggattctatgaggaggacagcattacttcggatgatgcatttgacgaatgggagttttgtccttctgactttgctgcacccaacggtgaatatattcggttcaaggaaaaggaattcaatgctactttcctgtgccctgagtgcttatctcttgctggtgttgatgagcatgatgacggaaaaggaatgcatatagctgttgtcgttttgctgagtattttggtttcagttacactgattcttggagtggtgggtgcatataagttctggcgaaagaagttaagggaacaggaccaggctcggcttttgaagttatttgaagatgatgatgacattggggatgagctgggccttggtagtgcaatttgatataacgatagtgaagaaaatacctccttcacagtataggtcaacctcaaaattttgtttatgaaaaagaatgagaaattattttcttctggtttaacatgcgactatgccgattataggaaatattcatcaaagcgggaagaaaggtgtgccaatgttcatatacacctgtacatgaaatagagctacgttgtacttcatattttaggtttgctcggcaatttagtagaaacagaacagaaaaagaaataaatggtgtacttcatctttaagttatgctcagcaattttgt

SEQ ID NO: 121358 - DNA, 1744 bp, Glycine max
  Clone ID: PAT_MRT3847_80594C.1
gttgatttagtaccagatttcggtgcctaagtaagagagagaggggctggtagttgttgcaccagatccctcagcagtcacaaccattcattccttcagaaccaaagtccaccacttaactatctttacctaccaatacggcaataccctttctcttacattttttccttttttaattccccagttcctttcttatttaatttacaagttccttacttttcccttcacacactcatttttcttttcactcaaatcatggatttcttgcaagcacaagaaaatcagatacttgtgggtgtggccgtggccgttgtagccattgggcttggtgcagtatatctctattcatccaagaagaccaaaggttgcttggacccagagaactttaaggcattcaaacttgttaagcgtgcacagctgagccataatgttgcaaagttcacatttgcactcccaacacctacatctgttttgggtcttccaattgggcaacacataagttgcaggggtaaagatgctcaaggtgaagaggttatcaaaccatatactcctactactttggattccgatgttggacattttgaactagttattaagatgtacccacaaggaaggatgtcacaccatttccgtgagatgcgtgttggtgactacctttccgtgaaaggacctaagggacgtttcaagtaccaacctggcgaggttagggcttttgggatgcttgctggagggtctggaatcaccccaatgttccaagttgccagagctatattagaaaaccctaatgatttagttgacaagtttgatgtctaattgattaacaatggaactttcttcacttaattaacgattatcaattctctagcatcaaaactgagttaaagcacaaacagacacttacttcactgggagaataaaggagccaagaatgacaacttcaaactgaaaatcatattatcagaacacaaataacaagaaaactgcttcaaccgtctaagatataaggaaattttgaatttcagagaatagaacactatttatcacatcaaaccctaaatcctctgctgttcctccttcctctagccctctcaaacttccttccctttgctcgaacataaggcttggtgtggctgtgaggcacaccaggagcaggaccaaagtgcttcacagcttcgcgagcattctttgggcctctaagaaggaccgtgttctgtcccagaggagccctgagagccaactgatcaaacgtcaagcattcaccacctgccttctcaattcttgcccgagcagtctctgtaaacctgagtgctgtgacctttaaggctggaacttcataaacacgaatatcatcggttatattgcccaccaccacagcaatcttatcttccttccccttggtatacttaatcaaccttgacaaagacaatgggggcttgttaaccttgctcatgaacaatctcttgagtataacggcattgaatttgctgccagttctccgaacaaggaagcgataaagcttgaccaagagcttaagatagatatcattggacttgggtgctgttcttttggtttttttgcttttacctccggccttgagatcgatccccattgctgcttccggtctcggatgagcctaccgcactctctgctgctgcacctgcccccttctgtcgtctttccgacccgttctgtcgtcttctcgcagccgtttctgtcgtcttctagcagccgtacggacgcgtgg

SEQ ID NO: 121359 - DNA, 150 bp, Glycine max
  Clone ID: PAT_MRT3847_80595C.1
ggccagagcttacggttttactatagacctgccgcggagcgcaacttgacattgtgagacgcgaaggtgtcagaagcgaatgcgtacccttgaaattcctcataacatcaccatttacatcgacagcgctcactagaagattaagattga

SEQ ID NO: 121360 - DNA, 469 bp, Glycine max
  unsure (1)..(469): unsure at all n locations
  Clone ID: PAT_MRT3847_80596C.1
ccgccctttttttttttttttaaccagnaaaaaaaaaaaggttaaaaaaagccaaaaaagggggaaaagattcnttgcctgcaacataaacctagtactgaaagcataccctcttctattatgaaaagaatgtgaaggcattccagntcgtctaaaaatacaaaaatggagaaacttccaacacttaactctaatatcaacaaagaggagtgtggcaaaatacaatcgaaaactaatctaaaacttaggcctagcaggactaaagcaagcttaagacactgacaaactccttgcaaactcacatataaagttggctatacataatcagaactaatctttccaattatacttaaaaacacagtgcccatttaattgcagaagactaacaaatacaccactgaggctataacattatcgttattcattacaccaagtatgttaacttgaagtgctggacaaagctatatgc

SEQ ID NO: 121361 - DNA, 1317 bp, Glycine max
  Clone ID: PAT_MRT3847_80597C.1
atttgaaatgataaaaaaaatcaagcatccactatgtcacatgaaattcaacatcttttgttcctttcctctattttgcattaaagattccaatagatacaatttcagataaagtgagtaaaaagggttttactgctcctctttacctttccttgtcaaaaagttagtcctctcaagtctgaagagttaaatacatggagagatccatcatcccgggtatcacccacgcgtccggcagaattcaggtctgtcttattcttgccccttggggccttgctgttgttgtgaagctcttgtggggttcccttccgcttcataaaatctgtcataagatagacttcttcaaacacataaagggaagaagaaaaaaaaaaaaaggaactgtgagcttctgattctaagaaaggaagtgattgatggaggacaagtatagtctaaacaggcaaaggagtggaatatggaaatgcagtaaatctggagatgaaataataccaagaaacagttaatccagccaattgagctgacacaattgattcttgagtttcgaatgttactagtgggaggtggggaaagaaacaaactcttacacccaaacacttccttcattgatcaataattcatgaggacaaagtagtcacttcaattcattacttttggcgttagatagatggtattcaactagttgttgttaggtcaattggacatcaaggttagtttgaactttcaggaggaagttatcaaaattaatatcattcatgtcaaatgatctaggatctcaatcaaaatacacagagacattaaaattgtataaacaatcatggcaacttgcaggaatcaattttatttgcaacatgccagcaacaatcaagcttatttctgctctagtgagttaatagatatagatccaactcaatagaaagcaacacatgcagttaaagaggaataaatgctgcaaaggtcagaaaacacaggttacaacgtttagacacccaatactttattgctcatctctttctaactcataattagagtggagacaactgttaccacaagaatggaagtttcaaatcagggacaattgtctcttatagcaagcatctttttttggtagaatataataagcatctaccataaaccatagtcagtactcagttcagttaaaatgccaatttggagaagaaaaaaaacataatcatatgaaattaaatcaacaagtagcaaccaagcatatcataaattcaacccaacagtgtcacagaaataagcacggtgcatgaaattcttgtatctgtttctaaatataagcacaattgggta

SEQ ID NO: 121362 - DNA, 532 bp, Glycine max
  Clone ID: PAT_MRT3847_80598C.1
gtaacttatatttgtatcagacaaattacaatttacattcttcatcagtgctttatgtaatagaaaattttcagttttatgcacgtctcttgcctcctttactggcagttttgtagtccacagggtagacgagcatctaaatggaagatagatgcaaatgatatgcaaaagcagaaaataaaacttatgatctttttttacatgattatgctattgctgttgaccctttgctaggacaaagcagtacgcgacttcgatattctccaagagcccatattggaaagatatttctgtatgcagagtaactgatagtacaatgcttgttgaagactcccgtgatttcctgttggggaaactccccgttttccatttgtgaattgatcaaaaccttggctgcacgatgtaatggggttggatctctttggccctgtcctgcttcaataagtgccaacatagcccatgcagggtttactacatgtgacttgtttccttccaaatttgtataaaccttttgttggcatgcaatatagct

SEQ ID NO: 121363 - DNA, 235 bp, Glycine max
  Clone ID: PAT_MRT3847_80599C.1
acagataaaacagcatatcaatttgttttaagcatattataaggccgggttcacaatcatatctcgcaacggattcatgtctgccacaaacatggacagcattatgtacctattttcaacaagaaatcggtaaaaaaactagaacgcgggcatagaaaattattatgagccagcctatccaaccagatcagaacttaccacaatgcttgtgatttcccaaaggtgtctatagaag

SEQ ID NO: 121364 - DNA, 551 bp, Glycine max
  Clone ID: PAT_MRT3847_8059C.1
tctactcttccgcggactcgttggaattttgtgaggttcattatgaagaaaagggacatgcttagttgacaagttggaatcaacccatactccatggaagggactggatcggccaataggttactgagcaagggcaacgatattctgggttgcgattatgctagttttgatggtttgattaccaagcaagttatgagcaagatggcagaaatgataaacagtctttgtggtggtgatgaaaaattgattgcgtgaaaggacacacctgctgttggcttgtttgtcaaggatggcaatttgtaagaaagatgtttggagagatgaatgtggaatcccttctggatttcccctcacagatttttgctatagcatttttaatgagatgcctcattagttatttctataaaaaaaaactgctccaggctaaaagtcaaagtttgtttttacatctcttaaaaagaatgattttttggtggaatggggatgagaacaaatttttgtcatgaatatgcatggcctacctaatggttataaattgaaaagctttttat

SEQ ID NO: 121365 - DNA, 331 bp, Glycine max
  Clone ID: PAT_MRT3847_805C.1
ctcacacgtcactctatgtgctcaatgcacactgtccacaaattcaagtttgttgccactcaatgcgccgaagtcggcagcaccacccgtagacctaccaccagtcccatggtccaccttggctgtcgaaagatcctactcatgttttttgacaggcgacgtttccgtactgcgacggacgatccgtctgaactgcccgactactaggcgcgcgtacgccacaagctcaaggacctctattgtatgatcgtgaccgcctacacccatcaaggacgaagaaagaatggtacaccatgagcagcagcagctacagcaacagcaagatcagcac

SEQ ID NO: 121366 - DNA, 322 bp, Glycine max
  Clone ID: PAT_MRT3847_80600C.1
ggcagcgaaaagaagacaatagggggtttcagatatgaatacacgagctcagggtatcgatgcaagatggctatatactgttatagcttcatcgaatgatcatggggttacgtgcagatattcaacacagattactcatgatgtcacataccttatcactggtatagttgatatcgtagaatatatggatctcgttgctacttacaaagatatttacgtcttcatctagagatttgagagtgtgacacttcgtctatggaaccctctcgcaatagatataaccttgagatgtcgcattttatagcattctcgtcaaggtcta

SEQ ID NO: 121367 - DNA, 501 bp, Glycine max
  unsure (1)..(501): unsure at all n locations
  Clone ID: PAT_MRT3847_80601C.1
ctgttctcttcgctcctgcacttgggggggtggggggggatgggatctcaggctagccttctccttcaaaagcagctcaaagagctttgcgaaaaccccgtggacggggtctctgccgggttgggcgatgagaccaacatttttgaatggggtgtgaccataatggggccgtccgatactgtggggggggggggattgtggaatgctattgtgggttgggggtgcgattgcgggagtggggggggttgggtgagaggggggtggggagtgtggggcggggggggggtgtgggtggggggggggggggggggtgggggtgggggggtggtgggtggggggggtggggggtggggggtgggggtggggggggggggggggtgggtggagtgggttgtgcgggggccggngggtggggggngggcggtcgtggtgggggtgtgtcctggggggtggggggggggtggtgtgtgggggggggggggggggggtccggggggcggg

SEQ ID NO: 121368 - DNA, 270 bp, Glycine max
  unsure (1)..(270): unsure at all n locations
  Clone ID: PAT_MRT3847_80602C.1
tatcatcgcaccctagaagctggaactctgttgactcttgcgataccgtgctttacacaacttaacctttccagctatcaaccccacttccaccgcaaacctctaccgaccnacttttcaccccaaagtttttctccaacaccagcagaatgangcgaacaaaagcaagggcgtacacaatctccagtggacggcggtttacaaaggggcccctggggggacgcccgttccttccgccgcctggatgttccagaggcgggggccggacct

SEQ ID NO: 121369 - DNA, 360 bp, Glycine max
  Clone ID: PAT_MRT3847_80603C.1
aaaggcccagtaaaaaatgatttttttttttataaccccccataaaatttaaataaaaaacttattttttttaaatacaaaaaaagggggagaccaaaatattccctggtttttcaaattaaacaaaaacaaagggattattccttaacgggggaataaagaaaacattcacctgtggagggacatttttataaattggcgctatcaaatttgggagcatatttataggatccccacttggggaaagagaaagaagcttctgaatcttcaaagggagggggggagaattaattaaaccccccaaagttaccgcctttgaagttcaacgatgagaaataattcaggggatcattaatattc

SEQ ID NO: 121370 - DNA, 257 bp, Glycine max
  Clone ID: PAT_MRT3847_80604C.1
cgaaaaaggatagtgtatctggtatggtgcaaatggccatttggtgggtgtgttgaacttgaattatgagtaagaatattaggacctaactaagtttttttatattcaatgttagtatattggtttagtcgtggctattagcaaatgtgcaaaatgataaactggtctttgcatcataaataattgaagcttaagacttttatgtcagttttccaagtgtacttaaatttggtgtaagaggatcctcacagggttat

SEQ ID NO: 121371 - DNA, 379 bp, Glycine max
  Clone ID: PAT_MRT3847_80605C.1
accacagcaggggaataggctctagctatagggatactttttaatcctttttgtcttggagagatctgcactaagaggaagaagctctattgacgtgaggttgtatctgattaagaactgagtgacacttcagtgacacataatgcgaaacataccgcgcatttggaatgcacagatattatcaggccctgaaacatatcttaaatcgagtatcccttggacagcgtcattgcctatgatgaagagggaatgatccaataccctacgattggtattcagggctctttgtttgccctcagatatattgggactctcttctacggttctcagaagcagatgaatgttccgaccgggaggaggagcttttgaggaatctttt

SEQ ID NO: 121372 - DNA, 462 bp, Glycine max
  Clone ID: PAT_MRT3847_80606C.1
actattgtacagtatcattcaatacagacacacataccttgattctccagaatgcagaagccagagacccagggaaaccagcctcccccaggatacccaactgagaatcccccggccaaaagaaagctgttttttggtttaaagaagagaggagagagaggattcattgagggatgcctctttgctctgtgttgctgctggctttgtgaagaatgctgctgaactacaattctaggtagagcctagagagctatattggcatattaacaacgacggttactgcttctttcctaggttgttagcgtttattttagtggatttcaccaggcatacgttgtattattactaccttaccttatatatagtcatgttgtaatatacactcaagtgatcatctattctcaataaaactagattcctcggtttttcttttcaaaaaaaaaaaaaaaaaaaaaaaaaaaa

SEQ ID NO: 121373 - DNA, 262 bp, Glycine max
  unsure (1)..(262): unsure at all n locations
  Clone ID: PAT_MRT3847_80607C.1
acccacacgtacgnccacacgttctattttcttaattttttttcaggcgaagtggngaaaaaagagggcgtgctcttaacctgaaagtgtcgttcaacactcattttcaaccttatgagaaaattgtaaggaaagagtaccacctggtcacttttgatcttccctactttgccttcttctacaaccagaaactttttttttacaagggttaatattttgagtttttcgtccaaaaacttatacttttactttctttgtttct

SEQ ID NO: 121374 - DNA, 269 bp, Glycine max
  Clone ID: PAT_MRT3847_80608C.1
cgggttccactatgtgagcctgttattgattaggtgctgtttagatactctctaggctttgttgtttcggtgagcataaagtcgatcttagttgattgatgctcgcgcaattaatcaccgtatttgatatctacttccatgctgagcctgcacaccgaatgtaccagactggcccggcttcgccccgagaccccccatcactttcaggtaaagccagaccgctgtcaggcgggtgctgcccggcgactgggccaagcacgccgtgcctg

SEQ ID NO: 121375 - DNA, 205 bp, Glycine max
  Clone ID: PAT_MRT3847_80609C.1
attcggctcgagataggttttaagaactcaatcagttggaattgttttccaggcaaaatgttttgaaagtggcgaaacagtggccatgaaaaatgttttacaggacagaagatacaagaatcgttaactacagttaatgggtgtgttggatgatccaaatgtgatgtcgctggaagcattgattgctttcaactacaagtacaga

SEQ ID NO: 121376 - DNA, 717 bp, Glycine max
  unsure (1)..(717): unsure at all n locations
  Clone ID: PAT_MRT3847_8060C.1
gggggcccggggctttggttttaccccggaagtgggggcctggcctttattggccgccccatatagcttttacaagttagccaaaaacagggtcaattttgggctctnngctctttggaggcctcggttatttcaggggcttgggatggggcccttgccttnggtggtccctcacacccccccctcctngcccgtcccncttccccccttcctccggccttttccgatttcgtntttgtctccccctcctccagctctgtttgctctttcggggtgggattgggtgttgtgccttacccttgggggttgtgggggggtggctatgggggggggtgggggtgggctgtgggggggggttgggtggggggggggggggggggtggggggggggggggggggtgggggcgggggggggggtgggggggggggggggggggggtgttggggggttggttgggggggggtggtggtgggtgtggtgtggtttgggggggggggggggggggttggggggggggggggggggggggggggggggggggcgggggggtggtgtggttgggtgggggtggtggggggtgnggtgggggggtgggggtgggggggtggggggggggggggggggggggggggggggggggggggggggggggggggggtggtgggggcgggggggggggggggtgggggggggggggggtgggggggggggggggg

SEQ ID NO: 121377 - DNA, 1199 bp, Glycine max
  unsure (1)..(1199): unsure at all n locations
  Clone ID: PAT_MRT3847_80610C.1
ccgggtatcgattccgactannnannntagatactacgagttgtgtttctttgtggtagcaaagaaataaagctgtcaactgggtcatgacccttttaaatagccttttccttttcccacataaaaagcccattatgattttgtgcaatggggtaaataagtaataatagaataacaaaagttccataattcataaacctttgacatgatgaaggggcaatagcttatgggtattatggcctcatgcttatgctaatgccaataaagttaaaagtatgttcatataataggtaaacagtgagaaattaatttatgctttatagtaaatagaattgggtagtttaaatgttctcttggccattggaagtccatcaaaagtgctccattgatctcccacaataccccatatgcgataaccttcatcgaccaattgttgcctcaccttggaatggtattttttcacgtccatcaattcatcatcaaaacccctcaatgtaagcctattccatccatggtatccaacactcacaaggttgtctacggtgggagatcttaggttttcctttcttgaagaaatcagaaagattttgaaccctttgttcttgatttcatggaagagctcgagtgtgtgatcaagagccggtgccttgcttttctccatccattcttctaaagatgttgcgttcagcttttctcccccaaaaccatgcttcttataataaggaattgtggacaaaagggtctcatcaatatcaaaaatccaggaatctttgccatcatctttcaaagtgcagaatccactcatgtagagcctaatctcctccactgctctaacagaatcagccttgtattgagatgaggtcatgtacttcttcacatggtccacacattcttgaggcacaacactgaaccctctaatgttgtttagttcaacatttatcctccaactctcgcagtagttcttcaagttgtctccaacaacaaccccttttcccaatctttggttcaatatgttccattccggacgattcactacttcatcacttcttccccattttggattcaatatgttccattgtggactcaccaagccaatgaagaggcctgctatgattagtgagagtgccaaacatttggccatttgcacaaaaacagagataaagagggacggacgcgtgggtcgacgcgggaattccggc

SEQ ID NO: 121378 - DNA, 365 bp, Glycine max
  Clone ID: PAT_MRT3847_80611C.1
cgttttccacccggtaaagtaactggtcagaagtctgatattctgattcagatgcctaatggaccgctaccaagatctgatgctgctcaggctgtaaagaagatgaagattgagaaacttgatgatgatgaagatggtgaaaaggaagaatgagtgcagagtgataacttttggtgatcaagagtcgttcaagttgatgtttttgctctttttgaacaaccttttctgaatggggctgattaaagaatggtgaacacctgagtgtaatagatgcagtttattttaatttttaattttgtttttgtaaataagtttgttagaaactgaggtgtatatctttgcaaagttacaaattttgagtgcta

SEQ ID NO: 121379 - DNA, 502 bp, Glycine max
  Clone ID: PAT_MRT3847_80612C.1
gggggaaagatggaactgcaccaccgcacaggtgttactgcatgaccctcagtgtcattttaaaggctgagaaccctaacccattttttttgaacctgagactttcaaatgaaaccggaccaaacacaagaaaaaacatcctcttgctaacaaaagtgcctgttctttttaaaatcttattctactagcctacacttacttttttagggggcgtatgacaccatccccaataaagatccgaatacccccttggaggaagggcttttaacaaataaagtttaagtgatgggttttaaacccctctttctaccaaaatttttattaacaaccattatttgacccccgttttctctttgtatcacatagtattgttatatatacctatgcggcgtctctctttttatctatccaggatctaggggggtactaaaaactgctgaccacaaatggtggtccacaaaggggacaaggatgtggaacgggaacttggcaccttggaagc

SEQ ID NO: 121380 - DNA, 1069 bp, Glycine max
  Clone ID: PAT_MRT3847_80613C.1
cggaattcccgggtcgaccccgcgtccggctatttttaaatatattggagaggcctgtcccctctgaaggtcagcctgttgatcctgatcttagaaaatcatggggttggtggaaggtcaagaaatggacagttcacattctcaataggctctacactcgttttggagacttgaagctgcaaaaccccgaaaatagagcctttgctcaaatgtttcagaagcattatgcggggaaaattttagagtgccacttaaatctgttaaatgtcattcgtgtagggggctatttacctgacagagttatcaacctaattcttcaatatctaagcaacagcatttcaaggaatagtatgtatactctgctgcaaccacggcttgatgcccttctttttgaaatagtgttcccccttatgtgcttcaatgataatgatcaaaagctttgggatgaagatccacatgaatatgtaaggaaaggctatgacattattgaagatctttatagtcctaggactgcttccatggattttgtgagtgagttggttcgaaaacgtgggaaagaaaatcttcaaaaatttattcaatttattgttgaaattttcagaaggtatgatgaggcttctgcagaatacaagccctatagacaaaaagatggtgctcttcttgctattggagcactttgtgacaaattgaagcagactgagccatacaaatctgaacttgagcatatgttagtgcaacatgtctttcctgagttcagctgtcctgttggccaccttagggctaaggcagcatgggttgcaggacaatatgcccatattaacttctcagatcagaataattttcggagcgctttgcagtgtgttgtatccagaatgcaggattctgaacttcctgtgcgtgttgattcagtttttgctttgcgttcttttattgaagcttgcaaagatttgaatgaaatccgtcctattcttcctcaactccttgatgagtttttcaagcttatgaatgaagtcgagaatgagatccttctatgtacatctgggactattgtggacagcttgggggaaga

SEQ ID NO: 121381 - DNA, 433 bp, Glycine max
  Clone ID: PAT_MRT3847_80614C.1
cccacgcgtccgggaggagagatagatggcaggcatgtctgacatgcagaacaggcaagcgggaccactcccccctggtcaattcaggggcgctccccttactcgccctcgctctgatcccgtagaccgtgagaaaacttgccctcttttgcttcgggttttcaccaagactggtggccaccactcggacgaagaatttgctacgagaggaaaggagcccaaagatgaagtccagatatatacatggaaggatgctacacttcgagaactaactgacctggtcaaagaaggtgctcttgcagcgaggaaaagagatgcgaagctgtcatttgcatttgcgtatcctgacaagcgtggtcgttatgtcgtgaggccggttggcatggcattttcgtatggaaataatcggcgattggatgatgcaaagacatta

SEQ ID NO: 121382 - DNA, 353 bp, Glycine max
  Clone ID: PAT_MRT3847_80615C.1
cgatttatatttggacgcttgttttttcctttttatttttttccgttacctgtttgcgtcgggctgggcccaaagacagtaattttagagctgggggtacaattgccctgcccgggtcccaaaccaaaaaaaaattggcttagaattgcatacaatatactatccggaagcatggaccgtggccactgttgtgcctaatgaaaaagaaaactcacatttctcccttcccgctcactgtccgctttgcctgccccaaacccggggagccggccgcccaggtgcactatccaacacgcgccgagaggcgaaaggcaaatcccgctctagggggggtagtatttttaccaatgaaa

SEQ ID NO: 121383 - DNA, 208 bp, Glycine max
  Clone ID: PAT_MRT3847_80616C.1
gaacaagcaggattgatattctccaaccctttcagggtcctccgaacacactaatgcaaggggcaaactcgggaagaagaaaaagaagcagaaaaataagaaaagctgcacacgagaattctttgaaaattgactagaacacatttatctcatcttacacaggattgaagacagcactaggttcaaccacccaagcccccctccactg

SEQ ID NO: 121384 - DNA, 338 bp, Glycine max
  Clone ID: PAT_MRT3847_80617C.1
gtatgcgcgatatctatcacagctacttatataaattcggcatagataacaccgtactctctaatatcccataccatgaaatacatggatatggggtggacgaacttaatggcagcttatctgaagagagggttagtcatggcgacgcagcagcattgccaaagacacttaaaagttacaacacgctgttgtcacatggcatcaacattgtgaacttagtcagaagatatcttgacagataggtcgttccatagatcaatctacataaggctggcatccacacatcggagcagttaattctcaaagatccacatcttatcactccaaatgcactttca

SEQ ID NO: 121385 - DNA, 509 bp, Glycine max
  Clone ID: PAT_MRT3847_80618C.1
taaataagtcaagcgagagaagtatgtgtggtcgacgaaattgagtagaacgtgtgttaaaacacattcgatcattttgtcaagatttattactcactactgacagatgatctctctaggcctttcgcatctcctccaaattctcacatgcattctgcttttgactcgatcattttctaaagatgatcgaaagatttacatcgtctacatgggtgataatccgaagggcatggaatccacagaattacttcacactagcatggttcaaagtgtccttggcagaaaaattgcagcagatgctttgctgcacagctacaagagttttaatgggtttgtggcgaggctaacaaaagaagaagcagcaaggatgaaaggaatcgatggtgtggtctttattataccaaatagaatccatagtctccaaacatcaagggcctgggacttcctcggcttccctgaaaatgtccaaagaacaaacatagaaagtaaccatagtcggtggagtaatt

SEQ ID NO: 121386 - DNA, 155 bp, Glycine max
  Clone ID: PAT_MRT3847_80619C.1
tcgcagttgtttttgggaaactaccaaggaacggtaactggttctaagttgagacaaaaatccaaatgtatagacaacaatagaagagagaatggaaggcacagctatattgagggatatgaacacttttgattggagggatttataaataacgc

SEQ ID NO: 121387 - DNA, 342 bp, Glycine max
  Clone ID: PAT_MRT3847_8061C.1
cccacgcgaccggtttttttttgttgaagaggcttacaacaagctaatagttgaacttgagaaaagtgttcctacattggttggcattgaatgacccaaggatgataaactttctcgtctgaaaatttttgccaaacctaagacagcgctgcttcactattctccctatggagtttaatcttgtggtccgtcagaagcttttaaattttgtgaggctccattataaaaaaagggacacgcttatgtttgaagttggaatcaacccatacttcatggaatggactggtttggccaatatattactgagtaagggcaaacatattttgcgttgctattatgcta

SEQ ID NO: 121388 - DNA, 1324 bp, Glycine max
  Clone ID: PAT_MRT3847_80620C.1
agaacaaatggcatttgcatgcttactatatgtatgatctaaagctgtttacaaatcgtatcctatccacataatcaataaaacattacagaaatagaagaaaaactatgtgcaaagcaagtatctaaaattgaactcatatggcataatctgtacatattgtgagaggggctcggtttttcttttctcaaggaacttaatggcttctttccccacatcacttggtagttggaggcatatccaatccagcaatgattccaagtcttttgcaaagtccagtaaataccaatccagcaacttcgggataaggaactttgatatcgaaattccaactgcagcctgcaaatattctttttttgccatttcaagttcgttctcaacctgagatgctctgtaaattctcacagcaggagaggaccaagttccacaggatagagcaaatgtcactagaggttctgacaattccagtccataagtttcatgatttttccctcccttcgataatgtaaatttccagtgataaggaagtcttaaaatgcaatgttctatagttgttgcacttagcaagtgtccacccacatttatcgttgccttgtgcaccagcggtaagaccatttctggacccactggtatacccttttctaggtacggatgcagtgtacatgaacacagcaggagaggaccaagttccagaagagagagcaaatgtcacaaggggttctgacagttccagtccatatatgcttcttgctgtcatttgatgattttttgttcccttggaaaacgtaaatttccagtgataaggaagtcttaaaatgaaatgctctatggttgttgcacttagcacgtgcccaccaacatttattgttgccttccgcattagtgcaacagccatttgaggattctctggtatgccattctctatgaatgcattcatcatacacgaattgtagatgttgatccagaatgcaagcttctcctgatggttgaggttttccaagttgacagaggctactttcctaaaaagtagtttcaaccgatgtagtaaaaataaagtatttgcagttcgttttggattgaaagatttggcatcaattgcacataattgcctgtatggaccaatatccctcttcccaaattccaaacagatgccatatggatcccaaaactctgttccttcatcacggttgtgaggttttagatcccacaagggtgccatgtcacatgtagaacctggattctttaaggcactcattctcaagagaatgtttgataagcactttagaatattttctgaaattatatttggactctgctcgagccg

SEQ ID NO: 121389 - DNA, 576 bp, Glycine max
  Clone ID: PAT_MRT3847_80621C.1
cccacgcgtccgcttcgataaaatcctcaaaccctcttcatgatgtggaaccctctgcgcacggagtccaaccctgaaccggagatcaatcaccagtttcattcacaaattcaatcctgaacgtcttttctcgcaagaaaaatgagacaaagcacacatttcatacccttcccaattcaaatgaagaaaaacagcataaatcttcttcttcttcagctgctgcaaagacaactaaagactcaaggatgcatgagactaaatctggaatgcctcctccaaaagttttgcatgcgtatccaggtttgtcctccccaatggattatgcactcaaagagacaagcccttttcttggagggggacaagtagttggtgggcgagttattcgcgggtacaggccatccagctcctatgaccttgttgaaccaatgcaatacctatttgtacgagttgtaagagctcgtttggctgggagcattgatccatatgtggaggtaaaggttggaaatttcaaaggaattaccaaacactatgagaacactcaagatcctgaccccgctcaagtgtttgcctttgcaa

SEQ ID NO: 121390 - DNA, 1515 bp, Glycine max
  Clone ID: PAT_MRT3847_80622C.1
caccgtccaacactcaaccccagatcaatcaccagtttcattcactaattcaatcctgaacgtcttttctcggaagaaaaatgagacaaagcacacatttcatacccttccaaattcaaatgaagaaaaacagcataatcttctccttcagctgctgcaaagacaaataaagactctgggatgcatgagtctaaatctggactgcctcctccaaaagtttttcatgcatatccaggttctttctctccaatggattatgcactcaaagagacaagcccttttcttggagggggacaagtagttggtgggcgagttattcacgggtacaggccgtccagctcctatgaccttgttgaaccaatgcaatacctattcgtacgagttgtaagagctcgtttgactgggagcattgatccatatgtggaggtaaaggttggaaatttcaaaggaattaccaaacactacgagaaaacacaagatcctgaatggaatcaagtgtttgcctttgcaagggaaaatcagcagtcaactttgcttgaagttgcggtcaaagacaagaatatgttacttgatgaagttattggcactgtgaagtttgatctccatgatgttcctagacgtgttccacctaatagtccattggctcctgaatggtataggattgacaagggtaaggacaagaaaaaaggggagttgatgcttgctgtatggtttggcacacaagctgatgaagcttttcctgatgcttggcattctgatgctctctcctctggtgatatatcctcgtctgcatatgctcatatgagatcaaaagtttaccattcaccaagattatggtatgtacgggttaaagtgattgaggctcaggacttacatgtgtcagagaattcccaaatccatgatgcctatgttaagctacagatcggtaaccagattttgaagacaagacctgttcaatcaaggaccatgattctgcgttgggatcaagagctgatgtttgttgctgctgaaccctttgaggaacctctgattgtttcagtggaaaatcgagttggtcccaacaaagacgagactattggagctgttattattcctgtagaccaaactgacaagcgagctgatgatagacttatccacactaggtggtatcaccttgaagaatccatatcatctgtgatggatggggaacaaggaaaaaaggagaaagataaattttttagtagaattcacctgagtgtctgtcttgatggtggttaccatgtttttgatgggtcaacttattatagtagtgatctcagaccaacatcaaagcagctctggaagaagccaattggtcttttagaaattggcattctaagtgttgatggacttcatccaacgaaaaccagggatggaagagggacaacagatacatactgtgtggcaaaatatgggcataagtgggttcgcactcgaaccgttagtgtcagtcttagtccaaaatacaatgagcagtacacttgggacgtttatgat

SEQ ID NO: 121391 - DNA, 348 bp, Glycine max
  Clone ID: PAT_MRT3847_80623C.1
gagagagtatagagagaagtgtgtgcgtgcgtgcgtgtgtgtgcagcgttttcttttgcatcaaccaacccaagtacaaccgccaactacgtcattttaatccaacaaaaattcccattcagcttcttttagagagagaaaagattcgaattttaacggagaaaaatagcgaaaagacttcaaatattcttaattgtgcgactacaaacgtcggactagtaactcaaagaaagaagggaaacaaaatgcatctatctttgacggctgtctatgaaactatcatattgtgaaaacgcaccaaggaaacacatcaggcgctttcgaacatacacattactgtgcagattt

SEQ ID NO: 121392 - DNA, 567 bp, Glycine max
  unsure (1)..(567): unsure at all n locations
  Clone ID: PAT_MRT3847_80624C.1
gttttctcttccaagttcaaacttngaagagaataatgcttggatagttggattcataacctgccctcaagactttttgtaagaggcgagtacttcatcaactttttgtgttgtgtattgtttcattaattttcttgaaagtttcctatgttatgctgaatcgttttggttttgatgcttgagttaaagttctgtggaactcaaaggaatctgtgcttcctctgttgcatgttatgtgagcaaaacttggtggtccacatttgcagttttccatgtccttttaaaggcagaacaaaatacccttttaaatggaagtgggtatctttcttcttagccattataggtgttttattattgggagacaatggaatggtttttcttaccttggatacgaagtgatctttctccttcatgcgtgatattaaactgatatataaaagagagtcatcttatcatcatttcattcccttcaatttgtttcattcccaaatatacaattgacagaaagtggagaatattaaataattaatgcaagttaacttaaaaaatagaccactaattattcaa

SEQ ID NO: 121393 - DNA, 285 bp, Glycine max
  Clone ID: PAT_MRT3847_80625C.1
ttgcaacaccgcacatattcttccctaattccatcttgaagtaaccattgtcaccccagttgtggcttaaatgtatgcagagagatgtggtgcccgatatgcccgtgtaactgcaccttgcacgtcatgcttcgtatcggccatcttaaagggtgaaacattgtactgggataaaaatttacaggatatggtgatggttatctgtaaaataaggttggaattgggatggtcaattctcttgagcttaattacattacaaaatcgtactggaaattatttggcaca

SEQ ID NO: 121394 - DNA, 302 bp, Glycine max
  Clone ID: PAT_MRT3847_80626C.1
ggttcttttcttttttttttttttttttttttttttttttttttttttttttttttttttttcagaaattcaaaaaacttggggggaatggattacaaaaaacactgggtggggcaccttttgacttgagcctgacagtgtttttattaagtttggctacaaccgtgccaattttatgccccattttatcctgggggggagtttctagcgttttggggggggcgtgtccaaacatttttttttccaaataagttaggtttctgccaaaggcctttaaaatcaaccctgccattttttattta

SEQ ID NO: 121395 - DNA, 302 bp, Glycine max
  Clone ID: PAT_MRT3847_80627C.1
ccacttaatctcttttccaaaaataaaaaacaaccgtaaacccctacgcatgtattaattctcaaaacactcacccctccccaagaaaaaaaaaccaaaaaagcctaaacttcctaaacctgggaaacaaaccaactcccaaaacccaaataatcaaacttccaaattgagccacggccaagacccatcttatccaaaacttcaactttacccaaaagatatggggttttactttttgacccacaaagacattttcacttccaaaacacatagccattaccccctccccccaacatttatat

SEQ ID NO: 121396 - DNA, 235 bp, Glycine max
  unsure (1)..(235): unsure at all n locations
  Clone ID: PAT_MRT3847_80628C.1
cttctntctcttaactccaanaagtttaaccncncttcncttcccccattaaaacctatntcaccaatccaacaaggtgctgctcnntgcttccggttaaggttttggttgtngttcttgttagtgatcctcatggacgctgcatcggaggctgccggcggcggtggcggctccacaggcagagggatcacnggctgcngcngcacgccgaaccgctacgagtcgcagaaacggc

SEQ ID NO: 121397 - DNA, 658 bp, Glycine max
  Clone ID: PAT_MRT3847_80629C.1
cggccgcgtgtgcggacgcgtgggtgccgtcatgcaggatggtgctgacatctggagatagatcttagaaaacattcaccgcatgactaaatgaataccattgggaaagaaaaacaacttctgataatcctgtcaaggtttataattgaatgggaagtactgcagaagtggatgaaagcaaactaacgagcagtgaggtcgaaccagctgacttagaggacgatacattgcaattacctgctcaagaagaggaagatctcaacaggattaaagaagcagagtagaagaagaagggaagcaataatggagaaatacaagaagcagcatcagcaagtagaagcagtggttggaaatgaaggaaatgacaaggatgcagacattcctaatgacatctctgaagcatgtgatggtaagactgatgatgctgattatgtggagccatcatttgctgttgggaaatctcctgaaaatgtgaatgttgcttctaagaagatatctcctgctggaggcctgggtgagggtactccaaagagtgaaaggtcagaggacaagttttgtgatgatatatttggtgagacgccaacgggagttcggaaatcaggaaaaggagatggtttgctgattgagagggttggcctacatgacaattgggacgatg

SEQ ID NO: 121398 - DNA, 420 bp, Glycine max
  Clone ID: PAT_MRT3847_8062C.1
ccgccggcaccggcccggaacttcccggctggatccacccacgcgcccgtccatatctaggggtaattatgcttttctttgagagttttatcaaggttagcgattgcaaaggatgccagacttgaaggacactgtagggaactggggaggagctcatccgctcgaataacaagacaactacgcttccgttgccgctaaacccggtactgcatctggcacgaagggttatgtgggcatccataatctgggatttccagactccctgcggaaaccagagctttatcgagccatggagagacaccgatttgaacatgctacagaagtgcaacactgaatgcatccctcaagcaatcataggaatggctgccagttgccaaggcaaatgtgcgataggcaacactgctgggcttgtgctgtcga

SEQ ID NO: 121399 - DNA, 277 bp, Glycine max
  unsure (1)..(277): unsure at all n locations
  Clone ID: PAT_MRT3847_80630C.1
gcacgagggaatcacgagtgttgactggttggatatgttagtttgtactctctgcttatgggggttggacattttgattgaatttggtcattatggtctcatggtgtgagttccctttgttggagtcaaaaatcaagttttttaaatacctgatgtactaagttctttgttgattaccttctgttttctgattgcttaataagtgccttgattaanaaaaaaaaaaaaaaaaaaaaaaaaaaaaaaaaaaaaaaaaaaaaaaaaaaaaaaaaaaatt

SEQ ID NO: 121400 - DNA, 1109 bp, Glycine max
  unsure (1)..(1109): unsure at all n locations
  Clone ID: PAT_MRT3847_80631C.1
agacattctgcatggaaagcaaagcgtccgggaaaaggttgaggtgaaggcgataggcacaacaacagagggtggtggcggtggagggccagggaagaggtggggtcacacctgcaacgccgtcaaaggtggcagacttgtctatgtcttcggtggttacggcaaagataactgccagaccaaccaagttcatgtcttcgacactgtgaaacagacatggagccaacctgctttaaaaggctccccaccaactcctagggacagccatacaagcacagccgttggtgataatttgtttgtgtttgggggtacagatggaatgaaccctctcaaggatttgcacatattagacacttctttgcaaacatgggtttctccaaccataagaggagaagggccaccagcacgtgagggtcatagtgcagcagttgttggcaaacggctattcatctttggaggttgtggaaaatctgcagataataataatgagctctactacaatgatctttacatattaaatgcagagacatttgtttggaagtgtgctacaacatcaggcactccaccattctcctcgtgatagccacagttgttcatcttggagaaacaaaattattgtgataggaggtgaagatgggcatgattattatttgtctgacgtccatattcttgatactgatactctaatttggagggagctgagtacatcaggccaattgttgccacctcgagctggtcattccactgtttcttttggcaagaacttgtttgtttttggtggatttacagatgcccaaaacctctataatgacctttatatgctcgatattgatactggtgtttggacaaatgttacaactgcaaccaatggtccttctgctagattttctgtggctggtgactgtttagacccttttaggagtggtgttcttatattcatcggtggttgtaataaaagtcttgaggccctggatgatatgtattacctatatacaggttcagcaaagtgtcatttatttgcaactattaacttttctaatgtaacctatggttctgatattttgctagattattacatataataacaaattgtgatatancttctgact

SEQ ID NO: 121401 - DNA, 252 bp, Glycine max
  Clone ID: PAT_MRT3847_80632C.1
tttttggaaccatatctcatctatcattgtgggaaagcgaactattgcacgattacatgttaacatctaatgtgaggtgttctgactcttctattaccaagaatgcactacattatattgaaacataactaaattacatctataggcgaatggagggctatattgtttactaacattagtaccattcacgcggctaagcttcattaatatcttgaaggaaaccgacaatgatagacacctacttagctctct

SEQ ID NO: 121402 - DNA, 136 bp, Glycine max
  Clone ID: PAT_MRT3847_80633C.1
ggggggaacatcagatagcagtggttgcattgtgtcacgacgattcgatcgttttatctatgatgttgctgggttcagcttcttggatttcaagtggtgtaaatgatcacatacatcatattactttcaatgctgt

SEQ ID NO: 121403 - DNA, 559 bp, Glycine max
  unsure (1)..(559): unsure at all n locations
  Clone ID: PAT_MRT3847_80634C.1
gaaagtgggtggtctgggtattagagaaacgaagagtgaatgatacttttctcatgaaattggcccaggacctttgtatttccaaggataaactgtgggttaaggtcttacgcaggaagtatgattatggtaaacacattattcctcaaatgaacaaggcgactaatgcctctacttgatggaaatttgaagccttcatcacgttgaggttttggattgatgaatggctcctaaagatgagtcattgtgatttgtgaaagatcatttacgtggtctttgagaatggtgactgggacgtccaatacctctcatatctttttcaggatcatggcaactgtccctccaagacaacacaatgtggatgacaccattgcatggtcgcattctccaaatggaaggttttccttatctttcgcctacaatttagatcattctatctaggatagctcaatgaagaaggtatttttgatctcatttggcagtggtctgaccaagagtgctttcgagttatcatttggaanattgggcagcgagcttttctcactaatgcttttctctt

SEQ ID NO: 121404 - DNA, 967 bp, Glycine max
  Clone ID: PAT_MRT3847_80635C.1
agtagatatgaagttaagattcctgttttcactgcatctcaccattctaactggtttgatctgtaataatttggaccatttggtcggacctgacctaccaggttaatcatgaaaagatgtccagtcaactttcatggaggtgggagctactgaacctatgtgaatttgtctttcttgggggattttattgatgatgacctctgatgcgaacgaagatcttcaccctagaatagataattgggtttgtttcatttacagagaggaatcactgccttaaggtggaggaaggtatccatgcgatcatcaactcatttgtcaccagcattttgcctgtacatacagaacttttttttatagaaggaaacactggcaaataaagaacagctttaaccttgaagcatcttgttggaaaatcaagggcctcacttgaatggatgttcatagagtagagacatgtaaggcaactcatctgcattttcataaatatcagttacttacattaaattgcaatactttctgaattttgatactaatttactactacaggacagaggtttctttaagaagctgtcattcaattgctgtgatgtacttgacgaatggtctgtactatatttgttttgcaggattttctcttggttaatttagtctcgcaaacaaaatccttcagtttcctgccatgtgagctaggaattcaaaccaacaatatcataactaaccaaattctttaaacagtttcaataacctaaaccattttttatataacaaattctttgacctgaaccatgtacatataccagtttataagcgaaaataaggtacatacttacattacataaaaccatttgttttatcatcacaaatgagctagaattgaaacctagccctcaaatctattcatctctctgttgatcttctgttcataagatttacaacacccagtttgtatcaaacatctattacaaga

SEQ ID NO: 121405 - DNA, 513 bp, Glycine max
  Clone ID: PAT_MRT3847_80636C.1
ggccccgaaacaaacaaaattggtttggaaagatcaaattttaaacacacccctttttccaaatatttccgggcccaatttttttgggggttcctttggaaggaccccaaattgggaatagtaaaaaggcccaattccgggggggtttttttttgggggcttagataaatccaaaataccaccggttattttggaaagaaaaatttcctaacatacccgggttaaaaacaggaccccgggggaaccaagattcaaaaccccttggaaaaaaaggtttccttccggggggattggggaaaacctaaaattattattacccccccgggggcctatttgggcccctcctaggatttcgggaccatcacaatctcaagcgatggggtttgaaagcgttgaaagccacaggctcaaaagggggaccagggggtttgttgctttgggccccccagggggatttcacgggacggaaaaaaaggaatttgggttagggcatgttttttttgttttgaaaac

SEQ ID NO: 121406 - DNA, 761 bp, Glycine max
  Clone ID: PAT_MRT3847_80637C.1
gctgatacttacttaagaggtgttgtttttctacccgagcgagttgttccagttactgcagaaagtgatgtcgctccacaagttaggatgacagaaaggacagagattccaattccagttccagttcttaacccagagacgcagatacatagttctgttccttcatcaggacagtctaacaagcaaccttttgaggccgaattgcaggtacccgtgtctgtagacctagttctcccaactgagctctattccggcttatcagtttcacttgggaaccaatctgcacctgttgtgacacccatgtctgatttgtcaaagattgactcttctatttccactggaggaattatgccaaagggaatgtcaaagcctggacctgaaagtcagcctgcctctatcttgtctgggtttgagggtgacaaaatcatcaaacaagatggaaaattgcatgaagtcgatgcttccagacaggcaaaggaatctagtgctgatggaggagcaataaaagactatcagataacttctgaacccatcaactcagttccaacagttgaaaacactgagaaggagctcccaactggacagcagtctatgccttctgtttatgagctgaataagttgattgctgatgaaccaaagcactcagttattgaaatcaaccaaatccctgtatctgctgagcgtgaatccatgccaccagaacttaaaaataatactgtcgacaattttatgcagaagcagggctctccagaaacaggtac

SEQ ID NO: 121407 - DNA, 768 bp, Glycine max
  Clone ID: PAT_MRT3847_80638C.1
aggaaacagacagtggggagagaaataggttgatagtgttgatcattatcatcgcagttggaggttgcttattggcactatgttgctgcttctacattttcagcttactaagatggcgcagaaggatcaaagcggcagtgtcaggggagaagaaaaagagtccaagaacgagttccggaacaagccagagccgtagcagcaccgacacaaacggtccaaaactcgtcatgttcaacaccaagatcactctcgcggaaacaatcgaagcaacgaggcaatttgacgaagaaaacgtgctgagcagaacaagacacgggttggtattcaaagcctgctacaacgacggaatggtcttttccattcgcaagctccaagatgggtcattagacgaaaacatgttcagaaaagaagcagagtccttgggcaaaatcaggcaccgaaatttaacagttctcagaggctactacgctggttcaccagatgttagactcttggtatacgattacatgcccaatggaaacctcgcaacgttgctccaagaagcttctcatttagatgggcatgttttgaattggccaatgcgacacctcattgcactaggaattgctcgcggcatagcgtttttgcaccaatcttcacttatccacggtgacatcaaaccccaaaacgtgctttttgatgcagacttcgaagcccatttatcagatttcgggcttgacaagttaacagttaccaacaacaaacacacaatgcagttgaagcctctac

SEQ ID NO: 121408 - DNA, 893 bp, Glycine max
  Clone ID: PAT_MRT3847_80639C.1
aagaaccccagctccagctaccttcaacccaacacacccatttggctcgagcaattactctgccctatcatcttatacattactactattttttactataacttcaataaattcaaagaagatatttttcttcctaataatataccaattcatttcaaagagtgatggattctccacaaaaaaaataatcaagttttgaagaaagaaatcttcactcactatgctcctctgctgcaatagtacggtaaaatgaatcactgtgttccagatttcgaaacccaaatggacgacgacttagaattctcaattcccgtctcaaagaaaccctccacgtaactctctcttcactattattttcaatttttttgtttttcctgaaagcgacgacaattaaaacaggcaaaacgacgagatcatggaactgttatggcaaaacggccaggtcgtgatgcaaagccagaaccaacgacccttcagaaagccgccgcagccgccggaggccaacggcggcgacggcgccatttcggcgagggagattcgatcatctgaagcagaaaactacaataatagccaacacttgttcatgcaagaagacgaaatggcggcgtggctgcactatccaatccacgaagatcctccacccttcgatcaccacgatttcggcgccgacatcttctacccgccgccaaacgccaccgcgagccagaatcgcggcagcgccgccgtgcagtcctcctttcgcacgacagagctctggcatccggctcctcgacctccgattccgccgccgaggcggccggagcatgcgccgagcaggatacacaatttcgcgcacttcacgaagcacggcaatgcgtcgtcgagctcgaaggcggccgccgactaatgagctc

SEQ ID NO: 121409 - DNA, 565 bp, Glycine max
  Clone ID: PAT_MRT3847_8063C.1
tttcggattttgcttacaacaagctaatagttgaacttgagaaaagtgttcctacattggttggcattgaatgtcccaaggatgaaaagcttcctcgtctcaaaatttttgacagacctaagacgcgctgcttcactattttccctatggagtttaatcttgtggttcgccaaaagtttttaaattttgtgaggctcattattaataaaacggacaagcttagttgtcaagtttggaattaatccatactccatgggatggactggtttggccaatatattactgagtaagggcaacgataattctgcgttgcgattatgctagttatgatggtttgattaccaagcaagttatgatcaaaatggcacaaatgataaacagtctttgtggtggtgatgaaaaaattgtgcgtgtaaagacacacctgctgcttggttgtttgtccaaagattgccagttttaaagaaagatgttctcgagaggttcattggggaatcccttctggatttcccctcacagttattacgcatagccattttaatgagatctcatttaaatttttttg

SEQ ID NO: 121410 - DNA, 453 bp, Glycine max
  Clone ID: PAT_MRT3847_80640C.1
tttaggtctttttttctaaaaatgttctttgcttaaataacgggagctgatcacaatattgatttgatacaagctgttatgtttttctactgaatggaaaagaaaactgccatcactaaaacctaacttgacctcaactacaaactaaagaaaattgaattgcttgcgttattgcttaagctcgctgattctaatatcatttggttatctatgctaatcgtttatcaaatccatgccaatgatagccttcctttataggcagcagtatggccattcttgtgctgagccggacaaaagccccctacagcagttatagctacctctctgaccttcacgaatgatcacctttatagagctttctactccttaacaccggcatgagagacactagtcccccgaacggctatccgcattgattataatgaaagccattgtgtcacactcactaccata

SEQ ID NO: 121411 - DNA, 391 bp, Glycine max
  Clone ID: PAT_MRT3847_80641C.1
gtagaaaccctagaaaggggattccttattaatgtgttttcagaaaggaagtgccccggcatgcttgcgggaatactcgactcctttgaagaactgtgacttgatgtgcttgatgctagggtttcttgcgaatacaccttccagcttgaagctgtcacatgagaagtaagataatacactaggatctacatcatcatctaattacttactaccttaatatatcactcttatatagtgatcctttgtaatacttcttaagcgtctaaaatcaggacacaattcttggcttatataccaatgacttgtgaaactcttaatatctatatattactaaggattgcttcatttatatatttgatagttaacatccagttaagtttccctgttaaat

SEQ ID NO: 121412 - DNA, 472 bp, Glycine max
  Clone ID: PAT_MRT3847_80642C.1
tcctgatctacctgaatctttaatggaacctgaaccccatgtgaatgctgtaagggataattattctcttatatcgacttccacatcagagttagaggcagtatatgctgtagttaatgagacttctgattcttgtttggaagacaccaaaaccataacaatggaaacaaacgctgaaagggatgacgatgattcatgggaaactgaagaaccttctggagtggtatcagccagtgttccatcttcaacatcagatggccctgcatcattcaggagtcttaatggcaaaagtgatgaaggagggaatagctgtggaagtctttcaagaatagaaggcttagggcgtgcagcaaggcgtcagctagctactgttcttaatgaattctggggacaactatatgatttgcatggacaagtaacccaggaggcaaaggctgggaaaattgaccttttgctgggagtgggtgtagat

SEQ ID NO: 121413 - DNA, 435 bp, Glycine max
  Clone ID: PAT_MRT3847_80643C.1
ttttagaaagaaaaagtggagcctccaacctttggaaaaaatttactttgcttgcactcaggcgtacttactatataacatttgagagcatgcttaataaacagagatgcttcagcgcttgaagcgcgtttgcccttgtaactaccattgatcttgactttctagaggttacttatgtgaccaccggatttcctgagtatgcacttactatcggaaaagcctgttctttctttaaaaaaggaaatatcttacatgggcgtcgtatgggccctatgtaccttgaccctaattacaaccttacgtgcgcctgtttgcgaacctatacctattgttttgagtcccctaaaacaaatcctgtggccgttgtttattaaatgcgagactggggaaaccctgggggtacccgatttaatcggctggtggcccattgccctt

SEQ ID NO: 121414 - DNA, 723 bp, Glycine max
  Clone ID: PAT_MRT3847_80644C.1
cttccacttcaattcaagagcacttcttcaacattaaaatcaagagtgttcatacgatgttgtcctgagtacccctgaattccaatctccatccttccaagttatcaacaaaacaatccaacaatgttgttttccacttccaccccaacacacaagtgtcttgctctttctttccacttcaaatctggaaatacccagcaccaactacacccacatcatgagtgtggtaacagcacaaccacaaacatcaccaaccgctgaggtgaggctaatcagcacagagttacaagtccaagaatgctacaagttgtatgtggagccaacaagagggtgcagaaaactcacaatggaggatgagtatatggtgtcaccaaagttccctttcaacttcaagcttccatttttcctctccatttgcgaggtcacttgtgactcttacattgaggaagagttggagaggttgcccatatcctctggccttgctcggtatctgaaacccttcattcttgagagtgttctagtatagcatagaaatgatgaggagattagtccttttcttttttagctaggtgagctttttttatttatccaaatgcagttctaacctttttaatgagtaaactttgcttccttatctctataaattccagcagtatatcatggacatggatacagctataaccccatggaattggattcttctttctaattgattacagaaat

SEQ ID NO: 121415 - DNA, 2118 bp, Glycine max
  Clone ID: PAT_MRT3847_80645C.1
aaaattttcacctatctcatcaatttccatattcatgaccacttctttctctgaccttctttcttctcccaccacccaccacaacctcggagttttcgaaagacctcatcataagtcctcctcgtcggatcaaacaggttcttcaggcggtgtgccgaaattcaagtccacaccccctccttctctccctcttagccatcatcttccaccaatattttctccttcttcttactttaacttatcatccctcatgggttaagccttgctgaactacttgactccccagttctccttaactcttccaacgttttgccatctccaacaactggatcatttgctggtcaaggcttcaactggaagagcagttatggggaaagccagcagcatgtcaaagaagaagacaagagcttctcaagtttctcctttcaaacacaaacacaccctcctcttccatcttcaaatggatttcaatcttcaaccggcgtagttcaaaccggatggagttttccagaaattgctaaacaagatggttttgcctcaagaatgagtatgagcatggtgaaaactgaaaccacttctgcgatgcagagtttcaactctgagaataataaccacaggaatggttttcaatcagatcataaaaattaccaaccacaacaagttcagaccttaagcagaagatcagatgatgggtacaattggaggaaatatgggcaaaagcaagtgaaaggaagtgaaaatccaagaagctactacaagtgcacataccccatcaaatggattcagttgccttagatggacaaattactgagatagtttacaaaggcactcataaccatcccaagcctcaagctgcgaagaggaactcattgtctgcctcatcacttgcaattcctcattcaaatcatggcggcattaatgaactaccacatcaaatggattcggttgccactcctgaaaactcatcaatatcaatggaagatgatgattttgatcatactaaatcaggaggagatgagtttgataatgatgaacctgatgccaaaagatggagaatagaaggtgaaaatgagggtatgccagctatagaaagtagaacagtgagagaacccagagttgtgtttcagacaaccagtgacatcgatattctagatgatggatacaggtggaggaaatacgggcagaaagtggtcaagggaaatccaaatccaaggagttactacaagtgcacattccctggatgtccagtgaggaaccacgtagagagagcctcacaagacctaagggcagtgatcacaacctatgagggaaaacacaaccatgacgtgcctgcagcacgtggaagtggcaacaactctatgaatagatcattgccaataaccaataccacaaacaacactagtgcagcaacttctctatacactaataacaattctcttcagagtcttagaccaccagcagcaccagaaaggacatcatcacatttcaaccccaacatgcagcagagttcatcaggaagttttggattctcagggtttggaaatccattaatggggtcttacacgaatcaacaatctgacaatgttttcatcactagagccaaaaaggagcctggagatgactcgtttcttgactctttcctatgctaaaagaatattttcttatgcatagttttggatggttggaattcttggaaggggttggtttaggattttacttgactaataagatacccggttcattccatttatttataacttaggtattttaatttctgtttgtaagttttagtacttaattgacgttgtttatttatgtaacaaaaatttgcattagaattcaacatgagttattaaggtgaaactctaattataacagaagaataacactaaaaatactttaaaaaattacatttaagtttcatccactttttttaattttgtattgttattgtaaaaattgcatgcaagtttttggtatatggtaattttgtattattattgtttgttgtaacaaacacacagattggtatgctattttctatatattttttagtaatcgtgtgacttcagttgggagctagaaactctttttatcattattttagtaatcatgtgg

SEQ ID NO: 121416 - DNA, 769 bp, Glycine max
  unsure (1)..(769): unsure at all n locations
  Clone ID: PAT_MRT3847_80646C.1
gttcaaaccggatggagttttccagaaactgctaaacaggatggttttgcttcaagaataagtatgagcatggtgaaaactgaaaccacttctgccatgcagagtttgacccctgagaataataaccacaggaatggttttcaatcagatcataaaaactaccaaccacaacaagttcagaccttgagcagaagatcagatgatgggtacaattggaggaaatatgggcaaaagcaagtgaaaggaagtgaaaatccaagaagctactacaagtgcacataccccaattgtccaacaaagaaaaaagttgagaaatccttagatggacaaattaccgagatagtttacaaaggcactcataaccatcccaagcctcaagctgccaagaggaactcattgtctgcctcatcatcacttgcaattcctcattcaaatcatggcagcaatgaactaccacatcatcaaatggattcggttgccactcctgaaaattcatcaatttcaatggatgatgatgattttgatcatactaaatcaggaggagatgagtttgataatgatgaacctgatgccaaaagatggagaatagaaggtgaaaatganggtatatcagctgtaggaagtagaacagtgagagacccagagttgtggttcagacaaccagtgacatcgatattctagatgatggatacaggntggaggaaatatggacagaaaagtggtcaggggaaatccaaatccaaggagttactacaagtgcacattccca

SEQ ID NO: 121417 - DNA, 390 bp, Glycine max
  Clone ID: PAT_MRT3847_80647C.1
aaaaaacccaaaggtaatattttaaaaataaaaaaaaacaaaaatataaagttataacaaaaccaaggggggaacaattgtaaaaaaaaatggcaaaaacaagagggggggggggattaaaaagacccaggcataaaaaaaaaaaacaaaccttgggggaaaaaaaaaaaagggggggggaattaataaaaccaacaaaggtgggctaaaaagtcaaaggaggaaaaaaaatggaggggaccatcgttatcgcctttggaatccagggaatgggaaacttaattggctttggagggattcgaccaaaaagggaagttaaggctcggaacccaacgggggttcttttggcaaaaaggaaggggggcctaaactaccccggccctttaaggg

SEQ ID NO: 121418 - DNA, 326 bp, Glycine max
  Clone ID: PAT_MRT3847_80648C.1
cccaaatgaaaatatttttagcataaaattggttaacattaacattatttttttttaaacaaatttttttgaaagcttcttttcacatgatttgaaaaaattccaacaaaatttctgataaacataactgggcaaaaataaaggaatgccctttgagcaaaaaccaaaaccttatgttggtttttcaggggaggactttccaccttttaagtccaaattcccaccccaagatgtttcccaactctttggaataatagcttttttatcttcaattaaaattctaaacttttttaatcagggggaaagggtccttaataccctaattt

SEQ ID NO: 121419 - DNA, 259 bp, Glycine max
  Clone ID: PAT_MRT3847_80649C.1
ataaaattcttccaccaagttatgggcctccttgtgttgcttctgggctccctcttaggtctctctgctagttccaggatatcaactcatcgttccagattagaccttgacctaaccaagtcgaccacacagtgacagggtcgtcactgtgccaactatggaagagtgagcatggacgtgtctacgataaccacgatgatgagggaaagagactggagatgtccaagaataacttgagctatacccgggacatgattgg

SEQ ID NO: 121420 - DNA, 467 bp, Glycine max
  Clone ID: PAT_MRT3847_8064C.1
ctcacgcgtccggtttacaaggagcaggtaaagcttttccaaacaagattgttccgacgataagcttgtgttgctaacacacaagaattctttgatggaaatttttcagtggattcttggttaccaatttttgtgaattgtctttatcctgtaagtcaattaccttcagaagctgtcgttgcaaacgtcacatgcggtagtggacgtggtggtttacccaccactgcttggattatgtctgcagttaccaatcgttccttatatatcaacaaatggattcgcacagtactcgggataggtaagaaaattgttttttttactagagttgatccttttccagtagctttacttggtgttctttttggcgttaagaatgataattttggttctaacgctccttatatctattctgtcgccaatttttgagaaactgtatgagtcttaattattatgttgatgagtgccct

SEQ ID NO: 121421 - DNA, 399 bp, Glycine max
  Clone ID: PAT_MRT3847_80650C.1
agggtcttgaggggaaaaattggtaacccctttgattaaattggaaaacagcaaacccccaaaactgggttccaactacaaagaaacattacaatcaatttgggcttaaacaggggcagctgatttagggtatcctctaaagaactgggggggtttgggtgaggagaaaacactatctggggtctctaatctattaacacttttaacacaaaaactcgaactatttatgttggccccctcaaatggttacaagaaccttttgaccattgacacaactgttaaaaatctttggggtcataaattgctttttgatcccaaaggagcccaagacaaattgggatgtacactggtaccaacattggctagatatcaaaactgacaaaaagcagccccttatta

SEQ ID NO: 121422 - DNA, 187 bp, Glycine max
  Clone ID: PAT_MRT3847_80651C.1
accatgttgtaccttcttgtaaaatatctgtttgatgaggttgtcaaattggattcaaatttttattgttgtaataaattaactgctgaaaatgtaagaaaggattattccatattggatccaatccacgagagattttgaggctcaaaaaaaaaaaaaaaaaaaaaaaaaaaaaaaaaaaaataaa

SEQ ID NO: 121423 - DNA, 215 bp, Glycine max
  Clone ID: PAT_MRT3847_80652C.1
ctcgagcctcatgtgcttcctttcaatctctctcatgacactatacaatctcagatctgaattatctcatctatctagaccctctatattatgtctcattgagtccactgaaaagatcatatttttcagtgaaacaaggattaagaatcaacccctccatgttgatactagtgcttggactagcttcagctactgtacttagtactgttgttgca

SEQ ID NO: 121424 - DNA, 345 bp, Glycine max
  Clone ID: PAT_MRT3847_80653C.1
ggaaccgattgtatcattaactcttattctcttccgctacggctaacaatctctatctatctacaaagtgtgttgtgtactgtacacaaaaaaaccaggattctctgttggagtctgactgacgcacctggccaacagagtaccatgcagcctctgcatcgcctggaatcacagggaagcgtatactcataaagcgttataaataatcattgaacacagattcacatgtcacgagctcgagactatgatggacatacatgcttagaagggaactatgggaatgatggacataggtaaaccacatcagaattgcaagactcggaatacagatggcgatcgaggatt

SEQ ID NO: 121425 - DNA, 362 bp, Glycine max
  Clone ID: PAT_MRT3847_80654C.1
gagaacaagaaacacgggccatttttattgggtttttaatggtcccaaccttttgaaagcctgtcgttcccgagatgaattatgctttggggggggaccaaactaacaacagggcacgtggggtgggagctccatttccagctttaagctaaaaagggttgggccggggggcaaaaattcaccacatcacatttttatttttttattatacacacatttttgttggggcccaagatgcccttatttaacaacattttttttttgggggggaccctccgtggtttaattgggaacccacaaaatggacttgttttcaagggaatggcaaagagggttagttccaggatcaacttttatttttt

SEQ ID NO: 121426 - DNA, 1419 bp, Glycine max
  Clone ID: PAT_MRT3847_80655C.1
atctttacggctgcgagaagacgacagaagggggaagttcaacatactaagtaggagagttaaaaatgggtctagagagccactctagaatttgaaaataacacctttatatatataatgatagataatgttcaattctactcataatcttattgctctaataaacagttactcaaatgtcgcagtctctgcacgtaaagacttcatcaacatttatacgacttcacttttttttttttttgaaggattatacgacttaattcactgagtagctcgagtggtggggtagcaatatattggaccagaacataactcatgaatatacaagcaagttagccggctcaagttcaaaataagaatttttaccatgatactatgggtcaaaacataacaagagaggggagcatctcagctcaggatttcatggatgtaacttccgggaatgtgttgaccgcgtcggtgacgcaataccgcgtcacccacaataacggtgacgtacaattgcgtaactggcgttgacgttacagtccccactcttcccccttatttatattttcacctctatcctccactaatcctctcctcccccacacacgtctttctctctccaccatgcaccaagccattccctaccgaacctccatcctgaccggaacatgtgacatggcacacgccggaggaatcaaagaattcaacctcgccaatccatccaacgttgccgcaatggtttcggagagcgcagtggtaatcattgggaaacgggggtgctgcatgtgccacgtggtcaaaaggttgttgcaaggtctgggagtgaaccctcccgtgtacgaggtcgacgaggaccacgaagccgccgttgctcgccacctgttcccgcagggcgccgaaacggtgcagtttccggcggtgttcctcgccggcaagttgttcggagggttggaaagagttatggcaactcatatctcaggtgagttgattcccatcttgaaggatgctggtgctttgtggctctgactctcactttagctacctacatctgctctttctttcttttttttaaacctaatttctcgagtggggaattaattatataaagcgatattaattttcttaggttcaattccctccttttttgtgttttacttttctattcctgcgtctcttagctgggcaagatgagaaactgcgttgttaataactccgttgtgctgacaagcctggatgagagattttgtacattttgtttcaattagttgatgtcgacgtacaagttcatcaattggatctcaagaatttactgcaaaatgatgtcaattatgcttctagaaatgtttttctcttcttgattaaaaacaaagggaaattaaactagactgaattagtgtatcaacaggcaaaaaatgggttggggtttttttt

SEQ ID NO: 121427 - DNA, 457 bp, Glycine max
  Clone ID: PAT_MRT3847_80656C.1
ggttcagatcgaattagaacaataacgcgcacgggacaaaaattgtaacgtaccgtattgcaatccggccaaagcaagcaccgaagtggaagtcctcatcttattaaccctgaagtgctgctcacactaatcgtggcagcgcaaggtgtccgttaactagtgacctagacaaggggcttctgccgcggggccaggacggcggttaatatatatagatgtgagacgcaagggccgaggcagctcagcccaattttaaagtgcaaattgaatctcactcaggagcgccatgttagcaacggggccccatagccaagagtgccggagatcagagctgggtgggccaatcccttgaactacggctcgctattggcgtcgattcaggagaccatgatatcacagggcatgggggatccggcagttccgctgggcttagaagctagaggcccgactttgcaac

SEQ ID NO: 121428 - DNA, 952 bp, Glycine max
  Clone ID: PAT_MRT3847_80657C.1
cccacgcgtccgtacggctgcgagaagacgacagaaggggagacaaaaagggatcagtggaagtgaaggagtttaagatatctggagcatagtgtgttgttctctgtttggaaggcagcggaaacaaacatgtcgtggtgttactgcgctaagcctatgactttgcagttgccgttgcaaccaagagcatcatcatcattccattcccacgttggaggagtaacagtaacatcctcaacactgtctcttcgactctcttctactcttgttttcacccacaacctccacttccaacccaaactcaaacgcgcttccacaaccgttcgatgctcctcggcattgactcctcaattgaagtctaccttggatcaagttattgcttcaaataaagtagttgtgtttatgaagggaactaaagattttccacagtgtggattctcaaacacagtggtgcaaatattgaagtctctaaatgtgccttttgaaaccataaacgtgcttgaaaatgacttgttgcgccaagggctgaaggagtactccagttggcctacctttcctcaagtctacatagaaggagagttttttggtggctgtgatatcactgttgatgcatatcagaagggggaattgcaggagctgttggagaaggcaatgttgtcctgaagctatggaaggaatgaggaggacttcccaagtttgtactttgtaatcttccccctaaagttatactgtggctcagtgacaatggaccaaataaattgtatgatgcattttgtgtccacaattgcctattatgattactgcaatacaaatatcccggtatttgagtacaaaacagataagtcacaaattacccttaattatgtttgtatggatggaaatggttgttgaattggttggtttatgaatttgggttatcaaaaggaaaaagagcaatgttagttgagcattc

SEQ ID NO: 121429 - DNA, 568 bp, Glycine max
  Clone ID: PAT_MRT3847_80658C.1
cattaacttcctgtctagcaacagcaagtgaacgaagccctctttcagcaaacttgtcaataatagcatgaaccttcttcttagcatcatccctgaggttacacagggacatgatctgctcaggagcacctttgcttgccctgtgccaatttccattagcatcaatgtaagtcaaagcagtcctcttgtcaacaggattgaatggtagaaagtgcacctctcttatcccagcccttgcctctttaggatcagcaagcattcccacacggcagcatcaatggcatcctggttttcagtcctggcagccctggcagcaagaaggatcacatgatccttgtccacaccctttgcaaagacctcaaccaagttcttgtcaacagtgagtttgttgagggtgagtgttcctgtcttgtcactgcaaaggacatccatgcctgccatttcttcaatagcagtcattctcttagtgatggcaccttgttgggaaagcttgtgagaaccaatggccattgtcacagacaacacagtaggcatagcaatgggaatccctccatcaagagcaccaaca

SEQ ID NO: 121430 - DNA, 569 bp, Glycine max
  unsure (1)..(569): unsure at all n locations
  Clone ID: PAT_MRT3847_80659C.1
ccacgcgtccgcgtctactcgatgaagaaagggcagattgtgcgcgtggacaaggagaagtacctgaacagcatcaattatctgtcagtgggacacccgcccttctacaaggggctggactacatataccaagaccgcggcgaggtcttggatatcaggaacttcgaaacaggagaatacgccctgatcgcttgggtggggatcccgacgccaccggcatggctaccaacctacatgctcatcaagtcggacaagctcgactacgagaggatatgatggccggccggcggcctcgcagggcaccgtagcgccgccgccgaattcatgcttcatttcgcatcaggagtcggccaagcaggacacacctcttgttgttgacttgttgtaggtatatacgtacatgccagtattgccagaacagtcgacagaggcaatctgagacctcagctgctggaataatcaggaagtagatcgagagcgacgtacgatgacgagattcataattgctgctgcacatcacttctttatgttatntaaactcacatttcataattaatactaataatata

SEQ ID NO: 121431 - DNA, 541 bp, Glycine max
  Clone ID: PAT_MRT3847_8065C.1
cttttcgcaaaatttttgacaaacctaagacgcgctgattcactattctccccatggagtttaatcttgtggttcgtcagaagtttttaaattttgtgaggttcattatcattaaaagggacaagcttagttgtcaagttggaatcaacccatactccatggaatggactggtttggccaatatattactgagtaagggcaacgatattctgtgttgcgactatgctagttttgatggtttgattaccaaacatgttatgagcaagatggcagaaatgataaattgtctttgtggtggtgatgaaaaattgatgcgtgaaaggacacacctgctgttggcttgttgctcaagaatggcaatctgtaacaaagatgtttggagagttgaatgtggaatcccttctggatttctgcttaccagtttttgcaataacctttttaatgagatgcttatttgatatagctttgaaaaataactgcccccggcctaagcttcaagtattgtttacacacttcaaaaatttgtgtctttgtgtgcgat

SEQ ID NO: 121432 - DNA, 459 bp, Glycine max
  Clone ID: PAT_MRT3847_80660C.1
gttagtttgtttgaagcttggaatttcaatgagtctcgtgacaagcacgttttgctagagagaacttccaagtttcaaatgttagattcttgtaaccataaactcacttgtagtagttatttttgtttgatcaaactcggagtcttacattagttatatagtttgttttataaatttaaaaattatggatcccaacattcttatttatgcttacaatgtccatatgatgttccagtagctaatgcttgtagtagatctgaagctattccttcagagtgggctgaagctgaacaaatttcataggcaaatgaaaggtctgaaagacttgagctacaaatgaaggagtggcaggaacaaaatcagaagacacaagaggagatgcttaacacccttaaagattattgaaaaatcttttaatatggataccaatacataattattctttagagccatgatact

SEQ ID NO: 121433 - DNA, 1095 bp, Glycine max
  Clone ID: PAT_MRT3847_80661C.1
gaccacgcgtccggtttgtacagtgatttttttgtctagtttcacaattttaagatgaactaattccttttaggttgacaaattaagaaaatattttaaatttcaggaaagttatgataaacctctagattgtggaagagattttctcatgcctttcaaggagatttcatgctccatggttgaatgttttgggctgcataaacttaaatttctcgtttataagatcactctggtggtgttataattgcatgttttcaggtgttgggggtggactcaatggcagtggatgaaccatgcatcaaagaggagcaggataatttaaaagagctttctgatcacaggtcacgatgaagcaataataagcattattgatcaaccttctccttgactagtaaactgaagacatatatggtgcaagcttgccttggcttttgatgtttaatattactgcaagatgaatgtagtagttattttttctgtatgttacactatggtaggagcctttgtcaagggagcagctcattgttggatccgttgagatgaagtaataacattcatcttgtgtttcttggaaaaatgattaaacaaacacatgctttcaccataaatctagtttgtcatttatcgatagcggtgcttagtggcattgggccactacaaggagaccgttgcatctcagttcagtggtgcgtgcggccattgcggctgtatcccagagtggtggaacgtcagattgtttcaaaatcttctagaagatctgtctgaagttgtttcaaaatcccaaaaataaccttactgagtggtggtagtggggccattttgggaattttaatattgtatcaagtatcaacatcaaagaacaaaaaacccctcgacccttcattctcctcacttgtgcatgacagcctcttgctttcactgaggtacagtcccttaattttttggaattttcacttttagtcttcaataatttttttactaattttggtccttgaacttttattttgttaatactttttgtccctattgtaaaaaaaaacaccgttaaatgatgactttaattttattatgtttagtgacagttaattttttgtc

SEQ ID NO: 121434 - DNA, 389 bp, Glycine max
  Clone ID: PAT_MRT3847_80662C.1
gctcattttttaacctaatcccctcagccttcacttcttcccattccttctcagtaacccccttcaagttattaatattatcaagctctctttgcatctcctcctgaaagtttctctccctttcctgcaagtctttctccatttcctcctgtcttttctggatttcattctcaagattcctcatcttcaattcaaaatcttgaagcatttgtgccttttcatttttcaccttttcagacaaaagatgtttctcttgcttcattgaatctctaaatgattccttctccgattcaagcatctccaggtctttctttatattgaccttgcatatgttggttctcacttttcaacctttcttcttcactgttccgaaattttcttaaactttc

SEQ ID NO: 121435 - DNA, 397 bp, Glycine max
  Clone ID: PAT_MRT3847_80663C.1
aaaaagaaaagtctttttgtttggttgtctttcttgtgtcaaacaaaatttattagtgttgcaaacttgcaatccagttgtaaaaaaagtaagtattatttattatgcttgtgatcataagcctaactttggaaaattgtattaatcttgttagttctcttctaagattgggggctgatgtgttcaatctgatcatgcaagaagtactagtgctacttcttctactccatgtctgacttctgaaaaactgcaggttgtgatgaagagggccaagagtatggctcaagcagcatgggcacgtccaaaccttaatttgtcctcttggtcatgcatgggacctcgtcgaagagccatgagtgctcattactccagagatgggggaaattcccctacttct

SEQ ID NO: 121436 - DNA, 489 bp, Glycine max
  Clone ID: PAT_MRT3847_80664C.1
gttggtgccaattttgcttctgctgggataggaattctcaatgacactggaattcagtttgtaagccatttttttttttaagttgtgatgaatgattttgctaattcaaccccgataagtttattttagtttttgttttggttatactttttatttaagtaataatacacacacgcagacatgaatttttatttatttatcaataaacacttataaaataaaataaaaggataaaatgattttttttttataaattaaaattaatttatggataagttaaaatcaagttatagctaagcaagagaagtgaaaactttaacacttttttatttttatttgtaagaatcaaaaacaatatcaggaaatgacttatataaaaattaatttcaatttattaaagaaatttattttattttactttgtttttttttctctccaacaagttattatttttaaacattcctgtttaatcaaaagaggagcagggac

SEQ ID NO: 121437 - DNA, 265 bp, Glycine max
  Clone ID: PAT_MRT3847_80665C.1
ttgtaagatgatagaagggaatagtagtgagaagattatagaagggaatggtagtgagaggatgatagaaggggatagggggaataaaaaaaaaagaagaggaagaagaataatatggaggtgttaaaggtgtgtaaggagtagtagagattatgagggggtaatagtagtatgtagggaatagaatgataataaaagagattagataataagataggatgatgaagagaaaataaaattaggttgtgaatgtggtaagagtata

SEQ ID NO: 121438 - DNA, 293 bp, Glycine max
  unsure (1)..(293): unsure at all n locations
  Clone ID: PAT_MRT3847_80666C.1
gnnntttgntccatctataacnacaggnaggcagaaattcngtagcgttcatggaatgtggcngcanttccttgcnaaggaanttccnnncatgacaatcagnccatancntnactacantttcngaatnccagtctacnggtatgcaattnaaacatgtcngtaataagctgttttctaggagatatanggttagtggtgggagangagaggggagangtcgtnggntcganccccccttttacatctntnacaaanttancaagctnacaatttgcagtaaaaaagaagtt

SEQ ID NO: 121439 - DNA, 342 bp, Glycine max
  Clone ID: PAT_MRT3847_80667C.1
atcaccattactgatggcattgacaaaactagcacacctgtgtaattaataaagcgggtagattgctatcctctcatgagaaactctaagcagatgcctaatgttttatgattggctcctgaggacaacgccagtttatggtcacaacttcattatgatacgtgcaatactctgaaaatgcaagatgcttatcttgtcaatctcataaatgtgttacgagaattggatatgcacagtccagaagaagctcgccaattgagaatgaaagctctctctcgcattgaatggctgcaaacagctgatgtgcctaccatagcacagattgaagagctccattccctg

SEQ ID NO: 121440 - DNA, 268 bp, Glycine max
  Clone ID: PAT_MRT3847_80668C.1
actgataatttaaaatttttatttctctaggataatatacaagcaaacataacccaagtagcggggttacaaaccaaccaaaccacagactaattgcactcgaattagcaaccatatacacgcacaatttcttacttttgtttttctcactcattaatagatcacaagattggggaaaaggaaaatgattgagagagagagagagagtgagagagagagagagtaatttatgcgcacccctctcttcttattggctcataaacctttt

SEQ ID NO: 121441 - DNA, 432 bp, Glycine max
  Clone ID: PAT_MRT3847_80669C.1
gatttgtctttggaacaagggtgtcgattctgaaagtttccatccacgattcaagtcccatgaaatgcgattaaggctgaggtgcagaccatttgccattttcatgtgcccaaggtttgatatttaatggggtttcaatttattcttaatcttgtgtcatacagcaatggtgaacctgagaagcccttgatagttcatgttggacggcttggagttgagaagagtttagattttctcaaaaggtaaagaacatactgaaaatttcacaacacaaacttatgattttgcggtccatcaactggaacattgctgaaaactttttgttggttattaatgtactgaagcttaagatggtcataactttttcaagatatgttttccaaatgttctgtttgaaatgaccctatctttctgttacttctgttctttata

SEQ ID NO: 121442 - DNA, 699 bp, Glycine max
  Clone ID: PAT_MRT3847_8066C.1
ctattttcaaccataaattcttacaaaattaatatatttatgatctagacacatttccagatgttttcctattattccattcatgtattccctgttgatattgatcctatcaaatatcattgtcaaacacattttattgagttgaactggtcagagtctagatcagcttgcttttgaagttctaacaaatggattacccttgaagcatttgcatgaatgttcatcttctaagaccatatttacaaaactagtatttattttatatttttactctttgatgtaggcaccctttgctataggaagttattcccttattcgttgtgagagggaaggatgtgggtggtagctacttctagagttaatgtttgcattctattatgtctttagggacattaatcatctgagatgaagatgctaggcataaatggacttctaatttcccaaagagcgtttcaatgaaatcatgcagccaagctctatgtttaattacgatatatctattctgcatgttttctcttttgaacagattgaaaattattatttttgctgcttggtgaaatatacttttactgttaaaattagtttgaacatgaagtctgctgaactggatgtgacattgtgatattactaaaattttcagtgtgaggattatcaatgtaacctttcttttgttcaattgcagttgagtatgggcaggtt

SEQ ID NO: 121443 - DNA, 437 bp, Glycine max
  Clone ID: PAT_MRT3847_80670C.1
tttttggagtgaaaattctggtacaaactgtttatgacttgacttttcagaatggggcacgcacgactatagaatttaaggtgagtcaactgccaacaaatttttgtttgatttagtgaagtttgcagaagatgataagcaacctcagatagtatcacactattttgtttatcagtatagaaaattaatgcgactatgttttaagaagaaagaaagacaaaccaaacaattcctatccgctttggtcttctctctctctctctctatatggacatatatttatttatcaagaggctcacatacatgatatccactagggaaggatgataagcacaaaaaaaaactctggatatttactattcctttcctcgttctttttgtatcaactccctgtgtagttactagccttaatgccggccactagcactctttgcatt

SEQ ID NO: 121444 - DNA, 290 bp, Glycine max
  Clone ID: PAT_MRT3847_80671C.1
ttgtggttatcgactagggtcagaacctagggctcatattcttctgttttgctcaatccttgcaatctcgcgttacgcatgcgatgcttctacgctcagttaattcaattggagctagccctgatctatcgaaaactcaaggcctctgaggtctgagggtttactgatctaaattttgataaatgaaggcagagacgatgactatgaatacgaatgccctggtgattatggatgtgcagatcgatggagatcccgatctaaggattgctgtagagctaccctatgatgat

SEQ ID NO: 121445 - DNA, 225 bp, Glycine max
  unsure (1)..(225): unsure at all n locations
  Clone ID: PAT_MRT3847_80672C.1
tagagcggccgcttntttnttttatttnntttcttttattccgaaataacctacaccaactccnctcacaaaaagcggcttttcctactcatttccaccacaacccaataaaactcttcttccttaaatttaaacaacaactattcaatcaaatgaatctaacctcctataaccccaaactctattaggactttcctaaaaaataaacaaagaaaaatctcaacc

SEQ ID NO: 121446 - DNA, 582 bp, Glycine max
  Clone ID: PAT_MRT3847_80673C.1
gggatgcaatcctaccgtagtagtacaaagaaataaacaatatgattgatatattacactaattattttcagcacaataaaaatgcgcttacacactaaacaccaataatattttgacacaaacacaacagtgatattattatccgttgatgtgtatatttaatttagtttactattgtacatgtgtgtcttattttctattgcattaacttatttttatgatgataaattttttaacattttttatgagataagacataagtcatacttttttttaaaggacataagtcatatacataaaacttataaatcttacacaaaaccccataaatcttttttttgttgtgtacttgttggatttaatgttgtaaataaaaacttaaacaaatagggtaaaacttataaaagaatgattgatttatagtaaaatattagtctttctacttaaaacccaattaacatatcaatttattatattcatagatggaaaattaaattaaattctattttgttcttgtatgcaatgatgagatctgggtcgtctaatttggaacatttgcttgcagaaactttttaaaacta

SEQ ID NO: 121447 - DNA, 611 bp, Glycine max
  Clone ID: PAT_MRT3847_80674C.1
ttatgtcgattcatgcaagaaacatacgaattattacttatgcccagaacattttctctagaggtaacgtgcgtactttatagtcacacacccacggtgttgtgcggcaggcaaaaaatggggccttcctaactcatgactgaaaataccttactgcttggggaatgacatcgttcctcggcaacaatttcctttaaccttaacgttttccaatctacctctattacgcccccttggaaagtgtgcattgtggagtcacatgatctgttcagcggatgaacaccctcccttcattttgatgaactgtaacttgcgagcatgatcgcctttgctgtgaaccctaaccaaaacctcccgcctacttcatggaacctcctgtatgaatggctctctaagacttgggcagcgcgatcttctcaagatatctgcaaccattgtcatgaactgtataggcctgatgccatgctgctaaaacatacctattaaacaacgcttaacactgcttaaaaaccactacattctatgccggctaatccaattgcttataccacaatgcgtaaatttattttatcaaacggtgcagtcagcgactgccctagaacgccttcact

SEQ ID NO: 121448 - DNA, 391 bp, Glycine max
  Clone ID: PAT_MRT3847_80675C.1
attacgatgagtgcgcttgaaaacagggctagctctaaatttgccctctgtgaaaaattttgccagtaccccacttcacataattgctcctccttctgtggttggaacaaagggcaatttgggattggtatatttaatatccatcaaggaccctttaggttttgcaacatgggaaagaaacaatttaatcaatttggtttccatttgatcctgaacctcatcgtgttggggatctatcctttgactcactttggcctctcccttttaaggtctgtgttgatcttacctttcaggaaaatattttgaaaattgtgaaccaaaggcatgcacataatatttggaagctgttccactaacaaatggtgcttctgaagaagaaaccttttccagt

SEQ ID NO: 121449 - DNA, 409 bp, Glycine max
  unsure (1)..(409): unsure at all n locations
  Clone ID: PAT_MRT3847_80676C.1
cgaccagcgnccggaacgaagcggaaaggaggaagaaagaaagaacaacacngacggaacagaacccaagcgcaacacngncngcagaaccaggnaaaaagagggccaaggccaaacgagccgnnaaggggggaaccgacngacnacaanacacacgcgacggacaaacaagcggagacaagccaaganngngnaacaccgganngcggcggccccaaccaagaagcaccaccaggacaggcggccaaacaagggggcccaggacaaccacnnngagcgagcnacaacggaaccgaggcaaggcggggggcaggncagaacagggacagggccagggagagcgagaaagcgacagaaagaaaaaaacggaaaggaccccacaaaagacagggggaaagaagagcaagag

SEQ ID NO: 121450 - DNA, 321 bp, Glycine max
  Clone ID: PAT_MRT3847_80677C.1
accatgcgctcgtttttgagagcaagatgatgcactcaacagaacccgggatggctcctaccagaatagaccaaaattcgtgtgagggggccctgcctttggattcggagcttaagcatctactatacggaatgatgacgttttataataaggcaccatattctatgtcgcccgcattggtctaaacaacgctgacgtggtagaatgctagcgtcgaccaggttggacccctttgaataggtgatctgtttctctggatggacaaaaactatatatacccctgctttgctcatcccctcaagaggttcccaccttaaaggg

SEQ ID NO: 121451 - DNA, 949 bp, Glycine max
  unsure (1)..(949): unsure at all n locations
  Clone ID: PAT_MRT3847_80678C.1
gtgctacacattctgccagctgtccatttccagagtcacttaagttatcaaaacaagacaactacttggtgttgcaggtcaaagaaacattcggggtggaggatgatgctacctaggaccttctttgctttcttactctttgcactgagttgcttcagatggctggaatacgcagaatccaaactacccaaactaccccaagaggaggttgatgctcttaaagaaatcactagcacgatgggtgcaacctattgggagtttgatagtgattcttgtcatagtaaaatgctgagattaacaccagagccacctaaaggatctcaaagcagcattgattgtgattgcacttctgaaaataacacctgtcatgtagttgggattaccttcaaacggctcaaccttcctggcatgcttccaccttatttggctaagcttcctaacctcacacaagttgattttgctttgaactacctaagtggtacgattccaaaggagtggggttcaacaaaactaactaatatctctctatttgttaatcgtatatttggggaaattcctaaggagttgggaagtattaccactctaacatacctgaatctcgaagcaaatcaattttctggtgttgttccccacgaacttggaagtctctctaacctgaagactttgattttatcatccaataaattatctgggaagttaccggtgacatttgctaagttgcagaatttgacagatttcaggataagtgataacagtttcaacggagaaatacctagcttcatacagaattggaaatcacttgaaagattgtgagataattgcaattcattttttttattcttgttttcaacaatacttcaaatgcactctaaattttcacaatagataaagccttcattatggttattccactctaacatacatgtaagtntctcatttatttatttat

SEQ ID NO: 121452 - DNA, 725 bp, Glycine max
  unsure (1)..(725): unsure at all n locations
  Clone ID: PAT_MRT3847_80679C.1
caagtgcgtgctacacattctgccagctgtccatttccagagtcacttaagttatcaaaacaagacaactacttggtgttgcaggtcaaagaaacattcggggtggaggatgatgctacctaggaccttctttgctttcttactctttgcactgagttgcttcagatggctggaatacgcagaatccaaactacccaaactaccccaagaggaggtgtcattttttttcagttgatgctcttaaagaaatcactagcacgatgggtgcaacctattgggagtttgatagtgattcttgtcatagtaaaatgctgagattaacaccagagccacctaaaggatctcaaagcagcattgattgtgattgcacttctgaaaataacacctgtcatgtagttgggatgtaaaaatctccttatcttatcctgaatgctttgaactttgaagtagtttatgcttcgctatattttctgatatagctagattttaatatatttaatctatagtttccttatagtcgtatgtatgagaaattcattgtggactttanattctgaaacactattattgaatcttaatactgcttgtctgagcctatttatttattcttaaacaatntttccatgttttagtaccttcaaacggctcaaccttcctggcatgcttccaccttatttggctaagcttcctaacctcacacaagttgattttgctttgaactacct

SEQ ID NO: 121453 - DNA, 503 bp, Glycine max
  Clone ID: PAT_MRT3847_8067C.1
ccacgcgtccgtttttctaggagcaggtaaagcttttccaaacaagattgtttttgatgataagcttgtgttggctaacacacaagaattctttgatggaaattttccagtggattcttggttaccaatttttgtgaattgtctttatcctgtaagtcaattaccttcagaagctgtcgttgtaaatgttacatgtggtagtggacgtggtggcttacccaccactgcttggatttagttctgcagttaacaatcgctccttatatatcaacaaatggattcgtacagcacttgtgagaggttagaatatttgttttcttactattagttgaaccttttccagtagttttacttggtgtactttttggcgataagaatgatattctgtagttctaacgccacttaccctatgttgacgcgacttctttagaactgaaagagtttataaatcttgagggtaaaatggccttttatttttggtacctatttcatttttttgttta

SEQ ID NO: 121454 - DNA, 293 bp, Glycine max
  unsure (1)..(293): unsure at all n locations
  Clone ID: PAT_MRT3847_80680C.1
cgtcggnggtgccggcgaaccttttttctcgcggcgaaccctgcggaggagatggacttcgagactactgagggcgtgaaggccatcgaagcttcaggagatggggatcaaggacatctgtccgcggatctaccagtacgttcagaagcctccgcttagcaggggccgtacgcccatattagggccggacgtatcgctaggcccaatcggacggggaaaacgtcatgattgctctcaccgttgccaggtcgtcgatccttctcagagaggttaggcattgatattgtcaccaa

SEQ ID NO: 121455 - DNA, 664 bp, Glycine max
  unsure (1)..(664): unsure at all n locations
  Clone ID: PAT_MRT3847_80681C.1
ggctcttaaggccacnnnggcannnnngccggggtctgagacgaagttggactggaaaactattgaggggattgctgaggatgtgccgtgttgttctctggcttatgatgcggttttgaatctgtcgttggtggatcttttggtctcttctggtttgttcgagagtaaatctgctgcacgtcggttgttgaagcaaggagggctttacttgaataataacagagtggataatgaaggtaagaggattgaggctgcggatatagtggatgggaaagttcttctgttatcagcaggcaaaaagaataaggtgctggtgagaatagtttgagagtatttattggatagcttagtattctttggagtctgtctatttgctctgtggttttgttgtacttttaagaaacctttgattttcttgttacacagaagcttattccttaagtgttgttttccaatcagaattagagtttttcacctcaatagctttgctagtctttaatgcaaacctttatttcgcagattattgaggtgaaatatcaattctgtttggagaatagcaccaaaaataattaagagactgtatctaaattttgtccttcaaatgacacctcttactcgcatccattatttggtaagcattgcggccaagtacttatttatgggt

SEQ ID NO: 121456 - DNA, 448 bp, Glycine max
  Clone ID: PAT_MRT3847_80682C.1
tgcaagtaacttagacaaatgacttgtgttttgatgacttatgacttatttgttatttatgcacatatgcttctattataatgtaaggatgatttattatcttgtttgatttttataagtttttctctcttgtatgaatacatttattgtatgtttattcatttttatataatttgacatgattagatttttgtcaaaattatattaatatgctaaaataattgagataagtaacgagttaccatgtatgtgttcataactaatttttgttacttagaattaagttttgattctctgataatagatttagattataattatatattttttaaaaccttgtatttaactatgtttttatgacatttgaacacttagtatttcttttaatacttgcttagtatgactaaacatgatgattatattgacttgctctttgttgtttatgatt

SEQ ID NO: 121457 - DNA, 316 bp, Glycine max
  unsure (1)..(316): unsure at all n locations
  Clone ID: PAT_MRT3847_80683C.1
gttgangcacgcgtacgtaagctcggaattcggcnngagggnttgngncngatnnaagtngatagttctnacaagantangnganggcagnaanngtanaaagnnaaagcntaaagacgntggnaatgaatggatcnncnntncnaanggnatntggaaattaggttgnggacatnntcnactaattgttaatctnnngcttntgagnancnggcntcntngaancntgagaaaanccnanaananaaggtgaaannngcaaanaaccggangggncaggtaagnatgcnttgggnnnaaggnncaggtagcngnn

SEQ ID NO: 121458 - DNA, 321 bp, Glycine max
  Clone ID: PAT_MRT3847_80684C.1
ggtaatgcggctcgagactacttgtcggaatggcctttgcttaatacgccggaacgaacagccgagttaccatgtgtcttctgggaattgtgtctaggaacttagactgcggaagaggattggcgggagcacttggcagctcgcaaatgccttagggacacactgctgcatcgtaaccccatgaaatgacgccagcatcagtgcttgtccacactagaagcagcgacgatctgtctggaacgaacacgccacgaatcggcagactgcatgcatcagaataagcctatgagatcacatgcgcaccacgagacttaccgacag

SEQ ID NO: 121459 - DNA, 415 bp, Glycine max
  Clone ID: PAT_MRT3847_80685C.1
gggcgggtgcggaattgtactctcgttccatgcgctccgatttgtatattggagcacgtactaagcatgaaagcccttaatcctataactagaacctgacgtgataccaatgactagtagatgcgtaaatcccagcatctgcatcattgcggcgtggataccatcaagatggatcttgagaagatgcgaatgcgatccttgttgagccactttagcatgatcaatgatagcgatcacgtgcgcgttcctgagtgtagaaagactatgagccacgactattgatgatataccagaacaagcctgttctaatgcttcttggactgaactctgggactctgcagtaagagcgctagtagccagaaaaagcagcatgatgtctgcttttctgacgagggcacgtgcgaatcggatccta

SEQ ID NO: 121460 - DNA, 944 bp, Glycine max
  Clone ID: PAT_MRT3847_80686C.1
gcgttaaaatttcatcgcgtgtaaatgatctacacttttatgttctgatggataattttgactggatatgaccgatatcggattatctccggctgtacaaaattttcaaaaaatttaagcatatcatcacaagctcatgtatgaaaaaagagacggcactaggtcaactacagaccacgcaagccctgcatactgaacaaatctaattccggtatcaacatcgaatgccttatgctgggaaaggagcttttgcaggtaaccttgtttaagcttatcagactttttccccgtcacagatccattcaatgtaggtatatagccagttgattttattgggatgcccaaggtattcgctaccacaggaatggtccattttgcgagagccttactgcagaatttcacaattagaattgtaggtatgcccaatagcatccttcctagaaatacaggtatagtcagctctgacgagaacaaacgaggaacgttggcatggtgaaattgatggtatgtttgttgaacaccagagacaattcccaatgcaacaccatcgaaagcagtgtgatactcaaagattggcttctgtgtgtgttttggtcatgatgtttgtgtgtaatgaatgagttattattgacaaaataaaaatgacatccatgctctgcaccttagcttactgtttttctgtcacttttgtcatttggtttcagggtctaggaatttgtcctggagttttggatggagccattagtatatctgctgttcaggtttgttttcaatataataaaatgaaagcttaccacccatccatacttatcaatacatgcaattaaatgctggaaatcaatagttcacaactgaagcaatgaatcccccctggctccccctcgattaagaacaaagaaatagtagtaactttttgaggatcccttctgtcgtcttctcgcagc

SEQ ID NO: 121461 - DNA, 347 bp, Glycine max
  Clone ID: PAT_MRT3847_80687C.1
atatgtatgtattttaccgaaaattaaagattgtacatagaagacaaaaaatggaggactgaataaataaaaaggaggttatatggtaaaaaaaaaaaaaatcctcataagaaggaggtgggtggttcaggttgttcttgctggcggttgcctaaaaagactaaattttatttttttcccccacaaaaaatttttccaaacaaatttcaggaaggaggtatctctggttggatggaagacaccaaaccctcttggcaaagaggggggggggttttaccccagcggggggtttttgggggggcacttttgacgcccccatttatgggggttttttttcagggaggggg

SEQ ID NO: 121462 - DNA, 726 bp, Glycine max
  Clone ID: PAT_MRT3847_80688C.1
agggttattatggctttgaggaagtcgccggcggaggtctgggtagaagttgactggtctggggcgaggaatgatatcaaatgtgggacgaggttctgctgttgtagccactgcaacacattagctcctgatcatcaaatcgagcgcgataacatacgtcgacaattccctgaccgccctcgttcttctcaacgctgataatcttcaacagcaggtccatgatgaccggacaatcgacatgctgcagcaaatccgtgacgacgttgtccagcgacttgaagaacttgagcatctcctccatcttgcggtccagcagcgactcgttgaccttggtgaagtagccagcctgcacggggtcgaggggcgcgggctgcttgatgtatgcccagaactggcgcagcgtgtcctggttctccaagacagcctcggagatggaccagacctcagaggagaggatctcgcacgagacgtaggcatacttcatgcgctggcgctcctctttgctctcctcgccatcctccgacttggccgtcgacgacgagcgcgctcggccagcgaccttgccaaagaagctcgggcgattggggccgtccgcatcgcccgcgccctcctcgccagcgtcttctttcggcgtcgtggctggcttggttgctatgacatagcgcagcaagcgctcgaggacattttcgtcgcgcaagtactcgacgagctttgaattctgctgct

SEQ ID NO: 121463 - DNA, 306 bp, Glycine max
  unsure (1)..(306): unsure at all n locations
  Clone ID: PAT_MRT3847_80689C.1
gttccggtaccggnaattcccggtgtcgacccacgctgtccgaagaaggcgtcttcataaacgcctttcttctccgtttccgtttcctcgttcgaattcgctttttgatctgcgaaaatgagagagtgcatctcgatccacattggtcaggctggtatccaggtcggaaatgcttgctgggagctctactgcctttagcacggcatcgggcccgatgggcaaatgccaagtgacaagacagttggcggtggtgatgatgctataaatactttcttcaacaagactggtgctttaaagcacatatca

SEQ ID NO: 121464 - DNA, 443 bp, Glycine max
  Clone ID: PAT_MRT3847_8068C.1
attagtttgtgttggctaacacacaagaattctttgatggaaattttccaggggattcttggttaccaattgttgtgaattgtctttatcctgtaagtcaattaccttcagaagctgtcgttgtaaatgtatcatgtggtagtggacgtggagggttacccaccactgcttgtattagttctgcagttaccaatcgctcctcagatatcaacaaatggattcgaacagcacttgggaaaggtaagaaaataggtgttcttactagagttgatccttttccagctgctttacctggctgccctttttggcgttaataatgaaattctgtgttttaacgccactaaacctatgctgacgcgatttcttgacaactgtaagagtctcaaatatgtggatgatgagtgatctttggcatatgcgaactagtatgtattcttttattc

SEQ ID NO: 121465 - DNA, 515 bp, Glycine max
  Clone ID: PAT_MRT3847_80690C.1
gtcgcagcgacagatctgtctctgactcctatcatggaggagaggagcaggaggtctactcaatctcagaagaacagcgtctgttgctctagtgaacatgctaactctattgtgtcttgcaggaaagatgctgataagctccactgcattgtcaacgagtgagagcatagttcctggtggtgcgtgtcgaactcctaactaaaccaatgtgtctacatggggctggtgttgcattacggcccaatgagcacagatctgcacaatattctgcttatatttcacctgctgaaaaagcttcaccaactcgaggctcccatgataaatcatcacgaccatgcccttactgagcaaaggaataatcaacgatcaatcctcacggtgccagacactgatcgtagtccttcaaggagagctcgcggtgggtcatttgaagaaccaggtctcatgtgcaacaaagcttgtactcctgtcgacaggaatgtgaaccaggacagaatagtgagcactaagaccga

SEQ ID NO: 121466 - DNA, 243 bp, Glycine max
  Clone ID: PAT_MRT3847_80691C.1
aatagtcaatatagaacaattataagaaggtcaacaaaatcgcttcacttacttatacagaaatgtgagcacttcaaatcaagtgttgagacttgattcacctagcgtatccgcaaattcaacacaccaagcaaattttaaacgtatctgtgacaacatatggcgaatcccgcgcgaatatggtcccgcggcttcacgaacaagctgaggccccaaagcatgcataaaatgtccttggcacat

SEQ ID NO: 121467 - DNA, 106 bp, Glycine max
  Clone ID: PAT_MRT3847_80692C.1
atgacaatcgaactgacacgcacacgaacaggcacacaaatagactaataaatacacacacacgactgcatatcaaataatcgctgcatgctactaaacaaacaga

SEQ ID NO: 121468 - DNA, 126 bp, Glycine max
  unsure (1)..(126): unsure at all n locations
  Clone ID: PAT_MRT3847_80693C.1
cagcgccggagatgcgctacgtgtaatttatgagcgcaatgtganacatgnngacttngnccttntcagtggagancctgtaagcaanatnacgcttactcaggnacttctagngcanntngngag

SEQ ID NO: 121469 - DNA, 439 bp, Glycine max
  Clone ID: PAT_MRT3847_80694C.1
catcaattaactcattcacacacaattattccctccaaatcaattatgggcactctagtaggacacgtagctccaggcatgggtttcatgctaatagggctatggcacctcttcaaccacataaagctccatgccctaaacccaacctcctacacatcaccaccatggttcccaacctccaaacacaagtacctggagctcctcctcatcatgttaggctcagcagcctccatctccatggaactcttcatcgggcccaaccgccaccagcccttggaccctgacctcaccatcccctccaaccacctccacaacttcgaacactcttccatctccctcgccttcctcctctacgccgccttcgccctcgtcctcgaccgcctaccctaccccgccaaacgtgccctaacacaactcctcggctccatcgccttcgccc

SEQ ID NO: 121470 - DNA, 275 bp, Glycine max
  Clone ID: PAT_MRT3847_80695C.1
tacggctgcgaagacgacagaagggcctccacacccacctgctctcagctcaaagttgaatctggggtggctggtttacccatctactcccccaaactcatggaagggagttgtaaccatcgaggattgggtcactttttttttccccttcaaattattaattattaatgttctacattcacgcttcacctgcttgctggttgaaagataaatatttatcttggtaaaaaaatgattaaagtatataaagtgtccagtgtcctcacttaaatcta

SEQ ID NO: 121471 - DNA, 225 bp, Glycine max
  Clone ID: PAT_MRT3847_80696C.1
cccacgcgtgcgggggtttttcttttacctgagtatactggctcttacacaagggggtccactacattgttgcttaggccaggaaggtatgaaatcaaatgcttagctggggggggatggaagcggtcaccaaaggaacccataaagggcgaaagccccaccaaaaataccttaaccatcatggagaaataatcctaatgacacgaaactacaccatcaacccgc

SEQ ID NO: 121472 - DNA, 660 bp, Glycine max
  Clone ID: PAT_MRT3847_80697C.1
cccagccatgacacaaatgatccagaactgcatggcccaagacttttcatggaagggaccagccaaacaatgggaaaaggtgctgttgagcctagaggttgcaggcagtgtgcctggaattgatggtgatgagattgctcctcttgcaaaggaaaacgtcgccactccttgagcataaccatcgataacctgattatgaatatggtcatcatggtcaagaacgtcatctaatacttgccagcatctgattatagacatagccacctacacatagtgcgagagggagagctctaaggaaggaatggactccaaatttcagttaccacataaagtccagaaagttagaggtttttccaggaaaaggaagaccacatactgaaattaaaagcccaatttgtttatgtaatgtggttgatgaatgtatcagaaatacttaagggtgtcttccaggcgttttcagtagaaacgtactcgttggttttttacttcctgatttttgtttgaggtttttttattgggtttatctttatgtttctgttggatattatcttgatcattatgataattgagtagtagaattgaacaaatttatatatatggccgtcaatccagatcttattaattctgaatattgccacaagtcattcagttggctattgc

SEQ ID NO: 121473 - DNA, 116 bp, Glycine max
  Clone ID: PAT_MRT3847_80698C.1
gcgcccacgcggttcgcacacgcgtacgcagaggcgtgctccaacgcgtgcgggagcatctcatagcataattcaccggagatggaaagacaactaacatcctatcaaattataac

SEQ ID NO: 121474 - DNA, 155 bp, Glycine max
  Clone ID: PAT_MRT3847_80699C.1
cggaactcggctcgaggagcgttgatatatgaaagtaaaagatgagaagagaggttggtcggagaacatcatcttcgtcgcctccagaaatgtgtagcactagcatcagcatagctctctcacaccacagctctctcaccaacgcccttattcca

SEQ ID NO: 121475 - DNA, 461 bp, Glycine max
  Clone ID: PAT_MRT3847_8069C.1
ccgggagtactgtccctggggatggcgaagagatgacagggattcttggaaccagtgtcgaagaggctcacaacaagctaatagttgaacttgagaaaagtgttcctacattggttggcattgaatgacccaaggatgagaaacttcctcgtcgcaaaatatttgacaaacctaagacgcgctgcttcactattctccctatggagtttaatcttgtggtccgtcagaagtttttaaattctgtgaggctcatcatgaagaaaagggacaagcttagttgtcaagtcggaatcaacccatactccatggaatggactggtttggccaatagattactgagtaagggcaacgacattctgcgttgcgattatgctagttttgatggtttgattaccaagcaagttatgagcaagatggcagaaaagataaacagcctttgtggcggcgatgaaaaattgatg

SEQ ID NO: 121476 - DNA, 521 bp, Glycine max
  Clone ID: PAT_MRT3847_806C.1
tttatctgcttccttcaagcccagcacggtcgcgtttcataaggctctcgaagctcgccagcagcttgtgaatgctttcgtcgcggtttcatgcagaatcgcgttctggattcttttaaactattttttgttattttccttagtagcacaacaacaattgatttagtgaatcattgcaatgctcactgggcgtttgattttagtcctatagtttcttgttcatggttaaagaatcaccatcaaaacagagaaaggaagaggagaaagcattgttcgcggtccgtcagactaagaaacgaaggcccgtaacatggtcctggacatgagtgttgcagaatcaagaaagagataggggtagggaagcagaaaattacattatgaatcctttttagtcgtgaatatttttattacatcatattagatggatggaaggatattttgaggaaatttttcaaaaataaattcttaaaatatatatttttaaaataaaataaataattaacttatctaaattttgaatt

SEQ ID NO: 121477 - DNA, 734 bp, Glycine max
  unsure (1)..(734): unsure at all n locations
  Clone ID: PAT_MRT3847_80700C.1
accggaaattcccgggtcgaccaacgcggtccgacggcttggaaaagaccaccaaaaggggggggagggggaatttaaaagaaagaaaaaaagaggttggtgataaagcaaaagaatattattgaaacataaattttggactttctttgcatttggcagccacccccacaacgaaataaaacaaaacaagcacacaaccagagacacacacgcatagagagagagagagagagaagcagaggaagaaggagaagaaggagatcttgagagatcaggtcgcaactcgtcatggggagagaagttacaggaatgcaagttgtggacaagaagccaaatggtgttataccagcttcaaatggtagttctaatgataaagtatgcttttctcctaaaatggaagcagctaaggttcaggcgaaggatcacaaggtaaatgaatgtaccaaaactaactcttttgaggagaaaagccatgagaagatggatggtttgagtgccaaaacaacaaactgtaatactgacttgcctgaggaggagattgagatttctgaagtgcagaaaatgggtgacagtaaaagttaagctcaccatctgcaagaaaagagcatactagtcancttgttacacatccatctgatcttgttactgaaagcatggttcccacatacagattgntgatgctgagctgatgcactgtctgactatcacaacacttaacatgcttactatctata

SEQ ID NO: 121478 - DNA, 1773 bp, Glycine max
  Clone ID: PAT_MRT3847_80701C.1
gtttgtattcacgaaacgacggagactaaatttctaaaacgcttgaaaccctaaaactctgtgtcctccgccgttcacatcattgtcgacgttcgttctagttgctcacatgctcttggcacccaacccgcaacgaaataaaacaaaacaagagcacaacgagagacacgcacactcatatagagagagagagagagagagagaagaagacagaaggaagcagaggaagaagaaggaggagatcttgagagatcaggtcgcaactgatcatggggagagaagttacaggaatgcaagttgtggacaagaagccaaatggcgtaataccagcttcaaatggtagttctaatgataaagtgtgcatttctcctaaaaggacagcagctaaggttcaggcgaaggatcacgaggtaaatgaatgtaccaaagctaactcttttgttgaaaaaagccaagagaagatggatggtttgagtgccaaagcaacaaactgtaatactggcttgcctgaggaggagattgagatatctgaagtgcagaaaatgggtgacagtaaaaagttaagcccgcctgctgcaagaaaagagcatactagtcaccttgttacacatccatctgatttggttactgaaaagcatggatcccacacacagattgttgatgctgaagctgatgcaactggtctgaacttatcaccaaacactaacaacatgctctcacctatctcatcaaagaattcacagccaaactctcctttttcatcaagaaagactttgcaacatgacaagaagaactatgatgatgaagataattggtctgtcgcctcctctgctatgtctatgcgcacagctagatctaaggtaactcatggttcagcccctacatttagatgctccgaacgtgcagagaaacgtagggagttttatctgaagttggaggagaaacaccgagctcttcgagaagagaaaaaccagtatgaggcgaggtttaaggaagaacaagaggcagccatcaagcagttgagaaagaacttggtaattaaagcaaatccagtaccaagtttctactatgaagcgcctccccctaagactgaactaaagaagctgccactgactcggccaaaatcaccaaagctaagtcggagaaggagccttggggatgctctgaacccatctcctgaagtttgtagtcgagggcgtcacagcactggaggtgtaggtcacaccaagggtggttccaatgcctctttccctcacaaaaacaacattcgacgcaacagcaatggcgtttgcaaacctaaagaacgaacaaaagaggataaggaaacaaaaacggctcctcctaagatcaccgaccacgcaaatgcagacattccagttcaatcatgtccgttgagaccgaaatagccttcatcacttcattttcatggggactgacttttgtgacttgcaatggtgtatatgttttgtaacttataatattgctacacggtatctcttcctattatataatgagagttattgatgtaatatgatgatgattatgatgtttcccagactagtcccataaattagctgctttctgcaggagcattagggttcttattatacggatttttctatggtgctaaaattgggtgtgttttgcgtgttcttatcatgtgattatgatatgcacctttgtttttccacaaatggatttgatattttgacatattcctttcgtgttcttattgcagtcgtccagtatgagttttgtattttcgaacagaag

SEQ ID NO: 121479 - DNA, 321 bp, Glycine max
  Clone ID: PAT_MRT3847_80702C.1
atcgactcagaaagacattggacaattaatagtggcttacttactaagtatgttacggtctataaacaaacttcagcatcatatacagagggtactcttatgccatgatgacactctatgatcttagatcctgactcagttgcgcttgagaggaatcgatcactcaccatagaataacttcatgcttactggcgagcaaagtacgagacagagttagaacatctcacagctatatgcaaactatgtgagactattcagacgcgacactgcgcggattcatagtattctcataactcacgtgctgtgactatggccagcata

SEQ ID NO: 121480 - DNA, 210 bp, Glycine max
  Clone ID: PAT_MRT3847_80703C.1
gctcaatcctgttatttcatgttctcgtattttgggcgcggggtcttattccatttcacggcagactgtttggaattaaatggctacagtgagaacactattgaattttgattctagcaagcagagtttttgtcagttttttattgatcttttcaggtgaggtttcttagttgacaaaactggagaatggaccacacttttacaaaattc

SEQ ID NO: 121481 - DNA, 288 bp, Glycine max
  Clone ID: PAT_MRT3847_80704C.1
ctttcaattttggatgcattggcatcagtccctgaaggcatattagctttgaaggattgttctaataccatacctgttatggtgaaactgttgatgagggtctcagagaactgcactcaatatgcattgtcgatactatggtctgtgtgcaatgttgcacctgatgagtgctctttgattgcttgggaagcaagacttgctgcaaagctccttcttgtgattcaaagccggtgccatccaaattggaaacaccattccaccgagcttttgaattgggtaagtttgaat

SEQ ID NO: 121482 - DNA, 1200 bp, Glycine max
  Clone ID: PAT_MRT3847_80705C.1
cggctcgagacgacagaaggggggagtaattcaattctcactcactagtcactatggaaatgcatagtagtataattttttgcatgttcttccttccgtggctctccatggttggtgctaaggttccggcaatgatcgcgttcggggactcgtcggttgatgctgggaacaacaattacatagcaacggttgctcggagcaatttccagccatatgggcgtgactttgtgggtgggaagccaactgggagattcagcaatggccgaatagcaacagatttcttatcccaagcctttggaatcaaaccatacgtgcccccgtacttggatcctaatcacaatatttcacacttcgccactggggtctcctttgcttctgctgctactggctatgacaatgctacttcagatgtgctttctgtgataccattatggaagcagttggagtactataaagggtaccaaaagaaactgagtgtgtatcttggagaaagtagggcaaacgagaccgttgccaaagcattgcacataataagtttgggaacaaatgacttcctagagaattattttgcaatccctggcagggcatctcaatatacaccatcagtgtttccattttttttgcccgggtttgcggagtttttcttctgccatcttgttgctctgcgtgctagctagactccctcagggggttcccctcccatggggtgcttgccactggagagaaccacaaattttgttggtggtaatgaatgtgtgtccaattacaataacattgcattggagttcaatgataatctcagtaagttgacaaccaaactgaagaaggaccttcctgggatcagattggtattttcaaatccgtatgatattttgttgcaaattattaaaaggcccgctcagtatgggtttcaggttacctcaatggcatgttgtgctactggaatgtttgagatgggatacgcatgcagcagggcaagttctttcagttgcatagatgcttccagaaatgtattttgggactcattccatccaacggagaaaactaatggtataattgcaaagtacctggtgaagaacgctttagctcaatttttgcattaaatattccccattttatgtatttaatgtaatggcattaggtagctttgcttaaaagcaagactctttcaataaaatcccaaccagaattgttttaacc

SEQ ID NO: 121483 - DNA, 340 bp, Glycine max
  unsure (1)..(340): unsure at all n locations
  Clone ID: PAT_MRT3847_80706C.1
gaaacactcatcagncatcaccatggccaagctagttttttccctttgttttctgggttggagtggctgctgcttcgctttcaattccagagagcagccctaacaaaacgagtgcccgatcccaaaacttaatgccctcaaaccggataacccgtttaaagtcagaaggagggctcatggaaacatggaaccttaccaccaggcaattcaagggggccggtgttgccctttttggctgaaccctaaaccgaaacgcccttcgtaaaccttcttacaccaacggtccccaggaaatctacatccaacaaggtaagggtatttttggcatgatttacccggg

SEQ ID NO: 121484 - DNA, 231 bp, Glycine max
  Clone ID: PAT_MRT3847_80707C.1
ctacggctgcgagaagacgacagcagggggggcggcaaacaaaagcgagagtcttcctttcttgtaacttcaacaaacagcatcagcggaactctctccggtgttggtgttgccgagggatcttaggcaaaggtcctgacgatatgggagcgtgtctttcaactccacaaggttgcgtgggcaggaggttgacctctcccaagaacaaaacccggaacaggaggagagagg

SEQ ID NO: 121485 - DNA, 1566 bp, Glycine max
  Clone ID: PAT_MRT3847_80708C.1
gtccttcctttttctctccctcactcatccgttccgttggttcagaatattcatcaccatcgggcccagcaccaaaccccttcccctctcccccaaattagggtttctctctgggaatgtgattcagcgcgcggcagcatcaatggcggagaagagattcggcgtgatagggtacgctctggcgccgaagaagcagaacagcttcatccgcgactcgctggtgagcctagcgaaatcgcgagggattgagctcgtgcgcgtggactccgacaagcccctcgcggatcagggccccttcgactgcgtcctccacaagctctacggcgacgactggaagcgccagctccaggaattccacaccctctacccaaacgccgtcatcctcgacgcccccgaggcgatcgagcgcctccacaaccgaatctcgatgctgcaggtcgtgtcggagctccgaattgaggaccgacccgagacctttgggatccccaagcagattgtgatatacgacaaggccaccctcctggacccgcaggcctgggagagcctcaagtttcccgtgatagcgaagcctctcgttgccgacggcagcgccaagtcgcacaagatggcgctcgtgttcacgcgcgacgcactgaacaagctcaagccgccgatcgtgctgcaggagttcgtgaaccacggtggcgtgatcttcaaggtgtacgtggtgggcgagcacgtgcgctgcgtgaagcgcaagtccctccccgacgtgtccgacgaggagaaggcgctcggcggcgtttccgaggacctgatgtcgttctcgcaggtctccaacctcgccaccgtgaacgactgcgacggctattaccgtttgatgcatctcgacgacgacaccgaaatgccccccgacgccttcgtcgtcgacatcgctgggggcctcaggcgcgccctcaagctcaacctcttcaatttcgatgtcataagagacgctcgatacgggaaccgttatcttatcattgatatcaactatttccctgggtacgccaaaatgcccggctacgaggccgttttgacccagtttttctgcgaagtaatgctcaagaagaaacagcaagaggaacaacagcaagaagagggtaacgctcctaaggagaaagaggaatctcttcaagcttgagataattttgtcacacagatgttgttctgtcggtgtcggtgtttggtggtttttgggtaacccgaatttccccagtggacccattggttggcacgagttgcaaatttcgatttagggtgcagttggtacagtagggttgtttgtggctagttttttttaaccctcttcaacaacatgtatattcctttcaccattgctctctggagataggtaccttttcaaataccctcaacatttaggaaagttgtattttgcggcttaagattaccaagctagaaactgtttactttgtgttttttttactcaataacttcatttttcccattttgccaaattctattctcattttggattatcttgctttgtttacactgattctaatttaagattttctcattcagtta

SEQ ID NO: 121486 - DNA, 376 bp, Glycine max
  Clone ID: PAT_MRT3847_80709C.1
tttttgacatagtcacccccaaaatattcaaattccatgaagattcttacataaaaatattcagatggcatccatagatgaaagaaaaaatgaaagggttttggtcttgactcccttaaactcaagtcaagcctgctcctctgcatgttacctttggttgttaacatgaggtgtcaagaatcaagatatagtcatatcatcacagtagagaccaagactattttaaaataatttaaaacacataaatatcaaaatcaacaaacaaaatttaatcatatttacaagaataaaaaacaacttattcaagcgttgaaaatataatgcaggcaatcagaagagagacatcttcaacatcaaagtagagcagaaagagaat

SEQ ID NO: 121487 - DNA, 456 bp, Glycine max
  Clone ID: PAT_MRT3847_8070C.1
tgccctgcgtccgggattcctttgaggaagtttctttaagtgcagcacttaatggtgttgagggtttggactatatggaaagaattcctcttgccacatctgagggttttcctcatgtgctttcacgcaaaaatggtgaaaaaggcaaaagaagatttgtttctggggatggtgaagagatgacattgattccgggaaccagtgttgaagaggcttacaacaagctaatagttgaacttgagaaaagtgttcctacattggttggcattgaatgtcccaaggatgagaaacttcctcgtcgcaaaatttttgacaaacctaagacgcgctgctttactattcctcctatggagtttaatcttgtggtccgccagaagtctttaaaattttgggaggttcaattatttagataaagggacaacgccttagtttgtcaagtttggaaatcaaccccat

SEQ ID NO: 121488 - DNA, 146 bp, Glycine max
  unsure (1)..(146): unsure at all n locations
  Clone ID: PAT_MRT3847_80710C.1
cgagaaaccaccgcnaccggcggagccgganaccaccccagagccaagcaagcaccccacccgcaaaacccccggcgaccgcgggaacccggagancggccccccgaaggaccggcaagacnacacccacaagcagggccgcgacg

SEQ ID NO: 121489 - DNA, 507 bp, Glycine max
  Clone ID: PAT_MRT3847_80711C.1
gtacgcctcgcggttccggtccggattccgggtcgaccacgcgtccgcccgcaacgacgtcgtttcatggatacgtccttggtgtggtgctgattcctctctccgaacatcttctgagggcttgttgtcgacgagggcagtactacattgtctggggttcgattccgggtttgcatttgataatttctctgtgttgcatgtaaaacacgttggattggaacgaccaaaagctcgctaacatagtatggggtgaggcgattgatagtgatgatcatattgtgccttatccggcaggcaagtgaagatcttaatgactagaaagaatgcaatcaagactcttctgctactaaactgaatgagcagaggagaatagaggctaaaactgattgttatcaaggaaagctacgaagcaagtcctaacttgatattattcgacggatcttctgactaagaatctggtacaaagccatggcctgacttatttttatccaatgcagctaatactgc

SEQ ID NO: 121490 - DNA, 194 bp, Glycine max
  unsure (1)..(194): unsure at all n locations
  Clone ID: PAT_MRT3847_80712C.1
agaacaagagggtcatnaganangaagnaganagtgaaagantgaagaacaagagactanagggtgtagangaannagatggtantgatggtcnntgttcccacggaggangangnggaagagtnntttgccatactaagaaggatgaggnttgcggtgaagtacttttnatgacaaagggagtcgtggcaanc

SEQ ID NO: 121491 - DNA, 256 bp, Glycine max
  unsure (1)..(256): unsure at all n locations
  Clone ID: PAT_MRT3847_80713C.1
tntccaacaaggcaacaacaaannncngggttgatgcaanntttgttcaccataataatgtcanggaganggaggaggaagttgaaattgttgagtgataacaattactgacagcagaagagctgcantggaggtggtaaatgaaaatttggagctgcaaacttggttctgatatccctactgaactacttagaattantctgtcccttnaagtctagcatgatatgttcgggctcggttgtttncnananatagc

SEQ ID NO: 121492 - DNA, 312 bp, Glycine max
  unsure (1)..(312): unsure at all n locations
  Clone ID: PAT_MRT3847_80714C.1
gtggggttttttttaaatnacaaataacaacgtattcctcattgaccttgaaataactctccatcaatgctacctcatgtattcacactctgaaacaaaaacttattttcaaaaagaaaaaagaaagaaagaaaagaaacataaaccatcaaatgggggggaaggggataaaaagctctacataatctcctaaaatacccacccttagttaaacttactctggacaacagcaaaaacctgtgtgaatacctggattctacgtaccatgccctacatgaatcccacaaataattcaggtaacttatggatttc

SEQ ID NO: 121493 - DNA, 453 bp, Glycine max
  Clone ID: PAT_MRT3847_80715C.1
attagtaatttttactgtgttatgtattattagattggtcattaatattattttaatggagtagattactgagcagattactctgattatttctattgttaaaatagttatcgctattttttcgtttaatgattcttctataattatatcttttgagtaaaatccggacgtgtatattaaaccacatatagacatattagagatattaaatctgagggcagttgtgggcataagttttcttatttgtgatatttttcgaatgtcctgtgtttcaaatgttttaattattgatctggcagctataaaaattatagctttaaatattgcgtgaataatgaggtgcaaaaatgctacttcttttatttttacagcaattattagaaatattattcttatttggattattggggatagggcaataatcttttttaaaactggttctatcattctatt

SEQ ID NO: 121494 - DNA, 814 bp, Glycine max
  unsure (1)..(814): unsure at all n locations
  Clone ID: PAT_MRT3847_80716C.1
cttgctgcctgcggagttctgaaggacaggacttaagacaatcactctattttattttttaaaataaaaaacataaattagttcccttcaaaaaatagaggcactagcatgaacacttgttaagataggaatacattaaaaatatatttgtgggttttatatgagactcattttcagtttaatatgaagttttcttggggttgatatcaagtttctggaaatatcggagttaaataataatagaaaaccattgtcacgtaagtcattaaatgtgattctttttcggtttgttccctacatttgtcagtgctataatttagctgacattattataacagcagcaaatagtgtgaatcaaattatatacaaagaaaagaaaaaaggacaancttggtgccataaagctcccccatgagagtctaggaaaggatagattattacatggtcttaataatgtcatattccttactaattttaatatgatatataactaaaattttcagtttacgaaaaaattaataaaatttgattatgtgtcataaaaattaatcaattttcatatgacgactgaatttttcagtttacaagaaataatcaataaaacttggtgatgagttacgtaaaacatggntggtataagattatataataatttctaaaaaaaaaaagggtaaatctcgctcatatnatgagtttattgcaggtagccttaaccttgcatttgtaagatgctgattccacaactaaatgtgacctaatttttcaatttgcactaaagaattaaaaagaatcaccttgtgtacataaatactga

SEQ ID NO: 121495 - DNA, 484 bp, Glycine max
  Clone ID: PAT_MRT3847_80717C.1
ggagaggacctctcctaaatttctttttgcaggggaaaaatttttcctaaaatattacaagtagtaaacggaaaccaaggaatttaactccaacccccatatattgaacaaactcctgaggtactataaacattaattccctttcccctttagcatcattggccaactatagaaaattttccagtatgcctacaacatatgcaagttttttgttcccacaactaagggttaataaaaaaaaaaaaaaaaaccctttaaaactcaaatgacaaactagttaggaaaattgacatttttaccaaccgacagctttaacacatgcaaggcacatgtatagaggcggcttttttttttattgggtctttaacttttcctttgtttctatgggggaaaatcactgcttttggaaggggttgggttgctttgcttgtgcaagcatttcaaccacttccctaatagttggccgctccacactttgttcctg

SEQ ID NO: 121496 - DNA, 266 bp, Glycine max
  Clone ID: PAT_MRT3847_80718C.1
catgtcgtagagatctaataacactgacttgggttactcaatgatcttcttcacaggtgttacgcaccaggaaccgtgccggtgccggcatgggtgctccattcaccggactcaaatccatggctggcttaaagactaggaagaccaacgatgacattacctacattgctagcaatggatgcagagtccaatgcatgcatgagacgacaccaattgggatgaagaatctagagactcttgactacttgccagacgatctatgatgc

SEQ ID NO: 121497 - DNA, 258 bp, Glycine max
  unsure (1)..(258): unsure at all n locations
  Clone ID: PAT_MRT3847_80719C.1
ggctggtgttagtggcagtagcaactactcccttattgtgactctttgttctttatttcttccttactttttgcttcctgnacccatgcctcntccnaggaacctcctcnaattgtggntggactttnatgggattccnataggngaagtttnccanngttngaagggnnatnancaaagcntctccaggaaggtttccaaaaagggtaaagtggnaantnccgggnntancaaggatctcttncagnctgctttntt

SEQ ID NO: 121498 - DNA, 314 bp, Glycine max
  Clone ID: PAT_MRT3847_8071C.1
ggaaacaagagaaaaattagtgccattaaggtattaattaagtatggccttagtagttaacttgggtggtgtaaataatgtttcttaaaccggcatgtatctaagagggggaaaaattgaagatatgtcggtggcgatttagcggttattaccaaagataatcatagtctaggtaggaaggaggggatattataattaatgagtttaatggcgattcattatgagttgcgaaactaaatttatactatgggtttaaagtatgtaagtaattaggcaatataattgctgggtttactgtacacggttaataaaat

SEQ ID NO: 121499 - DNA, 550 bp, Glycine max
  Clone ID: PAT_MRT3847_80720C.1
cccaaaaactatttctttcatgtcaagaaccagaataatacagtcttgcaacatcaggcaacagaaaaagcggcttcaacttcctccaaaatctgggactcttgagttaaagcaatgatttcttagttcattgcctatcaaagcactcaagctgtgggcaaggaccatagtatttttactcaaattagaaagttaatcttacagcacgtatttactgcattatcagaatgccactaacaatatactttgccttcaaaagcatggcaaaaaataagcatcgacttgacttcaaccctcagatttcgggacaacctctttcttcattgagaggcttcaagttcatgtgtgttggatgcattctttgacatgtctatgcaaggattgtttttaatttgatccatagcctgggcatcaacccaaggattcttatacccaaggtgagaaaggtgttgattgtttttcgcgtcctcatcttgtgagtaactcatggaaaagttcactgggttagctgctttgctttaacattgcaccttggtagaaatctcgagcc

SEQ ID NO: 121500 - DNA, 293 bp, Glycine max
  Clone ID: PAT_MRT3847_80721C.1
accccacccgtaacctcggactctattacagtgtactcccttgtgttatcttctccatatatctcactcacacaaactccactcgcccgcattctggatgacacgatagaatggatgagagggaggaggacatgccattgtggggactcaggactagggagtgcaccatgcgcacagcagcgcacggcgccacaggacgatcaggactgcattgagtctccgccggtgcccatggtcgagccagggcatatcacctgctgttgtatgtaaccgccctgaatctcacctgtcgg

SEQ ID NO: 121501 - DNA, 1259 bp, Glycine max
  Clone ID: PAT_MRT3847_80722C.1
atgaactcaaactcaaactcaaaacaatgaccactttttctttcttctctcattttctttcctccactattcctccttctccctcaccctcctccaagaactctattttctatgccctcttcaaaggaaacaccaagcaattcactttttccaaagccacgaacctcttgcagttgcagccacgcataactgttttctcttctttaaaggatgcaggctccagtgacaacacaccaagatgcagctgcaggaaattcaagacaacataaagagcaggcgcaataagatctttcttctcatggaagaggtaaggagattacgtgtgcagcagcgcacaagaaggggtcaaaaagttgtcaatgaagagggagaggagaaaccagatgagatgccggatattccgtcatcaattccttttctttcgcatgtgacgcccaagactttgaagaagctctatctgactagcatgtcattcatatctgcaataattgtatttggtgggcttattgcgccgacgctggagctaaaattaggtttgggtggtacctcatatgaagatttcataagaagcatgcatttgcctttgcaactaagtcaggtcgacccaattgtggcatccttttcaggtggggctgttggtgtgatttcagtactgatgctaattgaggctattaatggtgagcaacaagagaaaaaaaggtgcaagtattgtcatggaactgggtacttggcctgtgctcggtgttctgcaagtggcgtgtgcttgaacattgatcctatttcagtatgtagtgcttctgccagacctctgcatgctcctacaaccagaaggtgtccaaattgctctggtgcaggaaaggttatgtgtccatcttgcctttgcactgggatgatgatggcaagtgaacatgacctgcgtattgatccatttgactaacacattacatgatttgaggacttgtgatttttgtttctctaatttatttaaaaaatatgaacaccatctacaaaatcccttctccaaatttagcattattattttaaaaaagctatataaagaattaggctaaaatggtaacattctagtcttccacttcaggtgaattgtcaaaatggatcggccaatattctttgtataagaatcaatattgtactttgagtatggtgctggtgaaattcgttaagatcaatagtgcttcttttcattagtagtccttgtggttcatctaacaataaaaaagcacctattcagtatttat

SEQ ID NO: 121502 - DNA, 1427 bp, Glycine max
  Clone ID: PAT_MRT3847_80723C.1
ctgcgagaagacgacagaagggggacgctagtaagtttttcatccaatatcacagaatcacaatagcttttctctccgtgtagactcatccaaacaaacactgtaaaaaccgcaagaactctctatcactttgccacccttcattcataaacactttccattattctatgaactcaaactcaaaacaatgaccactttttctctctactctcatttcctttcctccaagaactctattttccatgcccccttcaaaggaaacaacaacaccaagcaattcactttttccaaagccgcaaatctcttgccgttgcagccacggttaaatgtctgcttttcttcttcaaaggatgcaggctccagtgacaacacaccgagcaacttttgcattattgaggggccagagacggttgaggattttatgcagatgcagctgcaggaaattcaagacaacataaagagcaggcgcaataagatctttcttctcatggaagaggtaaggagattacgtgtgcagcagcgcacaagaaggggtaaaaaagttgtcaatgaagagggagaggaggaaccaaatgagatgccggatattccttcgtcaattccttttcttcctcatgtgacgcccaagactttgaagaagctctatctgactagcatatcattcatatctgcaataattgtatttggtgggcttattgcaccgacgctggagctaaaattaggtctgggtggcacctcatatgaagatttcataagaagcttgcatttgcctttgcagctaagtcaggtggacccaattgtggcgtccttctctggtggggctgttggtgtgatttcagtactgatgttgattgaggctaataatgttgagcaacaagagaaaaaaaggtgcaagtattgccatggaactggatacttggcctgtgctcggtgttctgcaagtggtgtatgcttgaacattgatcctatttcagtatctactgcttctgccagacctctgcatgctcctacaaccacaaggtgtccaaattgctctggtgcaggaaaggttatgtgtccaacctgcctttgcactgggatgatgatggcaagtgaacatgacctgcgtattgatccatttgactaatactttacatgatttgaggacttgtgatttttgcttctctaatgtatttaaaaaatatgaacatcatctacaaactccccttttctaatgaattttagcattattattaaaaaaaagttaaataaacaattaagctatataaacattttagtcttctccaggtgaaattgatcggcaaatattgtataagatcaatactgcttcttgtcattagtagtccttggttcatctaacaataaaaagcacccattcagtatttatatataatttttaaatgcaaaattgccagtgccacggcgaa

SEQ ID NO: 121503 - DNA, 247 bp, Glycine max
  Clone ID: PAT_MRT3847_80724C.1
gcttctagaactttcatactacagtattaaaaaaggctgctgggggcggcatggctctgtatgccccatccaagcctggaaaagccgtgaagctgggcccatcagccgcccaaacctgtatggtgaccatgaggaagaccgaaaccaagcaggcctccttcggtagcgcttagttctttcaataccgcgtcaagcactctggcccattctctggcgtgcccccaggctacctcactggcgagtctcc

SEQ ID NO: 121504 - DNA, 362 bp, Glycine max
  Clone ID: PAT_MRT3847_80725C.1
cttctgcagtagacattccttcagagcatctcaaaacagatggcagaccactagatcatactgagattacaagaaatgatctgtgttgtgcagatgaggaaatagagttgagcactgacaacattaaggagcaaagatttatggctacctcttctgccgtagacattcctgttgagcaactcaaaacaagttgtagaaagctagataatacggagattacaagaaatgatctgtgttgtgcagacagaaattttgctggcaaccaaaagaacaaacttctcatccttgatctgaatggactgcttgctgattttgtcagtatcagtgacactgacacttctttccgaagatatagacgagaa

SEQ ID NO: 121505 - DNA, 511 bp, Glycine max
  Clone ID: PAT_MRT3847_80726C.1
ccacgcgtccggtgtgagtgtcaattctgctttctagagtacgttttatgctgggacaaattactctgctgctgtttagtgcaaaactagaagaactctaggtagaggagaagagggagtggtagataaggtagataaggaaagtgatggagaaggaatcatgcaagactaaacataatgaatttttttttgagtcacattagtggtttatgtcaaatttaaaaatacactgtactaaatcttctttattatgttaagcgatataatcccatatgttggaaagccaccttaattgtgttcacccctagctcgtcttaatgttggatcacatagacagagactatctttggttagtcaatcctaattgttaaatatgtatagggatgtttttgttactattattgctttagacttttagttctgtatcttcagcttcactgattaatttatattattttgaacagctgtaaatgcttgtaaaacaagctctattactttgataaaattctga

SEQ ID NO: 121506 - DNA, 291 bp, Glycine max
  Clone ID: PAT_MRT3847_80727C.1
attcatacataccatgtcacgtagcatgtgtaatgtggagagtgttgcattgtgttgagaccactagacttggtttcattgtgaaatgagacggcgtaacaatgttgatgtggcttgatagacagactaaactgattcataggtatgtatgacggtgtcattggatgggtttcaattactgacatttactgtgcgcatgtagataaatggcacagtactattctcttagctataatactgtgttcatttgataattctgacgatattgatgatgattctgaggatcatata

SEQ ID NO: 121507 - DNA, 527 bp, Glycine max
  Clone ID: PAT_MRT3847_80728C.1
ccacacatccgcccaaacataccgcccacgataccgcccacggtaccgatacaactgacaaaaagacgacagaaggggaactaatgaaattaacaatggttgttctgatgattctgcttaagggaatgatgagaacagcactgaacactgaattctataacctaactccaaaaagctcaacagcaacaggaaacaacctcaaagtccaaaagggaaaaaaaaaagaaaaattgaaatcaaagaaaaacaaagccatgaaagaccaatttgcaacaagattttcaagacaagccaaacctagagagggatcaaaaaaagtccatttaaaataaagggttcataaaaaaaacacaaaatgtgaaaaaaaaccaaaagaaaccaacaaaaatacatagatcctataccatcaaaagaataaaaaaaataaaaaaaaacgatataaataaaaagaaagaaaaaaaaaataaaaaaagcaaaaaataaagaaaaaaattattaaaataacaaaaaaaatatgaagaatcaat

SEQ ID NO: 121508 - DNA, 634 bp, Glycine max
  unsure (1)..(634): unsure at all n locations
  Clone ID: PAT_MRT3847_80729C.1
cagtgttctgtccgactcntacgattcngtggaaactcaagcaaaaagacagcacctgatacccaaggaggtgttagttccgctctcgatgaaatcaccgtcttattcaaacttcttggctgccaagaagccagaccaagacagaaactgccaaagctcggctgctggctgcagcagtgctcagaaaggcctcgattttaatctaccggagggcagggtccacggcggcgacctcatgttgtattttggagggaatctcaaaaatgcactcggcggcatctgaaatgggggagggagcctggtgtctcgcaagttgtagattcattttagggattagggaccatttccatcatggaattgtgcataaggctttgttgctgcttgttcaataactttgtgtatagttgggtgttgattattattagccattaggctcttattgttcgtagtgctttgtctggctttcattattcaatgtataaggtggcaacgttcttgaaaccaaccaagtccacttccacaaacagcgtcattctaagatggtggacttgctgcaattgaatgaatcattgtattctttaaaaaaaaaaaaaaaaaaaaaaaaaaaaaaaaaaaaaaaaaaaaacccccagcc

SEQ ID NO: 121509 - DNA, 763 bp, Glycine max
  Clone ID: PAT_MRT3847_8072C.1
ttttccgggggatcatttggattttaatttcttttaccttaagctattaacaacttgttcgctctcaagcaaaatgtccttaatggcagaagcacccaactttcttaaactttattctgatggttctgtgaaacgctttgaccctgaaattgttccagcctctttagaatcaaccaagggatacaagtccaaggatgtgatcatagactcatcaaaacctatcacaggaagaatcttccttcctgattatcctacttcctctaagaaacttcctctcttagtctatttccatggtggaggcttttgcattggctccaccacatggcttggctaccataactttcttggtgacttctctgtcacatctcaatcgattatcctttcggttgattatcgtttggctccggagcatcgcctccctattgcttatgaagactgttacacctcacttgagtggcttggtgatcaagtttcttgtgaacccttgttgcaacaaattgacctaactagagtgtttctctctggagacagtgctggaggtaacattgcacatcatggttgctgggaaggcaattcaaaacaatgaatgccctttgaagattaaagggttaatgctcatacacccttattttgggtagtggagaagaggactaagaatgagatggctgatgaaagtataaagggatgtgccatgaatgattatgtttgggagattaagtattccagaaggcttaaatcgtgacttttttgggtggaaattttg

SEQ ID NO: 121510 - DNA, 473 bp, Glycine max
  Clone ID: PAT_MRT3847_80730C.1
ccacgcgtccgacggctgcgagaagacgacagaagggtggtcccccactaatattcacaaatttggtccttctattttgtaaaattgtgcaatgttggtcctccagaccataattggacgttgaggttaacaagtgatgttgattgccacgtgtcatgttctgattggatatcaactccatgaaagatgaaataaattattgttttcattgatcaatcaaaacatgacacgtggcagtcatcattcaataagaacgtgacacgtgacagtcgacatcacttgttaacgattaacgtccaattgtgacctaggggatcaacattgcacaattttactatataaggagaccaaatttgtgaattaaattacttgaggaccaaattcgaaactggagataaactgaggaaccaaaaatacaattttgccaaaaaaaaaaaaaaaaaaaaaaaaaaaaaagcggccgctctagagga

SEQ ID NO: 121511 - DNA, 326 bp, Glycine max
  Clone ID: PAT_MRT3847_80731C.1
aaaacaccctcattggccataggaatgcgctttttttaagggaataaaaaatttcattcttgttcacaaatgcaaaagggccctttttaaccaaatttttgggacttttacagttttaaaaaagtccccgaaacataggggtaggggggcttgaactcaaaaatttatttttaaccccaaaaaaaacaaccagtaaagtttctggaaaagggtcaacttttgaaagaaaaacaatttttttaccttttccaaggggtgggggaattcttttgttgatatttggggggggattgtgaactggaaaaataatccaaggaggggggggg

SEQ ID NO: 121512 - DNA, 387 bp, Glycine max
  Clone ID: PAT_MRT3847_80732C.1
agcaaacaaaaaactaattaccaatacgtaagcaagtttttggttgggacaaattttggcaaaaattaatggggcatgggaattttttgatgcaagggatacatagccaaatgattttggaacgaaaaaaaaggcccaaatttggaaaccgaacctcaaggatcggattgggggattatttgaaattgggggggacacccgtgtataattggtcaaaggcgggggcaattaatttttgggctatgcctttgaagcctgtgaacaatggggggctttaccgcctttccatgtttagtgcggtacgggaaatggtccccaagcttggaaggtttccccgggtaaccagcctttaacttgagacccagacttttcaaaatttcttggggg

SEQ ID NO: 121513 - DNA, 313 bp, Glycine max
  Clone ID: PAT_MRT3847_80733C.1
attcggctctatgctgcgagaagacgacagaagggaggcagcaaaacgtgtgcggactagagatagggacagacaagctttggaatttaagtttcagttgagtttgctttaacgctttcactttgcagcggtcaagatctttgtatctactcttggttacatcttcaattcatctacgaaccgcgtttctgctgttgactcatcccctgtctctgtctcgctactcagtaaggatgtatgataagtatagggaggcaccgagtgtaatgagcgatagacttaactgcaatggactcgagactagtctggtcgg

SEQ ID NO: 121514 - DNA, 316 bp, Glycine max
  Clone ID: PAT_MRT3847_80734C.1
accgcgggacagggctctatctgcaatgcttagaaataatgaagttcaacggatttagtgagacaatatgcagataacatcgatcttgtctttgaacaatttgccgagtacctggttcagatgggaaacattactccttcttcacggtggaggggagagatcagaaagaactgcggtggaattaactagcgatgtactgatatcattgggatgtgacacgagtgaaagttgcgcctacatgttacttttcttactcttggtgactgcattaaaaaacaggagtgtcaattgatcaattctgtggagagttgaggaa

SEQ ID NO: 121515 - DNA, 345 bp, Glycine max
  Clone ID: PAT_MRT3847_80735C.1
gtccggattcccgggtcgacccacgcgtccgaaaaaaaaaaaaaaaaaaaaaaaaaaaaaaaaaaaaaaaaaaaaaaggacgaaacaaaaaaaaacaaaccaacctacccaacacctgccaagcaacaacataaaatataatataaagctacactcaattcaatggcctggccgttacaacacaacgactggacaaggcccagcccttccccaacctaacttacttgcctggcagccccttctccttttcccgggtggtgtaaaaaagaccaggcccgatccgccttcccttcccatccgcagcctagacctgtttggggaacgggccctgccctggagcgttaa

SEQ ID NO: 121516 - DNA, 212 bp, Glycine max
  Clone ID: PAT_MRT3847_80736C.1
ttttcgttctctacaatgtctcgaaactcaatttgactaatgaccggttttgcaatgggacagtttaccagaagaggagcagcaagaattccaactggatcttaatgcatttgaccggtaaaaccttaaccctcaaatgacccattcctttctttaaggcaggtaccattaaggatggccttttcaaattaattggaatccaggtcaacaac

SEQ ID NO: 121517 - DNA, 451 bp, Glycine max
  Clone ID: PAT_MRT3847_80737C.1
gccatacgaagtgagcaaagaaggactgcacaggaaggccctggtagacctttatctagcgcttcttgtgtacctgggcgaaaccaagctctgtaactcgcacatagtcctaagtgcaaagtccaatgcattagtgttattgctttacaaaactgaacacacgattatcgaacacaccatacataccagtaccaaccatgacgccgaccttgatgaaaggccacgagaggccagtgacatgacttaagtactacatgtacggccatctggttttcttgtgaactaagagaccacatccccactgtctggtatgtcgacagcggctaacacctgtgcacataccaacaccagaggacacatgaacgctgcggtgactctcaagatattcctggcccgtcatgagtgtatgatcggatcagaccgccacactatagcacaggcacaccgggcc

SEQ ID NO: 121518 - DNA, 259 bp, Glycine max
  Clone ID: PAT_MRT3847_80738C.1
acatcatgaaacctcgtctcggcttcgcaatcgcgtaccggctcctagtacatacctctcttgcttccgacatacacataaaccaaagcaattttcgatttgaaggatacaatcgtcaagggatatgcgataacggcggacgatgatgttaatagtacggtgaacgatccgagagacgctgatgtaaggcaataatcggaggaagcaattcaacatccaaatcggtcacagggtcatccaatcgaggcttttcgaaaat

SEQ ID NO: 121519 - DNA, 139 bp, Glycine max
  Clone ID: PAT_MRT3847_80739C.1
tcaaggtactatgtacagcctctacgcgattaaaacaatccatatcgtagatttatcaaatagaaccctatttacatttttttataactaaaatgcgatttacaagttgtgtatattacacatgtcactgcactaatca

SEQ ID NO: 121520 - DNA, 520 bp, Glycine max
  unsure (1)..(520): unsure at all n locations
  Clone ID: PAT_MRT3847_8073C.1
gcaccagaacatacttctaatgatattatttaagtttattgagtagaatccaaccctgggttagaagatttcagcacctgtgtagagtcttcacaatttttgttaatgtactctctctgtttctaattataagatcctttctactaattcacacccctttaagaaaagtagttaatttagttaatcacattaaatttgccaattatttgtactatcattccaaaattgtcctttgcttatctctctatctacttaattgtttctcattaatgtttggagaaagaataattaagtaagggtatatagggaaaaataattaatgcatttagaaattagaaaaaaatcctataaaaaggaacaaataaatttctgaaaagggtcttataattagggatggagggagtatttcggagagctgatagctgcaacaatgaagttagttgaacagtgaaaaattgcttgtgcaaatatggaggagttcaaatgatatgaattattcaatgattntcatcgttgaaag

SEQ ID NO: 121521 - DNA, 430 bp, Glycine max
  Clone ID: PAT_MRT3847_80740C.1
tacggctgcgagaagacgacagaagggcatttatattttattttatttttaatttttataatttgaaattataggaattaaaaatataagaatgaaaaaattatatagactaaaaatattatttttaaaattataagaattaaaagaaattaaaatgtaaatgataaagattaaaaagattatttttaaattaaaaaaaaaaataaaaatcatgaatcaaataatcaaatgagtaatttaatcttttataattaatttgtcaagagaatccattagcatttgtcttttttatttaatgaacaatataaaatataaccaagcatataagggattgtatatactatgttttgtgcttaatttgggttaatttgagtgataattactgatatttaattatgggtttggaattggcagaaggtactacaagtgc

SEQ ID NO: 121522 - DNA, 831 bp, Glycine max
  Clone ID: PAT_MRT3847_80741C.1
accagaaaaaacggctgatccatccgtccgctacaccttctcaggaatcacataaccacttcaatcatcataaactccacatgcccttcttccacgcttctcttcttcttgttcaaaacttttaaggtcatatatctctttgaaagcagcttccacttttttctagttgtgttgttggttgaaatttcttttagggggaaaggatctctcactttctctctctttctttttccatattaataattaagagggttatattagaacaagatatatagctaggtttagatatgatggaagagagaaataataatgatgctgctgagaaactggatgaagttatgctaccagggtttaggtttcatccaactgatgaggagcttgtagggttttacctcaagagaaagattcaacaacgccctttgactattgagctcatcaagcagcttgatatctacaaatttgacccttgggatcttccaaagttggccaccacaggagaaaaagagtggtatttctactgtcccagggacagaaaatacagaaacagtgcaaggcctaatagggtaactggagctgggttctggaaagctacagggactgataggcctatctactcctcagaaggttcaaagtgcattggcctcaagaaatccctagtcttttacaaaggtagagctgccaaaggagtcaaaactgattggatgatgcatgagttcaggctaccttctctcactgactcactatctccaaagtacatagaccagatcaccattcctgctaatgaatcttgggctatctgcaggatattcaagaaaccaatgctacagctca

SEQ ID NO: 121523 - DNA, 169 bp, Glycine max
  Clone ID: PAT_MRT3847_80742C.1
cacaaaaggggatttgcaactttatcttatgattgctagcggttggttacttatgattgctagacccttgactgtctctacaggatttggagctgacgaacgatggatgtcgaaatgtttgttttaagatgggggtatataatcaaaaaaacactcattttatttggcc

SEQ ID NO: 121524 - DNA, 426 bp, Glycine max
  Clone ID: PAT_MRT3847_80743C.1
aattcggctcgagcaacactgcgattcccagtaataattgtcttgttgatgccatctccaaccatcatcaaatacgtctttttcttatcaatagacacattttcctcgtaaacaccggcggtgacgtagatcaggaagtaccccgccgtggatgcagtcttgttcggggccgcggcgagggcgtcgccgatggtggtgaagtttccgcttccatctttactcaccgtcacaatgtcttttaccttaaccacgtcgcccaccgtcgccgcctgaaggagctttctcttactcaccgactcgtagatcgcgcgcgttctgctggacatctcgagcggcaaacgcccgtttcgaaagccacgctgcttggcgtttggctgaaacacggagacattagcgtcgctggggacccacccctttgtgaagagt

SEQ ID NO: 121525 - DNA, 495 bp, Glycine max
  Clone ID: PAT_MRT3847_80744C.1
ggctacagcccgctcatgactttgtccctgtatcttctccacttgcaactaacattgacccaacggggggacggcatggtacattcgatagcaaaatatatatcaccgttcccgttcacagtaccaagactcgacccccttttatgcgtactgggtacaaaagacatatcccccaccatgatgatacataataaactaagacactcatggttatatgagctgctgaccttgctaacctccgcactgcacctgcttacaactgcacaagaccaaatatgccagccattgaccctgtgtaagacaacatacgacaccgaggtgcaaagtcctatggctggaactgatgatcatgtagatagtgcacttgctacaactacaagaggcatctttaccctactacagtcaacgacgacccacctgggatctgctattccagagggacacattggccttctttgacaaagactgttccaaacttgccgagcacatatactc

SEQ ID NO: 121526 - DNA, 550 bp, Glycine max
  unsure (1)..(550): unsure at all n locations
  Clone ID: PAT_MRT3847_80745C.1
ttgatatagcgtanngctcactgcccccaaacgnnacaggtccttattcaacccagaatggttacatataacagacaccagcaggatgccgccgttctccttactggacccacccactcgaacaaaggcatctagagaaataaaaatggctacaattcttctaccacatatttgagaagtttaacaccaaaaatcaataaagggaaaaggaaacaatcaaagacgattgatagaaccgatttttgtcgttccctcactcacttttaaggtgatcagctcaatcactaagtacctgcaccgagcaggattgtatggaccctcaacaggcgacactgatgtaatcagcctgcgacttgctaatctggatcannttagatccaagttcgcccaagtgaagtgcagccaggttctcatcaaggtncttgggcaacacgaaaaccttctnnnggtacttggcgggactatgattcttccacaactcnagatgagcaatgacctgattgncgaaggnncangacatcacnnnattnnngtgtacagtggcgcatcc

SEQ ID NO: 121527 - DNA, 347 bp, Glycine max
  Clone ID: PAT_MRT3847_80746C.1
cggctcgacaacatcattatttctaaatgtatatagctctttaaccataattgcctggatccacatggatgctaggcggtacaccatattcaaagatagctaaaaaatacttgactgtttaatgaatatcacaccaacgtaaaggggctatatctagtggtaatatttataagcttaatttattcacagaaaccatgagttttaagcatttttatacaaaatattcaacaagaatttactttattaccgcatcatgatagtaaaatggtctgataaagtggtgaaattctattgaatgcttggcgtcagatgtttttattggaacaaagggggcatataaattaaac

SEQ ID NO: 121528 - DNA, 430 bp, Glycine max
  Clone ID: PAT_MRT3847_80747C.1
ggccgtccttttttttattttttttactttttttttttttttttttttttttttgtaatccctaatctaaatagtaacccgtcaaagtttctaaatttttctccattaccacttttagttatcaagtaaaaatgttaactaattacataatagcagtaaattgtcatctcataaaaaaatttgacaaaaaattcatgtgtaatttttttagataaattaaatttttaatttcttgtcttgaaaaacaatttatgacatcatactagtaaatgagagattaaaaacataatttaacaaaaaattatatgtatttatcctattaaaattcttgatgacatgataagctatggacgataaatagtattggtatgttattagttagtattgttattttacaacatcaactaaaagtcattaccaaaaaatttaa

SEQ ID NO: 121529 - DNA, 1477 bp, Glycine max
  Clone ID: PAT_MRT3847_80748C.1
gccaagttcattttttatgggaagtttaagctagttccattaaacgagttgtatgcatcattttattacttgccctataacttacaattttttaatttgggcaatggagttatccattttcgagcaatgttgctttaataatggtttagaaatctacatttagactactaccattaatggtatcatgagttttctaatggtccattgatttcaatgttacatatagcacaattttgtgggggaaagaactatcttttttacaagagaaagtatccaagaaatattgtctgcttctgttttaagtacttttcagtgttaggagtgattcgcaccctatcttcggtgctcccaagttccaattatgtgacttccaagttctctattgtctttctttcaggctattaggcaaagtggcattggttactggtggagcgtctggaattggagaaagcattgtgcgcctcttccatatccatggtgctaaaatatgtatagctgatgtgcaagacaaccttggaaagcaggtctgtcagtctcttggtgatgaagcaaatgttgtttttgtccattgtgatgttacagtagaggatgatgtttcccatgcagtggacttcactgtgggtaaatttggcacccttcacatcatagtcaacaatgccggaatttctggatcaccttgttccgatatccgcaatgcagacttatcagaattcgataaggtgtttagtgtaaatacgaagggagtgttccacgggatgaaacacgctgctcgaattatgatcccgaagaagaagggctcaatcatttctttatgcagtgtagcaagtgccataggtggcttaggaccgcatgcatacacagggtccaagtatgctgtattggggctcacaaagaatgttgcagctgaattggggaaacatgctataagagtgaactgtgtgtcaccttatggtgttgcaacaggtttggccttggctcatttgcctgaggatgagagaactgatgatgccttggtcagttttcgtgattttactgggagaatggccaacttgcagggggtagaattaactactcacgatgtggctaatgctgtgctcttccttgcaagtgatgatgctaaatatataagtggagagaatctcatggttgatggaggcttcacaagtgcaaatcactcactccaagtttttagatgattaatggtatttcattgtttgttagtttacataatttgaggcattgcaatcctgatgtctagtacaagggttttcagttaacatacaaaacaaaatgaaaatgctcctctaaagtagtcttttttaatttatccttaaattttagatggttagatcatattacactttaaattaaattcgtgtgaaacttatctcctttcaacgaagggaacaaactgtcttattcttctcacccggtcaactctcagctaagcaaaaacaaatttatagttgtcttgtcc

SEQ ID NO: 121530 - DNA, 883 bp, Glycine max
  Clone ID: PAT_MRT3847_80749C.1
cgaaggttagagatgctttgctttttcggaagtcagtggacaaagacgatgatggttcagaaaaggatggttttttcaagaggcttttgagagatagcaaaggtgatgatgaactgggccaaaaaattcgtgatccgctcctgctcgaccttcacccatcaataccaaaatgaccaagcttacaattctcctcatcgctcttctcttcatcgcccacacctgctgcgcctccaaatggcaacagcaccagcaagagagctgccgcgagcagctcaaggggatcaacctcaacccctgtgagcacatcatggagaagatccaagctggccgccgcggcgaggacggcagcgacgaagatcacattctcatcaggaccatgccgggaagaatcaactacatcaggaagaaggaaggaaaagaagaagaagaagaaggacacatgcagaagtgctgcagcgaaatgagcgagctgaaaagccccatatgccagtgcaaagcgctacagaagataatggataaccagagcgagcaactggaggggaaggagaagaagcagatggagagagagctcatgaacttggctattaggtgcaggttgggacccatgatagggtgcgacttgtcctccgatgactgaaaaaaaagtactactaacacatatatgtgttagtttatgctagctagaagaacgtataagctatctccgtatgttgtatattaataaaaagatcatcactggtgaatggtgatcgtgtatgtaacgtagtgggcaatggaagcacttagagtgtgctttgtggccttgccctctgttttgataactgagacttttgcgaataccgttcgtttttcccttcaaaaaaaaaaaaaaaaaaaaaaaaaa

SEQ ID NO: 121531 - DNA, 367 bp, Glycine max
  Clone ID: PAT_MRT3847_8074C.1
tgtatcggctgttcaagaagggcctagaaagggtgaggccacattgcgcccaagggtttattctcactacggtgaggctcaagctcagccggacacatgttggtgtaaagcgcctataggttgtgcacaagctcctaatggtgataggtgctatctccagattattcattgtaccagtgcactccccaagaacactgaatgcatgaccgtactgcgtgaggttacattggcacacccatggaccatgatgacaacctgtgcaggcgaagggcagtacttgaacatacttcttaagctcaatgatgccaatggcaccctcagaatgggtgtctgcacttgctattctcttattggcaccggttttgat

SEQ ID NO: 121532 - DNA, 470 bp, Glycine max
  Clone ID: PAT_MRT3847_80750C.1
ctgagatttggattccacgcatcacaccttgtttgcagcttctagttttcctttcatacgagcatcaagtcacgcgcttcaaattctcatgtcacaacctcaggtaacattattagcaattttgactttttaactgtattctttttcaatttgttgattcagtttaatttattcaattctctagcttatatttttatctaacagttatattcctttcaacttttctcataataatattagcaaccttgaatgttgatccttccacatgtatttggatgtagtagtttgctcttgtgttttatcttcttcttttttcttaacaaaaagaaatatttagtggtggttgtgattcttatgtggcgtgacggctgaattgaagatgacagttggggctatagcttccaccaaaaaaggcaaagtttgaactctgaattttttaccttaaaccttctcccaggtccgtctctcaa

SEQ ID NO: 121533 - DNA, 282 bp, Glycine max
  Clone ID: PAT_MRT3847_80751C.1
cccacccgtccgaaaaaaaaaaaaaaaaaaaaaagggggggccgttttggaggatccaggtttccgtccccgtgcttgcgacgtattagtttttttttggggtaccctaaattaaattaacgggccgcggtttaccaccgtcgggccggggaaacccctggcgttccccaacttaatggcctggcggaacatccccttttggccggttggggtaatagcgaaagggccggaacggatggcctttccaaccagttgcccagcctgatgggcgatggggccccc

SEQ ID NO: 121534 - DNA, 393 bp, Glycine max
  Clone ID: PAT_MRT3847_80752C.1
cttgacgtccacgcacgcggcgaagctccgaattcggctctgccaaccgacttttccacagttgccacacgaccttgttgactcatgtttcgggggaggctctaggcgaaaaaccctttcttcatcagcttcatagccatccaaacctgacgcgccagaagattggacgaatatggaacaatgggcagggggcactgtcatccatatgaccaatgcattaggagattgcatatcaagatcctataatagtaccaccaattggaccccatacagccctaagaggtacagcaggatgaaaaggcatacgtaaccaggccaaactcctattccaatttcgcacccgacttctgaacctgacaatagtacatgaacacactgtttcccacacctgct

SEQ ID NO: 121535 - DNA, 423 bp, Glycine max
  Clone ID: PAT_MRT3847_80753C.1
cacagggaaccatggatcaggtacttacctttactatataaaaatccatgggtgaaagctgaataacacacaactttatgtcttatgaaactattaagtgaccctttgactaatcatagattcttgtaacgaggagaacctttgaaactattttcctacgaataaacttggtttagcccataccttgagtctaagtggcttgggtaccgctcggtactctctcgaaatgctcaacctgcgaggtacctagtcctttacaaagggcgaacatagttttaatggcctcaggtccacgggaggcagccttaacggcgaacacatccaggactatgctccgctgttagggatacatataccgtacacactgtccacctatgctgtgataaaactcttgttactgttgacagcaaccacctgtatcct

SEQ ID NO: 121536 - DNA, 891 bp, Glycine max
  Clone ID: PAT_MRT3847_80754C.1
attcatcacaaagtttgtaatctgattggtgacgtaatcaacatgagtcccacccttgattgtagcaatggaattaacaaagctgacctgttgaaactgcccatcacttagactcacgcaaatctcccacctttcacctacttttgcgtgaatccttggaagaggcactggtctggatttctccactgatttgaggtaaagatcagcatagtcacgaaatgatttcatacggatcacttgtccgttgagttcaaccttaacagtctttccaagacacccagccatgtccaccacacgcttcttcatcaaagcaacgacatcttcttcaagatagtccatcttaaacttttccaagtcaggcttgaaggtcaccttagtccagttctcaccaactttgcattttgttatcacaggctcagacttcttccccatgttgtcggagaacacctgtttatacttcttctggcgctttccatcggcagtttcgatgacgaactcagtcgagaagatgttggtgagcttggcgccatagccgttgcgtcccccggtagtccttcttctcgttgtcgttgtagttactgctggtgagcaggtggccaaagatgagttcggggacgtagaccttctcctcttggtggatctccacgggaacgccatcaccgttgttgaagatggagacggtgttggcctcggcgtcgatggagaccttgagggcgtccatggaggggtcacgctgcttgttgtcgccggcattgccgaggatctcgtcgaagatcttgtagagccgggaacgtaggagacggcacgctgcaccatctcgtcgttctcgtacaccacagcgtctgtgtgtccgaacgcgtggtcggccggatttccgacagtcggccgggc

SEQ ID NO: 121537 - DNA, 986 bp, Glycine max
  unsure (1)..(986): unsure at all n locations
  Clone ID: PAT_MRT3847_80755C.1
cccccttccgtccaatgccggagttgcaattacaattactctctgatcacaacgccatcgccaaagggtttcaggttgaaataagtgatttgttataatcaacatgtcatctccaagcaagagaagagaaatggatgtaatgaaactgatgatgagtgattatacagtggagacgataaatgatggactcaatgagttcaatgtggagtttcatggtccaaaagaaagcctttatgaaggtggagtctggaaaattcgggttgagcttcctgatgcttacccatacaaatccccttctattggcttcgtgaacaaaattttccacccaaatgttgatgagctatctggctctgtatgcttggatgtcattaaccaatcttggagtccaatgttcgatcttctaaatgtctttgaagcttttcttccccaactcttgctttatccaaatgcttcagatcctctcaatggtgatgcagcatcgttaatgatgaaggataaagagctgtatgaccagaaagttaaagagtattgtgagcggtatgctctgcagctgaacagtgtcgagattgaggaagacatcagtggagaagaaagtggatccagcggtgaagaagaaagtgcatctagtgatgatgaaattcctggtcgcgctgatccttaaatgggttcagtgctcttccatttgtgtctttaaattaaagggtgcatgtaataccaatcaaagcattattacatgattattacttgttcaattataagacgtaggattatatactttattttttctgcccgtagaattacgattctcattcgtcagtaatttcatgaaaagtcataatgtaatatacaattagtgttttacattttgtctttcattattttgaaaacaagaaatgtccaaagatacctgttgaaaaactcagttgttttctcttgtataattagctaaatatcacctttgcagttatgatggaactaaaaanaaa

SEQ ID NO: 121538 - DNA, 546 bp, Glycine max
  Clone ID: PAT_MRT3847_80756C.1
gggtagagcacagcgcgagcatgattgcgtttacggcaacaggaaaaggcacagaaggcagcaacactacccggacaccagatagacatggtttctggaaaagaaaataggcaccaatgaacagtgactcccccaggaaggcacgaaataaggtctcgttaggctctagagagaaagcaggagacatgactgaatccatgtcaatgtacacagctgagtgtattagtttggataataataattacagagaaaacgattgctaattaccataattatgtgaatcctaggatttcctaatgaatataattaaagatatctagctttttttatttggtacccataacatttttgtggagtttccattagatttgcttatgattaatctcgaaaactggtcatctttaatagaattttctctctcaattatgttttttccattcataccaacaacttgttgataaagatatctaattatagccaacaattgcctaattaccatagttaaatatatctaaataaatactatcatgttggaataattgattt

SEQ ID NO: 121539 - DNA, 1489 bp, Glycine max
  Clone ID: PAT_MRT3847_80757C.1
cccacgcgtccgccagcggatcaaagcggtataaggcaacaacgtcagaaaggtgggtgatgaagtgaagagttctgcgattgcgaatggaagtgagcgcgaaggtgaaggtgggtgggtttctatggttggagggtttagttgaggcgtgttgccttcatcgcgttgttattctgtgtatgaggtcaaacaacctattgatgcgcactggtcagtgtttcctcttaaatggtttcatcttcttaggaagtatattcgtcctaaactcggttgtcatccctgcattgtggtggatattacctgaccaaagctcacagtttgtttctcataaactctgtgacttaggtggcactttgaaattttattctttcgtacgtcttgcactcattcagctcttttatgtgctttggttttacccattatacgtgtttagcatagttcttagcacaatttggtacaacgacattgccaagtatgggtatgctgcaatgggaagatctaagtttactgtagagaaaggctcaagccaaaacaactcaccaactttacaaaatgctcatcatgtaaaaggaccattctggcttgggaggggtcatgattggaataggacagcaggtctattcaatactccttttgagtgttttttttcttgaggtctatgcaacaggattcataccatacatagggaagctgctcaacttcttactcctttcctggatgtatgcatattactgcttcgagtacaaatggaatttcaatgaagtggctcttgacagaaggctggactactttgaatcttactggccattttttgctggttttgggagcccttgtgttctggccatattctttttctctccccttgtgagttacgggattatggctatacttttcccactgtttgttctaactgcaactgggtcagagtccgagcaagaaatatcctttgaaaaacacagatggagagctgccggagtagaaagacttccaatattttatgttgcagacaaagtgtcgatgtggatgctatctcttttacccatggaaaaaggggaccaggtgcaagacagaaaagcacaataaggttgtcgtagtcagttattctggcatggcatagcagatgacaagacaaattctatgtaacaagctgatgggatgggttggttgcacacgtgacttcagaaagttaaagctactaaccactgccagaccaaattcaaaatccatcaaagtgtggaccacgttacagagaaaattactgtgtaacattataatttatatagacattatgctgtatttcgtgtacatgcaacgtggattctttgcgcgtaaatatattatatttaaagtgacatgctcattgaaatgtgaagtgtgctgatagtacgtgcatatatccctgccgtcgtactgagttaccatcctagttactagggtgtgaatcttttatgcagtggtgggcttgagattatttgtcagttcaagtagt

SEQ ID NO: 121540 - DNA, 283 bp, Glycine max
  Clone ID: PAT_MRT3847_80758C.1
gggagattgaaaacagggaaaatgttgttttccacggggaacagtgcaacattgtttgtttccagcgatactgaagttttgacttgtcaatatgcattagcaatactatggtgaaactgagttttatgccctagtttttgcttactattgatgatctctgtctctttccagcataaaccagcatcatgtgaagttctggcacacaaaggtgacagagtcaaagtacactatcaggtgagtaatttctcaagtttgtcttgtggcccaaggaccatacagttta

SEQ ID NO: 121541 - DNA, 247 bp, Glycine max
  Clone ID: PAT_MRT3847_80759C.1
cttcagttctcaaagcaacttgttgagctgcatccacattttcatgtcacatgcatcgttccctcacttggttctctcccaagtgcctcaaaagccatcctagaaactcttccaccaaattacatcaacaccattttgcttccaccggtgaaccctaatgaccaattatcacaagaagacattcccgtactagtcaaaattcatctcacaatgagtcactccatgccatctatacacaaagccttga

SEQ ID NO: 121542 - DNA, 320 bp, Glycine max
  Clone ID: PAT_MRT3847_8075C.1
aaggatcgaccacgcgtccgcccacgcatccgcccacgcgtacgtccacgtttgcattccgatacaagaagacgactgaccgtgacggctgaaagaagacgacgcaaccatacaactgaaagaaaacgactgtagggtaccgctgaaaaaagacgactgaatgtgtcaaacggatctacccactgagtgcaagcatttcaataacctaactatgtaaaatactataagaacatttttactggccccttttgatgatacaagattacgtacgcttgactgataaatttaatcttttcactaaaagcacctatttcttgttc

SEQ ID NO: 121543 - DNA, 316 bp, Glycine max
  unsure (1)..(316): unsure at all n locations
  Clone ID: PAT_MRT3847_80760C.1
agaagcacccaacgagggacgacaaccagcaaaacggaaacacaagaagggacccngacagcacggacaaaggaacctttttttaaagggggggggagccaccacaacaaaggcanccaaaaagaaaaccccccccaagggggggggggggagccagagaanagacaaagcncagcggccggggaccaaagggagccgggaaaacagcaggacaaaaaggggcggaggaaggggcanacancaaggcagcacgaggccacgggagggagacacccccacaagaagccggcaggaaaccgggggggccaaaaggacc

SEQ ID NO: 121544 - DNA, 365 bp, Glycine max
  Clone ID: PAT_MRT3847_80761C.1
tgactcttcacaatatatagtagtcttcaattcaatgtctgcacatgtaatggctgttacaggacttagagtttcatcgtttacaagctcacttgcttcatgcccatccatttatcaaccatggaacctatcgttacagacatctaaacgagggacgattcataataacttgtccatcaagtgcgttgctttcaatgacaacaaggtgcccagtcaaattgatcttcggacaaacaattttgagcaagttaaaagaaacagccaaatggcgttgctaaactcaagtgatccaatcaaaatattgaagatgattgacaccatccaaaggttaggaattgagcatcatttcaaagaagagatcaacg

SEQ ID NO: 121545 - DNA, 511 bp, Glycine max
  Clone ID: PAT_MRT3847_80762C.1
tttcaaatctcgatgttttgctatgcataaaaaccgattgcaccgaatccagtgtcatgattttcctttatttcgtactgtggacaatttggacaaaagccaaattgagtttttaatgggtttgtgtcttttttggttaggtttacatatggcacagaagctcgggggatttaatagagacattgcctggtcattctggagcagttaactgtgtgagctggaatccagctaacccacacatgttagcctccgccagtgatgaccggacaattcggatatggggcctaaagcgcctgaatgtaaagtaccctaatgtacgcaccaatggcgtccattactgcaatggcggcgaatttagatgaacctacgcaaactgtttccaattccatttctttttttaaccttgcaattgtacgtgtaaataccttcactatcacaagtagacgacattcatacctaaacatgcatgtgacttttcatcaatctcaaaataaattcttattttatttta

SEQ ID NO: 121546 - DNA, 325 bp, Glycine max
  unsure (1)..(325): unsure at all n locations
  Clone ID: PAT_MRT3847_80763C.1
tttttgaacaaaaaatgaccttttggaataaataactcaggggcataccaggtatttttattttttaatacctaatggccgaccggaggggaccaaaaatggtatttntgggaatcaaacttttggttttaaaaattaaccggccggcggttcctggggggggcttttgaccggcaccacattcttggaaccggttgcaaagggtaggggggcccaaaaatgaaccacccggctttgaaaaattccagcatttttccccctgggaacccccagcccgggaaatgccaatccaaattttggtcttcccttgaattaggggttcccc

SEQ ID NO: 121547 - DNA, 275 bp, Glycine max
  Clone ID: PAT_MRT3847_80764C.1
tatgcacgccttcgcacgcaggcatcccctaagagcgcccgccccggccgtccttttttttatgtttaaaattttcgcggtttttatcttttcttactcatgatcactatcaacccaggggggggtatattcactaaatgttcaagtttccggggcccaaaaggcccccggtttcctaattttgaacgggaaccaaaccccccccaaaaacccgggggcctcaaaaaaccccccggtcaaaaaaaaacacgaggggaccccccccaatatgcaaa

SEQ ID NO: 121548 - DNA, 293 bp, Glycine max
  unsure (1)..(293): unsure at all n locations
  Clone ID: PAT_MRT3847_80765C.1
gaaagcagagacgccagccggggccggaccggaaaccccgggccgacccacgcgcccggatacaatagggggaacgagggcgaagaacacggggacgagaaaggaaccgacgaggccagaagaacacaccggaaacncagggcaaggacagagggcagaaacaacagcaagggaagcgcacgagaaagagcgaagaagggcaggacggaagaacacggggcggcacaaaccacaaggacaaagagaagcggcacaccgaccaaggacggacacagacgacagaaaaaccgcaa

SEQ ID NO: 121549 - DNA, 580 bp, Glycine max
  unsure (1)..(580): unsure at all n locations
  Clone ID: PAT_MRT3847_80766C.1
gcacgagcttactcacagatatatttttttttttngtctccatcnttttctcnaaagctttcantttgtgtggtncanctttctnctnctccttccctcccccctctgtaacaccccgctnctctnaatccctttctgttaatcatctgtcttccaanctaaaatttccgggttngtctattanttcnccaaaaancaaacttaaaaggatttttcnaaagccaggtnttttcaaaaacaaaatccaggttttattgtcaaatttcgctantcaaattaatttncataattattttttnctttgaaaccagccaaaagggttntttttnatccctcaaanctaatttctctcnctctttttttatttccgggactgaaaaggttgtctatttnaaatctccttcatcctttcctttcttgtaaaaaatttttaaatttttttgtcagtgggtgttttaattaaccnctgttctncaanttttanaaanacccggttgaattaattagtatcctggcngctttgatggattttacgcacanccaaatttcaattccccaatcctccngggaaantatggaa

SEQ ID NO: 121550 - DNA, 400 bp, Glycine max
  Clone ID: PAT_MRT3847_80767C.1
tcgcgtaacaagttacaatagtcattacacaagcgttatgcaacagatacactaagactcaatcctatatgaaatgtgataccatgttagtgagaaatctcgttgggcgcctaggaatatatgacatgacaaaccacatacttgtaaatcagataactcttactaggtaaaatcataagaaaatcggtcagagtcatgttgttttgcgagaatactccaaccatgtgggatcgatatatacttaaaggaacactcaaaccaggtgtatttattccaaggcctagactctgaagagtttgtcagggtttctcccttctgattcaggtccaacatagaaaacattttagcacgtagactctatctatgaactatacaaaacatacgactcctcaattattct

SEQ ID NO: 121551 - DNA, 575 bp, Glycine max
  Clone ID: PAT_MRT3847_80768C.1
cccgagccggcgggtcccgcgggaatgacgttgcggatacgtgtttcttacaaatctgtatgctctcaggccttgctggatatagcctcgttcatgcggagatccctggggacgatttctgagcaactgtatggcctaacactcctcttcccactagggctgagacagcttgttatgcctccccctgttggggaaagaatggctccagctatctatgcatggcggtgattcacagccacccagaatcattgctgacctaaacaagacctgagatctgggcctatcagtgcctgcacagttctccacgacggcctctgcgcacccttctggtgaatatacatgggcaaccgcttgtaaagacatcttcaaacaatgttatctgagtcacagcagatgtgcatacagctggaaccgtctgaagaacatgagaacttacgtgcaaagtcctcgtgaacatcaattgatgctgccatattgctcctgctaatgaacattgagctgctaccaagttcctttgtcggtgagctatagcaacacactctgtaaggagcgcacactctagaagaccaagcagt

SEQ ID NO: 121552 - DNA, 706 bp, Glycine max
  unsure (1)..(706): unsure at all n locations
  Clone ID: PAT_MRT3847_80769C.1
cggccgctcgaggcggcgggccgggaaaattctcacagtgacttcattcgcacaccttaaacttttcgtttctttttacacccccaacaacaacgagaagtagattattgatgggtatactgtacgacgacgtagtgatcataaggccgccagaaaaagacggcgacccaactctcctcacggtcaattgccccgacaaaaccggtcttggctgcgatttgtgtcgcatcatgctcttcttcggcctcaacataatcagaggagatgtgtccacggatgggaaatggtgctacatagttttctgggtggttgggaaacagaggacgaggtggagtttgttgaaaaagaggctcattgaggcctgcccttcttgctcctccgcctctggaatctcttattatcgctctgacttgcagccctccaagccttctgatgtctttcttttgaatttctcctgtcacgaccggaagggcctgttgcacgatgtcactgaggttctttgtgagctagaacttactataaagaaagtgaaggtatctactacacctgatggcaaagtgatggatctgtttttcatcacagataccagggaacttctacatacaaagaagagaaaggatgaaacgattgaacacttaacagagattatgggagatgccatcatttctattgacatttgattggttggncctgaaattacagcttg

SEQ ID NO: 121553 - DNA, 782 bp, Glycine max
  Clone ID: PAT_MRT3847_8076C.1
tcgggactcttatgttattctttgccattttttttatatattatgtttaggttcgattcattcaccgcactgcttcactcctgagcactggatcgatcgagtttcaatttcctctattatctttgttgctttccatgtaaccccacctcttatccatatatatccattcttcttcctcacacttgtttaatttgcacaaatatattatactccaaataaaccgtctcataatggaggagtcaggggaaaattggccttccgataattcttatctggatgaggtcaacgatgaatttggtagtgaagatgaagagggaggttcattttctggaatgggcgagaccgacagaaagaagagaaagcgagaactcgcagagaggttccttgcactttcagccaccatacctggcttcaccaagatgggtgagggttacaagatgacggtggatgaactagtgaagaccctgagagtagcgatatcttgatgactcattagctagcctgtcctaatgtacctaccaagcaagtgcagtattaattgtaatttgagaaaaagctagtaataaactcttgtttactcttttcaacacattcttttattgagtaaaattcatgaatcgtgtactaaacatgtgagtccgatgttccatttgaattttattatcatattattaaaacctacttgaattttaagcaataaaaaaatatgtcgaaaagagtgttgttaaaaaaaaaaaaaacaacctcccacccccctccaaagaaaaaaccccggggaaaaa

SEQ ID NO: 121554 - DNA, 339 bp, Glycine max
  Clone ID: PAT_MRT3847_80770C.1
cacgcataccctcttttgtggtttgaggaattgggattctaaaacctgccagctgggttgtatttaaaattaaggcttaatttttcttttaagttcttattttttttttaattttggtcctgtaaatttttgttagtccttttaagcttgtattttttttttttcaattttaatctcttaaagcatgaatttacaaacactagaaatgaaaaaatagaaatttaaagggattaaaattggaaaaaaaaaaaaaaaaataaaaaaaaaataaaaaaaaattaaaaaaaaaatataaaatattttaatatataaaataaatatttaaaaataatataaatt

SEQ ID NO: 121555 - DNA, 322 bp, Glycine max
  Clone ID: PAT_MRT3847_80771C.1
ctctaatggaattcattcatggcatttcagaaaactcaattggtaatcctgcgtcgcttcacttctcacacaatcttcgatagcgcagaatttacagtcggtgagaagcacttggcgtctaatattcacgtacgggagtagcattagattggttcggaatcaaagttatcgaaatcgatcatgcaggtggtgtcaaatgtatcaatggtcagcttcctgtgttggcggtgaccacggtagagtagaaatcgtggcatcagacacatctaacgttacaattagaagggtgtgacaatgagattgattttgatagatgatgaca

SEQ ID NO: 121556 - DNA, 279 bp, Glycine max
  Clone ID: PAT_MRT3847_80772C.1
aacctgaattttggtttttacattgaaaagttttgggatttcataattgacccttttaaaagttaaaacaaagaaacctttggtgaggggatagaaatgaaaattaccccaacttattccccgggggggaagaacctttttaacccttttgggggggggggggtgggaattgggaacccagggctttggggggggggaaatttttattttacaaagcagccggagagggctggaagtaggaaaaaatggggtcgtggggtttttttttttttgttccac

SEQ ID NO: 121557 - DNA, 370 bp, Glycine max
  Clone ID: PAT_MRT3847_80773C.1
cttacaagcttcccttttttggtttgagaatatcaggatatgggtgattcgagatgaccaacccatgcgagggaaaaattactccaccaaaacagaccaactgggggggcgacgaacactttaaactaaaagagacaaaatggaacagtctaactgagggatatacagaggacacacgctcttaaagccaatgttgttgatttaacggaaacatatatgggggaccttccctcagtctatatcttagggagaggccttgctgcacaggaacatagatgagaccctaaactccacttagaagagcacgccatgccactgttacataaaatctgaaacccgggccaataaaaaaaaccgaggtttagtaggc

SEQ ID NO: 121558 - DNA, 248 bp, Glycine max
  Clone ID: PAT_MRT3847_80774C.1
attgacatttacgaagtcaacaaaaaaacaattttaaataaaaaaaaaaaaagaaattcaataaagaccatttttaacaattcgaaccgcgattaaaaaaaacaaaaatcgccacttctttaaaaaactccaattttagtcctccttacttcaacagcataacccttttttcattctaccaaaatttaattaactagcccttattttaaaacttcataactggtaaaaacctggtttttaccaaatta

SEQ ID NO: 121559 - DNA, 1283 bp, Glycine max
  Clone ID: PAT_MRT3847_80775C.1
cgaagctcggaattcggctcgaggcccgaatgggcaaagcctcaacaagctgctgtaccagctgacaagaggtggccaggtgcaggatctaatccttcggtttcatattcattggcttcaccattgcaagtgtcacccacatctgctaagacagaagcttcttatatggctgcaggaggtgattataagagccttcaacctggatcagctagggagccagtaattgtgatgcagcgacctcaaactgtaaatgcaaagcagattccagctgccagcatgagttcatctcctcccggagtggctgccagttggtatccaactaatagtattgaagtcatgaggtccaatggctttatatctcatcctcctagtactagaagcctcagttcaaactatttcagttctaatcaactgtaccaccaacttcaatgtcaaccgcctcagcagtttgtggctggcaacagcagttcagtagatctcctagcaactaatcaagggaatagcttatggaataaaacagctgcatctccaagtcttgctgccgcttcttctcttggactcttttccaggctaggatcggcagctacatcaggggcaacttctccagtagactggagcactggtgggacaatgcaatttgattataccaacatagactggtccttggatagaggtttatctcccccacggtctaatgcattattgtttgggctttctccttttacaaagagtagtagtactctatatggctcaaatgcttctgggacggttgctcagacgacagttagatcattaccctctaatggtagcatggttcctttgcctggattgcaaaatggtgtagtatcgtctgctgaaacatcaggttctcgggattggagttctccatttgaagggaaagacctttttagtttaccaagacagtttgtttcttctccttctctgtagagtcgaggggagaaatcaaatgaataaaaaagaccaaaaaatgtgtggatttgatgtttgttcttatgatgctatagttgatgtgatgttggtggtaagctttctcataccatttcacatgcatgcacagtagactaccccatcacttgctgtaacatgcacaattcacttccatacactaagtacacactatataaactgggtagagccgtggaatgtctgatagaatccaaatatgcgatggctctgctcagttctcgtgacagttttgtggcagtgttacattttgaaagtacaggggctatatttttattaaatagtttgaaagttatcaa

SEQ ID NO: 121560 - DNA, 363 bp, Glycine max
  Clone ID: PAT_MRT3847_80776C.1
tagatatatgtcgccctgcccccacaacatgagaggttgggtatagaattagaacctgtgaccttcaagttacaagtaaccttactgattctcataggctaaggtctagggatcacttcctttcacatatgatcagttttcattcttactttctgaaaaaaatttggcttctgatcaatgtcacatttggatttttgcagtaaaatgatccagttgtttgcctgacggagcctgcacaataaagggaatgcaaagttacagaccccaatgacatgattattactgaaaacagattggcattgttaaccatgttggcaggtttaaacccattatggttcatgtctccataaattgaatatttca

SEQ ID NO: 121561 - DNA, 173 bp, Glycine max
  Clone ID: PAT_MRT3847_80777C.1
agaaaaaattatccatattttgtttaagcacaatgccaaatatgcccactacaacatttgaatcacttgatggataaaaatggcgaccatatttttatatttagaaaatattctatgtgcttcctttcaggccatgcttggtacccgattaacaggaatttggggtatgaaat

SEQ ID NO: 121562 - DNA, 394 bp, Glycine max
  Clone ID: PAT_MRT3847_80778C.1
aaaaagggaataacaatgatttaaaatttcaagttagatgttacaacttcacaccatcttgcaatgaagatgaaatatgtgtaatcaaaatttacataactatcaaacagccattagagggataatctaataaaaaaaaatcatggacctacagagaatatgcaaaatcatgaaagcctatgtagatagcaaggaatagtagataaccatcaaagtagtgatagtcacctattttatacacggcaagcccatgaacttaaaattcaaacctaaaataattttggatagataaaaaaaaaaatataaaaatcatatcatagcctatcttctagaataaaccacataatcagaatgttatttatatagcataaatgtcatatcatagcacaaacac

SEQ ID NO: 121563 - DNA, 348 bp, Glycine max
  Clone ID: PAT_MRT3847_80779C.1
acccactcatacgctcacactatcacatgtttacctgcaatttttaacccccagaacaaattaccaatactagaaattttttaaaatttacagggcacctatacataaccttatctctcatacaaacgaataaatcaaacgacaaataaaactaactaacccacaaattacacttaaatttttacaccaattgaaaacaagcaaatcatattgaaatacatctttatacaaactctattccaaaaactacataaaacttacaatctctatgcactgtctaaaacacaactcataaaaaacacaaacctctccattacaaagggaactcaatccatacaactattccta

SEQ ID NO: 121564 - DNA, 262 bp, Glycine max
  unsure (1)..(262): unsure at all n locations
  Clone ID: PAT_MRT3847_8077C.1
aaaagtgtaactgtctgataacatagaataacaaaggttctatatanncngaaattcaaacacactatatcatgaaccgattatcctaaaatgataataaactgggtgaganaacataaatgactttacattacatatttaacgtgtctatttatgcnaganacctttagactaaaagtaaactttttcgagaannatgaagacataaaaagcaaacttgatataaagggattancatgtagatgangatgtcggaagangc

SEQ ID NO: 121565 - DNA, 369 bp, Glycine max
  Clone ID: PAT_MRT3847_80780C.1
tgacgctggaagcgtgcacgcacgctgcgcacaatgagaagcttccgctgcgcacggtggttcaggttcagtgcttcgagcagcttcagctacgacacgccatcgccggaacgctgatggcggctgacgcagccgcagaacctgcgcggcagtctgcggcactggaacgggaaacggagggcggccgacgagaaggattagggttatgacttacagcacgtgtaggaatagaacggcatgtggaacgtgccagtaagggagaatcacgtactgcccttggagattgatcgcatgatgacgcgagtacatctcatggaacacgaatgttcatctatggttagattcatcggcaagtttgataagtccgac

SEQ ID NO: 121566 - DNA, 943 bp, Glycine max
  unsure (1)..(943): unsure at all n locations
  Clone ID: PAT_MRT3847_80781C.1
ccaaaaacgtaacacctccaactacagcttatcagtatgaggtctcctggagagcattttcaggtgatcttgctcttttcttttttgtatgttaggctatatctccccatgaattgccgaaaatattcaaaaatgccttgtcttctaccatactaattgagatcatcaagtgtcttgcatctcttttcactgaggacatggatctggttgtcagttatttggagcatttgaccaaggtaccaagatttgatgtgattgtaatgtgcctttcatcaacaaataaggatgacatacgcaagatctgggatgaagtgttcagcggtgaggcaacaccaatagagtatgcagagattctggacaaccttcaatcaaagttcggccttggacagtgacatcttcccctgtatgttttaatatttttttttcctcggtggatcctctcccttccgcaactatcttcacttgtaaattattatgctattgaaatgtttgagcattattgacggtcaacttgatccatctttaagcgttagttgataatgaggaaatgggaggaaaaagaaaaacaaaaggctcatgtgtagtgcttgaggctgagggtccagtacgttttaatggttttttccttcagaatttgggtcttctaaaatgaggaaaagtaaaggaagtaattttagttgataatgagaaaatcaacattttaatacatctgtaatttactataattttgttccaatcaatcaagaaatctagaaacagtatgctgatgctaagtctttctatgagaaagannntttcagaaagcatcaggggttctgagaagcactgtacagggaactcaaaaagtggggaagtcagaggaaaaagttaatggagacagcatccaccccatttcacatagtactcaaaagtctggactagctgaagttcatcatcataaaaa

SEQ ID NO: 121567 - DNA, 547 bp, Glycine max
  Clone ID: PAT_MRT3847_80782C.1
tttttcctcccatttcctcattatcaactaacgcttaaagatggatcaagttgaccgtcaataatgctcaaacatttcaatagaataataatttacaagtgaagatagttgcgcaagggagaggatccaccgaggaaaaaaaaacattaaaacacacaggggaagatgtcactgtccaaggccgaactttgattgaaggttgtccagaatctctgcatactcaattggtgttgcctctccgctgaacacttcatcccagatcttgcgtatgtccgcacaaaatgtaaccaacttatcaatcagattgacaaaccatccttatttgttgatgaaaggcacattacaatcacatcaaatcttggtaccttggtcaaatgctccaaataactgacaaccagatccatgtcttcagtgaaaagagatgcaagacacttgatgatctcaattagtatggtagaagacaaggcatttttgaatattttcggcaattaatggggagatatagcctttaatagacgagcctgcagagcaagatcacctgaaaatt

SEQ ID NO: 121568 - DNA, 492 bp, Glycine max
  Clone ID: PAT_MRT3847_80783C.1
cccactctttccttccacgcgtccgcaacccccaagtttcatgcttttctcaaaagggtttttcaataatcacagacttcattgttgggaaggcactgcacgccttttgcgtgaagggtgtcattcacctaggcacattccaggcaaacaccttgatcagcatgtactctaagtttggcagcatcgagcatgcacaacacgtgtttgataaaatgcctgagagaaacgaagcttcttggaataacttgatgtcggggtttgttcgagtggggtggtatcaaaaagcaatgcaattcttttgccacatgcttgaacatggtgtcaggccaagcagttatgtggctgctagtttggttaccgcgtgtgataggtcagggtgcatgactgtcggggcatttcaggttcatgcccatgtgatcaaatgcggtttggcatgtgatgtatttgatgggacgagtttgcttaacttttatggcccgtttggttgggttg

SEQ ID NO: 121569 - DNA, 383 bp, Glycine max
  Clone ID: PAT_MRT3847_80784C.1
ctgagggtcgtttctttttctttcttttttgtccccccaaacccggcagttgaaatgcttgccataaaaaaaggggaagcatcttttggcgaagcacatcaagtaaaactccaaactggagggatgtccttttcctccaagacctgcatcacttttaaaatgtagtactcccattaaaatgcaagaaacccggatcatctgaggaggacaacattgatcttaacagcccctatagcatgaaacttaaaaacaccaaatctagaactaaacaagtttctgatccttgacagttgcattcgctttatctatggcatcccttgcaacagggcgatgttcaaaggggcaattatgcttgcctgaatagcgatgttcaaaacctcggc

SEQ ID NO: 121570 - DNA, 657 bp, Glycine max
  Clone ID: PAT_MRT3847_80785C.1
tttatcaaatttctacctattaatttttttattattacttgaactttttaaattttacatttgcaaattgtgttaatctaagtcaatgataacgtgatactttgatgataggtcacattatcattcagttggtgataatgtgacactatgtttcttcgccatgttaacaatcaagactaataacatgtatgaaatgtaaaaatttggaaagtcatggagaaaaaaaaagttgaatatgcagcaatacaaaaaagaagtgtagtacaaatataaaaaacatatttaaatcttcttaagttggttactaatattaatactaataatcgttgaaataaaatatgaattttaattaaaaaacaatactaataatatttatggtattgtgtttgaatttaataagagcaaattatactgacaaagcgtgaagtgtcttagattcgacgaaacctcaaattattctatgttcgagactatttggactttggctaggctctgtttgttatactcacctagttaagttatatttcctccaattttaaatattagaaaaaaaaacaccccattttttttgtctcaattataagaaaattcaactaacgttatcttatttattattatctctaaattatccttcatttaattgatggattaattata

SEQ ID NO: 121571 - DNA, 363 bp, Glycine max
  Clone ID: PAT_MRT3847_80786C.1
ggagcggcttccgggggtttttttagcaaattgatcataacaatttcccacaaaccgtcctaaggctacatgcatacatgacacaacaattatcaagaggcgcgcgacctcaaatcctcgatcaatgaggagaaatcggtgtaagaagaacctttttcctccacagaacgctttgccattcgagcaagcttttttgctctggtccatatttcctttgccttctttccaaccatgaggcttctgacatgcctttaagccgggtcctttttaacagggtccctttccattattccaatccacgtttgaacgccgacactccccccaattttaactctgtgcggaaaaaacttaaacttgaaaaat

SEQ ID NO: 121572 - DNA, 2348 bp, Glycine max
  Clone ID: PAT_MRT3847_80787C.1
attccgtttcgtttatgtttgaactttggcagaatacgaagactaccatgctttgattttacagactcttgagtcgcaacttttcctccttatcttttttttcatgctgttggtaaggttttcttggttcaagagggtcaagataaagtaagtcttcggccactgatggggtacagggtcaatccatcagttcaactaaacaataataacacatcgaaacatttaaacatggtacattaatactttacgataaacagtagtggagagagggagaaaaaccaaagaagattgaccatggcttcttcattgaggatctcaaggctcctctctcgttcttttctttctgcttccactactactcctttgttttctagaggcggaagtggtgctcttggtgcagggctcagtaaattcagcactgctgctgccattgaagaaccaattaaaccaccacttaaagtagaacacacccagctcttaattgatggaaaatttgttgatgctgctactggcaaaacttttccaacgttggaccccaggacaggagatgtgatttctcatgttgctgagggtgaccatgaagatgttgatcgagcagttgcagctgctcgcaaagccttcgaccgcggaccttggccaaagatgacagcctatgaaagacaaaggatattgctgcgtgctgctgatctgtttgaaaagcacaatgatgaccttgctgcactcgagacttgggataatgggaagccatatgaacagtctgctcaaatcgaaattccaatgctggttcgcctatttcgatactatgctggttgggcagataagattcatggtctcacagttccagctgatgggccatatcatgtgcaaacattgcatgaacccattggtgttgccggtcagatcattccgtggaacttccctcttgtcatgtttgcctggaaggttgggccagcattggcctgtggtaacaccattgttctcaaaacagctgagcagacaccattatctgctttatatgcatcaaaactacttcatgaggctggacttcctgctggtgttctgaatgtaatatctggctttggtccaactgctggtgctgctattgctagtcacatggacatagataagcttgctttcactggttcaactgaaactggaaaaattgtccttgaactggcagctagaagtaatcttaagcctgtaactttggagcttggtgggaaatccccatttattgtatgtgaagatgctgatgtagatgaggctgttgagctagcacactttgcattattctttaatcagggacaatgctgctgtgccgggtctagaacatttgtacacgaacgtgtgtacgatgaatttattgagaaagcaaaggcacgcgctttgaagcgtgctgttggtgatccattcaaggggggaatagagcaaggtcctcagattgattcagaacaatttcagaaaatactgaagtatattagatccggtgttgaaagtggagctactcttgaaaccggaggagatagatttggcaactcgggcttctatattcagcctactgtcttctcaaatgttaaggatgacatgctgattgcgaaggaagagatctttggtccagtgcaaagcatattaaaattcaaggaccttgatgatgtgattcaaagagcaaataacacacactatggccttgcagcaggggtgttcacaaaaaacattaacacagctaatactttgactagagcattgagagttggaacagtgtgggtgaactgctttgatacatttgatgcagcaattccctttggagggtacaaaatgagtggtcaaggaagagaaaaaggagaatacagtctcaagaattacttgcaagtgaaggctgttgttacatccttgaagaacccagcttggctttgaacatcattagctttagatttatttgatgaaaagattaataaataggctccaataataaagatcattaaattgggtttattccattcatagtttctgataatgatgaaaataatctagtttctttttctgtttccccccctgcattttatgggtagagcgaaatatactatggagtctatggtataaaattcaacgtagaggtgaatttctggttgggactggaatcaaatttgtataatgatggatgtaaatttcatattacctgttctcaaaggacattgttcgtttttagtaaatggcaatgttatgatttgaactgtgattcaacaaacaacgattcaatatctatttttaaaaaaaaaaaaaaaaaaaaaaaaaaaaaaaaaaaaaaaaaaaaaatcctagatcgcgatcttttttttttgagcgttcac

SEQ ID NO: 121573 - DNA, 536 bp, Glycine max
  Clone ID: PAT_MRT3847_80788C.1
ggaaagtggaaatggagctttttctataacaaaggagaattatgggctagaatattggactcaaaatatggtgattggagacatttggaggaaccaacaaggggcaacagagcatcagcatggtggaaggatataaatatcatagatccttcaggtgcagatggcagcctttttgataaagggataaaatggaaagtggcatgtggagaaaagaccaaattttgggaggatggatggaaggaggatagagtaacatttaagttgaaataccccacacttttctctatttccaaacagtaacaacatctcataaagatgatgggcaatttcacagctacaggttgggaatggaactttaaatggagaaggcaacttttcgatgatgagatggagatggctgtaaagtttttacaagatctagaagatatcagcatccacccggaccgagaagacaagtggatttggaaggaagatgcatcgggtgtctattcagcagggagcgagtacaagaagcttatgtcagcccaaactgatga

SEQ ID NO: 121574 - DNA, 486 bp, Glycine max
  unsure (1)..(486): unsure at all n locations
  Clone ID: PAT_MRT3847_80789C.1
tncatgcacgcgtacgtaagctcggaattcggctcgaggacccgtcaacatgggccgcgttcgcaccaagactgtgaagaaggctgcccgggtcatcatcgagaagtactacacgcgtctgggtaatgacttccacaccaacaagcgcgtgtgcgaggagatcgccattatccccagcaaaaagcttcggaacaagatagccggctatgtcacgcatctgatgaagcggattcagagagggcctgtgagaggcatctctatcaagttgcaggaagaagagagagagaggagagataactacgttcctgaggtctcagccctagatcaggagatcattgaggtggatcccgacaccaaggagatgctgaagctcctggactttggcagtctctctaaccttcaggtcactcagcctacagttggcatgaatttcaaaacaccacgtggagctgtttaatctgttatgccatattttcaataaccctg

SEQ ID NO: 121575 - DNA, 516 bp, Glycine max
  unsure (1)..(516): unsure at all n locations
  Clone ID: PAT_MRT3847_8078C.1
aaancaaacatttaaaattgaatataccaaaattaaataaataagaaatgtaatggatcaaaatgacattagacctaaattaaattaaacaaatacgccttccattttcaggtgaaataaaagagcaaatacaacttagtttctgttatcggatgggctcttctcatcttcatacataacatgctgaagaccacagggatctcttcctagtccctactttaattcttcatttttctcatgtaattgtccaaaatccaaagccttgagtccctcttaaatagaaggaactggtgccaattggagataattcctctgtcgcctactttagaagagaacggtccctaaagccatatctaatgcagatattgcaaccttcaaataacttcgggacagtataatgtataacaacaacaacgatcctgctttatcctgcaagacacagcagtacagcacaaaaaccaaaagaaggcaagataccgatactactcattgacaggcatcaaaaaagatattttt

SEQ ID NO: 121576 - DNA, 221 bp, Glycine max
  Clone ID: PAT_MRT3847_80790C.1
caagggctgcgtatatgaattgcctttgctttgatgcatggaccatcaccctgatccctcggtgagctcgattgttcttggagagtgcgtacatctcatgcagaaaagcctattgcactacgacattacacactgggaaaccaaggtcattgctgctaagtatgggttacatgatcagctcaatgaagcattgcaccttaagaacagaccaactgactatg

SEQ ID NO: 121577 - DNA, 341 bp, Glycine max
  Clone ID: PAT_MRT3847_80791C.1
gcttggaacctttgggctgatttatgtgcttgtggatgtgcgggtggatgtgcgggcgtgagaagatgatagaagggggaagtacccgagatcagtctccagagagaaaaaaaaacggtccgcgtaggcggaggagacgtagcgagattagcggcaacacgcgacaataagcgcggtcgcatatcctcacgtatcgcgggccttatccgtaggcgtataagcgtcggtatcgttataggagggggcgactatgcgatacgtctgcgtggagagtatcggcggcgtaacttacgtctacgccttaagaccgtggtcgtcggaagcggccgtagacgcggtat

SEQ ID NO: 121578 - DNA, 730 bp, Glycine max
  unsure (1)..(730): unsure at all n locations
  Clone ID: PAT_MRT3847_80792C.1
ttctctttctttttctgcaacttctacaatttgtttctttttcttcaacctagcggtatggcaaggccggggaataagatcattcaagccaagctggtacttcttggagacatgggaactggaaagaccagtatagcactgagatttgtaaaaggccatttctttcctaaccaggaaccaaccataggagctgcttttttcactcaaatattgtcattatctgaagcaactgtgaagttcgatgtatgggacacagccggacaggaacgttatcatagtttggctcctatgtactaccgtggtgcagcagcagcaattgttgtctatgacatctcaagcgttgatacatttgttcgagccaaaaaaatgggttcaggaattgcaaacacatggtaatgcctcatactcagtaaataaacaaatgctatgttatctttgtgtaagcaacaccagcactagtaatggcagtgaggaaaccagcactagagagggcggcatggtctccctcgaagcgtcgcccaagacggctgcgaccagccccgcgctcttctacgatttcgccacctggctataggccgcttcaccacctgtgcctgctgggctgtttgggagctgccagtgccttgctggtgggagaattttgttgcggtgcgctgcccctttttcctccgtcagccaaccatggatcatggattggtgccaaggaacctttgacttnnnnnntgtaata

SEQ ID NO: 121579 - DNA, 163 bp, Glycine max
  unsure (1)..(163): unsure at all n locations
  Clone ID: PAT_MRT3847_80793C.1
acagccggcggccgcccttgatnttggggttttcaaaaaaccacctgtattaatttcttaaacnaaagaccgaccacacagggaaaaggggaaaatagaaaaccgcgaaagtacgagcacccacacaaacaggggggaaggcgaaccgggggaaacgaccaac

SEQ ID NO: 121580 - DNA, 362 bp, Glycine max
  Clone ID: PAT_MRT3847_80794C.1
gtgccgggactgcatcgaacatttgatatgcacctctagctcaattcgtgggcctgcgctgtgttgctatcggtgctgtcgagattgggttgttattaatgccttcgtaaaccgagaccttagtgccctactttcttactcaaagggtccaatgatgtaatatctgaaggctgtggaggactttgaattagtaaacaagcacgcaatatgagaaatattgtggtaaagatccgttcttacatgagtttttagtccttttcggttcaaaagggaaatacattattggtgcagaattaataacctgaacttaagggtacgtcactgtggtgaaaaggtttgtcctccctggttttgcatgatgg

SEQ ID NO: 121581 - DNA, 515 bp, Glycine max
  Clone ID: PAT_MRT3847_80795C.1
caaaaaaaggcccaaacaaatttattttttggacaaagcggcaggaaaaaaatattggcccccaaaataaagaaggagaaccaaaaaccctcccctggtcaaatctatttgggggaaaatttaaaccagcccccttggaggcctcggggtctgggccagtaccaaatctcctccaaacccaaggattctaaaaaagaaaataaaccccctcaatgggaactttctgggttccggccaaagggaaaaaaacaaagagcctcaggaagatatttagggaagcaaagagcaagaagaccccaatttggggggggcaaagggcctggaggaacaatggaccaccaggggcagggaaaatcatgtggacacaaaccacaatactcggggcaaaggatcttatctctaaggggaagagctcacgggaacccacccacccagggggcccccaagatctcccatatgccaaaccgaacaagaggatcacaccacccggaagggccctcactcctttcccaatt

SEQ ID NO: 121582 - DNA, 310 bp, Glycine max
  Clone ID: PAT_MRT3847_80796C.1
aatcttattgggtgggggtccatttttttccgtttcatcaaaaaacaaagcaaaaaattgccacagccctagagggaagttttctttacacttggaaaatgaacggcctaacctttcggggggaacgtaaaataatgtgaattaccaataccctttaaaagatgggtgatagcatcccaagtcataaattttcttatatcattttgccaattaacggtttgaaatatgaaaatttgcataaaggggttggggtcaccaattttattgcgggggtgaagacaccatttatatataccaattttaaaaatta

SEQ ID NO: 121583 - DNA, 456 bp, Glycine max
  Clone ID: PAT_MRT3847_80797C.1
acgaaacaaaattttttttttaaggaaaaacatataatagcaacaaaaaatcgagtgtacttgtattttgttcaaagaatagaaaacaaaatagttcaagtgggaaagagggatgaaaaaaaataaaaagaggggggggccgttttagggggaccaagttatctgccgcggccttgcaagtataaaatttttttttgggggcacctaaataaaattcccgggccggtttttaaaaccgtcgggccgggaaaaaccctggggttccccaattaaatcgcctggaagaaaatccccttttccccagttggggaaaaagcaaaggggccccccccgatggcctttccaaaaagttggccaccctgaatggcaatgggaaccccccttgtaggggcccataaagcgcgggggaggggggggttacccccagggtgaccgttacatttgccaggcccttag

SEQ ID NO: 121584 - DNA, 187 bp, Glycine max
  Clone ID: PAT_MRT3847_80798C.1
cgtccgaaaaattaaacttaagatagttttttttttttttttaaatactgagtcataatggaaggtgactcagtgcacctgtacagacgtcagatcatttatttgagtttcattttcttaagagttaactgtatcttgaaataccatgttgaaaactactgtgaggaccagcgttatgtgaacacca

SEQ ID NO: 121585 - DNA, 434 bp, Glycine max
  unsure (1)..(434): unsure at all n locations
  Clone ID: PAT_MRT3847_80799C.1
tttaatattaaaaacaatgattaatatcataagcaaaataaacttatgaaaagtttgtttcattgattatttatttatttcgaggaatatgggattgggaaaaattactctcaagtttattatgaggtaataaaacaattgttacaaactatgtctacattttttaaatactcaaaaataatatttgcatgttatattctttgggaaaaaaatatttttagaattaaagaaatcgttcgtgaaacaaatgtcttgtaaaccaagatttagactttttaaaatataaacgttaaaaccaaaatcaagacanaatgtagaaaaaaatgtatttaaattaaaaaggaagaaaataaaaaaaatcattttatatgatcatgactcatgagctaaaggggacagagaccattaggagaaaccaatcaagtctcaaaatg

SEQ ID NO: 121586 - DNA, 406 bp, Glycine max
  Clone ID: PAT_MRT3847_8079C.1
ttgatgtacttctagctaaggccgcacaagaagtgggcgttgaatggtttgattgccccgatcaggaggactcctccgaggaagtttctttaagtgcagcactcaatggtgctgagggtttggactatatggaaagaattcctcttgccacatctgagggttttccccatgtgctttcacgcaaaaatggtgaaaaaggcaaaaggagattcgcgtctggggatggtgaagagatgacattgattccgggaaccagtgttgaagaggcctacaataagctaatagttgaactccagaaaagtgctcctacattgactggcattgaatgtcccaaggatgagaaactcactcgtcgcaaaatatttgacaaacctaagacgcgctgcttcactattctccctatgga

SEQ ID NO: 121587 - DNA, 286 bp, Glycine max
  Clone ID: PAT_MRT3847_807C.1
gcaataaaaaagaaagttattggcgatatggagcaaaatttgaccatgctttacttgcacgggcgaaagacggcataagaagcactctaagcgaggagaaaactaaaccaggatggacattcgtctttcatctatactgttacataatacttgctagcgtaagctatattttgagagcggaccccatcactgccgattgcttgagcctgttactggtcgcttcatcaacgacgtattttttctgtccctgaatcacacagcttcccagggacgaaccttgcaaaac

SEQ ID NO: 121588 - DNA, 125 bp, Glycine max
  Clone ID: PAT_MRT3847_80800C.1
ataccacacatggagactgtcttaaaagggaggcatgtgacagctgagacatcgcgaaaaaaaaaacatacgcgcgaggggatgagacatggaccattcacgaaaccttccgacataattgaaat

SEQ ID NO: 121589 - DNA, 1001 bp, Glycine max
  Clone ID: PAT_MRT3847_80801C.1
cgagcccacgaaacataaatcccccgcaacgaacaaaaacatatataactccacccctcaacgacaacaatcccttcttcttccctcagatccacaacccgcgtcctcacctaagccgccggcaccggaagatggaggacgacgagaagacacccttggtgggagaaatcgaggaggtggacgcgagtcccgtggaggaggagggcacgagcgagcgggagaagcgcgtgcggaccaaggtcccggaggcagagatccacctgtatcggcaggggaagggccccgtggcggtgttcaagtcggcactgggcggctgggagcaggatcagctcgagatcagggaggacatcctcgagaagtacggcatgaaatcggtcttcgcgttcaatccgaccgccggggggcgcggcgttcctgtccggttcaatcccagaaatgggaggtcgattttgacgtacagggatggggctgttgtttaccttgatggagaacctaaggattcacttgttaaaccagtgacgaggatcttggttggggttgctttaataacctttatgataacactagtttcaagggatactccgaactggttgaagaaattaaatttctctggtgtgaacttccctccatggatcttggcttgtgtagttattgtcttcacccgcatgaggaagagaactagagattttctgaagaagcggggttggtgaatgaacttgtgtgtgatgcctctgtggtagggttttatgcatttctctatacactttcaagatttgtttaaactgacataattttgttgattacttatatcatcacaaatgttataggttaataataagggatgccacatttgatgatacatatagatgtttttgttcagcgagtataggctatctatctacatagatgatagatctttttccttttgttgttgctcaaatatgtgatcattgattggagtggaaagaaatagtttcatatcatgcaaaaaaaaaaaaaac

SEQ ID NO: 121590 - DNA, 842 bp, Glycine max
  Clone ID: PAT_MRT3847_80802C.1
aatttttcttcccagtctctttgagccttctccattgcttcatattggtcaataagttgggcttggtgttcttttgtccactgttccaatttctgtataacttggtaaaaggataagaaaatcctcacaaatcacataggctacttccccagataaataattatcactccatattctatacctcaaaacacatgcgggatttatatacaaaaaaaatgagtggaagaagagaaattcttttgaacaacttttggtgactaaatttcctcccatgccaacataaataatgcatcctcaagctaagctatgtacttattcatcactttttggtcatgttctctctttgatctctgctgtttggattctaggatatgattgtgatccaccagtgagtgcagcggcggcggattcaacgtgtgtaagaagatattcatatatcttcttcctcagcctgtcaattgtctctgctggtatctggcaaggttctccctcattcttgcttgatcctatctcatcaagccaatcattcacacttttcagttgagtgagcatacctgctatttgaccattatttgacaagctagtgtccccatcagggtccaagaatctctcaacaaacaccaaaaaccaatctcgtgaccgcagttgcagcatgtcagccaaatcaaccacctcatcaaggccatttcctctaacccactctggcggtgattggactagttgcttgtgtccatttgctagcatatcacctgttttgtgaggagttttggaattagccgtctgacgggtttttccatgagattttgatgaatcttcacttgaattttccatgacctcgagcc

SEQ ID NO: 121591 - DNA, 517 bp, Glycine max
  Clone ID: PAT_MRT3847_80803C.1
gcctaatgttgttacttataacgttttgttaatggggtttgtaggaaggtgagtctgcacccagaggagatgtttgagagaactatacggaatgcagaggaggtgtttgatcaaatgcgtgagagcgggattgggattgagcctgaagtgactagcttttcgatcttgcttcatgttaatagccgcgcgcatatgccgcagctcgtgctggatcagctgaggttgatgaaggagaaagggatatgtcccaatgtggtgatgtacacttcggtaatcaagtgtctggcctcgtgcgggtggcttgaggatgctgagaggttgcttgaggagatggtgagggatggggtagagtccgtgtgccgcgacgtataattgcttcttcaagaagtttagagggaggaaagatggggagagtgcgttgagaatgtataagaggatgaaggaggatggactgtgcgcgccatgttcgcataggtatgtcatattgattaggatgcttctgaggtttgagatgatc

SEQ ID NO: 121592 - DNA, 423 bp, Glycine max
  unsure (1)..(423): unsure at all n locations
  Clone ID: PAT_MRT3847_80804C.1
taccgcagctaaanctgatccatggggaccgtcagcatagctacacatacgcacaccaagcagccgatgacttagatccaatgtgctaattacctcggagattctgtcatgtccgtcacagtcgcgcgccaaacgctgaatctatcggtgccaccgagccaccactcagaaaattggttaaagtggattggacacgtataaagaacaactactcagctttgggactgtgtattcatttatgacttttagagagagtctctaacaggccaacattgagtgtggattcaaagaaaagtgcctctaatggccaggataaaatgttggtatcacatgaacagcaagcattgatcaatgatgtgataaagtgattcgggccacagtctggtaaaggcgtgcatgttgtgttctgatgcatgcatctca

SEQ ID NO: 121593 - DNA, 218 bp, Glycine max
  Clone ID: PAT_MRT3847_80805C.1
cggctcgagggaaatatagagctgaattcgtctgaacaagatatatttgtaatcccagcaggttatccagttgtggtcaacgctacctcagatctgactttctttgcttttggtatcaacgccgataacaaccagaggaacttccttgcaggttcggaagacaatgtgatgagccagaaccctatcaagagcaggaccttgcgttttctgggtttggt

SEQ ID NO: 121594 - DNA, 561 bp, Glycine max
  Clone ID: PAT_MRT3847_80806C.1
gtttgggtttccgccggaactgagggacatgttgttgcccaacaaaaagggcgtcctcgttgcctctcccgcagaggacaggaagactttgaggtccaagcaatgcactaggggtatttactcttttttttttgttatttaatttaattttactaaatggggcatgcatttttttattattggttaaagaagacaattactgatgcttgttttcttcggttaaatcgatattacgcaaaagggttgattttgtgtgtggatgttttctgtctctaaaactaaaaatttgggataaaagaggaatggtgctgttaattttttattagttgctaaaaggaaaacatggttttgcttgggaaaataggtagtgagtggtgctttttttatttctggcaaggtttttttaaatatccgtggcattacggcttgttgatattgcggcaaatcagggacaaatgcagccgatgcattctcaatttcagtcaccaacagctaaaaaacctttgagttgcggcccaaatcaatgtcacggactgatatttaaaaccttgatttttgttg

SEQ ID NO: 121595 - DNA, 236 bp, Glycine max
  Clone ID: PAT_MRT3847_80807C.1
agatgctgcttcttaacttctccaaactcaaacgtgcaccagaggtacgctttactttaatctattcaatacacatcttaacctctagcttcatccattcattaaatagatcttcgcccagaccatgagctgtgcctgaaaccatggaaaattcagttcgctgaatctggatttatgcatgactaacggggatctaatggtgattgattttggttgaaattttgctgtttttattc

SEQ ID NO: 121596 - DNA, 360 bp, Glycine max
  Clone ID: PAT_MRT3847_80808C.1
ttggggctcaaggtattggcctaagcttcagcatcttattcctttaccattagtgtgctattcctcctttttttgcacttgtcatgtttcataaacaacctcaatgcaaagcacaccaatgccagcagtcacaaccatcatcacaaacaccaacacactcagaatccttccttgaacacaaggcttcacatggcgtttcttggcctacaagcatggaagcaagtgatctactcagacccaaataacttcacttccaactgggtaggtccttcagtttgcaactacacaggtgtgttctgtgctccctcacttgatgaccctaaagtgacagttgtggctggcattgaccttaacttcgca

SEQ ID NO: 121597 - DNA, 297 bp, Glycine max
  Clone ID: PAT_MRT3847_80809C.1
acggctgcgagaagacgacagaaggggtccaccttgttagatcaccttgcaaccaatagtatgacaaacaaaagaaacctgcaagaggttctagtgaaatgtagataaagcacacaaattatttttagtcatatgagacatgcagcaaggtaagaaatttgttttgaccttccactgttcaattaaatatacacatctgtggtttatccggtgtgctcgaaatgaagttatcttagatgacaacaactggttcgagatgagtctggtaattggatttatgggttcatgggatactgc

SEQ ID NO: 121598 - DNA, 208 bp, Glycine max
  unsure (1)..(208): unsure at all n locations
  Clone ID: PAT_MRT3847_8080C.1
gcactcntncccacaccttctcctccgtctnnngtaccaaggacctccagatggttaacctaaccctccgcgtcctctcccgcnccgancaccgagaanctcancaccatggtcccagaanctcggtctcgaantacgatgannaggtcntgccttgcatgggtaaggaggtcttcaaggccgtcgtcgcgcgttcaaacnccgatca

SEQ ID NO: 121599 - DNA, 755 bp, Glycine max
  Clone ID: PAT_MRT3847_80810C.1
tacggctgcgagaagacgacagaaggggactccaagccctcaccaaatacttctcttggcattttgtgtcccttctctctttctcttgctcgatattttccaaccaaaataattattaaaaccaaacgtagctaggcaccactgctaggaatggcaagtgagatatttcttgcccttctgatcacaacctttgtggttgcagcctctgctggtaacttcaaccgagactttgagataacatggggtgatggtcgtgccaaaatcctcaatagtggggaacttctcaccttgtccctagacaagacctctggctctggatttcgttctaggaatgagtacttgtttggaaaaattgacatgcaactaaaactcgtgcctggtaactctgcaggcacagtcacagcttattatctatcttctcttggggatactcatgatgaaattgattttgcaggtctgggtaacttgcagtgggtgcaaaagaaccacatgatttacaactactgcactgatactaagcggttcccacaggggcttcatcctgagtgcacaatcgcataaaaacaaaaaccattttcagattataaacctctcacacctcatgagttcaattttttttcctgtctagtgtaaattaataaaaacactaagggtcctcggttaatactttataatatgcattctattgtttgtgaaatagtgtgcaaatgagattcgttgtaattttggttattaataaatgtttggagggttat

SEQ ID NO: 121600 - DNA, 1255 bp, Glycine max
  Clone ID: PAT_MRT3847_80811C.1
tttcggctgcgagaagacgacagaagggggctccaagccctcaccaaatacttctcttggcattttgtgtcccttctctctttctcttgctcgatattttccaaccaaaataattattaaaaccaaacgtagctaggcaccactgctaggaatggcaagtgagatatttcttgcccttctgatcacaacctttgtggttgcagcctctgctggtaacttcaaccaagactttgagataacatggggtgatggtcgtgccaaaatcctcaatagtggggaacttctcaccttgtccctagacaagacctctggctctggatttcgttctaggaatgagtacttgtttggaaaaattgacatgcaactaaaactcgtgcctggtaactctgcaggcacagtcacagcttattatctatcttctcttggggatactcatgatgaaattgattttgaatttctgggtaacttgagtggtgatccttatattcttcatacaaacgtattcacacaagggaaaggtaacagggaacagcagttctatctgtggttcgaccccacccaggacttccacacatattccattctttggaatcctcagagcatcatattctctgtggatgggacacccataagggagttcaagaatcttgaatcaaaaggggtttcttttcccaaaaaccaacccatgaggatatattcaagcctttggaacgctgatgattgggccacaaggggaggcctagtgaagactgattggagccaagccccattcacagcctcttacagaaagttcaatgcccaagcatgtgtttggacttcttcttcaggctcatcttgctcctccaacaatccatcatcaaaccaagcatggttgaaacaatcactggattcaacagggcaagctaggattcagtgggtccaaaagaactacatgatttacaactactgcactgacactaagcgtttcccacagggccttcctcctgagtgcacaatcgcatgaaaacaaaactatttcatattataaacctctcatacctcatgaattcattttttttttcttgtcttgtgtaaattaataaaaacactatagggctcctcggtttatactttatatgcatctattgtctgtgaaatagtgtgcaaatgagattcgttgtaattttggtttttaataaatttgttggagagttataaattaaaaaataaaaagaattgtgcgcttaaaaaaaaaaaaaaaaaaaaattccccaaa

SEQ ID NO: 121601 - DNA, 246 bp, Glycine max
  Clone ID: PAT_MRT3847_80812C.1
cccacgcgtccgcttgtccttgacagctgacatgaaaataattttttaattcattgatgccaatgttaaccgtgtgctttattggccatgtttataaacattttaattactatgaacatttcaattattatgaacattttaattattatgaacattgtacaaaaaaacagactatataatctatactctcacgaaaagctaaaagttgctattgatccagagaagtttataggcatgcattctgct

SEQ ID NO: 121602 - DNA, 544 bp, Glycine max
  Clone ID: PAT_MRT3847_80813C.1
aaaaaaacaaaaaacaccagggatttattggaacaaaggagggggcaaaaagctaaccggaaactaaaacgggattccattttccaaaaacaaaattaaaaacgaccctccaaatttcggccccaaaaattttcccggggacaaaccggggaaaaaggcagtttcaaaaaaaaaaaagggaaaaaatctcggggggcattattcaaaaaaaaaaagggggacaatttaatttcaatggacacccatatgggttagaaaacgagctttcaacgaacaaaacccacagggaaaaaacacgggcccgggggggggatcaacattcattaaaaaaaccccacttcccccccccaaaaaggaaaatcccatatttttcaattccaacggggctaccgagaagtaatccccacatcgggttggggaaaacaggtccaagggttccccatcattttaaaacataaaatccgggaagctaaaattttggggaacatcagcagccaaaacatccggccttgaaccacgcagggcattattaaaaaacgagggg

SEQ ID NO: 121603 - DNA, 513 bp, Glycine max
  Clone ID: PAT_MRT3847_80814C.1
gctcactctgtggatggtcaagatccaagggtaattgattctactgcttccgatcatatttttggcaatagttctctattcacctctcagtctcctcctaaaattcctcatctaatcacattagcaaatggaaccaaagtcacttcgaaaggattcggcaaattctctatttttccatccttaaacttggatccaatccattttgtccctaactgccctttcaatttagtttctcttagtcagctaacaaaagcattaaatttttctataacattcgatgctgattcctttgttatacaggaacgtgatacaagttggttgattggcgtagaacatgaatccagaggtctctactatttggaaatcagttcatcaatgtcttgttttgcgactccgtctcctaagcttttgcacaatcacttgggtcatccacacttgttgaagctgaagatggttcctagtctcaacaaacttcaagtcttagagtgtgagtcatgtcagttaggaaaacat

SEQ ID NO: 121604 - DNA, 338 bp, Glycine max
  Clone ID: PAT_MRT3847_80815C.1
agcggacatgactggtcaggggatgacacttatacaaagtgctacagttcctaactgattcagaggtgctgctcggacaaaaggctgtctaatggtcaagatggatgtgtctgggcatgcaccgaaccacatgagtgagagttgctcattgcaacagaggtatgtaacactcatcatcggtacaaaacgttgtgatgcatgtgagcggacaaaacctgatccacattgctgggaattgatgtcaccaacaaacggatgtcagcctaagaattgctcttaaaagtggagctctaagtgggcaaagctaactatactgcatttgcatcttcttattgacc

SEQ ID NO: 121605 - DNA, 344 bp, Glycine max
  Clone ID: PAT_MRT3847_80816C.1
cccacgcgtccgtttttatatagatctgactaaagaactggcaagttggatcgtatttttatatcatcttgattcccatgaaaggctagatagaagttctgatgtttgctaccccctctgaggtgtttctctcaagatatagtagtgtgctaaaatcaccatgtctttctatgtttatttgttaaaaaaaatatgtttttgcatgttgtagtttgacattcagtttgaaagaaaacagattattattacattgtgtaattataaattaaatttaatttactaaacagagtatgaaaagataccaatgagaccagaaaggagaacatactgaagcatctcgccag

SEQ ID NO: 121606 - DNA, 1025 bp, Glycine max
  unsure (1)..(1025): unsure at all n locations
  Clone ID: PAT_MRT3847_80817C.1
ttttctcaaattctaatccaataaatagaagttgtccaaagcagaacaagacaaatggctaagcagtgacatagtgtaagctaaatgatggtgcaaccaactacagacaaatatggttaccattccatgagaaaatggaagaaaccattattacataagagaatgataagtaataattccaaaaaatatttacagcatgtaattaattaaaaataagcaacatgcacccgtagtgttcatctccgcctagcaacatgcacccgtagtgtttttactacttggtcttcccctgatataacttcacagaagcatgtatcatttctttcaattttattccttctacaaaagcttgcccaacccttgatatatattctatgatcttgccacccacaaactcttcctgtcacttcctgatactttatgcggatgggtgtcaaattatgatgatagtctcccaattcattcattggaatatccttgcgcagccagggatgaaaacaaatgacggggagctgttcagcaggattaggggcgaattctggtatagcctgcgctggcatagctcataacttataactgtgacgcttgaaccaagcgttaaagaaattttttgcctggtaattactctcaggtgcaccaacttcatagtccgcatccttggctgcaccgtcggcctccgcccctgtggcagtctcccctaaacaaggacaagcagtagntgaagagaaatgggaaaaaactagttttcaagatgaagatnnaacttacttttgcaagctctnnnatgatgactttgangnnngannnnnncactgannnctnntnnactctcttcgttgggactatcgctgtagagctttgctttaaaaaaaatgattctcacgctgaatacacatttctggatcaaatacatattctggaagaggatcttcagcatcggggttggaaacttgatgcagtctcccttttgcaagctcttctatgatgactttgactcttgaatccagcaccgaattcttctttac

SEQ ID NO: 121607 - DNA, 443 bp, Glycine max
  Clone ID: PAT_MRT3847_80818C.1
gatttctctatctgctgtgaacaatttcacaacggggaatgcattgaggtggctcagaacagacaacaattacataacactgattgaattggactgtcaaaatggctttacatgaggaagacaggaacttgtttgacctgatgccaggaacggagtttgagtcgcactgaccacacttacaattattacatctgataacccaaggagtgggagattccactgaggctaaacaataagtgactcacgcagaacaatctgtaaaaaaatcttgcgacactttggtgtcccagccaactatacaagagagttaatgccactagctatttgaagaaagacactatatctgcttgtaccgaaatgctaaagcttaccttgtgtgattctaagactcagagggcgctattagatacaactttgtcattaccacgttttaagcactaacc

SEQ ID NO: 121608 - DNA, 227 bp, Glycine max
  Clone ID: PAT_MRT3847_80819C.1
tttattctttcgaaagaatacaagtgcgatctaaccaggcttcagaaactgaggtgcatacgttatgtacatgctagctgtttaagacgacgcccgagctcatgggcgaaaaagttcaacaactgcctaggggggccgcaagaccccccggtgactaacacatcaacgtcgaggctgtgaaacaagtctatgctgcacaacattgagcgctatggttgctagctcta

SEQ ID NO: 121609 - DNA, 1013 bp, Glycine max
  Clone ID: PAT_MRT3847_8081C.1
cggctgcgagaagacgacagaaggggactcacacactttctatagctaccctcaatctatagctagctagcaatattctctcaatatgatgcatcgtcagattgagatggagaattctgagctcttccaattcctcacaaacaccaacgatagctttcttcaacactgcatcatatggcctccctgcggcacctgcagcatcaaccatgcagcacagcttctctggctccttttcttattaccctttggaagcatctcatgatcatcatgccccttctcatgaagacaaagcccttgctgctttgaggaaccacaaagaggctgagaagagaagaagggaaagaatcaactcccacctcgataagcttcgcacccttcttccttgcaattccaaggtatatatatgatatttcattttgtagttcaatctatgcatactctatcaatcttctcattcgtatgtatttgcatcatcttcgttttaaattaaacttattttaaagaaaaaaagttatttactgtttagagaattaaaagaacagttgctaagaaacagtgggtgtgaaagggtagtaacttgtaaaatctttctcgctttttgttcgcaaaggttgcatactttttgacccaccaaagctaaatgggtgcaccagttgactacagtgtaaaagctaactagtgtgtaacagttaacaactggcaatttattaaacttgatagtttaggagaccgagagttgcatgaatccaacttatagacacgtaataagaattcatctcatataaaaattgataataaaatatttataaataatatatcaattaaatattttaatattataataaagtaaaataataaattataaatttcataatacttaaataataaatttaataatatattactgttagataataatttataaataattatagtagtgaaagaacatttcaatcaagagtttgatgctatacaatgatttaatgttattaaaggtgataatattttgattc

SEQ ID NO: 121610 - DNA, 1055 bp, Glycine max
  unsure (1)..(1055): unsure at all n locations
  Clone ID: PAT_MRT3847_80820C.1
ggtccggnnaattcccggngtcgacccacgcgtccggttcttgtctgatgaaaggttgttttgcactgtttcatgtgggttctggttatgcaagagggaggcagtgatggatggtaggaggcattctgttgatattcctatttccaaaactcttgtggcactgaagagagtaagatcattgagggatccatctactaatggtgttagcagactctctcctttggttgatgatggagattgggaagatggttctagtaatggggtttctctgagtttgaggttcctgaatggttctcatgtatgtgattctaatggtaatggtcttttaagatcaagtagtttagattttaagggacaaaaagagcaggacactgctgagtttgaattagaaatgtggaactctaagatgaaccattgtgggatctcatgtcaggaagggcaacaagatgatggactagtttactctaatcctaagcagcaatgtatttctggagacaaatcttcaaatgaaagctgttgtagcaaccatgaaggtagaggattggatttggtttccatcatgccttcttctaatcatttgaaggatggagagtcctgctatttgtcaactgcaacaagagtagaacactcaaagtcggcaagaaaatccctacgcaagaatcaagtgaaaccatcggaagtgattggtgatattgcaagccatgtaggaagccaacaatgcctttctgtttttgatgcaccctcagctcgtagtgcctcggaacatatcactcaggatgaggacgttttggataattaccatggatgtggattaaggagttgttggtcaaagtcaccaaggtttagagaatcaaatcattattctgaaatagaaggccttcccttgatattgcaacacgtaagtgagacggatctcaatggacatagaaacatgagacacattggtggtgaaattagtccaactttggaaactcctagaagtttatccatgaaattcaggccaaaatctttcagtgatttggttgggcataatgtgataggaaagtctcttttgg

SEQ ID NO: 121611 - DNA, 1417 bp, Glycine max
  Clone ID: PAT_MRT3847_80821C.1
caaaacttataaaagagaatagggttaggaagatgaatgactcaaacaatttatattggtttagtgatttctcacctacatatacccaacaatcgtagttggatattctgttaaccgaagctttcgtgtctaaacgaacactgtttggcagttcggcttcgctatataaattatacttttcactttctctgaatctgcagcgcttgttcgacttcactcactcaatctctgctagcctatatactgggatgaggaaatcaaaagcagatgagaagattctcagctacaacgatgtggtgcttaggcgatctgatttacacatccttagtggtccatattttttgaatgatcggattatcgagttttatttcagctatctttcttcatgtcatccctctcaggatatcctgctggttccaccatccattgcattttggataatacaatgccctgtcgctgaggctcttggtgatttcatagaaccccttcatttgcctgataagacactggttatatttcccgtcaatgacaatgatgacgttgacagagctgaaggtggttctcattggagcttacttgcatattaccgcaacgctaatttgtttgttcaccacgatagttgcagaagcatgaatgcagcacccgccaagcaactctataaaggcattgctggatacatgggatcctctggatcagcttctgaggctagctttctggaatgcactaattcacccatgcaagacaatggttatgactgtggcttatatgccacagccatagccagagtaatatgcaactggcatgtaaatcataaaaatgctgatacaaatgatctgtggttttctgcggtgaaggaacaggtttccccatctgctgtcgccagcatgcgaggcgagatcctggccttgatcagagatctaatggcaagacattgagatcagcatgttccagattaaaatctgtcttcttacttggaagtctagaattttaagtgttgagcttcccctaatgagaagtgtcaagtctgtctgaacctcaaagtttgagcttcctctataacttcatttatgaggagactctgatttagtgtcgagtctatttgagcctttgactaccagtcattgctgaagcaaatttgatctttagcaaattgatgtttgttgggcagtaaatactaagatgggcgtacatcttggttaaaggaaaccctgtatacactgttattggcttactgccattgcatcttcaacttcgttacatttttttgtttatttttttcgttacaatgtcattgaagaagtgtgacccttgctgcatgtgaagaacaatttatttttttttatccgttgtgtctcatatgctagattaatttttttaggtttgttcttttgacaagttgataaaattaacttaacag

SEQ ID NO: 121612 - DNA, 299 bp, Glycine max
  Clone ID: PAT_MRT3847_80822C.1
ggctgcgagaagacgacagaagggtttgttaaaaaatatagacaataaaagtatgtgaattcttttaacaaatgtcttgaattataaaataagctgcctattaagagtttgcattgtctgaagtttatcatcatccctgtggggttttcatacccatttggcccattgatacacacaagaggacagtggtgtgatacacttagagctagcttaaccctttcttgatttcattttcaaaactcaattagtttatatatgtgtttggtgggactatgtcccttaaatggttgcatgatgca

SEQ ID NO: 121613 - DNA, 394 bp, Glycine max
  Clone ID: PAT_MRT3847_80823C.1
ggacattcaaacgaaccatggtaggtgacttcgacggtagaggtagctgcaccagagctatcggagcctgcactcgagaatcaattttgctagggatggcatgaaccgcagggactgccttgctctggttgctgtgcacaatgattcatggatgctctattgaaccttctatctgggagctacgattaaccggaacgaacggaaacgtgcatttaacttgatcaatgatcttcctactgaccttgaaggtgtgacagacaggaagccagcataggacacgcccactgcagatagtgaaagcaagtctaagagcatcaccaagagatcaagtgatgggcaaggtaaaagcaacacaaaattctcatatgaaggttatgaataggaggatgagcac

SEQ ID NO: 121614 - DNA, 398 bp, Glycine max
  Clone ID: PAT_MRT3847_80824C.1
cggcccagagcgacccgtccgctcatctattctggtcgctccctatctctctctcttcacgagataattgactcgtgatgtggcggtgatgatgacactatcagggtgaagaagttccatattctgacgtctattacaaagcttagagctcaaaaagcgcgttctggatacctcgctggtcactgatttttgggttatcataggaactcaatctcatactccattagataacaagtatcttatgaccgctactgaagacgaattacggacgcataacgcaatacatgattgatttccatgtacttgttcaaggactgcaaaatggcggtcctctgccttgcacaatgtcactgacatggtagctgctggtgccattagattcccatatgccatgtctg

SEQ ID NO: 121615 - DNA, 469 bp, Glycine max
  unsure (1)..(469): unsure at all n locations
  Clone ID: PAT_MRT3847_80825C.1
cgacgcgagcgtggcgnccacacgccgcgcgccgctgcnccgnaccagnnncacagcanaaangggagagaaaacgcggcaaacagggnaggtttttcgagggacctccttacagggtgatgagcttctcntcggactccnttccgaaacaatattgttttataanngggggtggngngggaagnngaggggaagngggnagaaaaggcaccagnggagggggacaggggggcacaccctncngcagagggcggagaagangagggagncgacgacgcagcagggaagggggccgacanngnnganacaggcagaccncaggagcaacccngcggggagaagaaacagngcgggaccnacangaagaggggnagcaagaaagggacgcccaagcgcgaggcagagaaacaagagcgggngaagaagcacanggagggagcaacgaaagaccgggcgcgcaagaggaagg

SEQ ID NO: 121616 - DNA, 376 bp, Glycine max
  Clone ID: PAT_MRT3847_80826C.1
tagccggagctggcagagaaaaatcaatcgaactatcaaatgaggacagagacttgactctctctctctatcctttaccagcgttcctaaccctacaagcttcgtgtcgtaaagaaaattccaaagctcaacagagaaaatgaggacagtgctttcgcgcttgaggggtgggacgccttccatttgcaggctcaatgccacggcagtgtcaatcagcgggagaaatctctgcacagattctaacaaagttgatgaaccctttaaagttgaagaagcagagactgtaaatgtgcctccaccaccaacggaaaagttgcttgagttgggaggcaatggggttgttgaatcacacatttggagagaagccctagatcgt

SEQ ID NO: 121617 - DNA, 1727 bp, Glycine max
  Clone ID: PAT_MRT3847_80827C.1
ggtccggagttcccggccggactccgcgtccgacccgcgcgtccgctgaagcgaacgaaccaggcatgaaccctaacccaacccccgccctatggccaccctcgacccaatccaaaacggcgtctcttccgacaatcccgccgccgctgaacctccctccacccccgccgaagaccccacccccgatgccgccgccgagaagcggtggccggggtggccgggccactgcgtgttccgcctcatcgtgccggtgctcaaggtcggcagcatcatcggccgcaagggggagctcatcaagaagacctgcgaggaaacgaaagctcgcattcgtgtcctcgacggcgccgtcggcacctccgatcgaatcgtactcatatcagggaaggaagacctggaggcacctctttctcctgcaatggatgctgtaataagggtttttaaacgtgtctctgggttttctgaaattgatgccaagaataaagcatcagcggttgcattttgttccgtccgtttattggtggcctcaacgcaggctatcaatttgattggaaagcagggttcattaattaaatctatacaggaaaatactggtgcttctgttagagtactgtctggagatgaggttcccttttatgctgctgcggatgagaggattgtggaacttcagggagaagccatgaaggtccttaaggctttggaagcagtagttgggcacctgaggaagtttttggttgataatagtgttcttcccttatttgagaaaacttacaatgcaacaatctcccttgagcgccaggcagatactacctgggttgacaaaccatcactgcatagcgcttcacaacctagcattgtaactgatcttcctctttcaacaaaaagggattctctctttgctgaccgtgaaagtcagttggactcattgctccctccttccacaatgtcaatgtatgggcaagattcttcactttctggtcttcgttcttcggctctcagtcgacccagtgcccctcctattgttacaacggtaatacaaactatgcaaataccattgtcctatgcagaggacatcattggtatacaagggactaatattgaatacattcgctgtactagtggagccatattgactgttcaggagagcccggtgcctgatgaaatcattgtggaaataaaaggtacctcatctcaggttcaaacggcacaacagttgattcaggaagttataagtaatcacaaagaacctcttgctagtaattacagcaggttagatacaggcctgaggtcttcttaccctcagttgggcagttcatcgtattcctcatcttccttgtcctcgcaaccctatagcggtgggtacggatcttctggtcttggaggctataggactttcagactttgaatttagtctctaggtctcacactgacttcatttgttctaattgggtctgatttgagagtcgatgctggaatgtattatggagccaccaaaatcacgtttttattatctgttatcatcatataattgggtaatcttcgatgtggccaaagagttgagtagtgccatagaaaatgtaatgaaatattaaccatttccaggatgtttagttttgtagtgtatatgtgcattaatttaaagcttaatcgtggaatctataggggcatgaatttaagttatatttattttattttatatttgcaatgctaactattcttaccttttatgt

SEQ ID NO: 121618 - DNA, 2369 bp, Glycine max
  Clone ID: PAT_MRT3847_80828C.1
aattcggctcgagcttttgaaaaggatgattgaaatacttggtggacaaccacctgattatgtactaagggatgccaaaaacacaagtaagttcttcaagtgtattgggagtctccagaacattgagagcagtgagagttctaaaaatggaagaagtgtttatcaaacattgacagtggaagaatatgaagctagagaattgaagaagccatcaattggaaaagagtattttaatcagttgaaccttgaagcaattgttacaaattatccctacagaaaaaacctacctaaagaagatattctcaaagaaagtcaaatacgactggctcttatagattttctgaaagggcttgttgaatttgatcctgcaaaacgctggtcaccctttcaggcttcaaaacacccttttgtaactggggaaccttttacacacccttacaagcctcctcctgagactcctcatatgccagtagttcaaaatatcaaggtggataatcatccaggaggaggacactggtttgccgctggtctatcacctaatgtttcaggcaaaagcagagcttccctttatagcagtccacattttcagatggttcaacatccgcctgccaatagttatggcagtgtaggaagtcatgggagctataatgatagtgttgggcttggaagcagctatggaagttacggagagagcagtaacatgtttgcttactattcacctattggtccatctggtatgaacatgcacaatcagggaagtatgtcaatgcttgggaatagtccggatgcaaggaggagagttaagtaccaacctgggaatgggctggggataagtccgtcagctggaaattttgctcccctgccccttggtgccagcccatctcaatttactccaccaagttcctatagtcaggtttcagtcagttctccaggacactatggacctacatctcctgcaagaggaacttctcacggatcacctttaggcaagacagctgcagttagccagtttaatagaagaaaaaattggggacattctggaagtcctcaaactctagaaacattttcttcacattggcaaggtcaatatcctgacagcacaagccatactgagggaacatcacaagctcttggcagttcaccatcatacctacagtcaaatagtaatcctggaaactggaagcagcgaggaagtggagggttatctgctaatcagaacatttcatccttaatgaagcccagtgctagtatgaactcacaatcaacagaattggtttatgacaatgcggagacaggcatttctttgcctgatcctggtgattgggaccctaattatagtgatgaattacttcttcaagaggatggttcagatgaaagcagtttgacaactgagtttggcagaagtatgaatcttggtgctactgaaacatgggctggatttggaaggttcaaccatgtttcgagcacaaacactcctccaataatcatgcaaagactgaatggaccaagtcaagcattcactaatgttgagatgggtagccttccaatgcatgatcttcaagcaacatatgtaccctctatgtctaagcattttcatctcatgcctcatattttacaaaattctccaagtcgttttggataccaatctgttcaaagattcacacatggtagacccccccatggtgctgagtggaatcaaattaagattcaggctccttcttctggtttcagcagtgtgggccctcgttctcccaggaataactcattcaccaacagtatgacatgggggcgaagaatgaatcctcctgtctcaagcatgcctccaacatcccgcgcaagaaaagattatgcaaggatagactagcagggcccaatccaatggttcattgtttttcatttttattttctttggggggggggggggtcatgacaagattagtctgtgtagatgggaagaaaaggaaagtgaaaaaaaggaaaaagaaaaaaaaaaaaggccagtaccctatggtttcgttagcaaacccttttatatctttgatcagttattgtgcttgcgcttaaaattaatttgtggttattgtttgcatgccagtgatcatttattgggggtattggtatttgcctatttggtaattcaaaggctctatatatgcgctgtcatgtaccttctggaaggcttgtgcttaatgaaatccaatgagttggtcgcgtgccaaaaaattattcagtcgttgcctttttatagtagcgtagctatttgagttcttataggcttctaaagttttcttcctttaatatatatataaaaaaagttcttactaaatttgaagtttgaactatttagtaaattccatttagttgtacat

SEQ ID NO: 121619 - DNA, 588 bp, Glycine max
  Clone ID: PAT_MRT3847_80829C.1
cccccaattccccaagtcgctttgcaccccaatctgttcaaagattctcacatgggagccccccccatgggcctgagtggaatcaaattaagattcaggctcctttttctggttttagcagtgtggaccctcgttctccccggaataactcattcaccagcagtatgacatgggggcgaagaatgaatcctcctgtttcaagcatgcctccaacatccggcccaagaaaagattatgcaaggatagactagcagggcccaatctaatggttcaggttgtttttcatttttattttgtggggggggtgggggtaatgacaagattaatctttgtagatggggaggaagggggaaagggaaaaaaaaaaaaggccagtaccctatatggttcgttagcaaacccttgtatatctttgatcagttattgtgcttgcgcttaaaattaatttgtggttattgtttgcatgccagtgatcatttattggggtattggtatttggtaattcaaaggcatactatatatgcgcttcgctcatgtaccttctggaaggcttgtgcttaaagaaatcctatgagttggtcgcgtgcc

SEQ ID NO: 121620 - DNA, 545 bp, Glycine max
  Clone ID: PAT_MRT3847_8082C.1
acgttatttaccttgtgacaaaattgctagtgtcttgactacttctgatgagagattggtaggcacacaacatgagggatatgatccttttcttggtggaattcaaaaatatgccactcccatgatgcccctagatgaagaaattctttctaaggttgcacacgatatggttgaggaatggtttgattgtgttgatgaggaggattcctttgaggaagtttcttttagtgcagcacttaatggtgtcgagggtttggactatatggaaagaatttctcttgccacatctgagggttttcctcatgtgcctttcacgcaaaaatggtgaaaaaggcaaaaggagatttgtttctggtgatggagaagagatgacatttattccaggatccactgttagaagaggcttacaacaagcttacttttggaacttgagaaaagtgttcctacattgggctggctttgaatgtcccaaggatgagaaacttccttattgcaaaaatttgtgacaaacctaagacacccttgtttactattctccctattgt

SEQ ID NO: 121621 - DNA, 457 bp, Glycine max
  Clone ID: PAT_MRT3847_80830C.1
aggaaccggaccggaaagaagggggacgacccacgacggacggggttaccagcgaccacaacacgaggaaacaagggggaggggcccaagcagcaacccgagaagacaaaaccaaagagcaagcgccggggcatgcaaggcaagccagcagccaaaccacggggaaggcacaaacgagaggagaaaaaaggactgagaagaagaagcagaggcaccggaagagaacccacacaagggagaggacggccaagaacacaaaaccgggacaaacaaggaaaggagggccaacgaagaagccaaagaaaaaagccaggcaagacaagacggacccagagaccagacaaaaacgcgcggagaacagaccaagcaaggaccagaggaaccgacaggaagaagaaaagcggaaaaagaagggaaggcccggaagggaccaaccgggaagagggcacgaagaaaa

SEQ ID NO: 121622 - DNA, 716 bp, Glycine max
  unsure (1)..(716): unsure at all n locations
  Clone ID: PAT_MRT3847_80831C.1
tgcaaatgaggagaaagcctgctatatggctggggaatgtagtcaagccatggcatcaaaaagtaatgccgaccagaatataaaactgggtcaaaaaaggaaggaacaaagcgaggatgaggaagaggaagaatatgatcaagaaaatgaagaaccctcaaatcagaagaagcctcgtttagtttgggatgccgagttgatatgatantcttgctgcgattaatcatctgggaattgacactcctaacgtgaggtttcaacttttattgcagaggctttccccaagagaatactggacctgatgaatgttgaaggacttacacgagaaaacatagcaagccatctgcagaaatacagactcggtctcaaaaaatccactcaacagcctagcatggttgctacgttgggtaatagtgatccttaccagcagatggattcaatagaaggctttcgcactttgtcgggatcaggaggaatgataagcaccacactaccatcatatgcatctggtggactgttttgtaggctgaactccccatctggcttgagaggaattaactcttctcttcttgttcagcctgttcattctcaaaacattgatagcaagtccataaaaacacttgggaacatgcagctatccatgttttctgcanatcaaacctcaagtttattacaggggcattccaacatcaatcgatgggtaaccattttcagca

SEQ ID NO: 121623 - DNA, 257 bp, Glycine max
  Clone ID: PAT_MRT3847_80832C.1
tagatcgcgacccgccgccctttttttttttttttcaaaatatcgaatctttttctcagtaataccaatgcaggttgtccatgtgcatgctctccctagtatccaaagcaaaaatacatgcaaatctgagggtcgcgttcgctggtgttggttcagccctgggttattttctgggtggagatcagcctgcagtcttcgattcttccgcgctggtccccgtatctgtggctcgtgcatttgcactgtttgtaggtctc

SEQ ID NO: 121624 - DNA, 289 bp, Glycine max
  unsure (1)..(289): unsure at all n locations
  Clone ID: PAT_MRT3847_80833C.1
agcagaaccantgnaagagaagnctctacatcanagggntcccaantcantcttcancttcctcttcttcactatcttntatggctcctnacaagntcaattcctcaggaaatacnagnatgccatgttcacagggtgagaatggttttgtcagttcctttnctctcttccctganaaggtggtgcaagagntncttcaatctccagtccaggggtcgggtgaccatcttantgagnnctctgaagctttaagaatgttggcgaaggtctcaggctagttgctgaaggg

SEQ ID NO: 121625 - DNA, 656 bp, Glycine max
  Clone ID: PAT_MRT3847_80834C.1
aaaaaacaaactttttcacaattcaaaaaaaaaaaaaaaaaaaaagaaggccgaacataaaaggacgcaagcttacttacacaagtcaagcaacgggacggcccccttttagtgccacgcacgctccccccttctggccgccgtgtttctcccttcctccgtggcttaccccctggcttccccccccgccttctcctgcctgccccccccggcttcccccccccgtcgtcccacctaaagggctggctccaaccccccttcccccctattgggccctctgcctggtgcccggtccgcgccctctatccctccttttagccctctacccgcgctgtgcgcccccccctttcccggtgcctttgcccgcgccctagcgcccgccccccccccccctttcccctccctttctccgtcccccccccgccttgcccctccccgtgtcttcctttgggggctccgcttttgtgctgccggtttacctcttggccgccccatttcccccctcccactcttgtttacgcggcggagttcactgtccgggggccacccccctctcccccccgcttttcccgcccttcccccctcgcatttccccccccccccccttccgggaccttttttttccccccttggcccgcccgcccccccccccccct

SEQ ID NO: 121626 - DNA, 1664 bp, Glycine max
  Clone ID: PAT_MRT3847_80835C.1
ggacggatcgaagacgagcagtcgtcgtaggcgttgcgtacgcgagaaagcaaaaagcccaagcagtcgtcttggtgctgccgattggtcaaaatatataaatccatttgttgaaatttgttactgtattgcattgcgtttgctgcacccatcaatggcaggcgtttctctcaagtgcggtgactgcggtgctctgctgagaaccgtagaagaagcgcaagagcacgctgaactcacctcccactccaacttctccgaatccaccgaaccggttctcaacctcatctgcaccgcttgctccaaaccctgccgatccaaaaccgagagtgatttgcacacgaaaagaaccggccataccgagttcgttgacaagacttccgaggccgttaaaccgattagtttggaggctccgaaggtggatgcaactgcttcatcggaaaacccttccgctgctgcatccactgaccaaaatgaagaaatggttgttcctgaagtggacaaaaagctgcttgaggaacttgaatccatggggttttcaacggcacgggcaacgcgggcgcttcattactctggtaatgctggccttgagtctgccgtaaattggatagtagagcatgagaatgatcctgacatagatcagatgcccttggtacctaccaacaccaaaattgaggctcctaaaccttcgcttaccccagaagaattgaaggccaaacagcaggaactaagggagagagctcgtaagaagaaagaagaggaagagaagagaatggagagagaaagagaaaaggagagaattcgcattggcaaggagttgctggaagcaaagaggattgaagaagacaatgagaggaaacggttgttggccttgagaaaagcagagaaagaggaagagaaaagtgctagggagaaaatcaagcaaaagttggaagaagacaaggcggaaagaaggcggagacttggattgcctccagaggaaccctcagcagccaaaccttcacctgcacctgttgtggaggagaaaaagagttttgtgcctgttaggcctgccacaaaagccgagcaaatgagagagtgcctccgttctctcaagcagaaccacaaggaggatgacgccagagtgaagagagcattccaaactcttctaacttatgtagggaatgttgccagaaatcccgatgaggaaaagttcaggaagatacgtcttagtaaccaatcttttcaggacagagttggttccttgagagggggaattgaatttctagaaaattgtgggtttgagaagatcgatggcggcgagtttttatttttgcctagggacaaaattgagatggccgtcctgaattcagctggatctgaactagactctgcaataaagaatcccttctttggagttctttagatgaggcaactgttataatccagagtctcgataattatagtttcatgtttcgaagtctgagtgctaccgtttgtttattaaacatactgtttttttttttatttaccttaacttttgctcaaaggtatctatagagagatttgttacttgactgtcataagtttacgaggtttatacaaatttgtttcatgacttcatcttatgtctaatgattcagtttaagcagaatttataatgtaaaaattgaactagtgcccctttg

SEQ ID NO: 121627 - DNA, 1419 bp, Glycine max
  Clone ID: PAT_MRT3847_80836C.1
atggcaggcgtttctctcaagtgcggtgactgcggtgctctgctgagaaccgtagaagaagcgcaagagcacgctgaactcacctcccactccaacttctccgaatccaccgaaccggttctcaacctcatctgcaccgcttgctccaaaccctgccgatccaaaaccgagagtgatttgcacacgaaaagaaccggccataccgagttcgttgacaagacttccgaggccgttaaaccgattagtttggaggctccgaaggtggatgcaactgcttcatcggaaaacccttccgctgctgcatccactgaccaaaatgaagaaatggttgttcctgaagtggacaaaaagctgcttgaggaacttgaatccatggggttttcaacggcacgggcaacgcgggcgcttcattactctggtaatgctggccttgagtctgccgtaaattggatagtagagcatgagaatgatcctgacatagatcagatgcccttggtacctaccaacaccaaaattgaggctcctaaaccttcgcttaccccagaagaattgaaggccaaacagcaggaactaagggagagagctcgtaagaagaaagaagaggaagagaagagaatggagagggaaagagaaaaggagagaattcgcattggcaaggagttgctggaagcaaagaggattgaagctgacaatgagaggaaacggtctggctcagctagtaaatttattgtcgcacatcttgtgttttgttttgaatgcactcagctacaagaaaaaaatgcttcctcttgcaggttgttggccttgagaaaagcagagaaagaggaagagaaaagtgctagggagaaaatcaagcaaaagttggaagaagacaaggcggaaagaaggcggagacttggattgcctccagaggaaccctcagcagccaaaccttcacctgcacctgttgtggaggagaaaaagagttttgtgcctgttaggcctgccacaaaagccgagcaaatgagagagtgcctccgttctctcaagcagaaccacaagcaatgcttctcaactatcgtttgtctgcttaaatattgtgacaccttagcctatttacgtgttcacttattcttggagcaggaggatgacgccagagtgaagagagcattccaaactcttctaacttatgtagggaatgttgccagaaatcccgatgaggaaaagttcaggaagatacgtcttagtaaccaatcttttcaggacagagttggttccttgagagggggaattgaatttctagaaaattgtgggtttgagaagatcgatggcggcgagtttttatttttgcctagggacaaaattgagatggccgtcctgaattcagctggatctgaactagactctgcaataaagaatcccttctttggagttctttag

SEQ ID NO: 121628 - DNA, 291 bp, Glycine max
  Clone ID: PAT_MRT3847_80837C.1
ttttagctataaactatatttttgtactctaacataaggagatgagaggaatatttcagatgtgtccattttactgcataagatgcaatggccatactatacatgcttaactgcataccccaccaaacggatgtaatctctgagccctaatcgagcacatgttttccaagatgcaaaagatttgaggtaacacagccctatataaggctgttgtttacaaaggtcactaccaactacaataaagctacaaaaatgctaacttatgaaccatattgggcccagttataaaac

SEQ ID NO: 121629 - DNA, 474 bp, Glycine max
  Clone ID: PAT_MRT3847_80838C.1
aaccatcatcgagtttttgagtttttacccctaatttgagaagggagagtttaactttcgaagctgggtcacttgttttgaaggctagtcacttaatgaggcggtgttgtaattgtgtttgtggtgatgcattggccaaaattgaatttgaaagtggaattaggtgtgttttatcaacttatgtcagagagacacggggattttctgacgaactgaattcgtcaaattagtgactcacaatggaacttttttgcttgttcatagtgttgtttttcagttaataagtttgagtctcgctgcataatctcatttttttccattgctaatctgtagtgtagttaatgtatctcactgatgattctgtttttgttggctgctgtgttgcccgtggtaattttgataatttgctcgaccttggatggatggaattcattgtgaaatgctgattgtattttacacttgtaaaaaaaaaaa

SEQ ID NO: 121630 - DNA, 1136 bp, Glycine max
  unsure (1)..(1136): unsure at all n locations
  Clone ID: PAT_MRT3847_80839C.1
cggaataacccggtcgacccacgcgtccgcgcatttctgactcaaccctcggttacacagtaaagatgaagaagctgctttgaacattcaataagaaaaggacgcagcaacccccttttggttttgccgaaccacttcttccttgacttcttgcatggttcgggaaatcgcaaaaccctcacagaatcaagttcatagcctttgtacaatcttaacacccacacaccttttctccctcaatgcttcaattcaagctgcaagccacttccgtgtttcgttcttttcccataattggacatctcagattcttctcactcatttccttcactttgtaactgttttctctgagggcatctattcaagtgagagacgccaacgtaattctgaaatttcgactgaaactcagggctaaaattggctatgatgggagggcaatccagcaagatacctagcaatagtggtgttccaacaccaatcaaaatgggtacccattctctgtatgcggctgatttgaactcttatgaggctgcgtgtgttgaagatccaaacttgcaatccttagatgctaccattcaggagcgcaccaacagggtgatcacctctcttgctaatgggattgaggttcgttccatatccatcgagtcactaggggaaatgactggtagtttgcttgaaatgaatcaggatgttgccaaagtcattctagagtgccagncagatatatggaacaagaaggacagggagctcttctgcttggtggaggacttctttgaaaatagcctccagacattggaattctgcaatgctcttgataaatgcttgaatcgagcacgcgaaaggcatgttatagttaagtctgcaattacctgttttgaggaagaggtgcaaaatggggttgaagggtccacttatttgaagacattgcaagagcttaagggtttcaaggaagccggggaccccttcaccgaagagttttattcctttgttcagtcagtttatcaacagcaggcatcaatgctgaagaaattgcaaatcagaaagcaaaagcttgataagaaactgaaatccctgaaaacattgaaaaaggtgtcaaatgccattttcngggctgcttttgtgtctggtttgattttctc

SEQ ID NO: 121631 - DNA, 200 bp, Glycine max
  Clone ID: PAT_MRT3847_8083C.1
tctctaccgttgtttcattatcttttttgttggaatcatccattatcgtgatctggtctaattattgtatgagtctgttaaaccaattttcctcacatggtcatttcatcataacttttttgccatctttgccctttgattgctcatcaccaattactcatgtctttcatcatacccaatatacactgttataataaaaa

SEQ ID NO: 121632 - DNA, 242 bp, Glycine max
  Clone ID: PAT_MRT3847_80840C.1
gacacaccaaaccaaagtaagagtgagcaacttgcagcaccatattgaaatttcttccaaggctaaacttaacttgtgtttcaattttctctccttcaccgtgtttatctccacatatttcccatgcaacccaccccccaaaactcctaaacacccacctgttccaaagccaccttccccaaatctagcataaatccccaaaaacacttttaactttggtgtgtcttctcattttttacttt

SEQ ID NO: 121633 - DNA, 734 bp, Glycine max
  unsure (1)..(734): unsure at all n locations
  Clone ID: PAT_MRT3847_80841C.1
agctgctttgaacattcaataagaaaaggacgcagcaacccccttttggttttgccgaaccacttcttccttgacttcttgcatggttcgggaaatcgcaaaaccctcacagaatcaagttcatagcctttgtacaatcttaacacccacacaccttttctccctcaatgcttcaattcaagctgcaagccacttccgtgtttcgttcttttcccataattggacatctcagattcttctcactcatttccttcactttgtaactgttttctctgagggcatctattcaagtgagagacgccaacgtaattctgaaatttcgactgaaactcagtgtaggattgtcttttgggtgctggatcttgtcacattcagagcacttttctttctcacatctcaaagccaggatctaattgagcacttgaaactctgcaattgttggagtttgagacagttggtgattgattgtgatcctattgtatttacccttctaattttggaagttgggtttactctttgatagggctaaaattggctatgatgggagggcaatccagcaagatacctagcaatagtggtgttccaacaccaatcaaaatgggtacccattctctgtatgcggctgatttgaactcttatgangctgcgtgtgttgaagatccaaacttgcaatccttagatgctaccattcaggagcgcaccaacagggtgatcacctctcttgctaatgggat

SEQ ID NO: 121634 - DNA, 823 bp, Glycine max
  unsure (1)..(823): unsure at all n locations
  Clone ID: PAT_MRT3847_80842C.1
ttnnnaaaannngactgaaaatnnnntnnnnnnntcnattaagnnnnngatttatttaactcttaaaattggaccagtttgttttggttattaatgaaattactttaaaaaaaattgttgaaaaaataatattttaaaagaagagtttaataatgttaaaagtttctaccattgatttttttttttaatcaatcgataaattccccgtatnnngggagagagcgacagagattgactgtgaatgtttaataattgatctgcactatgtcaaattaatagttaattcacataattaatttatatcgtcttatgtttttttgtttgttcctgtttagtgactttttaccgagggccctctgcgggcccccccgccgtcccttttccgtgggccccgcgccgccccgccgagtgaggtccgcggcggccgccgccggacttggctcgaggtttgagtgccccgccgcgtccgcctcctccgtgccgcaccgccgcctgttcggcgtcgcttgcgactgcgggcctaggcgagtcgccatgccctcggttatgccagcattctctccgacgccattcatgttctgagcattacgatcgtattcattaaataacatgtgtacatattcatatatgtttcttttctatcagtatactgatatatacatatagatatggtttaggacaaaataacaaatttgtaacgcttttcccgcggcggctgctgtgaatggattacaggtctcataattaatgccttatggccttatggactaatcaaccctaagctaatatagtgtttcgaaggactctgttccttcaacacatt

SEQ ID NO: 121635 - DNA, 709 bp, Glycine max
  Clone ID: PAT_MRT3847_80843C.1
atgtttctaacaccaatattcaccattgtgattaatttcgtgagtggaatcaaatccaagtgtaaggttttccatcatgggaaactttcacagtagcaacaattacttcgagcggctttcgctggacaattcatcaatggttgtcttacgtaaaaccaagagccccaaagggcgtgaagttgtggacacttggagtgcagattactactcattcgaaagaagaatacgtgaactcatgaactcgaattgactcaatccaatcgcaactatcaagaagaagagttatccatctcgatcaacgaccgcgcatcgagccatgcaaacgacaacgttgattttcagatgaaaatgagcgtcgaagaaggtcttcttctagcaagcgttaccctaaacggaccaagaagcatgcagcaacttcccgagaggaaaaaccctatttcgcaaggtggtggggttgtcaagtcctcctccttcttgtacggacacgtgacaacgaccgaaagggtcttatcatcattttgagggagaagataactgatgacaatgaagagcttccttacatgatgaccgtgaagagtactttgtggcgaagattcgtagcgataggggtgatgggggtttgagtgttgagcttcagaagccttctattcgggtcaaagtgccttgttgtccatgttggatgattgtcaaagggaaagggtggttgcct

SEQ ID NO: 121636 - DNA, 622 bp, Glycine max
  Clone ID: PAT_MRT3847_80844C.1
aattcgcaaaaccctcacagttctcaatcaccttcatagcctttccacaatcttaacacccacacacaccttttctctctcaatcaatgcttcaggctcgagtgcaatccacttccgtctatcattcttttcccataattggccatctcagattcttttcactcttttccttcactttctaactcttttttcttcgggcagaaattcaagtcagagataccaacctaattctcagacccagtgtaggattgtcttttgggtgctggatcttgctacattcggggcattttcttttcttacatatcaaagcctggatctaattgagcacttgaaacactgcaattgttggggtttgagacagttggtgattgattgtgatcctattgtatttacccttctaattttggaagttaggtttaatctttggtaggactaaaattggctatgatggggggtcaatccagtaagatacctagcagtagtgatgttccaacacccatcaaaatgggtacccattctctgtatgcggctgatttgagttcttatgaggcggcatgtgttgaagatccaaacttgcaatccttagatgctacaattcaggagcgcaccaacagggtgatca

SEQ ID NO: 121637 - DNA, 258 bp, Glycine max
  Clone ID: PAT_MRT3847_80845C.1
gattaattgtcacaaaatttatttaaatttacatgcgtattaaatatacattaaaaattttagtcttatatatagcaacatgatttattttagaacataattaacctattaatttagttggttaaaatgttatgctaataacctgaaagtcatagattcaattcttgcttggatcattaattttaaattaattcataacacgtttttttaaaaaaattaaaaaaataatttgggttgaacctcatatgcgatgtttca

SEQ ID NO: 121638 - DNA, 360 bp, Glycine max
  Clone ID: PAT_MRT3847_80846C.1
gctagtgaagacagaacacgccgttctatttgtttttctaatggagcaatcatgggggaagtggcctcttgatatgggaatggacgaacacagggatctgagggatgaggaggagttcctgagaaacattctcaacgaaccctctgagagtgagatggctaccgctgggtcaaccaaaatgcctccgaggacatacattttggctgttgataactacaccataataccaactactcctgaacccactttcagaaaacgcacacgccagccacataatctcaacttataaccaattaaaccaaacccgaacacccaggctgggaagaggggtcaaacctgtcaccagactctagatcacat

SEQ ID NO: 121639 - DNA, 637 bp, Glycine max
  Clone ID: PAT_MRT3847_80847C.1
tacggcgctcgaaagacgacagaagggggcacaaaacaaagctaaattcaaccaacaacaaacgcaacattttcatttcccattatacccctctgcgcagaagacctcagaaaatatttcgatggcgggaaccctaaatctcacgcctctcaccggtgccggcaggactctccggcctccgttcaggatctcaattcgggcattcacggcgacggcgatcgattcccggcgagcggcgagcctctatgaggtgctccggatcaagcagaacgcttcggcggtggagataaagtcggcataccggaaccttgcgaaggtgtatcaccctgattcggcgctccgtcggtcggaatcggacgaacgggacttcatcgagatccacgacgcttacgagacgctgtcggatccgtcggcgagagcactgtatgatctgtcgttgatggcggcgcgcgatgataatcgctcgttctcgtctttggttgctgctccgaatggctcttccggattctactatcagacccgtaagtgggaaacggaccagtgctggtagatagcttccaagtataagaaagaaaaacgagaaaatatattttctgacattaacaaatttacacgacaaaaaaaaaaaaaactaaaa

SEQ ID NO: 121640 - DNA, 267 bp, Glycine max
  Clone ID: PAT_MRT3847_80848C.1
aaattttcttctcgttgtttttgtatcaagaatagtgcgacttggttactagtttgatcatatttgttatttcaagtatgtgtgaggtttattcaagaattttatgtggctttactaggaagatgaacaatgaatttatattgtgtttgtgtgtttgtgcttgtgtcatgagtactgggcgctgttcacatgtttctaaagaattgatctttgttactgagtcttctcaatggactactagtatattggaaagagtatattgaacag

SEQ ID NO: 121641 - DNA, 345 bp, Glycine max
  Clone ID: PAT_MRT3847_80849C.1
ttacgacgcttgcctagctctgaagcaccttcagggccaccacctcaaatattttcagtcgtacacaggggcccaaattccttctgttgggttagggactcggcacgccgaccctggctgggagagtgcaactctcaccacagacactcaagttggatacaggcatcatagctgcgctagagcagctaagactcatcagagatgggcactgctgctagatgccgtttgatgaggacgatgcgcaacacaaggactgatcgatcactctccaactctgaggtaagagcatgcgccacaatacgtgcctgccgcatcggacaaaacattgccggaagtgcaaccgga

SEQ ID NO: 121642 - DNA, 435 bp, Glycine max
  Clone ID: PAT_MRT3847_8084C.1
ttattctttctaaggttgcacaagacatggttgaggaatggtttgattgtgttgatgaggaggattcctttgaggaagtttctttaagtgcatcacttaatggtgttgagggtttggactatatggaaagaattcctcttgccacatctgagggttttcctcatgtgctttcacgcaaaaatggtgaacaaggcaaaaggagatttgattctggggatggtgaagagatgacattgattccgggcaccagcgctgaagcggcttacaacaagcttatagttgaacttgagaacagagatcctacattggttggcattgaatgccccaaggatgagaaacttcctcgtcgcagaacttttgacacacctatgacgcgctgcttcactattctccctatggagttcaatcttgtcggcccgcagaagaatttaaatt

SEQ ID NO: 121643 - DNA, 428 bp, Glycine max
  Clone ID: PAT_MRT3847_80850C.1
aaccctaaaaaaatacttttcatcggggggtcctatagggggcaatttatttttttggggaaaaacccggtacctttaaaaaccccaaggggctttttttttttggagggaacatttagggaaatggggggggaacgggaaccctgatggaataaaaaataggggggaacaccctaatgggggtggggactttacaaaaggcatagcacccggaaaaaaaaactttacctcacggataaagggctttggaaaaaaaaaaaaattacggtttataaataaaaattttttcttggggggccattttagggggaatccaaaattaggtttttgctttgaggggacgggggggccaataaaaacacaatttttggccaagctaaagttttttccggggggggggacatttttactggggcgggaataataaa

SEQ ID NO: 121644 - DNA, 241 bp, Glycine max
  Clone ID: PAT_MRT3847_80851C.1
gacaggtgcttttttttctgcttttttttttttggcattgattctggggcaacccaaagggttctgtttgcgtacaccccaggttggcaaaaccaccaagttttttattaaccatcggttgctcactcataccacactcggatttgcctcgatgggcacatgctgctctaattacagttaccccagacgaggttgaagacattgttcacaaaattccacttgatactaaatggtttggaca

SEQ ID NO: 121645 - DNA, 382 bp, Glycine max
  unsure (1)..(382): unsure at all n locations
  Clone ID: PAT_MRT3847_80852C.1
cacgaggcaggcccccacgagggagcaaaaaaggaacacacaggaagccaaaaagcccaccacggggacgaacncgagccncaagcccaacaccgcccggacccaccacacaccaaaaccgagcaggangcccgcggcacgcgagaaggaaggganacnccacaacaaacacaacacaagggaagcgaaaaagccagttttttttgtggaaacaggagccggagcaagaactgtaactgacgcaaaagttaacatcaaaggacccatgtgcgcctgaatagaaattccgccacccaccccacagcaaatttcaataggttctcccccaaagaaacattccattggatcttttgaatcgccgagaaaaactgctcccaaccaa

SEQ ID NO: 121646 - DNA, 308 bp, Glycine max
  Clone ID: PAT_MRT3847_80853C.1
gcaggataaacatctatcaacttgtgggctgcgttgcccacatgaccatcccatattagcccggaggggagtcgatatgaagactagctaccagcgccccatggtgagatgctatgagggctagcattgatgcattcagagaccgggtaggaaacaggagacaacgactagttcctctgatgaccagaaaagaacacgatcttgccactgatgatggatgccacactttactatgaaatcaagttatgcgcctcctgagcgactactcgcctttgagaactccgagcctataacatattatgctaagc

SEQ ID NO: 121647 - DNA, 541 bp, Glycine max
  Clone ID: PAT_MRT3847_80854C.1
aaaataacacacacttttttacatgattacgactattaaaagaggggtggaggggctcaaatagaccgagcattctcaacaagagggtcatgtctaatttcctttattgaattaaacaaacgaacaaacgaaagaaaacacaaattgcagatcatgcataggattccgccttttcagaaaaacctggctgtttcctgaggaacaaaaaaagctggcataaaaggtttaccagctatttcaaaatcttgagaaatttccaagagaatatcaaaaactgtaaactgtttgggattgtcaataaggaaactcaagtgccatgaatgttgattagcccactcagaactccacattttaaaaccattattcggaccacatacctctattgggaagatcaattcccaggaatgtgggtccgattatgaccacttacatgcatcaaaatggtctgttctggtgccgtttgttaaaaacacttgtaccaatgaggcccagccactacttttgaccgttgcattccgggcatcacaattttaccattaac

SEQ ID NO: 121648 - DNA, 1969 bp, Glycine max
  Clone ID: PAT_MRT3847_80855C.1
tacggctgcgagaagacgacagaagggggtggcatgacttttttctaaaggtgacacgtgtgacatacaacaaacacatttgcgttagatcagatttcagattctgaagatgaaattgaagttcttgctgaaaagaaatttgaaatttgaaaaaccctagttagatttcagaattggaagaaaaaacagcatggggtttagagtgcgaaatctgaatcccgtattccgaacttgcataacaaggctttcgtcttcaaattttcttcctccggtgctggaatcacttaattcccatccattagagtcttgtttaaccgaaaatcccgcgttcaaaatcccaaggagatggcatttgggtcatagtcattcacaccatgatgaccgccaccactaccacaaagagggagagaacattttccggttgggtctcgccgccgacatcggtttggccaccggaaaagccttcaccggctatctttccggcagcactgccattatcgccgatgccgcgcattccgtatccgatgtggttcttagtggcatagctttgttgtctttcaaggttgccaaggcgcctagagataaagaacacccatatggacatggtaagtttgagactctaggagctcttggaatctcttgcatgcttttggcgaccggaggtggcattgcatggcatgctgtagacattttgatgggattgttctcatctggtcctgaaatcgtcagccagacattggcacatgggcacaagcatagccacggacatggtggacatcaccatggaattgacatggagcatcccatccttgctttgaatatgacaattgtgtcaatatgtgtgaaagaagggctttactggataacaaaacgagctggtgagaagcaagggagtggactaatgaaagcaaatgcatggcatcatcgtgcagatgcaatttcatcagtagttgctctcattggagttggagggtctattcttggagtgaagtttctagatccccttgcaggacttctcgtctccggcatgattttgaaagctggagctgaaacaggttaccagagtgtcttggaattggtggatgctgcaatcccagcacaacattttggatcctattaaacaaacaatattgcaagttgatggtgtcaaggggtgccattgtttaagaggaaggagagctggttcatatctttatctggatgtacatattgaggttgatcctttctctagtgtaagtgctgcacatgacattggtgaaaatgttcgtcatcaaattcacaagtctcatcctactgtggttgaagttttcatacacatagatcctgccatgtcacatgcttctcatcagcgagatagttggagtggagacatgaaccagagcagtattgttcctgctgaggatagtaacattgaaggaattgtttctgatatcatctcatcaaactttccacagatgtcagttgagcgcatagcacgtcacatgtttcaaagcaagatagttcttcaaattgaggtttccatgccacctgatatcccaattggacatgcaatggaaatggcaaagctagcagagaaagagatttttaaggctgtctcgaatactattcatgttagcattcagctacgtttggggcaaccattcccacagatcaatcatacttagaaccatccatggatggtggaaagccgatttttttgcaactccatgcatccttttagtatgatttaagtttaatagattattacaatattgctttgttgcaactcctacctagtctcatactattccatactagccaattactttgagaggctcacaggaggtggaaaggtaagcagacctactaaaaccgaatatatttgcgcccattagacgtttcatacactgttgagttccctcgtcgccctgcaaaactactgaatatgactaaataatgaacccccttgagtaatacagtttttaacggc

SEQ ID NO: 121649 - DNA, 334 bp, Glycine max
  Clone ID: PAT_MRT3847_80856C.1
ccaacccccccggcaaatttgttcgaaaaaatggcccagggcttacgttcacatcaactggactgggggattccagggggctttaagggactgcaggacaagaccaatgatctaccctgagtaatagccatgtacccgactattctactcaagcacacgtaactgcatatgtcgagcatacatatggaatgagccgtgattatgtacataaagaaatcaaacccttactaaacatgtgtatacaggcacctagatccataacgacttgatcaataataaggtcctccagcaacatccattcaaagattattgcaaaacaacaaacattgcatat

SEQ ID NO: 121650 - DNA, 490 bp, Glycine max
  Clone ID: PAT_MRT3847_80857C.1
gcaaaggatggtgccgagaatggttatggtgctaaagcagcagaaattctcgatcaagttagaggaaggggttttcgtcatgagaagactaagaagaaacgtggaagctaccggggaggacagattgatttacaatcccactcagtaaagtttaattattctgatgaggactgattgacgatattgttttattttgtgggggactgcgcagtattgtactattgttgtccttatttcgttaccatcagacacaaagcgaatcatgctgcggatatgaaatttgtgatgggggagaatgttacatccaaaagacattgctaggttctggtaaacaagttgactttcacctgtatgttttctttgtgatttttgctgtccgttcccaaaggaacgagaatttttgtagctggcaaaatgaagacacctttctgtctgaatttgtgatactatataccatgcagttttaattttaaggccgtgaaatttcagt

SEQ ID NO: 121651 - DNA, 1579 bp, Glycine max
  unsure (1)..(1579): unsure at all n locations
  Clone ID: PAT_MRT3847_80858C.1
cggtcctcatacggctgcgagaagacgacagaagggggtgtgtggcacagaggacggagccgaagaagccgttttcgcatgcctgcaactccacccagtaacaaaggaagaatctctaccctcttcgctttcactcctcgccaagttttgttaagcaaccaaacaatgaagcacaccactgacaatggaacccccatctcggaacacaaagttcttcttcaccaatccattgcccgttacttggaacgcagtggcttctccaaaactctgaaaaaatttctctccgaagcgcatatcgagaaaaacgatttggagggatcaccagttgatctggaagaaatgtgtctcaagtatttagaaatatgtggcaaagatgggaagtcaaatattaatgatcaaaatgagcaagttgcaggtgggcacagcaaaaacaaagaagagggtaaatccaaggaaaagaagaaaaagaaaagcaagttagtttctgaatctcttgctactaatgtggaagacaatcatttagagtcagtagctactgttgaagaaaataaagtaaaggatggtgtttctacagatgccaaagttatcaatggttctgagaaagagaaaaaatccaagtctaaaatgaaaaagaaggacaagcaaagtggtcaaggtgatgtaatagagcagattggagatcccaatgaaactgtttcgaaggaagagaatattgaagcatcaaacaaagaaatgatgcatgaggtggagaaagattctaagaaaagaaaaagaccaatttctgaagaaaatggtcaacaggttgcagatgaagaaactaaacgccaaaaaaatagaaaatttgaatgaatctaaggaacaaacaaatgggaaccttgaaaagggtggagagaaatcttcggttcagggttctctgaagaaacaacaaaagggatcagttgagaaaaaaccagtgaaacccgcatttcagcgagtacaagttgacaagatacaatttactgatgagaggcttcaggataactcttattgggcaaaggatggtgctgagaatggttatggtgctaaagcagcagaaattcttgatcaagttagaggaaggggttttcgtcatgagaagaccaagaagaaacgtggaagctatcggggaggacagattgatttacaatcccactctgtaaagtttaattattctgatgaggactgattgggaagcatatagaattatagattcgtttttggtttgtagtttgaacaatgttggtggacggcagtattgttttattttgtcggggactgcgcaggattgtactattgttgcccatatttctttaccatcaaacataaagggaatcatgttgctgatatgaaatttgtgatcggggagaatgttacatccaaaagacattgctaggttcaggtaaaaagttgatttccacctgtatgttttctttgtgatttttgctgtacgatcccaaaggaacgataatttttgtagctggcaaaatgaagaaacctttttgtctgaatatgagatcctttataccatgcagttttaattctacgccgnngaaattgcaga

SEQ ID NO: 121652 - DNA, 327 bp, Glycine max
  Clone ID: PAT_MRT3847_80859C.1
ggtaaggcttttattttttatgtaacatggacagaaggtcgataatattgaaataggaagcccatttgtacagccctacaccgcatgtgccattatctatagtaccgaggatgcgtcttattacagcacaatacatacgtttaacatatgcctccactacgtgggggttgccccccataaaaaataaattgtagtacaaatatctcctatgcgagcagggtatgtgtggaaccatataatgactagaccgacacctagagaggattaatactgatgggctagaattcgaggacctcgctgaaggtccaccatgatctcacccacacc

SEQ ID NO: 121653 - DNA, 357 bp, Glycine max
  Clone ID: PAT_MRT3847_8085C.1
ggctcgagaggacttgaagataatctcagaggtttactacaagagaaacagtgatcttcttgagcatgctatcgccaaggaaacctctggggactacaggaagtgccttctcacactgtcgggaaacgaagacttacaactgtgcttccaaggcattagagattatgagttgcggacagtaagctatacttgtgtgcgatggtttcatgtgtgatggttttccttgagtctggctccaagagggcttgatcatgaaaacttggggctatatcttatagatggtcaatatgacagctgctatgaggcttataaatggaacaggctcgaaagaactgggccaagaacatgcccgggcgt

SEQ ID NO: 121654 - DNA, 535 bp, Glycine max
  Clone ID: PAT_MRT3847_80860C.1
gatgagagcactgttcctattactgttgctggaacttgcttttctggcttcagatggtgactcatttgacatagcttactgataaaaagagaacctcaaacacaacaagtgttttcagagattttatatcgaaagagactcttacagaaaccaatcatgccacgctcagtgtaacctgcttaatgagtagaaagaagaatgtgaagaatgtgaaattccacgaccatgaccacgaccacaacatccgctgagggaacctcagtaacccgatgagaaggaggaagacgaacatgaataaccacgttcaatatcattcatacgcccacaaacctcttaggactaagagctcgagcagatagaggaacacgaaaggcctctcaaggatgaaaaacgcgtagaatatgtaagtgaacaggaagatcaggatgatgatgatgaacatgatgaacgtctaattccattactacgctcacctcatcagattgaatagcgaaagcaagagtacgatgatgatgatgagcagcagctagagacc

SEQ ID NO: 121655 - DNA, 3128 bp, Glycine max
  unsure (1)..(3128): unsure at all n locations
  Clone ID: PAT_MRT3847_80861C.1
cggtccggaattcccggngtcgacccacgcgtccgctctactctctctctctcccacgcgtccgtgcaacaacacagtgtctgttactccccgacgaagctttcggcaaatggcgaatcttgcattctgagcttccgagtccattagctcactgagtcaaaccgccgagtcgagatcgctcaacatgttggacggaatactcggcagaggcttcaccgcgaaatgcaaatcgttgatcaaattgacgaacaggcgaatcgatgtgatacggaggaagagaagagcgacagagaagtttctgaagaaagatattgctgatctattgctcaacggtctcgatatcaatgcctatggaagggctgaagggcttgtggttgagttaacactgtcctcttgctatggtttcgttgagaattgctgtgagtttgtgttgaagcatctccctgcgatgcagaaactgagtggttgccctgaggaatgtaggatggctgtatcgtctctgatgtttggggctgcaagattttctgatttaccagagttacgtgacctaaggcaaatatttcaggagagatacgggaattccatggaatgttatgtcaatcaagagtttgctgcaaatttgaatttcaagtcttctacattggagaacaaggtctgcttgatgcaggagattgcatcagagttttcaataaactgggactccaaggatttcaaactgaggatgtcgagatcctctgcaaatgtacagggccacaatgcttgtatgtctaaccatgataaaccatcacatggcaaggattttacccaaaaagaagtaaggaatgatgttttgttagagaaaaattgtgatcttgccaataatgggtgcagatttcggaatggcaaggaagctgttgtgttaaacagacttgatcacgatcttcattctagatccgtactccctggaaatggattcaagcctctaaatggtcatgaagttcttcggaaaagggatgctcatgataattcaggaaggcaagagattactgttgagaagagtgacaaaggctgttggaaggagggtagtatgctaaaaccgattggacatccatctcagcagaaaacagtggaacaatttgaaggtggttccaagctgcagtatagtagggggaatatcacccctccgagagccaaccagggtagtatgctaaaactgtttggacatccatctcagcagaaaaatgtggaacaatttgaaggtggttccgagcagcaaagaagtagggggaatgccacccctccaagagaaaaccaggtcagtatgctaaaatcgtttggacatccatctcagcagaaaatagtggaacaatttgaaggtggtcccaagctgcattatagtagggcggatatcaccccttcaagagcaaaccagggtagtatgctaaaatcatttggacatccatctcagcagaaaacagttgaactatttaaaggtggttccaagctgcaagatagtatagggaatactacccctttaagagaaaaccaggacgctgcaattgctaggaagtctcctagtgatgttggttcgcatttcaacagtaatgcgaatgagccatttgctgttaatcatgctggccttcctggtgctgataaatccgagagagaaactcaaagtgatgaaacacctgcactgaagccctgctacagtaatgtcattccacctccatatgttaaacatcccaattctaagcagcagagcagcacacgtggagccaatatcatatcttcacttactgacagtggcggcatctctacatatcattcagcacatgagaagcctgatgctgcttatgtgatggagaggaggattcaaatagatttggatagttctgaccaggattggcagggcaatagacatgagagactgagcaaacagagttgtgataaagagatctcaattcgagaagatgccgaagaagtccctgtggtaaaaccaagatctatgcggcgaaggcactcaagatcacgaccacctggttactatgatgcctctaatgaagactctgaacttgagagaaaatcaaggagcagaagcaggagacgagatgaatcaagacgtggtctgaaagctatgcttgatgatgaacggtaccaaaatgctgaagaggaaagggtaatagataaattgctgatccattatagcaaaaagccatccgtccttgtgcctgaaaaattaaaaagaaactctaaaattcaccatgcacatgactcaaccagggaattgctgcagaatggaagcggatatgcatcacgatcattttcccttcctcgtgaaaaacaaaaagaagcggaaatcaagaagaaagtgtttacgcgtgctgctacgtttgaaccagttagatcactcgaagctcggcatgtgcatcctaagttacctgactgtgatgatctagcagctaggattgcggccttacgaggatgataaaggatcatataagtataatgctcctcttttatcagcatgattgcactcgttattatgatcatcacgctttaatcttgttacaatgttaagtgcctggtattacagaagaatgaagattgcatggcggtgcttttattgcaaaatgctgactacttcggagctgtactaaaccatcatagatggtcccgtctgtgttggttgacaatagtgactttgccatcatttacggacgcaactataggtcatacgcaacatcaattcaatttttgtattttatgattgtagaagtgtttatatatatatatatatggtgttccgactttcttcgggttgagtaatggtgagtaatgggaataaaagatgttgagacagacgctattcggagcctcttactcgcccttttttttcttcagatgatgttgtttgcgcatttatacatacacgattttatattcatataattttattatttgagcaaacagagtcgtgaaaaagaaatctccgaagaagtccctgtggtgaaaccaagatctatgcggcgaaggcagtcaagatcacgactacctggttactacgatgccactaatgaagactctggacttaatagaaaatcaaggagcagaagcaggagacgagatgaatcaagacgtggtctctctgc

SEQ ID NO: 121656 - DNA, 721 bp, Glycine max
  unsure (1)..(721): unsure at all n locations
  Clone ID: PAT_MRT3847_80862C.1
aaacatgagaaatatttttgttgtgtatatatatattttttttttgagtgaaagaatagctttactaatatttaacatttatttttacttttttaaacaacaacactaaagtttgtcttctttgcttaaatttagttactttaaaaatattattttttctctgtttcatataagtataacttatactttttttaatttgtttcagtttttatattttattcttttaccttaaatcttatctaattatattattttatttttatttaaattaattgatagtattttcttataatttattttttaattgtatttaacaaaaactacccacagatatttactactaacatgattttaaatcacaggtttaataaattaatgtcaatttcaatatctaatcaactaaccgatctattaaaaatttattcgtgaattctcaattatgaatgttttggtaattcatgtcgatgtgtatacgttaagatgacttagaccaatctcactttcgattagaagacaaaacattccaaaaagaacatgagtgcatgagtgataggctcaatgtttcgaaaggaaataataataagagtaaacaatattttccttatttgaaaggtgtaagtattggtctgtttttttttaatggtaaaatatatacttaaatttatttaatttagcatcgttatagaacagtattgaataaattacattctactttnctaaa

SEQ ID NO: 121657 - DNA, 142 bp, Glycine max
  Clone ID: PAT_MRT3847_80863C.1
ttcagatttttctcctgggaaaacgtgttcaaaatttgttcgcgtttagtaatacagaaatgtcttagaagagattttgaacacggtttcccaggagaaaacgtgttcaaaatttctttgaagacatttctgtattactaaa

SEQ ID NO: 121658 - DNA, 305 bp, Glycine max
  Clone ID: PAT_MRT3847_80864C.1
ggtcacttattttcttttttttaactttttgaattgcaattaggtggggacgaaaaaaaaatggatattaccacggccatagaaattcgtataatccaagacgaccttatttccctattacctgccaagatacccaagctcttgtcacaaaaagtctaaccttgacctttgagacacgctagggactcgctggtggatgaatggcaaccccctatttttctggagccacccccgcacccacagacatgggaattattctttgagacggaaacgccgagcataaatctctttagttcccgggccat

SEQ ID NO: 121659 - DNA, 432 bp, Glycine max
  Clone ID: PAT_MRT3847_80865C.1
gcatgtttacgagtgttagaaggccatgaggtattggtgcgttgtattcgatttgataacaagaggatagtcagtggcctatgatggaaaaattaaagtgtgggatcttgtggctgctttggacccccgtgctcctgcagggacactctgtctacggacccttgtggagcattccggaagagtttttcgactacagtttgatgaattccagattgtcagtagttcacatgatgacacaatcctcatctgggacttcctaaatgatccagctgcccaagctgaacccccccgttccccttctcgaacatacacctacatctccagataaataaccatacactgacctcatacttgcccaggacccattaaagttgcggtatttaacgtatctgccaataccaggatgagcaacaacagtaacaatcaaactac

SEQ ID NO: 121660 - DNA, 396 bp, Glycine max
  Clone ID: PAT_MRT3847_80866C.1
gggggggggaaaaaaaagggaaaaattcaaaagtttggggcccaaaaaaaaaatttgggggcggccccaccccaaaaaagggaggccacatccccccggggtttaccaaggaaaaaatgggctcccccttttacaaagcaaaggggggggagaagaaacctgttctttttaaaaaaaatatcattggcatgtgggatttggccccgggcctttttaaagctaaacctttgcaacttttgggtgccccttaccactttaaaaattaaggggcgctttgcagggaattgggctcccacaacaactgggaggtggaaaaacgaaaccatctcctcttctacattttgaaccccagggggcccaagaacaaaaacctcagaagtcccctttttttaaccc

SEQ ID NO: 121661 - DNA, 964 bp, Glycine max
  Clone ID: PAT_MRT3847_80867C.1
acgagagccattcgagcgcgcgcaaacgcggaatcatccgccccggtgtttctctcaactcagaaatcgtgtcttcactcttcacttagctacgaacccctcgcaatgtctgcaagcaaatccggttcaagaaagcgagcatccgaatccgaacgcgcaaaatctgacaagaacaagcgatcagccacggataacttcgatctcgatttggatttcgatctctcagatgacatcaaaggaatcgtctcggcgctgcaccttatcagagacaaggctcagaaggacggtcagaagaagaacgaagagactatttccagtgtgggttctgaggttaagtctatgatcgagggattgaggtcaaaaattgagaaggacaggcaaagctttgctaaggcgctttcaaagagttccaaagagtatgaaagttcattgaagaatgaaactgccaagtttcaagcatttcatgagaatttttgcaaagagaaagccacttctctgcaagccctgaaagatattatctccaaatttgaagaggaaaaggaaaagctatttgtgagatatgaacaactgaggaagaaggaaagagttatgatatctgaacaagaaaaagcctgcaatcataaaattgcccaactggaagactcattgagaaagaagaaacaggatgataaaactttcagcattctaaggaaaactcttggttcattcttggaaagtacctcggacgaggatttccctccagatgattgagactgcaatgcacagagatcatttgatgaagtcacaatcacggattctgtttatttcactggaaaacgtaatcatagataaactcgagatcaactctctttaaatagtcccacttcattctctaatcacaatcaattgttaaaaatataatccttgcgacagatattcagtgcaatatttggttatattaagatatatttctggggttagtggc

SEQ ID NO: 121662 - DNA, 2407 bp, Glycine max
  Clone ID: PAT_MRT3847_80868C.1
aaaagaagccctcagaccagcagaggcaaaaaaaaaaaaaaactaaataaaataaaataaaatgaaatgaaagaaatgaattgccatagatgatgacatagctggcaagatgagaattgagaataatgctatctcaagcatagtcttgcttacactgcacaccagcttctgcagctcgacgaggtttgcttttacgcctgcttccattatgccgaaaaccattacactttgtcaactcatcagtatttgatccgtttacaacaacattaattttctcatcaattggttctattttctcctgtaaatttcgttttctttttctcccatgttttgtagtattcaaatttttcatctctttgctagacactacattcttaacgttgtcaccaccacaggcatcctcttctaatatttcctcaatttcttcttcatcaaagtcatccttaaacagtttttgtggcctccctcttcttttttgcttaggaaccttttcattcatcattccttccttcgaatccccaagcacacatcaatgccaaccaaaacctccactccaagttctcaatccccaaaactctctcatctccgccctcaatacattcccaaccacatccccgactcctcctacgtccgcatcttggacaccaccctccgcgacggcgaacaatccccgggagccaccatgacagcaaaggagaagctcgacatcgcacggcagctggtgaagctgggcgtggacatcatccagcccggcttcccttctgcgtcgaacagcgacttcatggccgtcaaaatgatagcacaagaggttggcaatgctgttgatgatgatggttatgtgcctgtcattgctggcttctgtcggtgcgttgagaaggacatttctactgcatgggaggctgtgaagtatgctaagaggccacggctttgtacttccatagctacgagccctattcacatggagcacaagctgagaaagagtaaagatcaggtgattcagattgccagggatatggtcaagtttgcacggagtttgggttgcaatgatattcagttcggtgctgaagatgctactagatcagatagagaatttctctatgaaattcttggagtagttattgaagccggggcaacaacagtgaacatagccgacactgtaggtatagtaatgccattggagttaggaaaattaattgttgatataaaagacaataccccaggaattgcgaatgttattatttcgactcattgccataatgatcttgggcttgctacggctaacaccatcgagggtgctcgtacaggtgcacggcaattagaagtaaccattaatgggattggtgaaagggctggaaatgcgtcgttagaagaggttgtgatggccttggcatccaagggagatcatgccttaaatggtctatatacaagaatcaatacaagacacatattagagacaagcaagatggtcgaagaatactccggtatgcatttacaacctcacaagcctcttgttggagctaatgcatttgtccatgcaagtggcattcatcaggatggaatgcttaaacataaaggtacatatgaaacaatatctcctgaggaaattggacataaaagaaccaccagaattggtattgtgctagggaagcttagtggaagccaagctttgagaaagagacttgaagagcttggttatgatcttaaggaagatgaagttgatagtgtgttttggcaattcaaagcaatggctgagaaaaaaaaggttgtaactgatgttgacctcaaagcattagtatcatataaagcttttcatgcagaatctatctggaagcttggtgatttacaagtgacttgtggaactattggtctttctacagcaacagtaaaacttgttaatattgatggtagcacacatgttgcttgttctattggtataggagcagtggattcaacttacaaggccattaatctcattgtgaaggaacctacaaaacttttggattactcattgaattcagttacagaaggcattggtgtaaatgtcacagcacgtgttgtaatttgtagggagaacaatcatacatctacttatgctttcactgaagatgctaattatccaacatttagtgggattgcagcagaaatggatgttgttgtttccactgttaaggcttatctggttgcactaaacaagttgttacgatggaaggaatcatttagatgtgcttaatgtattcaattttttattgaagagttttgaatttgtattattatcagggataatcatttatatttcatggtaacatgaaaaaaaaaaatgagaataataaggagtggcggtgcaagttccataaatccagctagtctcctctatatatactttgtacttgaataacaacatgtcaac

SEQ ID NO: 121663 - DNA, 324 bp, Glycine max
  Clone ID: PAT_MRT3847_80869C.1
aaccacgccgttcgttaagcctttgttttctttatggtgggcgcctcccagcaaaaaaaggcccattttttatggtgacaaggtttcccctttaacggggttaaaggtcccagagggggaaaaggggaaaagggaaacccccttaaaggggggaacccctttgtaaaaaaaatttcgcccccattttgtgggcggaaaggcacaaatagtttgggacccccctttttgttggaaaaaagcaaaaactggtagcttgaaaaacacaaagggaaacaaatctttggcgtaaaccagagccaattttgggccacaaaaatttggggg

SEQ ID NO: 121664 - DNA, 416 bp, Glycine max
  unsure (1)..(416): unsure at all n locations
  Clone ID: PAT_MRT3847_8086C.1
ttttgttttatcttgcggttcgtcagaagcttttaaattttgcgaggttcattatgaagaaaagggacaagcttagttgtcaagttggaatcaacccatactccatggaatggactggtttggccaatagattactgagtaagggcaacgatattctgtgttgcgactatgcttggctcgatggttggattaccaaacaagttatgagcaagatggcagaactgataaatagtctttgcggtggtgatgaaaaactgatgcgtgtacggacacacctgctgttggcttgttgttcaagagtggcaatttgtaagaaagatgttcggagagttgaatgtggtataccttctggatgtgcgctcacaggtgttngcaatagcattacccatgagatgctcattagatatagctatgaa

SEQ ID NO: 121665 - DNA, 460 bp, Glycine max
  Clone ID: PAT_MRT3847_80870C.1
ttcttcgcgtccgcccacgcgtccgcacgggcttgcaacgatacaactgcaccatgaccaggacacttctagcagtgacagctgcgctctgcgctttggcggtggcgccggcctacccggccgtgcatcaccccaagcgcctgggacgcggcaactattttgctgatgagatcctcgctgacatcaacaagactgccttcggcatcttggacaatgtcgctgagaagcaaaagctggtccagtggaccttcgggtactcgctggagcgagctgccgactttgccgacggtctcaccggagactggccggccaagatcgagagcctgggtgctcaggccgagcaggacttcgacatcgatgcgaccgtctgcattcgggacggaatagactctctcggcggggacattttcgcggttcgcagctccactcagaaatgtgtcgcaaagaggcatgaaccact

SEQ ID NO: 121666 - DNA, 642 bp, Glycine max
  Clone ID: PAT_MRT3847_80871C.1
cccacgcgtccgacggctgcgagaagacgacagaagggggcagcatccattcttgttctgttctttctttcgatcagggtttcccctcgtctccgggctcgtttcgttctcgaataatcgatctacgataatgactcgcggtagccagagggatcgtgatcgcgaaagggctcaggctagaactggtgctaaaggcaagcaaaactcgtctccgggctcgtttcgttctcgaataatcgatctacgataatgactcatatcctttgatccgttgaaattttactgctaatttttcacaaattgtcgttaatttagggatagggttgactttctgttagaaaattcgaggaaaaaaataaatcacatttcaccctccgctacccccatttgttgtagatctttttggttttaccgcaattaatagtttcattcagtttggatccatggaaactaacacaagaataacacaattttaataattatacctttttttgtccttttcttttcaaattttgtttcctttgccacaatacagacggcgtattcgtggtttggtttgttaagccgttttgcttgttattgctttcaattaactctaaagcgcacgcggtagccagagggatcgtgatcgcgaaagggctc

SEQ ID NO: 121667 - DNA, 505 bp, Glycine max
  Clone ID: PAT_MRT3847_80872C.1
tagagtaaatttgataagagataagatgtatcctaatctagactaaagctgcaagcctgcaacaattagataagatctacgtttaaattacaagataagatattaatagataagatcttcatttttagattacggaatcatgtttatcccttatctatttagttagccataattatgatgtgttcagttaggattctatatccatttagttgcagtagcttcttctcttgttatataataaatatgtgatgagttctttgtacctgcatggagccgctcgatatggatatggatcctgacttcaggcaattagggaaggatagtgaccgtgatttcatggactcaactagtgattacggtacatgagggaacacaggaatcttccttatctagtgatgatggggaatctgtcaattctcagggttactttttttagtatcttgaactggagaccctctcagaagttgtgatttacaagcatcaagttggatatctgtagcctgct

SEQ ID NO: 121668 - DNA, 169 bp, Glycine max
  Clone ID: PAT_MRT3847_80873C.1
gaaccataactcataaagcggtgtggggacaagatcatttccaccatcatattttaacatctcatggcccgatctcgccttttcctatgatatcaatgccccactttattatagatacattagccatttgcatcaacaaggcaaatcattagctacaatacttcattac

SEQ ID NO: 121669 - DNA, 120 bp, Glycine max
  Clone ID: PAT_MRT3847_80874C.1
ttttccggccatttgatatacactaccgcagggaggcggactgagggacagcatatataagtatctaatactagatgtttaagaaaatcacgttgttcacatacccccaatggcacaaga

SEQ ID NO: 121670 - DNA, 296 bp, Glycine max
  unsure (1)..(296): unsure at all n locations
  Clone ID: PAT_MRT3847_80875C.1
caagacngntgacaccgtccctggccantccancgatttcctcggtgcantganggccagagtatatgatgacgaangaggaagtggatttccggngntngtgtnnacggcattgggaanannnntgtgaactcaaaagatggacctccaaccttgagcagcccaagatgantctggagaagcncntgacgtatggnaacatgcctgnccaagaacnagagaatgtcaagagagtccaattggccgacaaggactggancgangctgcactnggaaatnctaacgaggatgctntt

SEQ ID NO: 121671 - DNA, 437 bp, Glycine max
  Clone ID: PAT_MRT3847_80876C.1
ccgaacccaaagctttgattattgaaattagcttaacagattagaatgccttgcacgaatcccagggagctatttaaaagagtcactcaaagtactgggccctattcaatactctggccataacgaataacattgacaacataaataaatgcgaaatttctaattgaaattactaaggaagcgctgcttatttgccctcttaagccacaccaaaatccggaatagcccaatgtttattaattcctctcatttgagtatcttcctcttgagctgcttattagcacaagcctcacaatgcatacttatcttaagttctacagtaactggttcactagcctgagaagtaacagcttctggtataggttctccttctgctgcttctggcagtggagatataacttgggctcttttctttgttttctttgaaattatgttgc

SEQ ID NO: 121672 - DNA, 165 bp, Glycine max
  Clone ID: PAT_MRT3847_80877C.1
aaacttaattatgaacacttccttagttcaatatggggaagtcttcactcactctctgtcttcccgtgcttagtatcttgtcgagtgcatgttgctattagctcagcaagtcacgagtggcactaacaactcgagcgtgaacgacacgcgtagtcgaagtggtga

SEQ ID NO: 121673 - DNA, 104 bp, Glycine max
  Clone ID: PAT_MRT3847_80878C.1
cggagagtgaaagccaacgcaacgcaagagaagagggtcctgctaccataccaacatccacagcccatacgagcgtgcgtcgcgaagccttctgccatcacaaa

SEQ ID NO: 121674 - DNA, 443 bp, Glycine max
  Clone ID: PAT_MRT3847_80879C.1
gtggaggtttgttcttaattcatgtagaaaatacttaaatattaatcattttgaagtggagtataaattggggtggatcttactaattatttaattactttattttttcctaattctattattcttaataaatgacaactaacaataaagaatgtgttgaatagctatcacaacataatatgacttattcttattatattataataacgtcactccatttaattttttgtttttataaatatagtcttaaattagtcaatttgatgcacaaaagaatcccaacttatgttaggatccctttttgtctaccgcatctcgatataacacctcattttatttaaaagggtgtttaaaaaacaatgaacaagattgggggggactatggccaaaacccatgttcaaaatcaaagaaacctatatatgttgggagtggtgggcaatta

SEQ ID NO: 121675 - DNA, 513 bp, Glycine max
  unsure (1)..(513): unsure at all n locations
  Clone ID: PAT_MRT3847_8087C.1
tcaaatgataatattgatctactgttgagcattgatttgttgggtttacaaggagcaggtaaagcttttccaaacaagattgtttttgatgataagcttgtgttggctaacacacaagaattctttgatggaaattttccagtggattcttggttaccaatttttgtgaattgcctttatcctgtaagtcaattacctccagaagctgtcgttgtaaatgttacatgtggtagtggacgtggtggttnacccaccactgcttggattanttctgcatttaacaatctctcttcacatatcaacaaaaagattctctcagcacttgggagaggtaagaaaagtgtttttcttactagagtagatcctgttacagtatctctactggctgttctgtctggctttaagaatgaaatgttgtgttctaacaaccataactatatgctgactgcgattattgagaactgtaaaattctcaaatatatgggtgatgagtgatcttttgcgttggagaac

SEQ ID NO: 121676 - DNA, 299 bp, Glycine max
  Clone ID: PAT_MRT3847_80880C.1
agctgctatgcatggtgctgctgcatataggagatgaaactgatggcagaaagatgtgatgctgtgaccgtgctaattatatatagtcgggtttggttacctatgatttatgctttttttttttaggtccaatatagtcttcccatatacaaacaggtgcgatctattacatggcttgctttgtcaagattaagaatatgttgcatacacacatattaacgactaaggtatctttacgccaattactgctccttttgaacaccggcgtattctcttacatatctctatcgcttcttcct

SEQ ID NO: 121677 - DNA, 434 bp, Glycine max
  unsure (1)..(434): unsure at all n locations
  Clone ID: PAT_MRT3847_80881C.1
ggggcgcgtgcacccacncgtgcgtacgctgcgagaagacgacagaaggggatgtgtcaggtgacaacactngatgggaggaggatnatttccgggggancgactgggggaatgatacaggaaccaatgggggtgattggcgactcttataaatgggattggcggactatgacatggattcaaaggacagggcaaaaatttggtggttggttctcatgggcctaattggcactggaaggttgggtgatccctggcatggggattccactcttcaaacatgggttaatangcttatagaaaggaatttaaattcattatgattctttgggttaaaatcatttggtcatttggtcggataggtaaccangtatttggtggacattacaacggggtaggtgatcatatttggtggctggaccctnttatttggtaca

SEQ ID NO: 121678 - DNA, 247 bp, Glycine max
  Clone ID: PAT_MRT3847_80882C.1
gcaagtcataaatagaacgtgagctatgagatcttcagcttgtatttatgacttgctactaaaagcattatatatgttggtggaaatggcaagcacacttgtaaccacagctagtaaatatttttatcagtgcaatcataaatacaagctggttctctcatttctccccttctattgttttttttatatgtatagaaaattctatttggggagagagggtatggctggggagattctagaggcattt

SEQ ID NO: 121679 - DNA, 262 bp, Glycine max
  Clone ID: PAT_MRT3847_80883C.1
ggctcgaggagacatgtacccttaaaagattactgtacaatggcatcactcatagctgagaagcctggggtaaaatcttgttgctctcaaccatgtgccagacaggtgaagaaagagtcttctgccagacctaattgaggctctttcaaagccccgggctcgaaaccaaccccaaagaaaattcctagccggactgggaagaaggctatctgtaataaataagctgaagatgcaagagtccaaagtacgaaagactaaagaa

SEQ ID NO: 121680 - DNA, 161 bp, Glycine max
  Clone ID: PAT_MRT3847_80884C.1
ctcgcaccgattcctccatcccttcgcaacagagcagtagcgagaactcctccaaccgctgacacaacatgagcactggatcatctaggtgtcaagatatatttcggtgctatacctacttcagagctctccaataatttttcttccatgaaattacatcc

SEQ ID NO: 121681 - DNA, 383 bp, Glycine max
  Clone ID: PAT_MRT3847_80885C.1
aatctcaaggaagaaaaatatcttccatgagtcacgggtccttttcctgaacaaaatatgctgcgagcccctccacacaaaggaatatgctctgttgaacaaagactcccctcacgagcttatttattctcacggccaatcaacctcattcatacataagaacatacgcttggttttcatttaaactgtgtggtcctcaagacatttggggaccgcccaaaagacatgccaaccgaccgtggtgggatccaaacctcaaacactcctggaaaatgtccagcttacaggaaactgccaataacagtaaggaatcctgcatctgtatagaaactcaaagaaggaggccaaccgctaaatttaatgccacatcgaaccttgacaaa

SEQ ID NO: 121682 - DNA, 1169 bp, Glycine max
  Clone ID: PAT_MRT3847_80886C.1
attttttcacctctccccaaaaccctcgcgccgcttttttttctctttcattatttttttaccattttttttatggacctcttcaccggcgaccacttccccgtccccgaccacgtcgctccgttccccgattccggcgacctcctcttcgccgccgacctcctctcccaccgccacaacccccagaagttccgccccatcaggtccgtccccaccgcccccattgccaacccttctcctccccctctctcgcacgatccgattccctccgggtcgggtcacgccccatgccacgaatccagcttgtcttttgatgctgaggatgaagatgaggatgatgacaattcatcagcaagtaccaaaggacatggccctagaaagaaaaggagaaagatggtgagaaagctcgaagattttgcgaaggatttggtggtgaaggtgatggaaaagcaagagcagatgcataaacagttattggaaatcatagaaaacaatgaaagggaaagaataaagagagaagcagcttggaagaatgaggagatggagagaatcagaaaagatgaagaggctagagcccaagaaaattctcgaaatttggccctcatatccttcattcagaacctgttgggccatgaaattcaaatcccccaacaacctgcaaaaccatgcagcaaaagagaagaggatgaagttgaggcaagtgctagaaaagaactgaacaatgatccaggtgacaatagatggcctgatgttgaagtgcaatcactcatcactgtgagaacttcattggagcacaagtttcgtctcatgggatcaaaagggacaatatgggaggagatatctgaagcaatgaatggcatggggtacaaccgctctgcaaaaaagtgtaaggagaagtgggaaaacatcaacaagtactataaaaggacaatagggagtggcaagaaaaggcgtcaaaatagtaaaacttgcccttactttgatgagttggacattctgtatagaaagggtctcttaagtattggaaatgccttgagcaatacctgcggtgttccccagattgaagtaaaggagttgaatgaaacttgaataggtagtacttgatagtcgtagatacggcttatgtaaaagctccttcattcagcatttatttagccattcttcctttc

SEQ ID NO: 121683 - DNA, 324 bp, Glycine max
  unsure (1)..(324): unsure at all n locations
  Clone ID: PAT_MRT3847_80887C.1
gcgtacgtaagcttgtatcctctagacgcgccgctttttttttttttttttnnnnnnnnnnngcggaagaaaaattaaaccacagcaaatttcggggtaactgaaaatagacaacagaactgcgactcaagtaataatgtatgctctatcttgcaaaaactacttactgcgaaacctctctatgaacacgcaccgaatttttttttcccgaattaaaaaaacaaaaatttctttcattttacaaaattttcatagctgcaaattatccccccttgccttttgatccattctaaaatttattttttgttcaacattacaacccct

SEQ ID NO: 121684 - DNA, 157 bp, Glycine max
  Clone ID: PAT_MRT3847_80888C.1
cccacgcgtacctacatgaccttctgattctccttaacacttctcattacaggggtaggactatcctcaacagtactcgcgctacccgagaatcgcctattgtaccaacatcattcgacgaataccataaggcagtaatttttcagcagacacataa

SEQ ID NO: 121685 - DNA, 401 bp, Glycine max
  Clone ID: PAT_MRT3847_80889C.1
aaacaaaaactccaaattccataagcctattttggcttcaacatacttcccttttattttccaatttccatttttcatcatgatcatcatccatattattatttcgtcctgttattggtcacctgaaaagtgaagactgaaaaacctccccggaatcacgtaccgaaaaaccattatttcatttgggccaaccaccgaaacacttaaacacagcctaaaaaagagaccccactccccgaacgtttgacctttgactgacacaaaacgacttataatttttttttcactccctccctccttccagttttcactatcactactactgggccgaaacttcatgaacaaacttattcaaacgaattgcgttacgtattgcataaaccccatgtcgctttcgagcc

SEQ ID NO: 121686 - DNA, 213 bp, Glycine max
  unsure (1)..(213): unsure at all n locations
  Clone ID: PAT_MRT3847_8088C.1
tttctttccctcacgtctctctctcacatcanccatggcctccccaacactaataacccccaaatcagtgaaatcactgcacacccatcaagcccaaacccaccancaccatcgncgccactctcacaccacccanaanaacntccancgccgccgccacccaccctcgccgnngngaattttgtccatnatnanggncacnaatggtggncc

SEQ ID NO: 121687 - DNA, 1078 bp, Glycine max
  Clone ID: PAT_MRT3847_80890C.1
gaatgattaacggtaacggaagaaacgagatctcgtcgtttcagtcgttatctgctcagctctggagagcggtgacacgtgcgaggaaattcaacgacccggccaaaacgtcgacgtttcggatggcggtgaattgccgccaccgtctggagccgaagatggacgcgttctacttcggcaatgcgattcagagcatcccgacggtcgcgaccgtcggagacattctctcgcgcgatctgcgcttctgcgcagatcttctgcaccgtaacgtcgtcgctcatgatgacgctacggtgcgccgcggaattgaggactgggagagtgcgccaaggctgtttcctctcggaaactttgacggcgcgatgatcaccatgggaagctctccgcggtttcccatgtacgaaaacgacttcggctggggcagacccgttgcgattcggagtgggaaagcgaacaagttcgacggaaagatctccgcgtttccggggagagagggaaacggcagcgtcgatttggaggtcgttttggccccggcgaccatggcggggctcgaaaacgacatggagtttatgcaatacgtaacgcaattcgtttgaataagtttgttcatgaagtttcggcacagtagtagtgatagtgaaaactgggaggagggagggagtgaaaaaaaaattataagtcggtgatgaaacgacggggaaggtgggtgggtgattgcacgacaatagtaccatggggtgtgggcgtcgttttgtgtcagtcaaaggtcaaacgttcggggagtggggtctcttttttaggctgtgtttgagtgtttcggtggttggcccaaatgatataatggtttttctgtacgtgattccggggaggtttttcagtcttcacttttcaggtgaccaataacaggacgaaataataatatggatgatgatgatgatgaaaaatggaaattggaaaataaaagggaagtatgttgaagccaaaataggcttatggaatttggagtttttgtttagctgttttgaaagtgttcgtccagtgccgtttttttttctttgtatacaataaaatttatttt

SEQ ID NO: 121688 - DNA, 650 bp, Glycine max
  Clone ID: PAT_MRT3847_80891C.1
gcgagaagtcccctcccctattctctgactccttacattcctagtgcgggagctcttcgtgcccccaatttggttggcctgatggcgcagtggctcgaccggtccgtgctcgtcggctcgaggctgaatgggtagaacaatatgagcccggtgtttacatcacatttacaactttgcaatgtgggaaaaaaggccttaagcgagtgagatttagtcgaaagcgattctcagaaaaggaagctgaaaaatggtgggaagagaatcaaggcacggtgtatcacaagtatgggattgaaggatatataaataataacactagccaaagtcaggtgaaaggctaattttttttcatgccattcatctttagcagttttcacctatagttcttagtgggaaggagaggacatgatgttggctagctttaggcctgaaaggaaagatcaagtgtacagtcacaaataatagcgtgtctttttttcttcatgagtatctcgggggcgttcattccggtgtacagtcacaaataacaatgggtctcttaattattatttttttctattttattttagcattataaagttgtccaagttccacttctaatactgtatttcaattttccaaatatggaatgggcaaaaaagttatcctac

SEQ ID NO: 121689 - DNA, 336 bp, Glycine max
  Clone ID: PAT_MRT3847_80892C.1
gcttggagaaccagcatcgccagatgcctatgagatgctatctagctgggaaccaagagcaagagatggtaaaatatcacccagagcaaggaggtcatcaaagccggagaggaacgcatcaccaggaagaagagaacgaaggaggcagcatattgagtggcttcaacctggaatactcggaacatgcagtcatcgtggacaagcagatagcgaaaaacgtacaaggagagagcgaaagcgaagacaagggagccattgagacagagaaaggaggcctgagcgtgattaaaccacccacggacgagcagcagctgagaccccaggaagaggaagaag

SEQ ID NO: 121690 - DNA, 474 bp, Glycine max
  Clone ID: PAT_MRT3847_80893C.1
cccatgaaaacaaacaccacatagacttggcaagactctaaaattgacaaccacaccacaaagacatgcatatgagaatcaaaaggtattttaaggttgtaaaggggccaaggacaaggtagaggaaagtatgggataagtagctaaaacccaaaggaatagaggagcaatggggaataagtgagaactaagaaaaagtagtaaaccccaaaaccaaaattaaaaattaatcataaaaagtaaacccaaaaaaaagtcaaccaagtcctcaaaccaatccaagtcttcaaaccaagacctcatgtattcaacttcattctttttctatttttttcattttttttcatttgtttgaacgtgaacagtagcaattgaaaaataaagtaacaattaggcaatatatgtatatacatcaagcatggccaaaatacatcatcaagcatgaataaaaaaaacatatcatccaatgaaaca

SEQ ID NO: 121691 - DNA, 700 bp, Glycine max
  Clone ID: PAT_MRT3847_80894C.1
gtcagcatcccataagttaacagcagtggcaaagtatgtctttgtctttgctgacaattcaaggtatccttcaacatgatccagtctcaggaaatctccatgcttcctatcttctgcttctgtgctggtatgtttttcaccaacaggatgtggactattcctgaacctaaaggacttgcacggacaacagctatggaagctgaaaaattgaatgtagtttcagagggttgcaattcaagaattttgcaagacaaggaagtgaagcagaagataggaagcatggagatttcctgagactaaatatagcgaccctgggacaaactctactgggagatggatcaaaaccgcgggtgtacataggatgcatgattagctgctgcaaaagcagctcaggagtctatacgaagtggtgctccggtagcagaagatatcaagatgagtgaatcatctggtaggagaagatacctaatggtcgtaggaattaacactgctttcagcagcagaaaaagaagagactcagttcgtgagacatggatgccacaaggtgagaaaagaaagaagctagaggaagaaaagggaattatcatccgatttgtaattggtcatagtgccacatcagggggtatcttagacagagctattgaagcagaagataggaagcatggagatttcctgagactggatcatgttgaaggatacc

SEQ ID NO: 121692 - DNA, 238 bp, Glycine max
  Clone ID: PAT_MRT3847_80895C.1
ggcaaaaagcaacagggtgtgtattaacatgagacaatatactatgatgtaaaacgttaacattaacaaccggttgaacttcacaaaatataaaccaatcgaacgagtaacaaaacaccaagaggttttgtttgtacaaaactccataatctggtcacctaaaaccattcttacattacatttttaggggaactgtctaaaaattcaaaaacttttcaaaatgaaaaattgacaaaag

SEQ ID NO: 121693 - DNA, 253 bp, Glycine max
  unsure (1)..(253): unsure at all n locations
  Clone ID: PAT_MRT3847_80896C.1
taagattgagagagctcggttgatcaagaaacttacaaaaatcaaagaagaacaaagacttatagctaaagctactaatttaatgcaagaaattgcgatgaaaacttttaataccataactaagactgagaggatcgcattcattcttaaacaanttcgtttatatctagaccaccgaaattatattcatacacaaatactctgaagaaagattagtacaagagtatttaatgctgatatttcaaaagaaaag

SEQ ID NO: 121694 - DNA, 214 bp, Glycine max
  Clone ID: PAT_MRT3847_80897C.1
agggggatctggtgggtttgcattgtatgattatcagtagttgtacgacgcacttgatcattatttgatctcgtatggaagtatgcaccatcatctctatggttgtgtcatactcactgaggtatgtgtagatgccttcgatttgtcttatgcatctataggcgtttgggttatatgatgcagtctgtcttgaactatatcatcttcaacttta

SEQ ID NO: 121695 - DNA, 451 bp, Glycine max
  Clone ID: PAT_MRT3847_80898C.1
cgaaagctgaggatcctattttgcgggcggggggttgggttttttttttttttttttttgggcaaatcgagctgtctaattgaggcgagaactttcgcttaaaaaacaattgttactttagcaacacaccttgaggggcctataaggccagaggataggtgaccaatctggaagtacccttaacaactttttttaaactaggagtgtgttgttactacagcctcaaatgccagccatgcataagagaagcggaggtaggtatctaagccaacgcatctgcataagatgaactctcgaaagcagggaaaggatagcgcctcaccataatccatcaaatagggaccctaaccatggggcacgcttatctatgctgggaccaggggcatagtggcgaaactcaccataatgcaagagtggcaaggcttgctgaatggaccaatggggccaaccc

SEQ ID NO: 121696 - DNA, 347 bp, Glycine max
  unsure (1)..(347): unsure at all n locations
  Clone ID: PAT_MRT3847_80899C.1
aaaaagttctganactaacgacngncgangcacatggaaancgngtagggtntntnagagctacncngtaacattgtgcactgtgttggtgacttgttnatgcnggngntcnatantncagtaatccagtgtggtgnnaagnntncngnngacagntagctgnanacagttngatncngagangngcttaccanggnagnnaaanctangcacaaggctaatgtcaanatcaagtgatnnntnctcngatncnaatagngtgcntctgnangactgcntaggtggngccaaggnnngccccangtgcagatangtcaggcnccaatncnnnangncactacctcncc

SEQ ID NO: 121697 - DNA, 126 bp, Glycine max
  unsure (1)..(126): unsure at all n locations
  Clone ID: PAT_MRT3847_8089C.1
ttttggcaaaccattaggaatttccattctaatttgggggaaaaanggcccctggaaatttaaatttgtggattaaagctcgcaccattttagaaaatggccaaaggtacctaaatattattcttt

SEQ ID NO: 121698 - DNA, 436 bp, Glycine max
  Clone ID: PAT_MRT3847_808C.1
gagagaatcaaatctctctctttccgatcagatcggacaccctctgtctgaatcccaacccaccgcacacaattcctttcttcttctcaacgtttcaattctcaatttttcaaaaacttttcccgttttcatcaattcgaatcttattgtttttttgcactgttttcgttaccaaattctgtgatctgtggaattccttgtgattttagggtttggggttgctggattcgggttcattgcgacggtgatggcaatttgcgcgttgaagttttgaatttgtggatattttttcgttctgaatcgttttttcgtggttctctaatggcgtcggctcaggtgctgccaaactccaccgcgtcgtcgcggaagcaagagcatcttgaagctggcaagcgccggctggaggagtttcgtaaaaagaaagctgcagagcgga

SEQ ID NO: 121699 - DNA, 807 bp, Glycine max
  Clone ID: PAT_MRT3847_80900C.1
ggctcgagttttcctcaatgcctgttcacgcgcttccattttcaaaggactctccgccgcccaaacccaaggaggctcatttccggggtgtccgcaagcgtccctggggccgctttgccgctgagatccgtgacccctggaaaaagacccgaaagtggctcggcacctttgacactgccgaggaagccgccagggcttatgacgccgccgccagaacactccgtgggcccaaggccaagaccaacttctcctacatccttgctcccgctttccacctccctcccccggtgctcactactcccgaagcccatgccctggcccaagcccaagcccaggaacaactcgccagacaggtcgagttctgtggcccaccgtttttctttgcaactgatgtagcttccaccgcgccggtgaggtcggagtacaagggttacaagttagagaatatcgcgggttttgtggtgagtaaggaggagcagaaagagaaaaataagcccttcttatttgaccttaacctgccggcgccgctcttctgaagccgccggcggagaatgacggcgccgggggcttagtgtttctatcttaaatgtctttgaatttgtctatatgacttgttttgagggggaattttaggtgctactccgcccttgttttgatgtacagtttagtttattataggttttgagcagcaagcattttggttattacggtggcataggtttaaagttcatttaacgttgtttttgtttgtcgtttgtttcttccttggattctcactgaatctatgttaatacgtacagctgcata

SEQ ID NO: 121700 - DNA, 523 bp, Glycine max
  Clone ID: PAT_MRT3847_80901C.1
agaaactccaatgcatttgtttatattggttcttaaatttaagcaacctgataataccattgaagcaaaggagttcttatagaagttgcttacataaacaactacaactaaggttctttaagctttaagaaaatcaaattttcaagttaaaatgaaggttcttgtgtgagtcaagaaataaaacagaactcaataaaaataagttaagaattcaagtgaaggtgaaaattagtaattgttctatattctatgtgataacaagagatctattaaaagagaattaaaaatttaaattgagttcttgtattgaaaatacacttagctctgcttcaaggaagataattgaaatttactccgacctcccttaaagtgtcgcttttgaaatgagaagggtgtcaagtataatttggctaaacctgagaggaggcttgtcagcaagatccatataatattccttgtttgttgtcaggcatattcagatatgattgctgagcgcagagaaaaagttacaaatggtgttgaa

SEQ ID NO: 121701 - DNA, 418 bp, Glycine max
  Clone ID: PAT_MRT3847_80902C.1
gggccccaaccaaaggggaataataaccccttggggggtcaaaggggtaataaaacccaaaggggctaaaagccccaaggggttttaacaaaagcgaaaaaaggccccccaaaaaaaccaaaaccctttgggaaaacccaactttttttcaaaggggcaaaaaaaaaaaaccccctaggggaaccccctttcccaaattccccaattccagccctttaagggggctccgggggaaccccagggcctaaagtcccccaattttgggggaacaaaaaaaccccccctttaaaagccttgggggggccctcttttaagaagggttcccttaaaaaccaaaaagggggtttgttaaaacaactggggtggccccccccaatgaatgggaccaaaaaaccccgggggggggaaaaccgccaca

SEQ ID NO: 121702 - DNA, 292 bp, Glycine max
  Clone ID: PAT_MRT3847_80903C.1
acggctgcgagaagacgacagacgggtcccatgatcacttttctgggcgaccacatgactagggctcggggaccctcagatacttctggtccaactccaccagctcccgcaccagcaccttccagcccctctgctcagagcacagagattttagtgctgatgctgcagagccttcaccatggcttatcctggtgatgcagagcatccatgacctggatcagcatcaagccattatgagcatggagggtttcatgggtcaggtggcctagccaagagtccagcgttctccttt

SEQ ID NO: 121703 - DNA, 591 bp, Glycine max
  Clone ID: PAT_MRT3847_80904C.1
aagagggtcaacggttatatgtagccatttcatcggaaggtgaagaaaaaaggggtgaagagttgctaaagaagttgttagagtcattgattggtgatggagaaagcccgtttttgaagaacatatctagatgtttagattctaagcacttagatttggtgagagcgtgtctaataactgtgacatggttgagctcctcactgtctatgctatttagtgctggattgcatcttcccgccttcttatccatcatctctcagttgaaaggaatcctggaaaatggagaacttgagctcaagactcttgcttctctgtctttgcttaatttcagtaaaatatcagagtgcaaaacgcttttgaagactatggcagaagatattggtccccttcttcatgaacttgatgatgtaacatggactgcaaaacagcttcatgccattgtgtcgagggagaatctgtagtattcaggaaacatatcttctcgtatcatcatttctgaagttccaattttgaatttttcttgtcagaaaatttatgctgcttatatatgaaaatcctttgcatagactgttctagaaaaaacaaatactt

SEQ ID NO: 121704 - DNA, 1044 bp, Glycine max
  Clone ID: PAT_MRT3847_80905C.1
cacgcgtccgataactccagttaccacaagtctcatataggagtcaaggtggtcgattataaatattctttcctttcaacccatcgaggcaccattgccaatcaaccgagcagttaagcgggtaatagcttcaacattgggaccctaacgcctcaactaggagatgccttttacaagaataaatagtgacaccctaacgcctcacttgggagtcaccttttacaagaacaaaactggagcagttaagttgaaaggttttcaagataaacctgggagtcgatcaagcacagtagacttgagatcggaacataattagtacagtacatttctatatgaagtatagatatgtgaatctagtttataattagcactgtacatttctataagttttggatggttattttagttcttggttgggttgttattttatttaggctaaaaggttttgaattttcttaagggtgtgagtccttttaatcaatgaggaccaatttcaagtaatccaaacatagaaacagaaagttcaacagaagggtagctttcatggcgtcaaatactgataaagttcaggtctttggaatctgagctatggtaagtccaaggcactgtagtgttcttattattgtttgtttgttctctctctctcagctttctttcacatatccacccgtgtttatctagaaaacctttcttcctcttctctctttcttatgacatcatcatattacctttgaaaattctgtcatatctgtgtctcttttctcccttccccttatttttgagttcccataagttatgtggtttggttttccgttgcatgaacgtgttattcttagcacttgttgcatcaagcgtttcatgacacgtgttgtgaaattccaaatttaaggtaaaaagggtactttgtgtttgtgacattcttcattttgctacttaaagttaagaccaatgctgtgtggcattcttaatagtaaggatagtccacaccaaacgtttcaactgtgttcatgaatatttacaaattgtaatgcattgttgaatttt

SEQ ID NO: 121705 - DNA, 175 bp, Glycine max
  Clone ID: PAT_MRT3847_80906C.1
cacgggataaattatccagctttttttacagagtaggtgggggtttacaggccatgtttgaaaaaaaaaaggtggggagttggaaagcaacattgcagatggcaaatcttgttggagactaaaattttacaattttttgcccccttgggaacccattttgttttagcagtttctt

SEQ ID NO: 121706 - DNA, 409 bp, Glycine max
  unsure (1)..(409): unsure at all n locations
  Clone ID: PAT_MRT3847_80907C.1
tgtgngngnnntgngnnnggtgcnctnctcnncngancnncagaaancccaaaaaattcnatntcgtgnncnngtctgtgacanagaggnncnannttgnngtnnnngnggnnnncacaacgnanncagncgcgacangcnacnacnggtnagngtgttnntcgaggngaagcgnggtancaagnnngtctnncgtgttgcgntgngagcnttgnntantnncgngntnnntatcnacatncgtntgcnctgtgccnnancgagnntnncnnannttgnatcacggctnnnnnnngangctcctggnncaagngtnnnncngnantcgnattgtgtcnnngctgnacnnnngntcngnggtgtnnctngnagtgnggntngnagtgancgnnnnctcgnanagtgtgnc

SEQ ID NO: 121707 - DNA, 286 bp, Glycine max
  Clone ID: PAT_MRT3847_80908C.1
ctttgttgctcgtctagggactaggatggagtatttacgtttaagcctgtttctgtgcatgctgtcactgtcagcgacttcgccttcttccttcgcatcgccaaattcgatccgtgccgattatgccgttaatctgaacgcaacgaacttcgatgctgttctcaacgatacccccgctactttcgcccttgttcaattctatgcccattggtgccctgcatgcaggaattataagcctcactacgaaaaggttgcaagattatttaatgaacctgatgcagtgcat

SEQ ID NO: 121708 - DNA, 661 bp, Glycine max
  Clone ID: PAT_MRT3847_80909C.1
cagttctaaaagtccagttaaattgaacttgctttattttatttttaaaaaataatatatggattctggatgtctgtcacaaaccatcaggtggatacgtatccaacgtagagctgaatgacaaatttgtatagtttggtaatagtttattcctttttttctttgtgaaatgatcctcacatgcttacactttgcagcaatatggaggacattgctcgggatgctggcagtgtggatatcgaagatgttttgtatagcatacctttgaccgaactacaattggtgtctctaatactctgcgcttttattgccattgtttttacaactgatgcttaaaatgaccgtcaaccctttgaaaactacatatggagctcccccttctttgctctattaatactgcaatttaccaacccctattttaaatggcccaggtaataggattatatatcgggtttgaaatgtttcaattataagtttatccttactgattgtaaatctttaatgagtgctgcatttatgcagggccttactagttggatggaacctaagaaaaagaagctacgaaaaaagtgattttcagccctgcgccatggagttaaggattttgtcattctttacgcgcaatttcgattatttaatttatgaatgcatttttcctttt

SEQ ID NO: 121709 - DNA, 341 bp, Glycine max
  Clone ID: PAT_MRT3847_8090C.1
gtgtttacaaggagcaggtaaagcttttccaaacaagattgtttttaatgataagcttgtgttggctaacacacaagaattctttgatggaaattttccagtggattcttggttaccaatttttgtgaattgtctttatcctgtaagtcaattaccttcagaagctgtcgttgtaaatgttacatgtggtagcggacgttggtgggttacccaccactgctgggattagttctgcaggtatcaaatgctccttagacatcaacaaaaagattcggacaggactcgggacaggtatgaacaccgtgtgttttactaaatgtgaatcttttccagctgcttta

SEQ ID NO: 121710 - DNA, 466 bp, Glycine max
  Clone ID: PAT_MRT3847_80910C.1
ccacgcgtccgggtgtttagtttagtcccatgtcaactagagttatgggttaaatagagcttatgaagcttaggccatcctcacattacaagctgattttgtggtgttgagtttggccctaagtccaaattctaagatggtatcaaagcttatcttagaatcatgtttaggtgtgagggatagtgttggaaagccaccttaattgtggtcacccatagcccaccttagttgcggcctttgtggtggctgccttatttatagccccaagggttgtggttagttccaatttttttgggttgagttatgtcctaagtcgaaattctaaaggccggtttacttactttcattggctgtgttcacttaattacaaaatttacaccttattttcaatttgtctcctgttttcaaagatttgtacgagaaacattgaagacaacttctttttttggttccagtacaaatcttt

SEQ ID NO: 121711 - DNA, 805 bp, Glycine max
  unsure (1)..(805): unsure at all n locations
  Clone ID: PAT_MRT3847_80911C.1
gtagatcgctgtgagaaacacaacaaacgctcccgcaacgcaaccgtttcgaaagcactcactgactcagtttgtttctcgtttcgtcgaacccttggaaggcacaatgggagggaggaagaagaagttcatcgacaagaagaactctgctactttccaactcatcgctcgcgacacctccgacccttccttctcccaatccgaccgtgtcttcgtccgcgtcgacaacaaccccgtttccttccccgtcgccgacgactccgctttcgatgactcccccgacgactactactacgacgacggcggcggcggagttagcggtggtcccttgccggagggcgtgaggagggagattctggagctagggtttccggatgatggctataactacttgaatcacttgagggaaatcaaaaacaccggcgctggtgctgctttctttcacaaccccaagttcaagcttcaacacctccctcgcgatgttaaggcatatgatgcttcgagattgcaaatttctgaggcggatggagaggctgtggagaacactatatacagtgttgcgtccaaaactaccagcgtaagggtgcagaaagcagttgatcctgaagtggctgcattgcttgatgatgacgatttgtcacggttgggatctgatgttgaggatttggaagaagactttgttgttcaggcgaatctccttgaagaggaagatgaagaagatgacgagaaggatcctatatgtaatgaaacgagtttttctgaggagtctgcgatacataganacgggacaatgcacacacactgc

SEQ ID NO: 121712 - DNA, 393 bp, Glycine max
  Clone ID: PAT_MRT3847_80912C.1
gtgatggaggagctcatggaggtggatactgtggctgcgcgggtgccggtggaggaggagggtatggggctggtggagcacatggtggtggttttggaggaggtggtggaaagtgtgagtgcccttgtggcctttttccctaagaactactctttaatgcacattatatttgcatgttttcctttttgcgtttcagtattattagtttgcttttaattacctgttcatttttatttatatcgtatcacttatatcttcaccattatttttaatcccgttgttttaactcttgattttttatttatcaacaatattttacttaatttatttattttgcattatttgtgttccttcttttcattcttgttaattggctttttcttatttcttttt

SEQ ID NO: 121713 - DNA, 740 bp, Glycine max
  Clone ID: PAT_MRT3847_80913C.1
acgagattttacacttgaaaaatatcactttggcggaatttagtctaagaaaaaaaaaagttaccaaatagtgtctcaaaattacaaatgtgagacaatttagttcttcatctgttttgttaatatttttttgaactaatgtcagtcactaataattttttaaggtaaattgatacacagtcagttttttataggaaaattatgtattgaaaattgaagacaaatgactaaaaaggctattcactttgtgtaatgttgcagaattatttagtgccttctttttcctttaaaaactaaattgagccaagtgtttttttttcagagacggatgtgtgtgtgagaactaaaattgggtcgagtgatttttctccttcaaaagttcatcgacttgtgccttgattcaaagataacggtaataacatacaggttaaggtggagattatgcttattgagggtgacaacattgccaaagctataacagaccatgttagagttcatagtataaggaaattggtgattggaattaccaaatctaatttaaggtacctttgcaatatctgaaattaaattaataacaatagcctttttactaatgtgtcacgtattttattattgggatgagtagcaaatccgtctctagaaggcgaaatgccatagcaaacaaggtcctcaagaacgtaccagaaatttgtgatattaaaataatatgcgatggaaaaaaagtgattgatcagaatata

SEQ ID NO: 121714 - DNA, 195 bp, Glycine max
  Clone ID: PAT_MRT3847_80914C.1
tttcttcccttttataattatctcttaaagggaaaacattgggggcaaattttgcttttcggcatccatggtaactctccgcttcaaaagactctacgtaaggaccacttccagcatctcctgtgaaaccaccatctgttgatgaagcatggcctccacattaccttctaccactaccataaagtagcttatgca

SEQ ID NO: 121715 - DNA, 386 bp, Glycine max
  Clone ID: PAT_MRT3847_80915C.1
gatgtgagtcaattcagcgatatctatcaggaggagcattttattaactacttgactcctgatattcggatagtgaggcagcttcctaaggagctacaatctttggacttggaggccattggtagtgttgtgacagatgttgacatggagaaggaggccaagccaagtttttacttgaaacacatcttacctattatacttaaaaatcaagttgttcactttgttggatttggtaatcgcctggcttttgatccaatagcatttgagctgcagatgtaattttcatgccctgcaatttgttcccagaatacaagaaaccggtgctctgcttctaaaaagattgcgtgaacattcaggtcttattggaccgttggatcgttatcttg

SEQ ID NO: 121716 - DNA, 2188 bp, Glycine max
  Clone ID: PAT_MRT3847_80916C.1
atttcatctcctcttcgtcaggatctgacccgaacccgaagcatggtatccgcttccgaaccagatcgatgctcgcgaacttcgcggactccgagccgcctctccagctcccgtagatcccaatcccacttttcttcgtggtatccaaggaaacgagccaaactgcttctctcgcttattgcttttctcgctttcgttttctttcacaattggtttatgcttctccgtttacaacatcaacccgatcctatacccaaacctacacttcgttcctcctccgtttcactttcccttaagcggaaatggaacaagccttcaaataagaaaaaatcacaaaaggggaattatgcaaggatgttggcattggctgcacatgccttggcagagaataaacgcgaacctaaagatttgtggcaagaacccttcgttcctgcttcttcttggagaccttgtgctgatcagcggaattgggaacccaatggtatgtgtggttgaaatttaacaatgattcatattgtgtatgtttataagtgtgcaactacaaaaggaaaataaaagttcaagctgatactcatagcctgctctcttgtactgtactccaatagagggaaaaaatggatacattttggttactgcaaatggtgggatcaatcaacaacgagtagctgtttgtaatgctgtcgttgtggctcgtttactcaattcaactttagttatccccaaatttatgtacagtagtgtatggagagatgtgagtcaattcagcgatatctatcaggaggagcattttattaactacttgactcctgatattcggatagtgagggagcttccaaaggagctacaatctttggacttggaggcaattagtagtgttgtgacagatgttgacatggagaaggaggccaagccaagtttttacttaaaacacatcttacctattatacttaaaaatcaagttgttcactttgttggatttggtaatcgcctggcttttgatccaatagcatttgaactgcagccttactatgctcttcctaattggggaacttcatatagagatttcgttgcagatgtaattttcatgccctgcaatttgttcccagaatacaagaaaccggtgctctgcttctaaaaagattgcgtgaacattcaggtcttattggaccgttggatcgttatcttgttggtccatttgcagaatcaatgaaggagaaaagtgaaagtaatgccaagaaagcatccaagtacctagctttgcatctcagatttgaaattgacatggtagctcattctttatgtgaatttgggggaggtgaagaagagaggaaagaattggaagcatatcgtgaaatccattttcctgcactgtcactgctgaagaggactacaaaattaccttctccttctgagctcaggtctgaaggcctatgtcctttgacacctgaagaatccatccttatgcttgctgctctaggttttaaccgcaaaacacacatatatgtagctggttctaatttgtacggaggtggctcacgattggttgctttgaccaacttgtaccctaaattagtcaccaaagagaacttgctttcttcatctgaactcgaaccttttgctaattattcctctcagttagcagcactggacttcataggctgcactgcttcagatgcattcgccatgactgattcaggaagtcagctatcatctttggtgtctgggtatcgaatttattatggtggtggaagaatgccaacaatacgcccaaataaacgtagacttgctagtatatttatgaagaactctaccatagaatggcgtgtttttgaacagagagtgaggaaagcagttaggcaaactaaacatgtacagacaaggccgaaggcaagaagtgtttacaggtatcctaggtgtaaagaatgtatgtgcagaacagattgatttatttatattagcttggctgtaattgccatttctcattgtaatttgtagcattgttgttcattatttccattcaattttttccctctggctagataggttagtctgtgccattatagttataaatacattcataggcgtgattttgattgggatttgatctcacatggtgacagttgatctcacattttgttaacaaaagctgaaaattctcaaaaattgtgacaaaaaaaaaaaaaaaaaa

SEQ ID NO: 121717 - DNA, 1039 bp, Glycine max
  Clone ID: PAT_MRT3847_80917C.1
ggatatcgattcaatctaatataacaggacctgggcaaacaattctcctcaaagaacgttgacttgtgacccattttctcagccagaatatcagctaatgtttttgacagaatggaaacttgggtagcaaactgttgaattgtcgcgctaaaagtgtcggatccaccagaacccagcatatcagttaaaggaatatgaaatgcttctgacagaatggaaacttgggtagcaaactgttgaattgtcgcgctaaaagtgtcggatccaccagaacccagcatatcagttaaaggaatatgaaatgcttctgaccaagataactgcctaatgcatgtagcattgagggatccccaacggtagctaccagcggaaaagttgaagaacttgttctctttggttttcttctcaaagggttgcttaaatatcttctcctgctcaagcttcaacccactgaaaacaccattggaaatcccatgcttcacgacctgaaagaaaccccattcttgagaagccttgaatatctcagatttgcaaatgctgaaagatggtaaatggattgctgtaaaaccaaaccctgatgctcttataatcatcattggtgacttattccaggcatggagcaatggagtatacaagagtgtggagcatagagttgtgaccaacccaaaattggagaggttctctgtggcgtatttcttttgcccttctgatgatacagtgattgagagttgcagtacagagccgtcgttgtacaggaattttagctttggggaatatagacaacaagttcgagaggatgttcacaacttgggctacaaaattggcctaccaaagtttctcttaagcacaggggacaagatagtgtgcatgaatatgtatcacgagttcaattttccaacctctacgggaacctaacaaagaaagcaagacaaccatatgagactgaggccaagttcggtttatatacctgcttgcactttaatttaaagaagaaaaaaatatataattgaaaatgatcagtgattagttaatataattc

SEQ ID NO: 121718 - DNA, 436 bp, Glycine max
  Clone ID: PAT_MRT3847_80918C.1
ggctggggtcgacctgggaacgagagagggggccactggaactaatcacttcggacaggagggaaagggaccattttttttaacaggatctatggatggaataaagcctggtatccatggaaaccacggacaagccgtgggggagactaccaatggaggccctccaacgggatgacagttcaagccaaaaaacaaggagcagggggacccggaagatgaaaaacccccagccggtgaacccggaaaagataaagccggagaagaagggaacgacaaactacaaataaaagaaaggaggaagccgctgacgggaccaaacaccatccaaggaagggcgggggggggcagaggtagaagtgaagaacccggaaaagggggccaagaacccatgaaaacaacgggacaagggcgggggagaagaaccagggggacgatt

SEQ ID NO: 121719 - DNA, 252 bp, Glycine max
  Clone ID: PAT_MRT3847_80919C.1
caaatccattctcacgtcacggcacggcacagcagcattcaaccttgtactcaaatccaagtaacgatcattacagacagttaccaccttaacatgcaatatcatctctgtctaaagcaaaagctgccatttctcactctctcagtccatcatattcgcccattcgggtgtaacagatagataaaaaaaggtattttggtaaaagggaggaggaggaggagaaaaaattattcgtccaagtttcaagtaatc

SEQ ID NO: 121720 - DNA, 417 bp, Glycine max
  Clone ID: PAT_MRT3847_8091C.1
tcttaagcacctgtctcgcgttctgtggctggctcgtgaggatcaaggcgagtttatggtcacaacttcattgtgtcacgtgttataatcgggaaatgcaagaagcttatcttgtcaatctcgaaaatgtgttacgagaattgtatctgcacagtccagaggaagctcgccaactgaaaaggaaagctctctctcatattgaatggctgcaaaaagctgatgtgcctaccatagcacagattgaagagttccatacgatgcataggataatgaatgctcctgattcaaacgataatattgatctactgctgagcattgatctgttgggtatacaaggagcaggtgaagcttttccaaacaagattgattttgatgatacgcttgtgttggctaacacacaagaaatgtttgatggaa

SEQ ID NO: 121721 - DNA, 323 bp, Glycine max
  Clone ID: PAT_MRT3847_80920C.1
ggggaaaaatccaaatcaaaaaggattggggggaacccccaaagatccaacatttattagggaaaaccggggtggggaaaaataagggggggggggttgaggaaaaataaattgcttacaaggcatgctaagacccctaaatattccacacacagttttcgaaacaccccaatttacaaaaaacttttctttggggtgttttaaaataaagcacaccccaatggcttggaagattctactttcttatcccattcacttggcaacgttcgttgcggatgagttttgctgcggcaaccatttttgggagggcttgcttcacctta

SEQ ID NO: 121722 - DNA, 646 bp, Glycine max
  unsure (1)..(646): unsure at all n locations
  Clone ID: PAT_MRT3847_80921C.1
ccacgcgtccgctttcacccttaagacccttctattcctctgcttctgttcctttcacttcccactctcaacttcatcagaatcaaatccttcattccccaaagaagccctccccaacaaacatggttaccttccaataagccccacttcaacttcttccattttctacgctttctatgaagcccagaactcaactttaccactctcacaaaccccacttctcatatggctccaaggtggccctggctgctcctccatgattggaaacttgtacgaacttggaccgtggcgcgtcacggaatcactcacccttcaacccaaccctggtgcttggaatagaatctttggccttctttttcttgatagtcccattggaactggcttcagtgtggcctcaacgagacaagaaattccaactgatcaaaacggcgttgcaaaacacctttttgctgctataacaagctttcttcagcttgatcctgttttcaagaatcgccctatttatattactggtgaaagctatgctgggaagtatgtgcctgctattgggtattacatattggagaaaaatgcanacttgaaggtttctgaaagagtgaatttggctggtgtgactattggggatggcttaactgacccctaaact

SEQ ID NO: 121723 - DNA, 204 bp, Glycine max
  Clone ID: PAT_MRT3847_80922C.1
accacgcgtgcgatgacttgcatgctgagtaattccacattacatttctttatgctagggcacacgactagttgtgatacatggccgcaaagatgcattcgtgtcttctggactgtgcatagttgcggtggccagtagtgcttgaccaactgatctgcacctgacttcgtactggcaggtggctccctgcatttcttcggtctg

SEQ ID NO: 121724 - DNA, 529 bp, Glycine max
  unsure (1)..(529): unsure at all n locations
  Clone ID: PAT_MRT3847_80923C.1
tcgatctatcgctaggaatgtgccagataccgtacatgcagtgctgccgtaagtacagacgagcaatacacactgtaatacctggccagaagagtgggtcagtaggcaccacgccatcgtagccatattctggcaatggcgccacgcagaagaattactaaactatgcccgtaaagatgcctctgcgattatacccttggcaccacggctggcgtgtgtaaggcacctcattgatgctgcacaacgtagtgcagaagaggagactacagctaccgttgtagaagaaacggcaccgtacttaaagctagacggtgccaccggtaacctggcaaaggttacggcaaatgaagctaaggtaccaaccgccgaagcgctggttgatagtaaggcagaatatgcctaataagctgcagactacattgcgaccaaagccgatgtgctaactccagcgagtaaatatgtatgtgtanctacggcacaggtacgggcacaagaagcagctactgcgctcccagcggcaactgcgcaa

SEQ ID NO: 121725 - DNA, 354 bp, Glycine max
  Clone ID: PAT_MRT3847_80924C.1
ggccactcgcaccaatcactacgtgtttgcattcccacactctcctcatattccaacgcctccactccgcgatccgctatggattctcgtgaacagcctcagccataaccgccaaacatgatggtgggacccaccgtgtacccttcgatgttggcccccgccatcgctagattcccttacagcaacaacaacaacatcaacagcaatcctcctcctccttcttcggagcctctcaacagcgacgccaacatcaaccataataacagcacgttcgaggcgttgaagccttgtgcgctggccgcctcggaatcgtcgatgaagaatcggggccggcccagaaaatactcgcccgat

SEQ ID NO: 121726 - DNA, 521 bp, Glycine max
  Clone ID: PAT_MRT3847_80925C.1
atttatgggctatgacttgtttattattacaaacatgcattagtattatttctcatagcaatcttttttataaccattcatgtaataaattattacttgtttcggcacttttggaggcataaatccaccaagtttgcaatatcacgagcatcaatgttgatgtcaatggacttgatcaaaccacagcctatgatacaatcgttgatggcattggtgggctttatatcatgacattttttgtcaaagcactttttaacacatataatatatagaccgccaacaccaggaggtattagtaaaggtgaacattctaattcaccaatttgaaagccaactgagtttatcatatacacgatttggttcaatttgatcaagtgaaggtttgtggatagcttctgagaaacccaacataattactatcataatcataactccattagctttcatcttattattttccataacttttctccaaatctatacaatctatcttagaattttattatgatcggacgcgtggg

SEQ ID NO: 121727 - DNA, 276 bp, Glycine max
  Clone ID: PAT_MRT3847_80926C.1
actcatctgtttaccctgaaaggatgcaaattatttgcaatagtgttacaacacctctcaagtcgaaaaggtctgcaagaacagaattatcgtctggggattgtttggtggaaggtaaggatcgctaccaaagtgttgcttcttgttcaatattcaattcaaatgttggacagctatcaaatacatatgtccccttttatcgtaaatctttgatcatgaagttcccaagaatttcaacctaccatccaaagaacagttagtaaagaagtttagtgt

SEQ ID NO: 121728 - DNA, 505 bp, Glycine max
  unsure (1)..(505): unsure at all n locations
  Clone ID: PAT_MRT3847_80927C.1
aaaatggacgaaaagatctaactaaatcattcttaaatattagaggaaatgaatgatttaacatatatttctccctcatcactacacgagcaagacgctgtgtatatacgttctgttcattcattcagaagcagcgtgggtgtgtgttttgcttcagagaatctttctcctaatggaacagctgaagccaagcgctcctaactcatcccctctcactccactcgccttcttggacagagcagccaccgtctacgcccacgtcccttccctagtctacaaccacaccaccttcacctggtccctcacgcgccgccgatgcctccagctcgcctccctcctctcctccctcggcatccgccgcggcagcgtcgtctacgtcctcgccccgaacgtacccgccatgtacgagctccacttcgccgtccctttcggcggcgcaattctcaacaacatcaacacccggctcgacgcccgcaccgtctgcgtcatccttcgncacgcgaac

SEQ ID NO: 121729 - DNA, 358 bp, Glycine max
  Clone ID: PAT_MRT3847_80928C.1
gggaaaccctaaggggggcgtttatttaacgttgcgccaccataccaagtctaatcacccacccagaccttttttaatacattgctgaggaacttatttcttaactcaacaatgtgctgtaagaaaatggaacaccaagtcatctaaaaagggcttcttatgctaatactgattcttaactttcttccccatcacaaataggaaatgacactaaagaacttttaaagacgaaaaagaagaactctaacagcatgaaaaagaaagaactcttgcaacagactgatccaccattaatttctggtattgacctttttccatattgaaatttttctagaggtgaaaataatcagttcaaaaa

SEQ ID NO: 121730 - DNA, 196 bp, Glycine max
  Clone ID: PAT_MRT3847_80929C.1
gggagaacgctaaggaatcccaatggctctggggctcttggcgacgatcctcttcttcattgattcctcttactctcacctcgttcgcgcttacgatgacgccgacgacgcgatcttctacgagtcgctcgacgacgatttcgatggacggtggattgtatccgacaaggaggattacaatggtgtctggaagcac

SEQ ID NO: 121731 - DNA, 505 bp, Glycine max
  Clone ID: PAT_MRT3847_8092C.1
aggtttcgtgggttgacgcgtgggcggacgcgtgggcaaaaatggtgaaaaaggcataaggagacctgtttctggggatggtgaagagatgacattgattgcggcaaccagtgttgaagaggcttacaacaagcttatagctgaacttgagaaaagtgttcctacattggttggcattgaatgccccaaggatgagaaacttcctcgtcgcaaaatttttgacagacctaagacgcgctgcttcactattctccctatggagcttaatcttgggggccgccagaagtttttaaattttgcgaggttcattatgaagaaaagggacaagcttagttgccaagttggaatcaacccatactccatggaatggactggtttgggaatagatcactgagttagggcaacgatgttctgcgttgcgagtctgctagatatgaaggcttgattaccaagcacgttatgagcaagatggctgaaatgataaacagctcttgtggtggtgatg

SEQ ID NO: 121732 - DNA, 371 bp, Glycine max
  Clone ID: PAT_MRT3847_80930C.1
cacaagtactagagctttggtatcaaaatggaattctgatataatacatggtttgcagcacattcacatcttgctaccaaggatgtggttactggctggtgctatagtagtctgatcgctcccagccatactggaaacgataactagcgtctatgctaagacttgcttatttcatgttcttttaaaggctgctatcttgtaattacccattgtatccttccttttttttgataagtgggaaatgattttttatggataccggactacttggctaccttgcttcttgatcttcaatcagtgttggctggtcatgataaagagattggaggaggagcactgcccttgtgatttggggcagcgggtggggagct

SEQ ID NO: 121733 - DNA, 271 bp, Glycine max
  Clone ID: PAT_MRT3847_80931C.1
cccgcttttgagattgcagagtctggactgcggggggataggatgtcctgggtctgtccagagacagatttctttcattctagaactgtctgagccactctggtctagcgactgcaagggtagcatcttcttgactgaagcccactctgcttggttgtcaccctgggaataatgacttgttgacctgtgaaaagcggaacattccacaaggttaagctcaagactagaaatcttgcttatgtgtgggaaaggatggattcataattttgct

SEQ ID NO: 121734 - DNA, 391 bp, Glycine max
  Clone ID: PAT_MRT3847_80932C.1
gaccagtctcactaggacttcggccgccctttttttttttttttttttttatatgttattaagagcttttgcttttctttctgcgcgctttttccaattaaagtattttctatccttttctcactgcaacaaaaagtgctcatcgcagagtttcaaggttgagagtcctaacctgaagtacacatagactgacattcatgtccatgtactactatgaaaccactgaacttgctcacgagaacattaaaggcacttatcagcgtgttgacaagcccactactgatgaatgggaataaaaaccaacacccatgtccctaaactacgggtaatgcttacggggtggtggggaaacaatgtctcaaccgctactgctggtgttatcgctaaccga

SEQ ID NO: 121735 - DNA, 315 bp, Glycine max
  unsure (1)..(315): unsure at all n locations
  Clone ID: PAT_MRT3847_80933C.1
aaagaaaaaagaaggttctaattattaataaattatagctatgtatatatatatatacagatggatattctataccttttatcttaattaaaattggacccctccttataaggggtaagagttttctttatttttaggaacttatccattcctttttaaaggggccccacaatccgaaagacttctgggggaggggtcattccgttttggacctagaatacacagagcttcagcaacggagagaattagnaatacccccgagaaacactaatgcaatccataacgcgggaccgggagaaacaacatttttgttat

SEQ ID NO: 121736 - DNA, 154 bp, Glycine max
  Clone ID: PAT_MRT3847_80934C.1
ggcccactcactttgggccacaacctactatctattccaatgctggcatgttcgtttactgacacaatctggatacctaccgtgatctccttcaaactgtgcaagtcactaagcccactctctttgctgaacaagattatgtgaacatgtactt

SEQ ID NO: 121737 - DNA, 563 bp, Glycine max
  Clone ID: PAT_MRT3847_80935C.1
ccacgcgtccggatctgataagtgttctaccaactcccatcaatcgaatcgctttttcgacaaatacgacacatctaagtcatccaagcatctcaatctattccttgataagaaaaataaacaacgcgaatggtgattggattgatgataaaatacgagtcctgggtcttgaacaggaattcgattgatgataaagaaagagaattctcggttcatgcctctaccttaacgacagagaataggattgactcaaatgctatatgactctgactcatagtcatcatttatcaaacaataactctggttatcaaatgattgaacaaccgggagcaatatacttacgatatttagttgacattcataaaaagcatataatggtttatgaattcaatacatactgtttagcacaaagacgtatatctcctgctaagtatcagacaattacttaatcacaaaccttgcggcgggctaataattttcattttccatctgatggaaaacccttttcgctccgcttagccctacctccccctagtaaggagattttagtgattggttctata

SEQ ID NO: 121738 - DNA, 382 bp, Glycine max
  Clone ID: PAT_MRT3847_80936C.1
acttgtcaaactaccaaaggttttgaactttaaaccactcatggtagcactcattggtcctggtgactttctgctccgtgaattttcaaggcttgatccaccacctgtactgcatttatcagatcaagctttggattggttcgtatctgagataaatcgctttcctgacgctggggtaaaggatggtgcacacaacattatatctattggcagatatatgaacggaagcttatgctatggaagatgagaagatgtgaatccaaaactcgtacagcaatgtgactttggcgctagggcaaaccttaatcctatggcagccatgtttgctggaatcgtgggacacaaggttgtaaaagcatgccctgggaaattacatccactt

SEQ ID NO: 121739 - DNA, 580 bp, Glycine max
  Clone ID: PAT_MRT3847_80937C.1
ggtgaaaattttggatgggacaacccctccttttaagaggcgaagctttagtttacagatgtgtatggtgctcatcctcatcctcgccctcctgcgactgcctctggctgcggcgacgctgagaaaatttgatttcaaattcatcctcgtcctcgttgtcgcagagcattgaaagccctcattttgttcttcaggggaggtttatgttgtatcaagtgatgtatcattaaagactcaaagcaaagatgaggatgacttctttaagcagaagagagtgacaatctagattgcttccagtatgtcatttttggaactaataatttgctagtgttcaatgaacggaaacaagtagttgggagtgttgcacgtatatacttcaaatgcttgctcaaagatagcaaatctcaatgccaattttttgcaaatagtcaagtaaattttaccaaaagagctgggaacataatagcggattagctaagcatgcttttatttccaaagaaatgtattgggtgaaagattatcccatcaaattgaatcgaattttctattcttttggacgtacaatgtattggatgcttat

SEQ ID NO: 121740 - DNA, 529 bp, Glycine max
  Clone ID: PAT_MRT3847_80938C.1
atccagaccgacgtgcaaaagcacactttaagagaaaggatccattattcaagttaggcttcaaaaaattgaacttcagcgccctgacaaagattcgtgttgggaatggaccctatccgctccttcgtacagaagcgaaagtacatccccccataacggggacctcaaacacggagccgaacaaggaagaaaccccatgtcttacacattgaattccacattgaactgcagaaaaattgaaattcgtttcaaatagagggcaccttgtcatccatatggtgaactacacagaagctgacagcccttttctgtacttgattcctcacactataacacacacataaagcccgccaaccacctacaattcaaccaaaaacctgctgaaggtggatgaaaaaacacagcttttgcacatgctcctggccaacacagacgtgaccaccctccagatgaatactctcgaggtaagactaaattatcccggggtattacacatggaaaaacggatcaggggaactggcagcaatgg

SEQ ID NO: 121741 - DNA, 726 bp, Glycine max
  Clone ID: PAT_MRT3847_80939C.1
ggtctatttcacacgcaccttcacttccacatttgtagcttatatctcctcacttaagcaccctcttatttggcacatcagtagctcactttggcttgttgagagcaattcagcaaccaaaggccttagctacaactaaaactaggagagcaattccattgccgttgctgttattagttcattttcacaaaatggaagagagcaccaagaggaaacacactaatctgatccatgaactaatccaaggaaaggaactaacaaagcagctcagtgaccatctggtttcatcttctccaacgtcccatgaaaccaatgaattgttggttgagaaaatacttttgtcctatgagaaagcactcaccatgctgaactgggggtctattatgggagaggccaaaaccaccagtggcaacatcatggattcccattgttcttttacaaatggtgaaagccccagaagtgaggtcgtggaccgtgaatttgagcacaaagctgtcttcaagaaaagaaagaccatgcccagatggaccgagcaattgtgaagatttgctcaagaacaggacttgaagggtctttggatgatggatatagctggagaaaatatggccaaaaggatattctcggagctacatttccaagaagatattacagatgcacacagagaaatgtacaacggtgtctagcatcataacaagctcaaaggtcagatgaagacactacaacaat

SEQ ID NO: 121742 - DNA, 792 bp, Glycine max
  Clone ID: PAT_MRT3847_8093C.1
tacggctgcgagaagacgacagaaggggacaccgcaaactctctctgtaaagtgcaaagcctctattttttcttgtgaatttgaaggacgatgagttccacagaggtcgcagccacaacgaagaagggtggaagagggaaacccaagaccacaaagtccgtttcccgttcctccaaagccggccttcagttccccgtcggccgcgtcgctcgctacctcaaggccggtcgctatgcccagcgcgttggttccggttcccctgtttacctatctgcggttctcgaataccttgccgctgaggttttggagcttgccggcaacgctgcgagggacaacaagaagacgaggatcgttcctaggcacattcaacttgcggtgaggaacgatgaggagttgagcaagctgatggggtctgtgaccattgccaatggtggtgttctgcctaacattcaccagaatttgttgcccaagaaggccgctggcaagggaaagcccgagattggatctgccagtcaggagttttagattcttagggtttcatcttgttagtatttagagtgcaaaattgaaagaaaatggaactagttttggtatgtagttggccgcgtagtacagtgagactaggattgacattgaatgatgtatagtcattttatatgtgagaataactagttgttttggtttatgatttggtttcctgcatagttttcgttctatttgaattttgcttgtatttagcgcctttttctattattattttggtcaaattagtcttgattttagtgttaaaaa

SEQ ID NO: 121743 - DNA, 255 bp, Glycine max
  Clone ID: PAT_MRT3847_80940C.1
gacccacccatacttaaacatccataccatacataccactacttttaactttattttacttatcacgtgaatcaagaacgcctcactaccatctcttttccaacccataatactccttcttccaaacaatccagtacaaacacattatcatgaacctaattatacatctatctccacatctactctaatataacccaattactctaatattaacatatctataacataaatactcacttaaacatacctataaaa

SEQ ID NO: 121744 - DNA, 2111 bp, Glycine max
  Clone ID: PAT_MRT3847_80941C.1
taatatttttaaaatgataaaacccccttgttgagagcaattcagcaaccaaaggccttagctacaactaaagctaggagagtaattccattgctgttgctgttattagttcattttcacaaaatggaagagagcaccaagaggaaacacactagtctgatccatgaactaatccaaggaaaggaactaacaaagcagcttagtaaccacctggtttcatcttctccaatgtcccatcaaaccaatgaattgtttgttgagaaaatacttttgtcttatgagaaagcactcaccatgctgaactggggctctattatgggagaggccaagaccaccagtggcaacatcatggattcccattgttcttttacaaatggtgggagccccagaagtgaggtcgtggaccgtgaattggagcacaaagctgcacacgcacaaagaaagtccacacccagatggaccgagcaagtgaagatttgccctcttatttggcatatcagtagctcacttgagctatttgagagcaattcagcaaccacaggccttagctgcaactaaaagtaggagagcaattccattgccgttgcttgttattagttcattttcacaaaatggaagagagcaccaagaggaaatacactaatctgatccatgaactaatccaaggaaaggaactaacaaagcagctcagtgaagatctggtttcatcttccccttcatcccatgaacctaatgaattgttggttgagaaaatacttttgtcccttctagagaggctcgagcaacaaacccctgaggtgattttcacctttgaaacagagcttaaagtcaaaacagaggaattggaaaccaaggaggatatcttcccatggttttcctttccttctccatcaattggatcagaaaacgaggacaacatgttacccgagactatgtttgaaaaccatttcatggaaagcttctctccagtattcttatcaccagcgacttcagaatcaaaccctttctgtttgtcagcgtaccacttggacagcactggactattatgccaaaacatacaaacctcagaatctgatatcactgagatagtttcagccccaacttcagtcaccaagtccccaatcctggatttggatatcttgcttgataaaggggattttgacacggatttccctttcaacattcctgaatttttctcttcataagaacttccctgcagttccacgtagatagttaaagagagagtaagaactaagaacagcatagccatagtctgttccggattaactggtgagtcgtagatcctgactatggaagggtaatcataagtcatgttgataaatcaagacaatgaaacatccctgtcatgcaagtttggagagttttcctgtatgtaatgtaccttcacctaggatgtaatgcgtaaataatttgttgctgtagtctaccgttttcttacttttgtaattggttcattagtcttcttttggttcaagcagggttggaatttctgaaataaatgagttctcatctcatttttgttgtctaaaaaaaaaaaaaaaagaatctgatatcactgagatagtttcagccccaacttcagtcaccaactccccaatcctggatttggatatcttacttgataagggggattttgacacggatttccctttcaacattcctgaatttttctcttcataagaacttccctgcagttccacgtagatagttagagagagtaagagctaaggacagcatagccatagtctgttctggattaactggtgagccgtagatcctgactatggaagggtaatcataagtcatgttgataaatcaagacaatgaatcatccctgtcatgcaagtttggagagttttcctgtatgtaatgtaccttcccctaggatgtaatgcgtatataatttgtagctgtagtctaccgttttcttacttctcttgtaattggttcaagcagggttgaaatttctgaaatgaatgagttttcctctcatagttgttatctagaattttgattgtgatcaatggtcaatgcatcatgtcatatgccttcttttagcccatcacttaatgttaattgttagtttgtat

SEQ ID NO: 121745 - DNA, 147 bp, Glycine max
  unsure (1)..(147): unsure at all n locations
  Clone ID: PAT_MRT3847_80942C.1
gttccagcatgttcagtccggcgaacacatggccgccatgggcgtcttggggttactagaggtgtttaacaaatntaaatttcaacaatcataattctcgtgatcttaatttaccctaaatttttttttattttttctaatgaattt

SEQ ID NO: 121746 - DNA, 185 bp, Glycine max
  Clone ID: PAT_MRT3847_80943C.1
attgcatgaggattatgggcataaattcagacatgattacaggatctgaaaaaaataataccatataagatattgatggaccccatttagataacactggagttaccctattgtacgcagatttttagatttatggatctctcattaaaaccactttccttcttacccaactaattacaccttaa

SEQ ID NO: 121747 - DNA, 442 bp, Glycine max
  Clone ID: PAT_MRT3847_80944C.1
ttttttttttttatccatacatatataattctttatattaatatttaagatgatattctacatataaagtttgcatcgtaatgttagagaatacaagacattattgcgtgccgcggtgccgggtttgagacaagacagccaccatttcctaacaacatcagaatcaaatacttcacatagccatatatatagaattctagttgttttctaaactgaatcttttgatggaacaagaatctaatagcagaatttcagctctaaataactttccagattccctttttcccgatgaatctctgcaaagagggcaagtagtggcattgttgaaaccaacccaagtattcaagcaatctctgtggaagacatgtccacaccgcagcgttatgatcctttcttctgtttctcccattatgcagagacacacggcgcaatcttcatcttc

SEQ ID NO: 121748 - DNA, 270 bp, Glycine max
  Clone ID: PAT_MRT3847_80945C.1
cctcgagccgaatcgctcgatcggctcgaggaggaaatggttaaggatatgtcgtctgatttcaagttagacattttttctcagcatgatcctgaagaaccctggttagtcaccaccataacatcgaaaatgtttctagatgaaaaggctaattctgtacaaacaattcgttagcaaggaaagttgtcaatcaacaactttgccacaaatgcagagcgcagaactttgaatgatagatttctgaaagcaaataaagctacaattggtgat

SEQ ID NO: 121749 - DNA, 592 bp, Glycine max
  Clone ID: PAT_MRT3847_80946C.1
gggaagagacccccctttattttttatttatttaccggccccccccatgggggggggggaccgaagccccaaatttatggggcgagctttgacgagcctggagtttgtcctaacttccccaggtcgaccagactggaaggccccctttttaaactttccttccacaaaggccttgaaaaacccagtttggggtctactaaataaccccacaaacccccttgggggggggaatgggaaaagggtttgatcaaaattgaaaaagccccccccagcagccaaggccttgaaatattggttttcaaaaacgagagggggggaatcaagggcccctgggacatttggggcaacatccaggggacataccctgttaagggtttgtctatagctaggggcaagggcggggtcaggccttccagttccagattggttggttagcctaaacatgggggagaaaccccgcccttggccaataaagggggaccctgagagggctcccaggtctttcacaggaggggtttttttctggaaaagatcaataaaaaagcttgcgttggctcttgggcttggcatgatgttgtttgaacctttttga

SEQ ID NO: 121750 - DNA, 283 bp, Glycine max
  Clone ID: PAT_MRT3847_80947C.1
gcgagacatgaaaaagcggcttgtgcagctgtaatccccatttacgaacggccatggacatgggtcgagccttatctggaaacccatccagaacataacgtagacccactgggacaccgcgtgtccactgccataaaacaatgctataaagactatgcatggcaaagtcatctgctccactagcggcaggacctttacaggaaagatggtacgctttgcacagtaccgacagtacatgatgaacgtatggctatagatgattgaccgccacctcacacactat

SEQ ID NO: 121751 - DNA, 401 bp, Glycine max
  Clone ID: PAT_MRT3847_80948C.1
ccacgcgtccgatgaatggagggtcttagacgggaatcatctttatatgcatgcctctctcacttatgaatcttcattccatttaaaaccaacctatcgacattgctgatagcatttccaatcttcctaacacttatttcagtgtttgcatgctaaggtgaactatagccggtgctcagccatgtaggcgagtgaataagctagaaagagtgagaagaaaaatcctttgagctgtattggtaagcttattatcgatcagtaccgatgagacaccctgaagcgtaccaaatggaacgagtcaggggctcatgagcttatgctgcaaagcatgacgaccgtcatgtacgacttatgtggaacttcatctcactgaggatagctacgtgggactacaactaaag

SEQ ID NO: 121752 - DNA, 376 bp, Glycine max
  Clone ID: PAT_MRT3847_80949C.1
gtaccaccaattttttttttttttaattataaaactagagaacagcatgttttgttattggcattgtgacagcaaaccttaacgtatgggccttataactaaatttaaagaacaccattggcccgtccaccacagggccaataaaaagcgcaaactaaagcaaacctcacagcagaatccacccggactactctttgttatccgaaccggataaaaactaaaagtgcacacgcctaatacagcactttattatgaggatgaaggctaactgaacacataccgattggagaatgatatgtgctgaccagaaacctgcctaagggaaggagccaacggctgttatgctgaatgatcttcagaatactgacagattaac

SEQ ID NO: 121753 - DNA, 483 bp, Glycine max
  Clone ID: PAT_MRT3847_8094C.1
agattggtcggcacagagcatgttgtatatgatcctttccttggtttaacccaaaaatatgccactcccatgatgcccctagatgaagaaattctttctaaggttgcacaagatatggttgaggaatggtctgactgtgttgatgaggaggattcctttgaggaagtttctttaagtgcagcactcaatggtgtcgagggtttggactatatggaaagaattcctcttgccacaatctgagggttttcctcatgtgctttcacgctaaaatggtgaaaaaggctaaaggagatttgtctctggggacggtgaagagatgacatcgactccgggaaccactgttgaagaggctttccacaagctaatagttgaacttgagaaaagtgttcctacattggctggcactaatgtcccaaggatgagaaacccttctcttcgcaaatattttgcaaacctatacgcgcttcttcactatcttcctat

SEQ ID NO: 121754 - DNA, 466 bp, Glycine max
  Clone ID: PAT_MRT3847_80950C.1
gccattgatccagggtttctgtagaacttttggaatgagacttcccagtggggagaggcgagaatggttgaagcctatcatgttcagcgcaggcattggacagattgaccaccttcatatatcaaagggagagcctgacattgggatgctggttgttaagattggaggcccggcttatcgtattggtatgggaggcggggcagcctcaagcatggtcagtgggcagaatgatgcagagcttgatttcaatgctgtgcaacgtggggatgctgagatggctcaaaaactatatcgtcttgtgcgtgcttgtattgagatgggggataaaaacccaattatcagcattcatgatcagggagctggtgggaattgcaatgttggtaaggaaattatatatccaaagggtgctgagatagatgttcgagcaattgtggttcgcgatcatacaatgtctggtctagaaatt

SEQ ID NO: 121755 - DNA, 270 bp, Glycine max
  Clone ID: PAT_MRT3847_80951C.1
gtctattgttttcagtttatgttatgtttagggttgtcttgtcttgtgcgtatttcaagagggggattcttttttcttctcgaaaatgtaaaatcactacctggaaaataaaaggtcgatattttacaggtagtgattttcgttcatttccactttttaaaaaaaaaaaaaaaaaaaaaaaaaaaaaggggggccccccaataaggaacctcgtcacccggggattaaattcgggccgggacctctcgggggtacaattttccccaaaag

SEQ ID NO: 121756 - DNA, 1237 bp, Glycine max
  Clone ID: PAT_MRT3847_80952C.1
gctttttcttaagaccaaatatctggatattataatcaataatccaaatatggaaaaacataaatacaattatatgttcaatatgtgggagagaaaaacccaaatataatgacatggcatcctccccctccacccctaatattcttcaggtctttcttgtagctacagtaattgcctcctctatagcttgagcaaaagttgcaatcttgtatgtgaaaaaacctactagcattggtatcaattctaagtgcatagatccaaattctggaaccagaatcgcattccagcggttatagaccatgaccaaaacaacaggaaccagtaatcttggctgcccaattgctcccttgacaaatccctttgcaccatcagtccttagcgagtccacgctacttcccagcatacgaatatacgccaaagaaccaagaaagccagcaccaaagctagctgcaatctcaggggaataagaaacataagctgaaaccagaccaacaccacctatacccaaggtaaagatttgcaacttcctctttaacttattatactgctcctcagcttgagcagccaaaacttttggatcttcacgagactgccttatttcccggaacatcacatcactgcctccagttgcggccttggtagctctatcccatttttcttgctcacgacgtgttggtgctgatttatatcttaccctattgcttcctgtcacattagtttctgcatcaatttgcaggtgtgcattatgatttacaggagctgcgagttctttgctcaaatcaacttccaaactgtccaggctcatgactctatttaagcttagaaaccctgaaggctcttcctttgcaggagggggttgagcattgggttcctcaatcaacttttggaagcgacccataaactccttgttccacatatagtcatcagaggccaaagggtcttcgtcatcgccgccccagtatttgcggagtttggtggtggtgggagggccaccgtactccccgggagccaccccggtggaccatttctgaggcttcttcttcggaaggagaaccttggtttgccttgggtctggcaagggtgccgaatttggggactctggggaagtgggtgtggctacacatctcacacaaacgtggctcacaagtgccattttttttggtgttgttatgtgggcatagcaatgaaggaatggaatggaacaacaagggatagaaaggtgttatgttatgtcaat

SEQ ID NO: 121757 - DNA, 350 bp, Glycine max
  Clone ID: PAT_MRT3847_80953C.1
ggacaccgtttagaccgatggagaatggttagcgcgcacagaacctacactgccgaggagaagcacgtggaggatcaaatagagcagccactgaatacactcccgaaagatctctaatgtgcaggcctataacaacgaatgtaaactagacagagaggaaaagttcttggacagaccgcgtaacctgcaagccatggctatatattgcgaggctattgcaaaaatggaagaatatcaccgagacataactgagttacaagcctgactggatcatagatacgggcaatgtggaatcacaactagagttgtggtcctctcctcaggtttatcagactttagagcatcaaatg

SEQ ID NO: 121758 - DNA, 813 bp, Glycine max
  Clone ID: PAT_MRT3847_80954C.1
gggatattggcgctttaactattcggcaaccacttgtttgccaatactatattactccttcatcccttcactttatctccttaaagccattcccttgtttccaaagatgtctagcccatggttcatacctttcgcatatgtaatactcggggagagttcttctactttgattgagggtttgatttctggaggcacaatcaagggttggtggaatgacttaaggatgtggttgtacataagaacaagttcttacctttttgctttaatagacattgtctggaaattctttggacgttcatattcatcctttgctgtcacaactaagattgtagaagatgatgatgtttcccaacgttacaagaacgaggtcatggagtttggaacctcttctccatttttcactgtactagcaacacttgcattactccatttgttttgcttactagccactataaaagagttagtcctttgcaaagttgctttgactggtgagaaaatggcattgcaagttctattgtgtgggtttttggttctcatcaatttcccaatataccaaggccttttcttaaggaaggacaagggcagattgccaagctctcatactattaaatctactacactggctttaagtgcatgcatcttcttcaaaatatggaattaactatattaaggtagtctctgcttttatcttttgattggatttttttacaattacaatgtagtattgttttggtgaaatgttagctttcaaatgaaaagcaatgtacttgtggtgtttttagttggaaaagaaaggaatttttattgtttttc

SEQ ID NO: 121759 - DNA, 1150 bp, Glycine max
  unsure (1)..(1150): unsure at all n locations
  Clone ID: PAT_MRT3847_80956C.1
gacgtcgcatggcaccgcccgtacgtaagtcttgggcatcctctagtagcgggcccgcccttttttttttttttttttttttttttttttttttttttttttttttttntttttttaaaagacgaataatcagttttcataattttgaactggtttgaatccaggcattcgtagcaaccaacaagtttttaaaaaaaaaaacccaattgacacagcacttttgtttttgtaaaaaggacaagattaagaacacagattctacttgaaagaaaaatgtttacaatagtcacatgtttgagcctcttgttggacggcacacatgattccttttctgagcatgctcttgactccggtgctgcgtccgacatgcatatccataccagcaatcttctcttgctgattcatctggtggaagaagatgtttgggtatagagaggcgaaaccaatacaggagaaatgacaccaacttgtggtaacaatcctggcatacaaaagttcgagcagtaatcatctcagcatgattcagcatcatccgccttctatcaatttctctgttttcaaactttgctatccactctgatatcacatccggcaatgtcctccccatttgtctaatgcaactatcagtgatattctgttcatggagattcttttcatgtgctaacaatggaattcttgaaatagagtgatctgagataggtcttaaagtatcctgggagcagacagggtaagagccattcccagttacccctagagcatgccagtaagctccacagaatgatctatcacatcctgaacaatactgaggaatgccaaaaccagtgcgggaaggcatcattcctccacatgcttgacattgaagatgaacagtgtcatatttgcaacgaaacccagcaacttcagtaacacactgttggcactgatggtatgtgccatcactttgatcatccagtggtgtgtaggccctctttcgattcttctttccagatccaatgaccaggtttgatcgtactaatgcataagtatctaaaagtgcaacttcgtcatgtgagcgttgtagtgaagaatcggcccttagcatatcctcagcaatcgtacgcaaaaagtggtttttcccagcaaaatgaacaactgctctgcattgaggacc

SEQ ID NO: 121760 - DNA, 304 bp, Glycine max
  unsure (1)..(304): unsure at all n locations
  Clone ID: PAT_MRT3847_80957C.1
ngcgcgncgncacaccgagcgancnnccngccnanccacgcancacaagnnaggcacngagcacgcaccccgngcgancagccnanngccngnngngaccagnncanagcgccgngcncgggnnggcgcngaccgncgcgcncggcacacccaacgccncacncggcncggtgcnngcacccccgcnccngnnncannngngggggacaggggggngggcngngngcnacncgcccgagcncgacgcaggggccccccnagcgcggnacangnngcnaacgcnggncgcncnngngcccngccn

SEQ ID NO: 121761 - DNA, 385 bp, Glycine max
  Clone ID: PAT_MRT3847_80958C.1
aaaccgaaaaacaagtaaggggtcggtcaatatacaaatggaactagtattaccacgggttgtgcaccacaaaataaaagggacgtatattctaatacgtgcctttgatgaatcaacaacttcaaacaacttaattaaggggagggagaaaaggcgagggggaacaaaattcaatactgacttaagctgaaaatcacatagccattggggggggtgaacgaaaaactcccattgagaaactttactacatataattaaacatgaaattgattaaacatgagataattcaaactgagcctacaaaattacaaatttaaccgtgaaagccaaaactgcaaattctatgacattgtgaaacgcaaatcctcttattctggtgctggac

SEQ ID NO: 121762 - DNA, 209 bp, Glycine max
  Clone ID: PAT_MRT3847_80959C.1
tccggggccgcccaacccttccggtggttgcaagtttcccaataccctagctttttttctgcttacgtttttaaaactaggacgaagtccaaattgaagcacgccctctttaagaaggttatgggcctccctgaaacaagaggccagagtagcccagcttagtgagaatttcttgaacgtccagagccgaaaaatgatgaggaatgcaa

SEQ ID NO: 121763 - DNA, 1042 bp, Glycine max
  Clone ID: PAT_MRT3847_8095C.1
tctattctttgaaaccaaagttcaaactctgtcttccctgggttctatttcgaaatcaacgacgatgagttccacagaggcagcagccacagagaagaaaggtggaagagggaaaccgaagacttcaaagtccgtttcccgttcctccaaagctggccttcagtttcccgtcggccgtgtcgctcgctacctcaaggccggtcgctacgcccagcgcgttggctccggttcccctgtttatctctccgcggttctcgaatacctcgctgccgaggttcgtcattttcttcctttaattttcgatttgtcttttttgtgtattgtgaccttaatgtgttttggggctttaggttttggagcttgcggggaacgctgcgagggacaacaagaagacgaggatcgttccgaggcacattcaactggcggttaggaacgacgaggagttgagcaagctgatgggatctgtgaccattgccaacggtggtgttctgcctaacattcaccagaatttgttgcccaagaaggtcgctggcaaggggaagaccgagattggatctgctagtcaggagttttagatttaaggctcttgttttcgtatgtagttggttgccttatatagtaagattaggattgacattggatgatgtatagtcctttaacatttgaaaataattagttgttttctaacatggttcctgcatagttttcatttatttgagtttctcgtgaatcgagatatctattctctttttatttgtgtgtttgggcataattttagtgtggtgtttatgttgaaaaaaaaaaaaaaaaaaaaaaaaaaaaaaaaaaaaaaaaaaagaaaagaaaaaaaataaaagaaaaaaaaaacccgaaaaaaaaaaacaaaccaaaaccggggggggcccccacttaggggattctgaaccccggaaataaattccggcccggaccttgaaggcttcccacttttccttatggggagccgtttaaaatctggcccaacatagggccatgatggtttcctggggaaaattgttttccc

SEQ ID NO: 121764 - DNA, 294 bp, Glycine max
  Clone ID: PAT_MRT3847_80960C.1
gcgctctcgggcaccacacacaattctgggacagcttatgagacttttcacgcgccttacgcctagacccgcaagcgtcggacagggaaggctagaaaccggtagaaagccaacgatggggactgtgtataggagcacgcatgctcaagagggtcattcaaaggaggcaactgagcataacccccctggggagtattgcagggactatggaaagaggacacccatcaacaaaatgtcgggaagagcgtaaaaaaccgtgtctaaggaataaacaacacataaggtggggctttt

SEQ ID NO: 121765 - DNA, 445 bp, Glycine max
  unsure (1)..(445): unsure at all n locations
  Clone ID: PAT_MRT3847_80961C.1
atgaaaataaatcttccgaagtttggtttactcccttctatctgttcgatgaaatgcctcaatgtgtttcacttttatctcgttgttatgtttttactacagtaatagctattcattggaccaacaacaaaggactagttttcagtagtttcatcactgtccaacttaaaaaaaggtgggaaaaatgaagtacgtgttggtgactagtggtgtcatgaatggacttgggaaatgagtcactgcagtaatattgggttaatcctcaatatttgtatttttcttggtcttattattcttgaaaagaatgttgttttgtgttttttgttgtaatagtttagtgaatttgactgactttttgaggctcaggctctggttcttcatctttttcaagttctgagtcatcttcattanggtgaggctctggagcaagttgtgaagttggttc

SEQ ID NO: 121766 - DNA, 385 bp, Glycine max
  Clone ID: PAT_MRT3847_80962C.1
aaaactgaaccccctttttttggttttggatttaagaaacaccctgggggggccttctttccaaccgggggcccttgtttttagtggtgccccgaaaaaatttcaaaagaacctcccaataacaaaattgggggggggggggaaaaaccccccctggtaaagcccgggaaaggtttggatattatacattttttagggggcacgcccaaaaaacttcccccttaagggggggggattaatttcttgggccttctcccaccggggggggtgggccccttccccggggggggggggggcttcttttccaaaggggccatgggggggaggtttaaaaaacctggttttccccccccttttggaaacaagggtgggggggaacattccc

SEQ ID NO: 121767 - DNA, 585 bp, Glycine max
  Clone ID: PAT_MRT3847_80963C.1
accaccaaaggatctgattcattaaaagcaataaatttttcacaaccacacaccattcatttgacatatagggaacacatacataatccatatagcattacttagggggggggcattttttacttttattaaaggcacaaacataacaggggcgggagggaaacccacaaaattaaaacgaaaatcatatagctgttaataataacaacaacccatgcaacataaaacccacatgcagttggggaaggggcatttttttaaaatggaaaacccctcaatgatggaagggaaagcgttgatcttgatgatgttgaaacccccaaaaccggtttccttgaacagccacttccagtttttttcggccctttttttgccaccggcgttgggagcaaaaagcatcatgtcaaatgcaatgccaacgtttggaaaaagttctttgccttcgggtcaaaaaacgtgacccacaattatgacttttcctgtcttctctggaattgccttcctgcagttcttaaaaatcttgatgcagggctcgtcgttccagtcatgcaaaatccatttcatgtaaatagcatcagcactagg

SEQ ID NO: 121768 - DNA, 331 bp, Glycine max
  Clone ID: PAT_MRT3847_80964C.1
agaatgggctactatctaaactctagctatgccaccttctgcaggattattccaaggcttggattagatgaagggagggtgagagtgagaagtttgagaagcatttgccactgtgatttctagaacagcctcgatggcagaggagaataaagatacacttcagtttttctaaattggctaaatgtgaatccaggtggcttaattaatgctgaataactggcatggtcctgttgtgctggtgtctgacagcagggctctgaggagcactcaggatggagtgaagtaggctccagctgtactcaaactataaattccagcaaccctgctgact

SEQ ID NO: 121769 - DNA, 609 bp, Glycine max
  unsure (1)..(609): unsure at all n locations
  Clone ID: PAT_MRT3847_80965C.1
taactctccgcgccagacacctcactttaagtatacacacacatttcatagcgctcaacacttcacatatataatactctacacactctgaagggtatagcgcgaaacccctatatttaatnnnnnnatatgataagattgagattcacacagcacgctgtgactttgagaacactcaatattatatctcgtgctgtggagatgcttggggagacgcttttttctcccattatcattatgagagacatctacatattttgtgcgcacatactctctctcattattattattctttctgtgataagaggtcgtgggacacctcttcttcttcttcttcttgtggagaggggcacgcctctcataaacatactaaacctcttcttcttctctgtgttttnnatatgtctctcgcgccaaactcggcacgaggtattcgtgagaacacagatgcgcatattgagagcaatatacagagtnacactcagtttctcttttctcttctttacatctctacacctttaacnntcacgtgggggaagaaagagatctcaatatgatagtgcccacacantccnnggtgtgcnntcnnnntgcnnnnagctcttgtgc

SEQ ID NO: 121770 - DNA, 295 bp, Glycine max
  Clone ID: PAT_MRT3847_80966C.1
ccggctcgaggtgaagcaggaaagataggaatctcatcagagatagcaactgcaacctttgtttcgattactgtcgcagggctgtcttgggtatttggttcttaagtaactgattgattggtgggagggtgttcactcttaataagtacaagtattattaaaacgataagattgagtatggattatgcaagaattttgattttcaattgtatttagagttttatatatatatatatatatatatatatataatatgtttaagtaattcgtgatttaaataaaatattatttattg

SEQ ID NO: 121771 - DNA, 337 bp, Glycine max
  Clone ID: PAT_MRT3847_80967C.1
cgcacaacgagaaaaaaaccatatacttacttccgaaaggaaactactatcatactgcaaaaacttgaaactgtattgaacatactatcagcaacttcctttacataaacattaccggctttgaacctacaattattctgctataaaattaaccacgtgctttgacttatagaacctaacacaaacccttatttagcaaaaactaaggcccttgcccaacaaaggagactcatactgaactcgactctccactttggcaaaacaataatctttttattttcttaacagccaccacatccatgtatcaaaatcaactcctgattctgtgaagtctccc

SEQ ID NO: 121772 - DNA, 141 bp, Glycine max
  Clone ID: PAT_MRT3847_80968C.1
ctcaaccttgcaagctttgctttgccttattacagctatgaagcacaccatccatcctttatatataaggttatgctggtcaaaattaacctgccctagattcttggaggccttgcggcttaaaaaattcagcaaaaaggt

SEQ ID NO: 121773 - DNA, 593 bp, Glycine max
  unsure (1)..(593): unsure at all n locations
  Clone ID: PAT_MRT3847_80969C.1
caagtattgtattttgtccagcagattctatgacttgacaggactgcagaatggaattctgaagcgagggagagagattttcctcactggttgctacctccgaactcccactggaggttctggacattcacgtcttttgccaacagagtatcttgtgattctgtggggtgaagtaatggtcaaagattttttaattttaaatttggccactgtgaaaattaattggactaacaagaggagtgagtgtgttggttcaacatacatacatgcctgttttgaagttaaatcaaacgatttaatttaatgaaaggtaccctatacactttttctttgtataatatttatcatatacatttatgagactttttaacatcttgattttgntacaacaactnatgttgttttttatcatcccaaanctattgttttttaaaatataaatttttacaatnataaatttgttttacnagtctatttttttcctttttaacanaaaaatttgctatttttgctcatgttcaagagtatcattcttgttttttgaaaatttttatatgataatttnattattttatttttnttagttttgttaa

SEQ ID NO: 121774 - DNA, 400 bp, Glycine max
  Clone ID: PAT_MRT3847_8096C.1
cgtctatctcgtttatgagaaacgagaattgtattagcacagtccagaggaagctcgccaattgacaaggaaagctctctctcggattgaatggctgcaaaaagctgatgtgcctaccatagcacagattgaagagttccactcgatgcagatgatgatgaatgctcctgattcaaatgataatattgatctactgttgagcattgatttgatggttttacaaggagcacgtaaagctcttgcaaacaagattgtttttaatgataagcttgtgatggctaacacacaagaattctttgatgggaattatccagcggatacttgggtaccaatctatgggaattgtatttatcctgttagacagttacctctagaagctgtcggtggcaatgctacatgt

SEQ ID NO: 121775 - DNA, 125 bp, Glycine max
  Clone ID: PAT_MRT3847_80970C.1
gcaacttgttttttcttccacggaggcttacttcatggtttatttgttaacccaccgaccggaggcggccaaacagataatctttcttaagggactcctccagacaaaacagaggccccaaaagg

SEQ ID NO: 121776 - DNA, 489 bp, Glycine max
  Clone ID: PAT_MRT3847_80971C.1
gggacaatattatcaagttggaggattctgagttatgtatggggctggaaactgcttcatttggtgaaagtcgtagtaagaactcataccatacttcagttggccattctgaggaaaatatacatgttgaaggtaggaaaggcccatctcagatgttaaactgtggaagtgaggaatgtgaacagtgcacaaactctctagggagatcaattcctcgtcctgactctttgtacttgccaagcatgcataggtactgcaagcacagttccattactgaaaggatgagacattacagcaactatcaaatggtccacagaaccaggttggggcttccaaaagaaggggaaaatggctcctataactttttggaaccgaaaatcaaggattcaccattggccattgttaacatgcatactgataagttgcaactttttggtgaagatattagaatcagaaatagcgttcctggcgacagtctatttgcacatt

SEQ ID NO: 121777 - DNA, 318 bp, Glycine max
  Clone ID: PAT_MRT3847_80972C.1
cggacttcggctcggatggtttcagcggcatgatgatgccaaatttgcaaccgctgattacgatgcgggaacttcagtgtactttgcattccactcttgcaactgctgcatgcaacctggctggtgtcaaagattcaaacttgaattcacttttgagtataattatcttgaagctgatcttcttgtatagaagctgccatctgggaccctgaaaggaaagaaaatatgattaaagtgaagataaaataagggaagattgttgaggtttgtatgaactttgtttgaatgtgactgtccaattgagaaaagtttggactt

SEQ ID NO: 121778 - DNA, 341 bp, Glycine max
  Clone ID: PAT_MRT3847_80973C.1
gccagatcctagatggctagacgtacatcttattcattgatcgccagatcatgataggggtaaagagcttcgggaaaacttggaccggtgagaccatcaccctcgatgtggagatctccgacaccatagataacgtgaacgctagaatgctagacccggaaaggataccaccttgccggcacagagtcatctttgcaggtaaacatctcgaggatctgttaacggttgccgactacaacagataagaggagaccagtctgcaactggagcttcgccgcacgagttggatgcaaatgtttgtcaagactttaactggcaagaccatcagcctcgaggacgaa

SEQ ID NO: 121779 - DNA, 607 bp, Glycine max
  Clone ID: PAT_MRT3847_80974C.1
ccacgcgtccgggaggttgttatgggatagacttcctactaaggataacctagcgaagaggcaaattcaaactaacagtgacttatgccctttctgtcacagcaaacctgagtctgcttcccatttgttcttcacttgtgacaaaattcagcccctgtggtgggaattcttatcctgggtgaaggaagacagaatcatccattgtagaccaatggataattttctccaacattcacctactgcaggaacacaggctattgctagaagatggaaaatctggtggttggcagctacaaactcaatctgaaaactcaggaatgatatcatctttcagaatcaatccttcgatatctctaaattggcagatagcattcttttcgttatgtggacctggctgaaggggtgggaaaaggatttcactgtccctttttcccagtggtcctcagcaatgtctttagcatttatctaatgctactaagaagggcaggttttgtgtgttgtattgtgatggttgtctgtatggctaaatttcagaagtcaattcttcattgtaacctgtagtaccactggtacttttaattataaatataaattatctttgcagttc

SEQ ID NO: 121780 - DNA, 644 bp, Glycine max
  unsure (1)..(644): unsure at all n locations
  Clone ID: PAT_MRT3847_80975C.1
gagtctcgtgtggtgtcataacttctgcatgctctctattaagaagtgtattcaatgaaattagtttttatacaaagttgtaaagctaactaactaactaattttgtgaagcaacaatgtggaagataactgtacagtgccaacagctacaacaggcacaacaatatgatttggtaaagtgattgccttattgaacactattgacaagcaacatgagtgctagcacctgaatcaacaagccagcaatcacgaaggagattaaaggaggaggcagacataatcataccattagaatcaccatgattctgatggggaacagtgacatttgaagtttgaccctgtaggagactcatcaactggttgtactgctgtgctgtaagttgaaattgtgatggagaatcctggctcatggaactcaaagagacttgattcactgacctagaagaaacttgattggctgaattagaagaaggcttgttcttcttgtaatttggtggataaccattttgtttataacattgtgctttagtgtgaccctgaattccacaatgagcacaaataggatgatccttttgtccacctttattcttggaatcaaaaccatttttcaccccccnnnnnnnnnnnnnnnnnnnnnnccnnna

SEQ ID NO: 121781 - DNA, 339 bp, Glycine max
  unsure (1)..(339): unsure at all n locations
  Clone ID: PAT_MRT3847_80976C.1
gtcgnccttttttttttttttttttttaaaagataattgtgtaacaaaatcaagcattaattttcagtggagcacaacccaggcgaaacttttttaacggaaggtgggtggtggcaaaggcgtaagaaaagacactcgacaaaaagggggatttggctggggaactgaataaaggttttactacaacaaccgggcctggaaaactgcttaagggaaaaaaggctgcccgggttttaaaggggggcgccccctctttttggttccctaaaaaaataaaaccgggttctttttttttgggccaaccgggttttataagaaaaagcccccagtgggtttttt

SEQ ID NO: 121782 - DNA, 260 bp, Glycine max
  Clone ID: PAT_MRT3847_80977C.1
gtcaaggctgagaacgggaagcttgccatcaatggaaatcccatcaccatcttccaggagcgagatccctccaaaatcaagtggggcgatgctggcgctgagtacgtcgtggagtccactggcgtcttcaccaccatggagaaggctggggctcatttgcaggggggagccaaaagggtcatcatctctgccccctctgctgatgcccccatgttcgtcatgggtgtgaaccatgagaagtatgacaacagcctcaagat

SEQ ID NO: 121783 - DNA, 271 bp, Glycine max
  Clone ID: PAT_MRT3847_80978C.1
ctcgctcaaaaaaattttccgagaaaacaaaagaaaagaaaagaaacccttccttccgttgttttctgtatatatccatcctttttccttgcacccccaacatgataccctcggaacattattggacccaaacaagacctaaccattttttgggtcatggatccgcgacgtgctcaacgagcggcgcattgaccctaaggtccgtagggtcgggttcttcgctccacccgaacccgacccgatctaattcgaagtctctccctcggcaaac

SEQ ID NO: 121784 - DNA, 299 bp, Glycine max
  unsure (1)..(299): unsure at all n locations
  Clone ID: PAT_MRT3847_80979C.1
ccggggnaaatggccagaaaaactcgtggccctaagacctagaccggggcccagttgggacctttaatattggcccagtaaatcctttttaccggaaaaaccttggggggttaacaacccaaggctggcttattggccctttgaagccttggaaggggcaagggaaataaaacccatttttttaacaattcgggggtcaataatccgggaacggaccgaagaacatgggggtctgggaaaattaaaggggatccgaccccttggccgaccccttggccgaacccgtggttcaacccgga

SEQ ID NO: 121785 - DNA, 275 bp, Glycine max
  Clone ID: PAT_MRT3847_8097C.1
gactcatttataacgcctctgaattatctgttgcattcgacacgaataccacgcgtctctgattcttcatagttgaaccacttcaatcacattagatgtgggtggagaaaacaaagatagtgtttgcttccattcctttaagatttgctcagcctgggtggcgcctgaacatagtaaactgatgcaccacgccgatcacggtcgaactggaaatgatgaaggtccttcagggacagacggtaaacccattccagatcgagtaccggttccacgcc

SEQ ID NO: 121786 - DNA, 699 bp, Glycine max
  Clone ID: PAT_MRT3847_80980C.1
cctagtcactctgctattcttttttctctgccccctctttttttttttttttttcttgttagttaaaggcactggcccaagaaaaattctagagtactgcattctgtggttctggttttcagcacaagcatgtctgagagtgaatcggctgcagcacacaaatatgggggtggacttctcacttcaagtaaccatggtgtcaagacagaaggatttgtgcaaagaggccactcttggtatgtggctactgatattccaagtgacttccttgttcaaattggagaagctaacttccacttgcacaagtatcccttggtatctagaagtggaaagctgagtagagtcatatatgaatcccacgacccagatttgaataagatagttatcgatgatatccctggtggggcagaggcttttgagcttgcggccaagttctgctatggaattgctgttgatttaacagcaggcaacatctcaggcctaagatgtgcggcagagtaccttgaaatgactgaggaccttgaggaagggaatcttatattcaaggcagaagcattccttagctatgttgttttgtcttcatggagagactctatagtagtgttgaaaagctgcgagaagctgtcaccgtgggcagaaaaccttcaaattgttcgcagatgcagcgagtccattgcttggaaagcttgtgccaatccc

SEQ ID NO: 121787 - DNA, 1614 bp, Glycine max
  Clone ID: PAT_MRT3847_80981C.1
ttccacaccaaaattcagtgaggagttgaagtttgcttcttgtatgagaaaattcacattcaatggacttaaggtggcaactaggaatttcagaccagagagtcttcttggtgagggagggtttggttgtgtcttcaagggttggatcgaggaaaatggaactgcacctgtgaaaccaggtactggactcacggttgcggtcaagactcttaaccacaatggacatcagggtcacaaagagtggcttgctgaattaaattatcttggtgatcttgtccatcctaatcttgttaagttgattggtttctgtattgaagatgaccaaagattactggtttatgagtttatgccccgaggcagtttggagaaccacctctttagaaggcccctgcctcttccttggtctatcagaatgaaaattgcacttggtgcagcaaaaggtcttgcttttctccatgaagaggctcagaggcccataatatatcgtgatttcaaaacatctaatatactattagatgcggaatacaatgccaagctttctgattttggacttgccaaagatggtcctgagggggagaagacacatgtatctacaagagttatgggaacatatggttatgctgctcctgagtatgtgatgactggacatttgacatcaaaaagtgatgtatacagctttggagtagtgctacttgaaatgctcacaggccggcgatccattgataagaaaagaccaaatggggaacacaatctggtagagtgggcaagacctgtactgggagaccggaggatgttctaccggataatcgatccccgccttgaaggccacttctcggtcaaaggggcgcagaaagctgccctgctggctgctcaatgccttagccgtgatccaaaatctagacccttgatgagtgaagttgttcgagctttaaagcctctgccaagcctcaaggacatggcaatctcatcttatcacttccagattgcgcgcgtagatcgaaccatgtccatgccgaatcataaaaacggtattagaacacagttagtatctgtgccaaggaagggtcaacctgtaaggacattgtctagtccaaatgttccacatggttctccataccttcatcataccaagtctccaaaacctattgggtaagaataactgttcactgtctttaatttgattgtctattcgttcagttcccacaaattaggccaccagctctacatacagcaactgttgtgtgtctgggagagtttatctgaaacctgatggaattattaaagtcttagtttcactatataatctcaaataaggtaagtgcatgagacagtttaatgttacatagtaatagtagggacatgtcatatacagttttcaagtatgaaactgttattcactgaaattgtttaactcttccaccttgtcttgggtttcgttccttctagaatgtattttttgtaaagaggaaaaaaaatgtggtgttaactcatgttagacatagatttttacacactcattggacaatatacatttcagtaaatgctgattgatgcaatcgaatgttgtacttgtactagagaaatgtttgagtgacctaaaaagtgatgatgagc

SEQ ID NO: 121788 - DNA, 1356 bp, Glycine max
  Clone ID: PAT_MRT3847_80982C.1
aattcggctcctagtttcctaattcccacactaccaatctcaacaacaaccgaaaaaagtgaacaaatgattgaaacatcagaagcttcagtttacggtgtgatggcaagttggctcacaccctccaatctattcattttcatcaatctcgtcattggaaccatcgccatctcctctcgtttcgccaacacgaccaaaagacaacaccagctcgtccgttctccttctttgctagaaaggcttgcgtcctttaacctttgttatcacaaacatgaaccaacaacaaggatgatgacgacgacaacaacaatgtttcacagagttgtggacccagtcgagcgtctggatgaattcaggctcgaccaggtcccctcctcgtccttgttggacagggttaggtctttcaacctggggttttataagagtgataatattgaaagacatggtccggtccataattctgacttgccccaactggtccagctggatcggcttccttcttcatctttgttggaccacgtcaagcctttaaatcttgagatcgaaagacctgacctggtccatagacttgactcgtcccagcttgatcgggtttcgtccatatcattgctggaacgagtcaggtcatttaatcttggctttagtaaagtcgagatggaaaagcctgattcgatacagcaacagctaacccgtgctccctcgatcctccagcggcttaagtcttccttgtcgtttgagcctgaatccgaagttaccggtggtggagagttggcggaggaaactgaagaagaaggggtggatgcaaaggctgatgatttcatcaacaggtttaggcagcaactgaggttgcaaaggcttgactctattatacgttacagggatatgctcaaacgatactaagaactagagaagagaagagaagaaactcttggatccaatattttccccaatagttcattccttcaccatcagctgcatgaacacgagaattctgctagctagggtgttgtttgtttgtttgtaatggtatggtgttccgcaaggcttgataaaccgttgctagttctttttttcttgtatactgatttgtttgaactgattatagttcataaagtacaattaattacaattcccatactgaaaattttgtagtttgcgttacttcttacggcgaaggcataaggttacttacgttaaatttggagaaactacttataaaaccgccgctagggttatcgccattttatttattcatataaagtttttttttttaatttcttgagggaaatttatatatagtttatatgtatcatatattttaactatagtaagtcatttttgctgtttgcgtggaac

SEQ ID NO: 121789 - DNA, 303 bp, Glycine max
  Clone ID: PAT_MRT3847_80983C.1
tgttgatcgacatacctagaaacagtgtgatgcacttgaaagcgcatgcatacttcattgatacaggaatcggcagcacgtcggatgcgaaacttacaatatgttacgtatcgaatgaagactggctatggtgcccgtacttctgaagacatatgcgcatgaagaaggctgggtgtgaaagcacacaacatgtatggctcttataccaatcctgattagtgctgaggagccacacagggacacatacatggggaacaaggtgcatcatactccaaaacaggtaatcaacaagcttactgttat

SEQ ID NO: 121790 - DNA, 183 bp, Glycine max
  Clone ID: PAT_MRT3847_80984C.1
gattcgccagctcgtatacgactactagtgggcagatcttcgaatgcatcgcgcgcaccgtacgtctcgaggaattcctgcaggatatctggatccacgaagcttcccatggtgacgtcaccggttctagatacctaggtgagctctggtaccctctagtcaaggccttaaagtagttcgtat

SEQ ID NO: 121791 - DNA, 195 bp, Glycine max
  Clone ID: PAT_MRT3847_80985C.1
gatcacaacagtgtcacagaggaaacgtacttttttttttacacaaattatcatatttgagtgtgatcgatggcagacccagacgcttatccggcgcatccgtagccctccacctccgtgccgatgccggcggtgcccagtgccgtgatcggcgtccacttctgtgcgccctagccgctggatctggccgtggtg

SEQ ID NO: 121792 - DNA, 277 bp, Glycine max
  Clone ID: PAT_MRT3847_80986C.1
catacgctcgagctcgaaccgctcgagccgtgacgcccacgctcgcacggccgtatcacgccgcgcgtacgttacaggaaccacctctacggccagggaacggatcggccggtgaacggagcggtttgcggctttgattccggcgagctgcgactttttgtgtcagagagtgaaaatgcgacgggacttgaatccatttcgtcggtaatagaggaacgggattcgaagaagtttgtgtgggagaatggttgcttgcttcactgtgagcttccaatta

SEQ ID NO: 121793 - DNA, 270 bp, Glycine max
  Clone ID: PAT_MRT3847_80987C.1
gacgagcgctacaagaacagggagctgctcatcatgcgatccatggatcactgcaatgctgtcaccctgaagcattgcctcttctccaccacaagcagagatgaactttctctcaacttagtgatggagtctgttcctgagtcactacatcgtgtgctgaagcactacagcgatatgaaccagaggatgccgcttatgtatgtccaattatcatactaccagatatgtcgaggtttggccagattccacacggtacctggtgcttgccac

SEQ ID NO: 121794 - DNA, 240 bp, Glycine max
  Clone ID: PAT_MRT3847_80988C.1
tgtttgagtttgcagtctaggtgagcaaaaatgagaaatccaaatcctataggcatgtgttttacgtgaagaaacgttaattaggagcaaaaaaacgaaaggaatgagagaagtaagagattgacttgttattaagatgagaagtacgagctttaccaatcttctccattcttcgccccctcccgcggtttccttgccccccccccccattgttctgcttggcttttgcgtttactttta

SEQ ID NO: 121795 - DNA, 568 bp, Glycine max
  Clone ID: PAT_MRT3847_80989C.1
ctggctctcactctcagccactctcatctcgtctaaacccttatttccaaaaccttcaagcaacctcgcgactccaaacctcatctgtgcaacttcaaatccttgagctatctcgctatttcaaatcctcactctcaccactttcattctctatctcatctctgtttccatttctctgtggtgacgcttctaacaactctcactcacaatagcttcgttcctaacgccacattcacaactcacaagaccgcataactctacaaatgtggaggattccaccgaaacacgcagaaacagctctatctgcacttttgagccttatgcctcatagctcctccaagctcctctctcaagtcaatcagcccccaagttttgtgcaatgtggaatgtgacaaggagttcattttgtgcgaatacaatagagatgtcgactcttacaagttcatttcatttttcataatcatccctcctgtatctggtttttgctggattcaatatgcttaatttttttaagaactctttgttgtcaagcatgtttcacttttatgaagtatatttagttaatttt

SEQ ID NO: 121796 - DNA, 702 bp, Glycine max
  unsure (1)..(702): unsure at all n locations
  Clone ID: PAT_MRT3847_8098C.1
gcagtgttgttatatagcggccatggtggcgccatagcagaatggcgtggtggttttttttgccaaccgccgccataggtaatttgtgaaggaaaacccgccatggcgtgtttatatggcggaattttggccttctgccatgttcccaccatccgccattaataacactgatccagtggaagatggttaatcataactgattgggataagaatatagttatcttacttatcctgaccctgttagttcaaggttttatacagaattgagtttcctagttcctacagttttactatgctctgggacaaggtgattgccttcagccagttcatgctatattttctcaatatattcctgcaacttcctattttcaattcctcttctttatctatttataaccttaatgtgaaaattatagaattgtttgactggttggggattgttgcatcttgatttaataagagtctaacagatgcaaaaataaaattgataactaaaatctttttccaaacccaggagagggggtagtggtgatttgaaataagtgaaagttgcagcttgcaactaaaaggacttctgtaatatttaattattttttttttatatttgntattgattatgttctgcaacttttttgttctcctttttttaagaacgcatttgtgtagtatgaagcagggtttctttaaacacatcaatttatt

SEQ ID NO: 121797 - DNA, 279 bp, Glycine max
  unsure (1)..(279): unsure at all n locations
  Clone ID: PAT_MRT3847_80990C.1
ggntngnaatngagccgattnggctcgaggagagantcaagaagaaggganatgaagtntatgcanatggnggatgaaattgatgagtatgatgttgganaactcaaggagtacganggcaagaaattgntttgagctacaaaggaagggttgaagctagatgaatgagagtgnggaagagnnanaagaagaaagaggngangaagaagtcntttgatgacacntgcaaggtcatnaagganattcctgggngananagtggngaaggttgttgttatc

SEQ ID NO: 121798 - DNA, 657 bp, Glycine max
  Clone ID: PAT_MRT3847_80991C.1
ctctctctacaccttcaaaagttccttgctgctcatcaaggggtgtatgttagatgatttgaaaagagtgggtcaaatcaatagaaattcccctgttttgatctgttcgcagtttggatggaattgcaggggagatttgatccttgttgctcgcctaagggtgcttggcttgtgcatcaaatgatttgaaaagagagggtcaaatcaaaagaagttcccctgttttgatctattcacagttggggtagaattgcagcggattttgagtctgacagagagctttcctctttgtgtgtgtgaagcgactgatgaaatctcaaacatagatagatagatcacatatgcacgttgacagttcagaaacgatcatgaagcacgtgcgcaccccaattttttctctcactgtacacctgcaggatacttttgagagagaagctaactaacaagaatcaattattgggagttgtgtgttgatgggttgatccacagatcgttacaagattcatccaagtgaagtaacaacaacctattttactccaaaaaaacccgatggcgacatactttcatcatggtaactccgaaatccaatcgggtggcgccgacggactccaaactcttgtcctcatgaaccccggctatatccactactccgacgcg

SEQ ID NO: 121799 - DNA, 401 bp, Glycine max
  Clone ID: PAT_MRT3847_80992C.1
gctaaatgttgttggcttaccaaaacccttaaaatgattttgattctaagccccattatttttcatttagaatcaaacagtgaaggctttttacattgagacgtagagttgaaatacaaggacacaacctagctagccctttatcattcatgcctaatagaacaatttctttatctcggttccaactctgagatagttacttcattggttggagaattcatgttttgcctaaaatcttcctcaactaaaactctttccattaagaaaaccggcttttttggttgtggtaaaacactttcactacttaacattgtaactacagatgtggtatcgggtctatctgtaggttgatgttgcacacataaaagaccaatatgaatgcatcgtaaggcttcagattg

SEQ ID NO: 121800 - DNA, 600 bp, Glycine max
  Clone ID: PAT_MRT3847_80993C.1
gaaacccaaacgcacgcattctctttctctccattctgtgattctattctttccttctctcaagttccattcgcttactgcactatatgcttcctagaaagagagcgagcgaaggaggagtggttgtagaaggagacactgaccccaccaacagttccaatagcggtgcggcgtcgttttcgaagaaggctcggatcggaagccttgctgcctgctcgggtgccggtgctgcggaatcggcggtcaacgtcagcggccagggattcggtagcggcagtggtgacgacagcgtcgggaactcggtcggaggaatggcgttggggaattcgcaaccggcggagatcgatgaggatctgcacagtcggcagctcgctgtgtatggccgggagaccatgcggaagctctttgcgtccagcatcctcgtttcggggatgcagggtcttggagttgagattgccaagaatctcattcttgctggggtgaaatctgtaaccttgcatgatgaaggaaatgtggagttatgggatttgcccacggattttgtgtttaccagaaaatgatggtggcaaagaacaagggcaaaggctttttgctggttaa

SEQ ID NO: 121801 - DNA, 343 bp, Glycine max
  Clone ID: PAT_MRT3847_80994C.1
gagaaaatcggaagcaactcataactcttaacattgagcaatatttctctcttctctttctttcccatttctcgctgcaaaacactttcgcagggtgggctatccatcaatctttgtcccattcttttcaacctccactcgtttcccttccctccctcatatagccgttcttttcaatttcagttacctccatatttttcattttttcttatattaatagcctctttcctacttactctctcaccagcgtattcctatctccattaccttaactgttcgatttcagacttctctccttcgcacaaactcccgttcttaaactcaaaatacttctagtctcttc

SEQ ID NO: 121802 - DNA, 840 bp, Glycine max
  Clone ID: PAT_MRT3847_80995C.1
atgggagagctggccactgagaaacatgttcgatatatattatcagttgaaaagaggaaagataactttgaatctgtagtaatggagcatctgagaatgaatggggcatactggggattgaccactctggatcttctaggaaagcttcattctgtcgatgttgatgaggttgtttcatggttgatgagttgtcagcatgagtcagggggatttggtggaaatgttggacatgatccgcacatcctgtatacactaagtgctgtgcaggtgttggctctctttgataagctgaatgttattgatgtagataagacattgtcagcctgcaaaatgaagatggatccttttcaggggatatgtggggtgaagttgatacgcgtgaagtacattataagttgcaaaaatatggatggtggttttggttgcactcctggtggggaatctcatgctggtcaaaggtcactagatcttgttgacaaagacctacttggttggtggttatgcgagcgtcaggttaaatctggaggtctgaatgggcgtcctgagaaacttcctgatgtctgctactcatggtgggttctttctagcctgatcatgattgatagggttcattggatcagtaaggagaagcttataaagttcatcttagactgccaggacacagaaaacggtggaatttcagacaggccagatgatgccgtggatgtctttcatacattcttcggggtggctggactttcacttcttgaatatccagggctgaaaccggtagatccagcgtatgctttacctgttgatgttgtaaatagaattttctttactaaagaaggacttaagtag

SEQ ID NO: 121803 - DNA, 333 bp, Glycine max
  Clone ID: PAT_MRT3847_80996C.1
acaccaaaaaaagggccgtttttttaaaaactttttaaagccaatttccaattaaaaggggtctttttaaggtttttaaggcccccgcccccaaactaaaaattttttttttgtaatgccccaattttttaagtaaatagagctaacagaggtgctttggtttcgggatccctaaatttccctaatcacatttgcccaagaaaaaaacccccggagttttttccatatttcttttttttgggaacacaaatttttggggaaaaaaaacaaaaattttttttttttttttaaaagggggggattaaaaacctaattgttgaaaacccccccccc

SEQ ID NO: 121804 - DNA, 2206 bp, Glycine max
  Clone ID: PAT_MRT3847_80997C.1
aactagtaggataaatttgatggttgactacaatactgatcaatctttacatgtcgtatcactgcaatttaactaaaagatgctcaaaatgttcacactgtttttaagaaatcaactgtttttggactggagatgggaggagggggtccaactcccaagagtgagtcttacaaacccaagattttgtcattactggaaaattatcatcgaacttaactacttaagtccttctttagtaaagaaaattctatttacaacatcaacaggtaaagcatacgctggatctaccggtttcagccctggatattcaagaagtgaaagtccagccaccccgaagaatgtatgaaagacatccacggcatcatctggcctgtctgaaattccaccgttttctgtgtcctggcagtctaagatgaactttataagcttctccttactgatccaatgaaccctatcaatcatgatcaggctagaaagaacccaccatgagtagcagacatcaggaagtttctcaggacgcccattcagacctccagatttaacctgacgctcgcataaccaccaaccaagtaggtctttgtcaacaagatctagtgaccctgttatggcaagggcccccacacaacagaaaatttgaccagcatgagattccccaccaggagtgcaaccaaaaccaccatccatatttttgcaacttataatgtacttcactgccttctccacattgattttatccaagcaatgtaatattgatagacaacaaatagcaatatatgagaaccgcgtatcaacttcaccccacatatcccctgaaaaggatccatcttcattttgcaggctgacaatgtttgtgaccttatctacatcaataacattcagcttatcaaagagagccaacacctgcacagcacttagtgtatacaggaagtcggcggatgatgtccaactaccacactatccctctaactctctcccactctccgtccatcgcccccttcaagagttgaaggaaatggctgaagcacaactacgagaccagcatggcaaccctgtcccactcaccgatcaatacggtaatccggttatcttaactgacgagcgcggtaatcccgtccaactcactggtgtcgctaccaccgctaccggcacagcaggttctgggtttgggtcctatggtaccggtgcttacggtggtggtgcaagtgcaaccaccgttgcagatcttttggcaacccaaccaaggagtggcagggaggctagagagcttcgtcgttcctccagttcaagctctagctcgttttggataaatgttttatagtctgaggatgatgggcaaggtgggaggaggaagaagggagtgaaggataaaataaaagagaaactaccaggggtaggaggagggaataataataaggagcatgcacacacaacaactgctccaaccaccgccactaaccaccctgctgatcagcatgagaagaagggcataatggagaggatcaaagaaaaattgcctggccaccacacccactgaaaacctgcgttccattaccatatgtttgcgcctgtctgtcttatatatgtaacataaagtactatatatgtcatgggctgagtatcttgtgcaattatgctctttatattatgttcagaatatatatctgattatgtcactatcttgattcttttgaatcatgtatatggatgtgttccatcttctctttgtatgcaccttcgattaatatctcggcctcgatcgcatcagtgtgacttctgcttttattttataataataacgcttctttataatatcaagttcagctaaaataaactttttcttatctttatatcattcattcatggtttttatcagggctgctacacttcatggagtcggtaagacaactcatcaaccatgaaacaacctcatcaacatcgacagaatgaagctttcctagaagatccagagtggtcaatccccagtatgccccattcattctcagatgctccattacaacagattcaaagtcttctttcctcttttcaactgataatatatatcgaacatgtttctcagtggccagctctcccatcttaccagtaaaggtggtggttgtcaatggcaccgtcggaatccagacccagaagggtcgcggcagtgatacgaaggagaaatgctaatgctctgttagtttgtgccgaggtc

SEQ ID NO: 121805 - DNA, 308 bp, Glycine max
  Clone ID: PAT_MRT3847_80998C.1
tttaaaagtttaatgggaacaaagaggggggggtccatcccaggagcgaatttctacctcactggttgaaaccccaaggccatcacttttctctgcctcggcttttttgtcatcaagataatggtaatacacataaaacaaaaagccccacactgttaacaacaaggctacaaacttcaacccattgaacttgtcatggaagaataacaagtgccagatgggaacactatgcaatgcctaggtgcctatcacatttgaaaacactgaacacccttgataaatgaaccctagcaaaccaattgaagata

SEQ ID NO: 121806 - DNA, 852 bp, Glycine max
  Clone ID: PAT_MRT3847_80999C.1
cggctcgagcggctcgagcggctcgagctcgagccgtggtagttctggattattacggttttctgaagtggtcagtcttttccatgagtttggccacgtggttcaacaaatttgcaaccgtgcatcatttaccagaatttctggattatgtgttgatcctgactttgtggagatacctgctcaactgttagaaaactggtgttatgaaagctattctctcaagttgatttcaggattttatcaggatattacaaaaccgttaaaggatgacatatgcaaatcaattaaaagatggaggacttctttttctgcacttaaattgaagcaagatattctctgctgtctttttgaccaaatcatacattctgcggataacatagacattcaggaattattcaagcatcttcatcccatggagatgttaggcttgccaatattagaaggaaccaatccagcgtcatattttccttctactgtcattggttatgaggcagcttgctacagtcgtatatggagtgaggtttttgctgctgatatattcacctcaaagttctgcaacgatgtttcaaaccagcaagcgggcaggcaattcaggaacaaggtattggcctcggcaggagtgaaagaccccattgatgtgttatcagactttctaggaagagaaccatcaatccaagcttacattgagaacaaagtcaagtatgttttgtaaggctttttggccggacgtgtacattgacaaatttttatttggccagaatcagtctattggcactttattgctttttttggagcattaaatgaaaattaatgggtcagtgtaaaaattagtacatattatttttattatgc

SEQ ID NO: 121807 - DNA, 425 bp, Glycine max
  unsure (1)..(425): unsure at all n locations
  Clone ID: PAT_MRT3847_8099C.1
ggnnnannngnnntnnnnnnnnttttnntntccttcctcngngtttnccccaaaactaaaaattcaaatctaaaatgaaattcctcacctaacgccccttatatttccaaaggcctgaattaatttatccaaaattaaataaataaaccatttcccccgaccaataattttcggaaaaaaaagcccaatttaaaaaaaaaaaactaaaaacccttttacaaaaaaaacccattaaagttttaaaattccctaaaggggccaaaattcccaatggcacacattgcaccccctgaaccttggagagcccccaaatttttttcgggaacccctttttttttaccgggggaaataatgggcttaattttggaagaaggggcttcccccggacccccagagggattttttccccgggaaaccggaaggga

SEQ ID NO: 121808 - DNA, 661 bp, Glycine max
  Clone ID: PAT_MRT3847_809C.1
aatgcacgaataattgtttgtaaggtttgaatttgaaatcatccatggcaggttcattgcacgaggacgacaatgaaatctcatagaagatagtggtgacattgttcaaggctaaattgatttttgccttttcctctaatgttgggtgatgcacataacctgcatatgtacaagttgttttcggtggtgaaaggaaaggtagatacgacgtcgtttgcaatgggaagttgtgatgcacataacccctttttttcaattcgagtctaacaagtctttttttcaaacaccttacatacttattcctatcatccaccatatcacacattactctcaatacttactcaaaaccagtttaacagaggaaaaaacactcaagcctaacccgaattcctccctaattgaacccacaacttcctagtgcaaactgcattgtatccacctttccctttcagcaccaaaaagtcaaaaacttatacgaatccaagtgttatctatctcccagtaatgacgaaaagtgcaagaagcaattaaacgcagaattttcacctcaacaaggaacttcactgaaccttatcattcgagcctccaacaatgtaatcaccattttctacgagactccattgtcaagtaagaaccggcctaccatggattggaattcaca

SEQ ID NO: 121809 - DNA, 536 bp, Glycine max
  Clone ID: PAT_MRT3847_80C.1
gagggggggggaaacaaaagcctggggggggcccccccaaaacatggggggtttccatggataaaaaaaagggaaacgggtttttctttccactttggggggaaaattccccaacatctcaatttggggaggacaagggggaacaaaaaaatttcccaccctccaagcaaaaaggggactaaaaagggaaaataacaataaagaggaaaggggaagttttttttattgggaggggggttaacccgaacgggatacctttcatattttaaaaagggggaacccttccaaaaaaaagccctttccaaactgatttcatggaaacagggggtgaattaaaaacagccccaaaatacttttgggaaacaaaaaagggacctttttccaaaaaaattcccatttttcgggctctctcaaaaggtggaaccaagccttccatttaatttttggacaacccctctagcccctcttaaaagggggaaaacccatccaggggaccctccatcactgggggaagggactcctaaattttttccaag

SEQ ID NO: 121810 - DNA, 336 bp, Glycine max
  Clone ID: PAT_MRT3847_81000C.1
agctgatgcaatgactggtgatatgaccaccatgccagacactggcactggaatgaacccatctaggagtgtagaagctgctgttatatacaaccaaaatacgccatggtacgaccaatggaccttttgtgtaggaaccataattggggcagtcattgcagactccaaccaccaggtgatttttagagccagggcagcccaggccgtagagtcattcaagagtaacccccataaatgagaacactatgtatttatgacaactggtctagctgaaagacgatcatgagcaacattgagggctatatggcaagcataattatgtgcaatgcttcatga

SEQ ID NO: 121811 - DNA, 2861 bp, Glycine max
  Clone ID: PAT_MRT3847_81001C.1
gacgatctcgccattatgctggcactaggtatttgaggcgaggtgtaaatgacaagggtagagtagctaatgatgtggagacagaacaaattgtatttgaggatgttcctgaaggtcttccagtccaaatatgctctgttgtccagaatcggggttcaatccctctcttctggtcacaggaaacttcacgtctaaatcttaagccggatattatattgtcaaagaaagatcagaattatgaagccactagacttcactttgaaaatcttgtcaaaagatacgggcatcctgtaataattttgaatttgattaagtcacacgagaggaaacctcgagagtccatacttcgttctgagtttggtaaggctattgatttcattaacaaagatttatcacaggagaacaggttgaggtttcttcattgggatcttaaacattttcagagcaaagcgacaaatgttttgctacttctgggaaaagtggctgcatatgctttgacagtaacaggttttttatattgtcaagtgccaccaactcctagacctgaagactgtataaaatgtccatctattagctttcaatccacaagacaagctgatgtcgacaacaaagatggtaatactttagagaggaaacctagtggagaaagcaaccttgctaacggaaaccattttgtcaagccacctatgttccagaggggggttctcagaaccaattgcatagactgcttagatcgcacaaatgttgcacaatatgcatatgggttggctgctcttggccaccagcttcatgctctgggaattattgaccacccaaaaattgaccttgatgatcctctaagtgatgatttgatgggattttatgagcggatgggtgacacacttgcacaccagtatggtggttctgctgcacacaaaaagatattctctgagaggagggggcaatggaaagctgcaacacagtcccaagagttttttaggactcttcaacgctattatagcaatgcttacatggatgctgaaaagcaaaatgcaattaacatattcctggggcattttcagccacaactgggtaagcctgctctttgggatttgggctcagatcaacattatgatatagggagatatggggatgatgatgcaagcttatgtggtaactctgaattatggctttttaggtcatttgtcaaaaggtgtttctcagatggaagcatcattgatggcaattctacacctatgtcaaccccaaatccaaagcttgaaaaattctcaaagctaggtttgcaggaccaatcagaagaaggaagcaaggctttttgtgagtcatcgcctgaaatatcaacttcttctgagactgagagtgacatgtcattttcaaggtacactcccttaatgcctcatagacatctttttggagatatacaaagagagcgcttctttcatagtgaccatatttcctattctgggcatggagattcattcagctcttccaactttgttgacctggattggctgtcttcaggaaattcatgtgaagaagagccatttgagaggttatcaattaccaactcttcgattgctaggctttcttcagaaaatgttatcaatggagttattatgggaggagatactccctccactagtgatttggactcaaacaataagggaagagagcgaactgggtcagagttatccaaccgtgatggccggtccaaagttctagaggaatttcctgatacttttgtaaactgggtgactaatggacagacactttgcaattgaattttcacatagaatggtcctttgcatttatatatatgatgtaaatttatttaattgacttggcttgcccgaaagatgctgaatagaagaagagactagaatgagctaagcatatgatacagacggggcaggaaaaataaataaacaggctttcaattcaagtaggcttctctgtaaggtgccgatcgatcgcagaagaaatcctaccggctttcttggtattgacttgaatcattaattctgtcgtgaaaatctcaatcaaatcttgaggtataataggacagagtaaatagcaagctgttgtaaaattgtttttttcttttcagctttggagcttattgtcttactttttctttcatcagttcatgaccatattaggtgcatttgtaaatatgtatgttaccctgtatgtctgagctccacttctagaattgcaaataattaattcttttaaataattttgcttcttgtaatgtgtaattctctcccgctgtcaaactagcggtgatttatgttttcatgttatggggagctagcgaaggagggagtggatgacctcgccggtgagcatgaggccggggtagagggtgccgccgataatgcggccgagcgggtaccatgactccgagtcgaaccagttccagaactcggcgaagccgttgcgtgtgaggaagagcgtggtgcggtagttgaagtaggggtcgaactcgtggatcatggactcgtagcggagaacgctgaagaggcgcgtgatgaaggcgaggacgtagatgagggagagcgtggcgacgcggatcagaagctcttgttgcttcgttttgagctttagggttttggggagagtgaaggagctcatggaggttttgagatcttgcgccattggagaggatttggtggtggtgacgaccattgttgggattagggtttcatggagaaattgggaatgggagtgagtgagattggacgagtgcagtgcagtggatctgaatctgaatttggtggagatggaagggaagagagtgaggagttgacggtttgcctgacgcgtgggtctaattccggcccgagaagcctggggtt

SEQ ID NO: 121812 - DNA, 506 bp, Glycine max
  Clone ID: PAT_MRT3847_81002C.1
gttatcttcgtcaaccgcgatgagggggtggcgagccataaagcaggtgactacatcggtggatacatgattgcaagaattgttcaatttcgtactaattctttgtgggcgaatacttatagggatgaaaattacttctgtgctggacacattctttacggataggactatttttcactattagtttatttggcgaacactctgctgatatgatatacgacttttggtgaaaattaaacatagttctgtttctattgataactctatgttaaattacaatttataagggtcgaaaatacaggattaatgatcgcactcgccttatctggtgtgggacgatactggatgagacatttttatttctctccttactttaactcgttgctggcacagactttagttgagatcaaagtgtgctcatttgaaagtactgggacgttcgtcaaacgatacttttgtaaattttatggagacatttcttgtgagaaaaattttacttggattga

SEQ ID NO: 121813 - DNA, 668 bp, Glycine max
  Clone ID: PAT_MRT3847_81003C.1
cggacgcgttggctttgacagtaacaggttttttatattgtcaagtgccaccaactcctagacctgaagactgtataaaatgtccatctattagttttgcatacggaaatatcgataagggaagctttcaatccacaagacaagctgatgtcgacaacaaagatggtaatactttagagaggaaacctagtggagaaaacaaccttgctaacggaaaccattttgtcaagccacccatgttccagaggggggttctcagaaccaattgcatagactgcttagatcgcacaaatgttgcacaatatgcatatgggttggctgctcttggccaccagcttcatgctctgggaattattgaccaccccaaaattgaccttgatgatcctctaagtgatggtttgatgggattttatgagcggatgggtgacacacttgcacaccagtatggtggttctgctgcacacaaaaagatattctctgagaggagggggcaatggaaaactgcaacacaatcccaagagttttttaggactcttcaacgctattacagcaatgcttacatggatgctgagaagcaaaatgcaattaacatattcctggggcattttcagccacaactgggtaaacctgctctatgggatttgagctcagatcaacattatgatata

SEQ ID NO: 121814 - DNA, 190 bp, Glycine max
  Clone ID: PAT_MRT3847_81004C.1
tggggattcggcgcgtacatggacaagaaacttcagagttgcaacaattcctaaagagagatagaaacaagaaagagagattggagaaaaagataacacgctctactaaaaaaattcgaaactcttcagtttcaattttgaatttgagaaggtgggtgtgcatggattaaattagcagaactagatttca

SEQ ID NO: 121815 - DNA, 259 bp, Glycine max
  Clone ID: PAT_MRT3847_81005C.1
ggctcgagctccactgtggagttatgtatgtctcggagagagaggagaacaacctttggctgaatctgcttatgaaaattcgactacagctatccacattcttatctaatggtcaaagttcaggttccaccaaaatcaccatcatcagctacggagtgagaaacaaccgccgtaagcaggagcaatgaggcagacgcagccactgaggcaccggctgcacatcacccagactgtgtgggcaacggaacggagaggccac

SEQ ID NO: 121816 - DNA, 302 bp, Glycine max
  unsure (1)..(302): unsure at all n locations
  Clone ID: PAT_MRT3847_81006C.1
gtnntggggggtttttttttttttttttttttnnnnnnnnnaaaaccgaaaaaagttttttaccttgggattgttttgggccccttaattggccaaaggcccctttggtttgtgcccttaaaaattttaatttgtgaaaaaatttccaagggggccgggggggaccctaacttaagcgggccttttttttaaaccttgcgcctttaaaaagcaaagggagggctttgcccgttcccacaggggttaaaaaaacctttgccttggggagcccatgggaggccaaaaaccttttttgacttttt

SEQ ID NO: 121817 - DNA, 590 bp, Glycine max
  Clone ID: PAT_MRT3847_81007C.1
ccacgcgtccggggaaatggtgaggttgcaggccgggtttttgaagcctgtgaagtccagggcccaagttgttgaagaagaaggctgaggggaaggagaagagtgaggattctgatcaaggttaagtttttaaaaacggtcagcgaccgttatttcaaagttttttttaactgtctgcgaccgtacttgtgaccacatcggccacatttgtccgtgatatcaacaaatctacttaaaaccttattggtcatctcccaggttacttctacttgtaatgtaatattagcatttggatttgtggttttatgtggtgactggtgactccatttttttacttttggaaataagtaataactctagatgtcaatagcctaactaagtgtttcgatgcttttccatatggatgtttgattaaagatgtattctaatgcattgagagatttggtactgtgggctgaatatatttcataacactgcattacaagatagttgaggcctatatgcgtcattgtgaaggtctcaaacaatttgctggtttcttgtgttctcctgaatttcaaatgaagtctgtatatcgatcgtttgaactt

SEQ ID NO: 121818 - DNA, 412 bp, Glycine max
  Clone ID: PAT_MRT3847_81008C.1
caattcccaattcgacggacgcgtcacgcgtgtctggacataactctagactatatgtttttctctgttaacacagagttcattttcaagtctctgtctctagaagatggggacaacacttctttcttcacacgattgtctccaatgccacgtctttcacagtgaaaacttcgctattgccgcatcacgtgtggcatagccaagaaactataatccttacactaatagctttgcctcctcatccaaaccaaatcgctgtcggaagccgagtcctgtcaccaatcgaaaccgccggcgatctcctgcgaatgccacctttccagcgaatataggcatgggacacgtttacatcctgaagcgaagcgagaaatttagcctgcacaataataccaacccaagactctctgagaac

SEQ ID NO: 121819 - DNA, 1254 bp, Glycine max
  Clone ID: PAT_MRT3847_81009C.1
ccacgcgtccgagcctccaaaacatgcatcgtctaaagaagcatcaaaaggctatggtggaaaatcttctggtagagaacaggagggtgtatccatgtcaaaatgctcagctggtattggtgcccattctaaagttgcaaagagaagagatggtcatgtggctgcaggagtgacgaaggctggtgttgggacatccgaccccactaattccaaagccaaggaattgcgagcctcaacaaaggttggacataagagatcaaggcagtcagcatcagatgatgataagaaagctgcaaacggtaaagccgtgaaagataccaaggttcaagaaaatagggttgatcctaataggagatcttcaaggaaaaaacagcatgtttcgtacacagaaaatgataaagatggtaattttgggaattcttccaaaaggccaaggcaccatgaatccagtaacaacaatccagcctcttttactgacggtgtgggtggtcagaatggaaagataagaaataaagcaagtgcaccgcctgaagaaactgttttaaggaataagaccaaagttgagcagacaaatgtgctaagaaaggaggcatccaactcagatcttaatgatagaaagtcaaaagctgacaattgttctccactgaagtcaaatttacctcccagttcagagatttgctgtcctgatccagacttcagtgattttgagagagataaggcagagggttgttttgctgttaatcaattatgggccatttttgataatactgatagtatgccaagattctatgctctcgtcaagaaagtgtacttccctttcaagttgcggattacttggctggaacctgactctgatgaccaaggtgagattgactggcatgaagcaggcttgcctgttgcttgtggtcagttcaaacttggtcagtctctcaaaacttcagaccgctttatgttctctcatcaatttcattgcatcttcagaggtgacaggggtacttaccgggtacagtgatagtgagaaggaacttgggcaattttcttttgctgttatccaattatgagctatttttgacaataccgacagtatgcatcgattctatgctcttgtcaagaaagtgtaatcctgattcaaatgccggattacttggctggaacctgactcagatgaccaaggtgagattgactggcatgaagcaagtttgcctgttgcttgtggtaagtcaaactaggtcattctcagagaacttcagatcg

SEQ ID NO: 121820 - DNA, 192 bp, Glycine max
  Clone ID: PAT_MRT3847_8100C.1
ctttgattcaattctctactctactgttctattctgttgtcatcatgggctacatcggtcatcgttttctgggctccgtagctgttaagtatcactgggctttcggcggtactcttatcgtcataccctgaattagtatgttccaagatttgatgtctcgatctggttccgaagattttgtctgatgggtca

SEQ ID NO: 121821 - DNA, 514 bp, Glycine max
  Clone ID: PAT_MRT3847_81010C.1
ctccgttcttgaccctctttaacccaccacaccctccaacaccgtatcctcttccccaaccaccatctcctcattatcaccaactctcaacaacaaaagcaccacgaactagagtgtgtcttctacatgctccaccccagcgcttcctcttccagttcacctgaaccgattttccaagttcaggttcaaccagtcctgtccacaaaccgttatgacgaatctatatccattgttaggagcccacttacccaaacaaactcctttggcggcggcgcaacgaggtggatcatcagaatttgggcgttttgatgaaccaaacgactcaatcttggaacaaggtggcgtacgaggcttccctcagcggagacaccatggttgtgttcgtgaaagggctgaatctgccgccacacaagatctcgaatctgacctggatctgatgccatttcgggctaaaaaatttccacaaagataatgccttacttaccacgagagttatttttgtggatcccgaagt

SEQ ID NO: 121822 - DNA, 654 bp, Glycine max
  unsure (1)..(654): unsure at all n locations
  Clone ID: PAT_MRT3847_81011C.1
ccacgcgtccgctattttcctgctttgcttcccttactcccatagtttcttctcccaaattcttcccaccatcttttgatcaattttcaaattttactgcatcttcagtttattcccatgccatcactttaatcatcttctcttctgatttctagattccccgttctgctcagatagttaaacataaagcaaattgtcccatcaaactatttcttcttcacttcttccttccattcacacattttcttagtatagtagttgcacaaaatgtcaggtggtgttggtccaactggcagtgacattagcctcccacaagaacaagaagttgatcacaaagagcagcaagaacaacattcactcaagaatctccacaaaaccatcaccaccacgcctcacaagccaactttcctctctttccgccatctcaattgcttggctgtggtggttgtcttatcttctagtggcatggttgcccctgaagactntgcttttgtgctcttctccataatctacatgtacttcttatcaaagatggctttcccatctcttcacccatcaaaggaggaacctttagtttttcacccaaaaaacaaggctccttgcccctctatgtgtttaatggggggccatcatttggacctttatgcccccaat

SEQ ID NO: 121823 - DNA, 422 bp, Glycine max
  Clone ID: PAT_MRT3847_81012C.1
tggaggttagcatcttactatatagttctcgcatacaacatatcactttaagccacaccattattgttcatcatttcagtccagtagcaatgacagtatacatggtagctgcaatgtgggaattagttctgtggcatcaatttaaactaaattatacataaacatgtagcatgtatgttggttgatccgctgagctgctagattctgtttaatttagtatccatttcactcgtcagcttaaaccagccaacaagggaggtttcgatggagttcctgtttttcaggtatgttttcttatttgcttgtgaactttagatggtctgtgggtgggagttacaaaatgttatgagctcattttttgtttgatacatttatcacgtataaaaaaggaactattactatcagaacaaacttaacttctg

SEQ ID NO: 121824 - DNA, 288 bp, Glycine max
  Clone ID: PAT_MRT3847_81013C.1
ttcgatcatgttcattccttagaaggttcagacttttcatggatcagttaacactagcatttccatttttactgacactagatcggttcatatcagactcatgatggtgccacgtaagggacacttgccatcagacgcgaccacacatggtggtcattctttaccgcaatcgcagatgtgatgtaaatgagcgtgtcggtggtcacaccacttgcttgccttcgatgtgctcgatcataaacaagaacgcttgcccacaacgcctacagctacaccgtcaatgacaaa

SEQ ID NO: 121825 - DNA, 258 bp, Glycine max
  Clone ID: PAT_MRT3847_81014C.1
gagagagagagagagagagagagagagagagagagagagagagagagagagagagagagagagagagagagagagagagagagagagagagagagagagagagagagagagagagagagagagagagagaactagtctcgagttttttgggtcttagtggtgggacatttgcagatgttcggtgttgcaaacttttcgttctagttgtctagtcctacgtgtatgttgagatgtcctacattggataggaatatggcc

SEQ ID NO: 121826 - DNA, 341 bp, Glycine max
  Clone ID: PAT_MRT3847_81015C.1
tttagatagcaacttaagggtgcttgggggcaataccaaaggggctacatcctttttgtaaaaacttaaaacagaaacattatgacacacattttcaaaatttaattacaaaccaattttttaaaatgaattaaacacaatctccggcactttgtaggttttccctttatcacaattatattggtaatacctgaaaacatctacacttcctaacaaccttatccattgaaaaaaaaaaaaaatatggatttttacaacaaaaacaccctcctctagaacccttttttatttttatttttacaactcccaccttaaggaccttttccaggaattcttttttt

SEQ ID NO: 121827 - DNA, 430 bp, Glycine max
  Clone ID: PAT_MRT3847_81016C.1
ctcgaggtgagactactttgcagtgcgctatgacccctatcctttttatcacgtgaatcatccagagttcatagacattgcgcgagaagagttggaaactctggggacaaccgagcgttctagcgcaccggagaaagaagttcaagggatttcatggaagaattacgggaaggaagctactccacaagagagaagagtatttagcgccgtgttggggatctttctcacctatacatcgtcagagcgagcggagcatacatgcgctggatgctatcttaacttttggctgtatacatctttctgatactaccgacgactagtgatagatactctacacttgcggctgtggcagattcccgtcatctaatattgccgccggcgggttttcgcacccgttggaggtggacgggctgccggagaattttgattg

SEQ ID NO: 121828 - DNA, 319 bp, Glycine max
  Clone ID: PAT_MRT3847_81017C.1
ctagtcctgagtgtccatggcacatagagcaccgtatgcatgagttagacttactagcaaatctacttatctatagtctgacatgtcattttcgagtgcgatgactcagtgtgatcctaaactatttggataatttcaagcaggatcccaagctatttgtgttatcatcatttcactatgagagttgacaatgagcagatagtttacggactaatgtagcttagagcatctaatttacttacacatgcctatatcatggttctatcagaagatgtatctacaactaccattgcaggtgtggatactctgtaatgactgt

SEQ ID NO: 121829 - DNA, 242 bp, Glycine max
  unsure (1)..(242): unsure at all n locations
  Clone ID: PAT_MRT3847_81018C.1
ntccgccaaacttacggccttagacatcacctcaacctacgaattcaccactcccggcagcggttttaaagatggattgaagctagccctcacaccttataaggaaacttgctaaggcttatataagagggccggcctcgctataaataaaactttattgaaagggtacatataacaaaaattgggatcaaactgggctcaaggcatataacgcgagtggtactttcctattaatcaccttt

SEQ ID NO: 121830 - DNA, 351 bp, Glycine max
  Clone ID: PAT_MRT3847_81019C.1
gggtaggaaaaaaaaaaaaaaactggggatttaatttaatataaatattttttttcgtaaaaaaataaacgttttaataaacaaaagttttttaaaaaaccatttccttttcatttttaaaggttttaatcaactttttccactgtgggcccactttttctagccccaccagtttttggagctccaccagccccttttgggaacccacttccccccccgccggggactcccccgggccctttgggaaacctcttgggagccccgccggttgttcacccaggttgttggtttacctaaggagggtggggattccaaattctttgagggtttttttgttggggtctaaattca

SEQ ID NO: 121831 - DNA, 523 bp, Glycine max
  Clone ID: PAT_MRT3847_8101C.1
tcggctgcgagaagacgacagaagggactcaacatcaaaattagtttgattatgattcacttgaagaggtgaagagacaatgtttatggtaaagggattaatacaattgatatcacattttgtgagattgtgagagtcagaatgaaaagataaaaatagtatatgataggatcataataatgatatcctttctaaccatcaccataaccaagaaacacacatattgttgaatgagaggacaaccatataatttttgaaatgaagacaaacctgaagtaacagaagatggaattttgttaataacatggacaacagtgaggacttcttccccaaaactcactaggaacataggtacacaataaaagagaataagtagttttagcaatgtggcaatgtttcctttcaacaactccattttgttcaggagtgtcaatataagaagtttgatgaaaggtgtaacagtcgtttttttttaataaataaataatacagtaataagttaataaataaataaataaataaa

SEQ ID NO: 121832 - DNA, 358 bp, Glycine max
  Clone ID: PAT_MRT3847_81020C.1
ccccaaaccatcttcttcaccttttctctctgcacaccaatatggcatcaatttgcgacagaggggtgcgtcttcgactacacaacatcgacgctttcatcgcttcttacagaaactccctccactcgctcagagccaccgcactcgaagccgcgcgatctcaatgtcacgctttctacttcacactttccaatcagtaacttagggtttacactctccgacgctcttcttaatctttctctttctctttttcgatcttttgcagccgaattagccgaggttaaagctaaactgctagaggctgatgatgaattggtaaaggcactcgcagttaagactcggagagaggcgaagcgaa

SEQ ID NO: 121833 - DNA, 206 bp, Glycine max
  Clone ID: PAT_MRT3847_81021C.1
accactccaatgtcaatgtgttcaaggatctgaggtctcaaactcgaacaatctaagctcggatcaagaattttggggcaaggtggatagtgttggcaggattcaagagttactatagttcaaacctaatagtagaacagaaggaactccagctggtgttatttgatagagaaacctctgttacataaatatggaagaggatgagg

SEQ ID NO: 121834 - DNA, 333 bp, Glycine max
  Clone ID: PAT_MRT3847_81022C.1
gcttgccaaattaacatttttaaatatatcaaggttgagtaaagcatttcacgcattgggccatcatcacttaatattgctaggaaagaaagggcaaaagcaagttagttgttgcgaatattaaaacggccacggcggcactcttgcagataaactttactggagtaatattatatcacacacattatttgtgcacataacacatgcaaaacacttgtaagctaaaaagcaaggcaaggatgtacaggtaactctttgtgggaatatcctacctgtacacataaaaacactactgtcactcgttatgaatccccctccacccccccctttgtt

SEQ ID NO: 121835 - DNA, 242 bp, Glycine max
  Clone ID: PAT_MRT3847_81023C.1
gcctctgctatgttgactggtgcttctgctgttgcaggtacatttactcatgtatatattatgcaatttttaatcttaactgcctttttctctttgtttgtcctagtatggaaaattcatatcaaattgcatgtgttaacttggtaagctttgttcagttattatatgaatatatagcctttgaggattggtttcccatggtgtgtaattttgtctatctttttacttagtgatataattct

SEQ ID NO: 121836 - DNA, 229 bp, Glycine max
  Clone ID: PAT_MRT3847_81024C.1
atgtccattggtgcttaaacattcatcaggcatcatgatggataatgtagtaagtactctctataatgtgcttttcaactgctgctggtttgatttgagttctagagatgagtctgatgtcaacgagtgccagatccaaaaactcaatgccctcaaaccggataaccgtatagagtcagaaggagggctcattgagacatggaaccctaacaacaagccattcgagtgt

SEQ ID NO: 121837 - DNA, 267 bp, Glycine max
  Clone ID: PAT_MRT3847_81025C.1
ggctcgaggttgatctttgacctcattttttggaccacaggcccatgaatcgtttccccgacatttaattcatgatgcaaagtcgtaccataacaccaggctccagagagcaccttctccggctggacatatacggctaagcccaaatgcttaagaaggcacgcaatgtgcacttgctgcattttcctccaaccactgtcccacatagttgttacaaactttcttccgaccaaaaagggaaccccgggtctaactgaaatggaatcc

SEQ ID NO: 121838 - DNA, 262 bp, Glycine max
  Clone ID: PAT_MRT3847_81026C.1
gaaagtcccttcatttgtacctttttcaacttctttgacgagtatctttgttttgtttcggcccgggttggccccccaagggactggaataaccttgggggaaaaataggcccagttgttttacattgtaaaggatctctcttttttcgcataattgtttttggaaaatttcttgaacggtccctatgcggcgccacccaaaaaatatttgtggaatcaattgggatttggaacccgggaaaacttccccagggttaattta

SEQ ID NO: 121839 - DNA, 412 bp, Glycine max
  Clone ID: PAT_MRT3847_81027C.1
cgacctacacgtcagtgcactcctacgtgacgacgcaacgtggcgcggacacggatcattctcggtaggcattataccaggtgcaaccctatacacgaactaatcgcatcctcgatgttctgtgatccatggagttaagtggtccacatgagtgttgctccatgtagactcttttgagaaacatgtgggagctagaggtgattgttctgataatcatgtgagctgtgcagagatggacttcacttggagaatgcacttatgatcctgattatactattggatcctcagacattccaggctattctagctaaagctgcatagcgtgttacaaactttactgactactttcctatatagtacatgccactctcttcctcgggtttcacgtttcaatctcattcttgattttttt

SEQ ID NO: 121840 - DNA, 586 bp, Glycine max
  Clone ID: PAT_MRT3847_81028C.1
tacggctgcgagaagacgacagaagggggggggcattgaattgaatagattagattatactaaaattcgggacactgtcacaacaacattctgaatcgtgatagacaaagaagcctgcttgttagactttgaggctctctgcccattgcaaccccacataccaacatcattctgtaatgtgtaatctatagaagatggaatttcagcatcccaacgtaacccctattctctcactcctatagataactgtgcacgcgcaccttctttcaaagaccccaaatatttaccctttccatttcagtgtttcttcttctccatcaccaattcaccatataaccccttttacctttctcaacccctacacacacacacacacacacatacacaaccagcattgctctttctctctcatttctactctaaatatatccaccattacaaccttcttcttgtccttatcttggagaaaattctctgctttgtggaagatggccttgttggagcgcttggaatgggcgaatacttatggcaacaagcgttgcacgagcttgttttggaaggcgcgcgctgcattgaaaaaggcatt

SEQ ID NO: 121841 - DNA, 1618 bp, Glycine max
  Clone ID: PAT_MRT3847_81029C.1
ggccatcccgtcccgctccggacccagacgcttccattttttctttcttatttccaccgaaaaagaacaaaaattaaaaacaagaagaaaaaacaataaaacatgtcccattttggtcggaaactcagccgctcctccaccgtccggcgacggttccaccaccgcgtttccctgctccagcggtgcctcctccgcgtcctccaccgcatcctcctctgctccgggagcaaggccaccaatgccacgtatagcatgctgccgccggcattgccctctccgccgccgccggtgagctccgacggcgagcttggccgtgaagagatggacctttcttcgtcggcggtgtttcagacccatgacttggactctgatttggtttccttgaagatcagcttgttgggggattgtcaaattggaaaaaccagctttttggcgaaatatgttggggatgaaaaagagcagcaagggaaccagagggaagggttaaatcagatggacaagactttggttgttgaaggagcacgtatatcgtattgtatctgggaagtacaaggtgatggaaaatcagaagaccaactcccaatggcttgtatggactccgtggcaattttgattatgtttgatctaacaagtcgatgcacattaaacaggtatcttctatgttgtgtcacttttaaatttaaaattaattcaagctttttcaagagctaattgctaatataaggtgaatttttcaccattttttgggggtgctttgtgtttccattgtgggtgtttgatttcagtgtcgtgggatggtacaaagaagccagaaaatggaatcagacggcaattccagtgttgattggaaccaagtttgatgatttcattcagctccctattgatttgcaatggaccatcgccaatgaggcaagaaaatatgcaaaggccctcaatgccaccttgttcttttcaagtgcaacctacaacatcaatgtgaataagatcttcaagttcatcactgctaaactctttgacctaccatggacagtggagaggaatctaactgttggggaacccatcattgacttctaaattgtacaatacataaagttttgaagttgagtgatatatcaaagtcaaccgggctccaataggagtgccatgagtccatctcaatcacacttggggcaatagagttgttaggtttggacacatgtcaattcctatgaaaattacaagcctcttcaatcaccaccaccaacaataaggttttatacaaggggaggaataaagggcaagttagaaatagaagaaattgaaacaaaggagaggactataaggttttgtagcataacaagagaagggaactaatgcattattgagtacaaattagtcattaatggtgctcttgtcttgattattaaggaagtgtcctgtgagttactgtcaaaagcacatagaaaatgagattaggatgtaccgaatctccttttgtttcatttttatgcatttctcacccagttttgaagttctggtaatccaaagcttcttctgaataaataaatcattttgtatgattcccttatctgtgtcactcaagtctcagggatctttcaatttaatagaatttaacatc

SEQ ID NO: 121842 - DNA, 226 bp, Glycine max
  Clone ID: PAT_MRT3847_8102C.1
cgaggaacagtggcaaacataagcgcgtgttcttcgattcagccaagtccacaatcctcgtcattcccaagccccacgcgcattgacggaaaccacccttcttcctttctcatcccattcatccgcaacataacttccatccccgacaacctccctcctctcaggatatccaacagcgcccccgtcaccccagctctctcatctcctcgtagctctaagcgcaagg

SEQ ID NO: 121843 - DNA, 257 bp, Glycine max
  unsure (1)..(257): unsure at all n locations
  Clone ID: PAT_MRT3847_81030C.1
cttttataagaacaagggtaaaattgtggaagtggaggaagttccatttgaaggctctaagggagggagctcatcaaggaaatttgatgacctgggtttggttcgtcctgttcctgctaaggggatgaaattaaatccgataataacaaacctggcattggagattgagaaacccgttcganccggataataaggaggtgggtgttaggaagagtagtgttccccatgttattctcaggaagccggccgcgcttaaa

SEQ ID NO: 121844 - DNA, 269 bp, Glycine max
  Clone ID: PAT_MRT3847_81031C.1
tgagtcgtattaactacagaaggggaatagagagatacaccgtgtgtgtgtgtgtgtatgaaagaatgataaccgatgacacggcaattggtggtgaccaccggtggcggattcgctgctgtcgggaacggccccagagccgccgccggcaatgagcaccacatcctgtcgtcacaggtgatacttctgctggcggcgcttacgaagtcaatgctcgtctgcaacatggacattccccacgatgtaatctccaccctccatcatctcat

SEQ ID NO: 121845 - DNA, 834 bp, Glycine max
  Clone ID: PAT_MRT3847_81032C.1
cggacgcgtgaagacgacagaagggtacggctgcgagaagacgacagaagggcatgctcaaatgtgtaatggagattttgcgtatcggaatctagtgtcattacaacatactacttcaactggtcaacaagcacaggtgcagtttttcttgcttaccttggcttgacagttcttcctgtaaacattggtgttggaagctatataagcaacatgttccaggacaggcaaattctgttggcatcagaaattatggttctcataggcgttctactgagtttccaagtaatcattccatattctgagccacaatacatctgttcggggctccttttatttgtttctgctgaagtacttgaaggtgtcaacttgtcactgctttcgcgagtaatgtcatcaaggctttttcgtggaacctacaatggagggctcttgtctacagaggcagggacacttgcacgagtcattgcagatgcaaccattactcttgctggctatgggggtgtgagtaggctccttaacgtcacccttcttccttccttcttcatttgcgtaggttccataattgcaacttgctatacctacaattctttatattgattagggccttagattttgttttaatttgctgtataaacttgctcaccgagttcttttcttcattccattttttatctataaagttctgtaagcttcatgatcaggtagtaaaaagtagctaggctatcgatcttaccttaattatataggttctcaaaaatcgaaatgataattcttagtatgatggatttgctcaggtagcaccatcatcatttagagtgatcattattctaatct

SEQ ID NO: 121846 - DNA, 141 bp, Glycine max
  Clone ID: PAT_MRT3847_81033C.1
ggcatttcacttgcggctgcagtagagaagcgctcttcggtcttcgactggcttccaaccggtttctctggattgggaaaatggcccttcgagaaaccggttggtcattccccagttttaatcctcattgagaatggattt

SEQ ID NO: 121847 - DNA, 2837 bp, Glycine max
  Clone ID: PAT_MRT3847_81034C.1
ggctcgagagttagcctataaaaaaaaactcttttgtagtcttattttcccttgtttttttcgtggtgattttattaatttgttactattggcaccccatgctatcttcctccacatataattttgattgttgttagtgctgcaactgttggtggttaaaaatcttcaacaaaaaggaagaaaaaaacgccaaaaataaacagaaatcgcgtgtttttgttcctgagcttttgcttccattgagcaaagcctttccaattgctgaaagtgatggttgcctttggaaagaagttgaaagacagacaaattcaagaatggcaaggatattacataaactacaaactcatgaagaagcgagtcaagcagtatgcccaacaaattcaacttggaacactagatcggcggcatgtactcaaggatttctcacgaatgctggataatcagattgagaagattgtccttttcttgttggagcaacaaggactcttggcatgccagataacaaagcttggagaacaacgtgatgctcttcaggaggagcctgaaataagcaaaataattgaattacgagaagcttatagagcattgggacaagatctattaaagcttctcttttttgtggagatcaatgctattggtttgcgcaagatattgaagaagtttgataaacgctttggctatagattcacagattactatgtcaaaactcgtgcaaatcatccttactcccagctgcaacaagtgttcaagcatgtgggattgggagctgttgtgggggccttatctcgcaatcttcatgatcttcaggaccgtcaagggagttacttatcaatttatgatcaacctacccttcccctccaggatccagtcgtggattcaataaatgcagctgttgataggttaaccaactcgacaaacttccttaactttttggggcagcatgcactcattatgcatgaagagctgcctagcccttctgaggaacatgttgatgatcaacgataccattttatgtctcttctcctgaacctggcaaacacatttttatatatggtcaatacatatattattgtcccaacagcagatgactattctatgagccttggggccgcgccaacagtttgtgggattgtgattggggcaatggctgttgcacaagtgttttcatcagtgtattttagtgcatggtcaaacaagtcatactttaggcctcttgtattcagtagcatagttctttttcttggaaatatcttgtatgcattggcatatgatgttagttcaatatggattctcttaattggtcgtcttttatgtggatttggttctgccagagctgttaaccggcgttatatcagtgattgtgtgccattaaaaattcgcatgcaagcatcagcaggttttgttagtgctagtgctcttggaatggcttgtggtcctgcattagctggcatactgcaaattaattttaaaatttccaagcttacatttaatcagaacaccttgcctgggtgggttatgggctgttgcttggctgatatatcttgtatggttgtggatcacttttaaggaacccgctcgtgaagctgaagaggatcacacaccacatcaatcaaatgatgaagtaaacaatgcacttgagaaaggcttaaaacaaccattactgattagttcagagaataaggtagatgaagatgccgaccaagattgtgatgatagtgaagaagccccagaggaatctcgccagccagtgaattcaattgtaatggcatacagactccttacaccttctgtaaaggttcaattattgatatatttcatgctcaaatatgtaatggagattttgctatcggaatctagtgtcgttacaacatactacttcaactggtcaacaagcacagttgcagtttttcttgcttgccttggcctgacagttcttcctgtaaacattgttgttggaagctatataagcaacatgttccaggacaggcaaattctgttggcatcagaaattatggttctcataggtgttctactgagttttcaagtaatcattccatattctgagccacaatacatctgttcgggtctccttttatttgtttctgccgaagtacttgaaggtgtcaacttgtcactgctttcgcgagtaatgtcatcgaggctttctcgtggaacctacaatggtggacttttgtctacggaggctgggactcttgctagggtggttgctgatgcaactattacccttgccgggtacgttcatcagagtatgctccttaatgtgaccctccttccttcactcttcatctgtgtaacttccatccttgcaacctgctttacctacaattctttatattgatttctgtctgaggttgagattgagatgaaaagaggagaatgctcttcagcaaaacctcagtctcttcaccacttggctctgcattctttcctatattcaatattttttatcaataaagttttcaatggctccataaagtttgaaaagtagctcggctcattatgtaggtatagtccaaatgtgtatttctttatggtatggtttcctctattgtcattatcattttgctgtagagatgggttttctttgttgtttttctattatagatcactgaatgaatgaaatgaaatgcttattattatcccttggcgtgccttttattttcactccggtatatagtgaagcagggatgtaaataaattgaattatttgttatattaattacgggaccaagttgatttattcagattttagacagattagttaagtgtgaatctatatatgattatataatgcttaatcttagaggctttgatgg

SEQ ID NO: 121848 - DNA, 381 bp, Glycine max
  Clone ID: PAT_MRT3847_81035C.1
ccagacgtccgcacacttcagatcagatatatgatgtgttcagatcactaaacggtataggggctcctaaggatctggctcttgttttattagatcctctttacttttgctcttcaaacttcactctacttcatttgcactgtcctattaccattataatattgatacatcggttttcgctcatcatctctaacggtatatatgatattatgcttcattgacagctattgatgttcatcttatatcaataccatagtcatttaataatttatattatatcttgcataataaatattgtaagttatctttaattattatattctatcttatttatttctcattataaatatcttatttcattgaaatttaagcatgtattat

SEQ ID NO: 121849 - DNA, 230 bp, Glycine max
  unsure (1)..(230): unsure at all n locations
  Clone ID: PAT_MRT3847_81036C.1
gcgcccagagacaaggggagggccggaaagccaagcgggaacgccggggggaaggaccngcagaagcgnggaggcaggaagagaccgagggggaggngcgccgacgagaacagagaccccgccaagaagacccgggaggggcagcgaaaccagcaacaccgagaaggaggggggccgagccaacaacgccagcgagcgggagagcggagggccaaaggcaaagacaaaca

SEQ ID NO: 121850 - DNA, 503 bp, Glycine max
  Clone ID: PAT_MRT3847_81037C.1
aaagtcctgggtaccgacggtttcggccgcagtgacagccgcaagaagctgcgtcacttcttcgaagtcgaccgtcatttcgtggtgttggcagccctggaagccttggctgaccgtggtgagatcgaacccaaggtggtggcggacgccatcgtcaagttcgggatcaacccggaaaaacgcaacccactggactgctgaggagacaccctgtgagcgaactcattcgcgtacctgacatcggcagcggtgaaggtgaagtaatcgaactgtttgtgaaggtcggcgaccgcatcgaagccgaccagagcatcctgacgctggaatcggacaaggcgagcatggaagtgcccgcgccgaaagccggcatcatcaagagcctgaaagtgaagctgggcgaccgcctgaaagaaggcgacgagttgctggaactggaagtcgaaggtgccgctgctgcggcgcctgcggctgcaccagcccctgccgcccaggcggcaccggtt

SEQ ID NO: 121851 - DNA, 502 bp, Glycine max
  Clone ID: PAT_MRT3847_81038C.1
ctttttttttttttttttttttttttttttttttttttttttttttttttttttttttttttttttttttttaagggggaacaaaccgacccatcacaaacagacaatcctttaaagagggaaaatcatccttgtttacatgctgagggccctctaggattaaaaaaaaaaaaaatattcccaaaaataaggccctaaaacccaaccgccccacccattggtttcaaaataaaaaaaaaggccccttaaaccaaccccctaatttggaggtggtgggaaaggtcattaaaagggggcaacccatgccctcaaaaaaatttcccctccccaacccccaaaaaaaagggaaaaaaaaaaaaaaaaaaaaacttttttttttaaaggatgggaaaacgggggggcccaaccctattttgggaaatggggcccaaaaaaaccccttcaaccctttaaaaaaaaaaaggaaccttggaacattttattttttttaaagcccccccgg

SEQ ID NO: 121852 - DNA, 454 bp, Glycine max
  Clone ID: PAT_MRT3847_81039C.1
cccacgcgtccgcacacactaaagataagcttttttcattctacgacactataactatcttcgggttggcgtttacattaaaccctgcaaaatccttccaatatgacaatctcctatccaccaccaaccgcatatccccatcggcatcagtctatcaaaccttactcgcgataaaaccgcgctttaaccgaggaatccactcttacatgataccaagagatggccagccacaccaacaacaacaacaagcgtcgtctctaatatactctctcgtcaacagatcactccgaaacgacatctactagaccatcctaagaaccgcatcgctctacaactgcctattcgaaacgaacctacacgctaccgttcccgtcctcataatcaaaacccgtggcataattcgagatatatacaacactgataattacctcggtttggtgaccactgatcttca

SEQ ID NO: 121853 - DNA, 284 bp, Glycine max
  Clone ID: PAT_MRT3847_8103C.1
attttttctccagcaacttcaggtgcatgtattcatgctcaatttcatctctgtctcactcgaattaattgattaattacccgaattctgtattggtggctaaccttcgatgagaaggttctgcattgtggtttcttcgtttgcctcgcattgttttctccagcttcttcagagaatgagttgtggggagtttgagggatatgagcggcagtattgcgagctttcagcaaatctatcaaaagcatgcattgataatgtagctgctcctcttaatggagagctaa

SEQ ID NO: 121854 - DNA, 123 bp, Glycine max
  Clone ID: PAT_MRT3847_81040C.1
acagactaaaactttccatggaatacagactgtcactcattattgggtatgatcaattcgagcccagagcctactatcgctgaaccacatgtgaaaatgtagacaatcaaatcaaggcccgag

SEQ ID NO: 121855 - DNA, 1587 bp, Glycine max
  Clone ID: PAT_MRT3847_81041C.1
caacggactgcaaaattgcctttagcaattagcactagcatacagttaaacgacccttaatggcttgttcaatttaaagatttattgttaagtccaaagagtgtctttagttttctgtcccatgtacatatatatatatatattagccacccttatcggtggtactatgtgcaagctcaaaactttaccaaatctataatcttccccttctctctcctctccccatctccctgatggggttctcatgaattcaagtagtgaaatcaagctatgatcaagccttttggggcttcgatttaccatctttttgtgctaattaaacacttgaaaattaccaccatgtccaccatgaagaacaatttcaaagaccaagaccatctctactcctcatggagcttctcaaagctcatggctttcttcttcctcttaatctccatctcctacctcttctactccctaaggttcgttagccactccttcgattgtgatcaaacccctcacattcccaccatcactcatcgtatttcttccaacaccccatctgaagaagagtccacacccccctttgaagaagttaccaacatttcccacatagtctttggcataggagcctcagcaaagctttggaagcagagaaaagagtacatcaagctatggtggaggcctaatgagatgcgtggggttgtgtggttggagcaaaaggtgaaaactgagcctcaagatgagaatttcttgcccccgttgaggatctctagtgacacttcaaggttcaagtataagaacccaaaggggcatagatcagctattagaatctcacgcatagtgtctgagacacttaggcttgggatggaggatgtgaggtggtttgtgatgggggatgatgacacggtttttgtggcagaaaatttggtgaaagtgttgcaaaaatatgaccacaatcagttttattacattgggagttcctcggagagtcacttgcaaaacatttatttttcttataatatggcttatgggggtggtggttttgccattagttatcccttggctgtggcattggagaagatgcaagataggtgcattcagaggtatccagggttgtacggctctgatgataggattcaggcttgtatggcagaattgggagttccactcaccaaggaaaaagggttccatcaggttgatgctttgtaattttgatgatttttttcatttctttttttgttgttgttgtttgtgatactgttattgtttggtttgtgacactagttttagtgtgctactatttggttccttggaaaatcattgggaaattgggggaagggtgaaaattgatagaaaagaaggaaagacgtgacaaaagaaattaactgtgtctgtgacttcacatgttgccttagtcaaccaatatgattggtggtttgacatgactataattgagaaagttaattattggaagtggtggagaaagtgggttagtgagaaagttggatggtttttgggttcacatgagataattcaaagtagacaaattttattaggttgagcttaattttaaaataatgataatgtaaagttttactttgttat

SEQ ID NO: 121856 - DNA, 597 bp, Glycine max
  Clone ID: PAT_MRT3847_81042C.1
aattcggctcgagagacgacagaagggcttctttatttattttccctcttctcttttatcctttgttttgtccatatttgtgtataaactttgctatgttattgtgtttggtgtgtgtctgtctatcgattacattcgtagttagaaatattttttctatgcacacatgacacctacaccttgcacacacattgagatattaggccctatacccaggtctatgtgagccataaggagtggaggtcgatctgtggtcatgctgggtcttcgactcgcttgatgatagtgaagcctcatctagagttttcttcttttggtgatgcattgtcgttgatagtccctatccccacaatgtattacctaagaggatgatatctctagaagccagtaaagttacatgaaaccacccttgggaattattgcttgaagtggacttttggatcctttccatgtgaagagactttaggatcttattcattacactctgaattggaggcacaaagaaaactcactgtggatagatccttgatcgcatcatgcatgtcttgatggcatcataatgggcacattcgatactgcatttatcatttatcatat

SEQ ID NO: 121857 - DNA, 271 bp, Glycine max
  Clone ID: PAT_MRT3847_81043C.1
aatccacacaatggggggggacttccgttacaagctaacttaacatatccttaacacaaaatgaaacaatttagaaaaggacctgggttccgggattttctttatctgtcaaaattgttctattctgagcagtctcaccagctagttcagggcgaaacctaatttaatttcagttcttacttgattcaaaatgagctttctataaacagtctcgaactatgcctggattttttttttacaggactagcttaattatgcttatttgcaaacc

SEQ ID NO: 121858 - DNA, 235 bp, Glycine max
  Clone ID: PAT_MRT3847_81044C.1
ttcggctcgagggttcttagatattaggatgaagtttgattcaaccatcagtgttgcgttcatggtcactgcaactgatgagaagtccatgactggctatggttctcctgtagagttcctatctcatgtggattacgggctttgaggacgatccgtctttggctatactgtgtgctgtgggtggttatgattccaatgctggtgcaactgcaaatgtcttggagtggtcaacgcc

SEQ ID NO: 121859 - DNA, 273 bp, Glycine max
  Clone ID: PAT_MRT3847_81045C.1
cgcaaaggaaggctcgagtgtgtgtgagaccgcggtgggcctgcttgtgctggtgggatgaggggtgtctgggtagttgagtgaaagaaaccgcgtgcgggtcagattggtgtgtgtgtgagagaagtgaggtcaagatgtgtgcagctttgggcgtggggaggtcatattgagtgtgtggaggtggggggggcaagatcgtgtatggatctgtgtatgagtctgtgtaatcacctgaatgtgggtcctgcgtgggtagctgatactatgact

SEQ ID NO: 121860 - DNA, 698 bp, Glycine max
  Clone ID: PAT_MRT3847_81046C.1
gaaaacagcaagttttagttcttagacaatttttttgtagtggtttatccccaccagaaagtttttgttgcagttttataccattgaaaaattttctctggtgttaacactatggaccaaagctcaacttttattatgcatgtgtagggattaaaacttgtagtttgttcgcatgggaattaaaacctagaatgaggacaactattgggaacatatgaatagtttaacctataacatttactagccggtaatgagccagccagattggttataggaacttaatatccacactacagcttaacattcaatgctgtaatatttaaatatgtggtggtgatgcgatgatttatctattatgatttgatttgactaaaactacatgattgtgtagacttcaatctgcatatccaccactttgtgctttcaggactactgctctttcacgagtttgtgtaggacaaagaagaagtacaacatcacatatctgtattgctttttgttgggttatcttgtggcattgcgatgcttttgttcacaaggctattttggtgctgctataataactgctttcactggaccaaagaatgtaccacgtagtacctgcagctagcaattatgtaaagattcgaggcttggcatcacctgctttacttgttgggatgggtagctcagagtgcaaggtgcaaatatgctattta

SEQ ID NO: 121861 - DNA, 561 bp, Glycine max
  Clone ID: PAT_MRT3847_81047C.1
ctgcttgggggggggggggggggggggggggggggggacagcaaacaaactagagggaagacacgagggcaatgcgggacacgagagcaccccacaattcaatattgcaaagatggggaaaaaaaaccaaaagtaacccaaaaaaaagaaaaatataccacagagagcctcagcctatacgaataagaatatggaacaactacttggccgtgttgtactactgcgtgtaaaagttgccttgccaataactgttcccatagtcgtagtagtaggtgttgtggcactgcgccggcaattcctcctgttggtaccacttgctggtgccaaggctgtcctgactggtggtaccggggtgaacggagtgccgttgaaggccgccagaagctgacccacgagagtggctaatggtgggcgggcgccacaattatgcataatttaacgaggactactaagccagctggcaatgggcccagggacaaatgccagaatgatcgtagttggaaacagaggcattgttgtaagagttcccagcctaggtattttgaggtgtggtaccgctgt

SEQ ID NO: 121862 - DNA, 232 bp, Glycine max
  Clone ID: PAT_MRT3847_81048C.1
agcgttatgacagtatcagggggcgtgggactgagtgtctatgacaatggtgcgaaggtacagacttaccggacacacgacgtcaaatgcaaccagatccattactatgatgctgtgacactaccatagatagctgtatctcgctagctaccctcaaagcgctatagttgccattatgtctctatcagttagcaatcagacgactctaacatcccttgctgagccacacatg

SEQ ID NO: 121863 - DNA, 168 bp, Glycine max
  unsure (1)..(168): unsure at all n locations
  Clone ID: PAT_MRT3847_81049C.1
gctcggaatgcgactgcgagttagatatcatcactactactattgatagtataaatttctattttgtatttcaagataatcangttcgatattgcgaatctgcgatcggaaccgtagaaattcaattctgcctactggatgagtcttcctgctcacaaaacaaactac

SEQ ID NO: 121864 - DNA, 454 bp, Glycine max
  Clone ID: PAT_MRT3847_8104C.1
tttttgtttttttttttttttttttttttttttttttttgtttttttttatttcttattacagtttttgtttttgtaaatttacacatgcgttccacggagaagaaaaaaagaaagaaccggccaaaaaattggagcccacaaggtttccccagaaaggtccaaaccacaaaaaaaggtccccgaggggggggggaaaccgggaaaacaaaacccggccccttgaggggccccactttcacctggggggaagtttataagcggcccgggatcccacaagaaaaaccccgccgccaaaaagggggaacccccggaccacaacaccagaaaccccccccgctaaattttcgggccgaatcgggggggctaaaatggggaaaaccccaccaccaaagggccgggcgcaagcgggccactttcggaggaaaaaaaggtggggaaaagggccaaaggga

SEQ ID NO: 121865 - DNA, 651 bp, Glycine max
  Clone ID: PAT_MRT3847_81050C.1
gataaaaacactactgtcaactgtattgcaaaaatatgtctgcataatatcctagctctgaatccaagaatacatcacttggaaaattttttcaacttcactatacaagggatgcgttacataatgtatgtgatttgagcttgggaattgtagttatgatgtcatagcagcctaccatgatttcaatgttcatgtcccatcttggcaaatcggcccttgactcttaccctgctttcagcccgaacttttcgtgattcataccttatgtgcttgtcaaatctgttgttttccatataaagcatgtcaatttaataatctaagaaagttataaattcatatatacaatcatcatgaccacaattcacacatacacaaatacttgcagttcataattcatattaataaacaatacaacaatcatttaatttagcaaggagaagaaaatgcctcgttaacaacagaagcacggaacacagtaaatggtgataaaaaaataacaagaccattcttccagaaaagtctgaactgaactctttcagtcaacatattggagaaaactatgtaacatattaatgaatcattcctgatatctcccaaagaaaatatatcaaaaaggaaggtcccaactcccaaaaatatatccaaccttac

SEQ ID NO: 121866 - DNA, 186 bp, Glycine max
  Clone ID: PAT_MRT3847_81051C.1
gggggtcggggctctcctaaccgttatatcaccctctttattacccataaacacaaaaaagctgtcctgacatatgatagcgggtgtccttcatctcattatcaaaaaccaccattaaggattcacacactgatatttaccctagagaacaattaatattttttacaaatcaatacctcttaacat

SEQ ID NO: 121867 - DNA, 177 bp, Glycine max
  Clone ID: PAT_MRT3847_81052C.1
ggctcgagcggaagagcaaacccccaaattttaagcgtcagcaggggagcaacaccacagccggggcagaggaagaagaaaaagaaccgaacaaccacaaccgaagaggaaggggaaaccgcacccacagggacgaggaagccgcaaccagaacgcaccacaacgccggaaagagga

SEQ ID NO: 121868 - DNA, 191 bp, Glycine max
  Clone ID: PAT_MRT3847_81053C.1
accggagaacccgggtggacccacgcgggtgacacccgcgagaagacgacagagggggggggacaaggaaaaaagaaaccccgcacaccccacgacgaaggacaagacaggagagcgcccgaggggaacgaaaagcgccgccaaaaacggacgccaaagagcacagaaaggaccgcacgcaggacccagaa

SEQ ID NO: 121869 - DNA, 184 bp, Glycine max
  Clone ID: PAT_MRT3847_81054C.1
gggtgtgttttttttaccttgaccataattttatatacaaccacctaaaaatatattgcaaagaatctaatattacaattatcttcgtaattcattggaaataccacatcattgaataaaacaggaaaaagaagcttatcagctaattttagtccttttagcatattaggagatataataattt

SEQ ID NO: 121870 - DNA, 302 bp, Glycine max
  Clone ID: PAT_MRT3847_81055C.1
tttttttttttttttttggggcgttgctgatgaaactgttacacgatatattttttttggatttttcgacgtgaaaaatatgaaataaatctgtcatgaatttttttaatgcattggcgataaattaaaaatattacatcacatgaccacttaaacattgtttcaagggtggaaacaatttttttcctcttaatttgaggttggcgctgatgaaactattacaccctatattttttatttgaattttttgccatgaaaaatatgaaattaagttgcccccccttttttaacgtattggagat

SEQ ID NO: 121871 - DNA, 701 bp, Glycine max
  Clone ID: PAT_MRT3847_81056C.1
cggtccggattcccgggtcgacccacgcgtccgaaagaattaaaaaattatttattttccccccttgtccgcttcgttccactcctctgttttcaccatcgaagatctgggtcccttacattcttcaccccatcaccattttctgcagatgctgcttcccacatggtgaaccactgtgcctcccatggcaatggcttgaatcattgcggcattggttgatttgatttacatgaaagtttgattctttccctcaaaacccaccaacacattgacacgtcgctttctttggattggtgggttttttccttcacgttttcgggttgcttgaggggcttgttgtagactacattttttttttctttttttttttttgaagatgaagagattgaaaactgaacctcccagttcgaggaggtttaggttgtctcatttcttgtttggtgttggggtgttatacttggtttttatatcgtgtaatttttcacagtttacgaaagttgtggcatcgttaagtggggttgagacttacaatggaattgggtcggataaggtagcgactattggggatgctgaagatgcagatttgagcaaaccctttgttaggtctggttataaagatgcatttcattggaggttaggggatgggaggggcccaggaagcctccttttgaggcccatggtgggaacccatggagggggga

SEQ ID NO: 121872 - DNA, 423 bp, Glycine max
  Clone ID: PAT_MRT3847_81057C.1
aaaaaacccaaattttattttatgggccacaattttaaaacgggtaataacaggtggaatttcactggggaaaaaacaaaaatccaaaaaaacccggggggaaaatatttttaaaaaacttttccaattcgaatgggaaactttttttatcaacattcaataaccaaaacttcatgggaaacaaaattttccatccccaacacaaggatgaaccgaccggaacaatttttacccccctttttaaattatggcaattttaaaaatttggcaaccttgaaatcagaaatgaaaaacctggggggaaaatattttttaacaaggcctgggggtataaccggaattttggttagggcccccaacgttttgaaaaggctaggagtttcaaaaacccatggttattggaaaatttaaagctggattggg

SEQ ID NO: 121873 - DNA, 546 bp, Glycine max
  Clone ID: PAT_MRT3847_81058C.1
tttctgcagattgctttcacgtctttggtttatccatcattaatcctagcgtatatggggcaagctcggctcgagtctagacatcatgatgttgagcaagagtaccactttggcttttatgtatctgtaccagagaagttgagatggcctgttcttgtgatagccatacttgctgcggttgtgggaagccaatccatcatcactggaactttctcaatcatcaggcaatgctctgcattaagttgctttcctagagttaaagtggttcacacttcatccaaaatccatggacaagtatatatccctgagatcaactggttgttgatgctcttgtgtttggctgtaactattggttttagagacacaaagcttatgggtaatgcatcaggtttggcagtagtctcagtgatgctggtcacctcatgtttgatgtcacttgttattgtaatctgctggcacaagaatgttatgcttgcaattgggtttggtctcttctttggcaccattgaggctctgttcttctaagcttctgtgatgaagttcctg

SEQ ID NO: 121874 - DNA, 386 bp, Glycine max
  Clone ID: PAT_MRT3847_81059C.1
attagttatattgagtcttggatttatggtttatagtgtaacaaaatttgatgatctggcatgtcttatgttgttcttattgtaatatgattagggtgtataattaataaactactgattatcatgtatcttcttaccatattaatgtagatcaactagagtgagattagggcttataattaattaattattaaactatttattgtgagatccttagttccaatacatgtaattctttataaattctaactatccgataatgtatatatattttcatttgattaattctcttctatataaaatattaattgacttgcatgcccattttaaacaaaatagatttcccagtttccgaagaaaggcagtaccttcttggggtccccttt

SEQ ID NO: 121875 - DNA, 754 bp, Glycine max
  Clone ID: PAT_MRT3847_8105C.1
tctccaagcgagatatcttcactccgattcctgaatggatgatatctgaagtctcaactcccaccccccctctataacttttctatcaaaaaagcttgttgaatgtgtacaccgtccaacataacatggcacgacaagggactgagatatgagcatcacttctaattgtctgtatacttgaaagtggctatgtcaacggtcacttctcttccttgaaaataacccttgaagtcactgctccccccctccaggaacaagctgtggacgctgaattaaacaatgtcacagtgacatgtgcattgaacaacaccttacccgcggtgacagactctgcctactacaccatacacctgaagctatgctacgtccccgttaccccctaggaccgcgcgagcacaaagaccgaggactatctgaaaaggcacactagctgccatcactacatcgtgaacataccctactacgcttcctacaacaccgtgcagaggttcgagtggctgcaccagcgcgatgcgcccaaagccacttactttgtacgcgcctacgcaatccactccaactacgatgaattggcttacggccagaccaccgactccaagaatagcaccaacttgttctacatccacgctgtctacggacgacacgcctcccgtgacatctgctccatttgcttcagagctttctacgtcgagtccctctatagtctcatctatactgcaaagagatagggtaaggcttcttcctcaagtgatga

SEQ ID NO: 121876 - DNA, 439 bp, Glycine max
  Clone ID: PAT_MRT3847_81060C.1
cggactcgttttcggagatcgaaaaatactcttcaaatatgtctggcctcatacaagcgctaccggagccgttgtctcatgttagagccaatctgggccgtcacgtctaatcctcatcattactaaaatagttaaatggacatgtctgctccattccttcaaatttcatattgctataggaacagcaacactcctatcaggtcttgccaaatactcacactattggagatgtccaaaccctacattcttaccgaacggacagatcagtgacgctattgatgactcacccattaagggtaataaggaggatgatgataaacccatgggtgactcccatggcatggctgatatagatgctgctgatgctgctttggaaggccaacatgcatgtggattcatctgctccgatacaagccgatcaactaatggtagaacaggg

SEQ ID NO: 121877 - DNA, 783 bp, Glycine max
  Clone ID: PAT_MRT3847_81061C.1
ctactgtactatcaagaggattagcatctaaatgtgcaaatgtcgtagcaggcgcaggatcgggttcactcaaggaagaggtgaactccagagatggtaggattgaacacctgaacagccatttgaacgagcttcacgtggaacatgtacaactgattgctggaatggaggaggcacacaaacatgtggaagaactaaaatcaaaagccaagcaacttgaggaagaggtcgagaggcaaagaaccgtgatcttagaaggagcagaagagaaacgcgaggccataaggcagctatgtttctcactcgagcactatagagatggctataatatgcttcggcagcatgttatggggcacagacgagttccagttttggctgcctagttaataaatttgaaacgtgatcttgtatattgttttggtgctatcttcatttctctgtcttgggatgttttatggttctagtgtatatgagtgaaggtcatgtgtactagtacggagaagtgatgaccatgttttcatggtgtaagttatactctggcttgttagctataccacaatatgctgatgccattgctaagagaacccttccttaagggctcaagagagattgaaaattttgcttagtttgggctaatatttgtataaccaacccgtctggtcttatgtgaatggttgtgcaactctctctttctttctttcttccctttttttttttatgttattgtaagttggatttctcttgcagtaaatatattgtagttatagattgacttggattttc

SEQ ID NO: 121878 - DNA, 2535 bp, Glycine max
  Clone ID: PAT_MRT3847_81062C.1
ggtccggaattccctagtcgacccacgcgtccgttccctttttattaacacttcacaaaacaaactctctcatctcctcacacttcaaatccaaatatctctgttctcaatattccacccccttttctcttctctcttctttctctattctcagatccattgctttatcccacagcttccaccactgcatccaaacacgcccttctctcatctagatagaatttgctcttgcaaaaatggcagcttctggggttcattcttgcaagcaaatgaggaggttggaatcgaggaagtctcattcttggtggtgggatagtcacattagccccaagaattctaagtggctttttgaaaaccttgaagagatggaccggagtgtgaagcgaatgttgaagctgatagaagaggatgcagattcatttgccaaaaaagctgaaatgtattatcagaagaggccagaattggttgctctggttgaggaattttaccgtgtttaccgggctctggctgaacgttatgatcatgtcacaggagaattacggaagaatataccctctgatctccaatcccaaggttctggtatttcagatgctggctctgaaccatcctccacttggccctctccaactccaaagagggggggtcgtcttaaatctagtacccgagctgctgggtttgaatactttcttggctctagtggaaatggtactgatgtataccaaaaagatggggatgagtcttctactttgacagattctgaggaggaatctgatgattcatcagttaacaattattcaggtttctcacggaatggtagtgatctagggataaacagaagaataatggaattggaaactgagcttcgtgaggtaaaagaaaagctatggatgcaggaagaggaacatgcagatggttcaactaggggatcaagaaatgagaatactgaagatgtttataccaaaattaatgcatatgaacaagaactgatgactgtgaatgagaagttaagactttcagaagaagaaattactaaacagaagattgagcttcaaaaatacagactcttcaatacagaaaatttggaggctggttttgagtcatcattaacgaaaaaacacatcaatgaaggaggggaagcacacaagatgatagaggttgagggaagcattgatggtgtggataaggaattgtttgaccaaaatggtgagatcgagacgcttgcgagggagctaagaattaccaaagaaaatctcaaagcttcggaaatgcaaattacttcactgaaatttgaggccaataaatcatctgaaagaattcagcaattacatgatcagcttgagttggctcgtaaagacatttctacttggaaaaccaaattcaatagtgagaaaagagagagcaccaaactccatgaaagacttgcgaggttaaggactagtctatcagatcgtgaccatgagatcagggatttgaaaacagaagtatctgatgccgagcagaaaatcttcccagagaaagctcagttgaaatctgaaatgtcaaaggtgctggaggaacggactcatttagaggaacagatcagagaatgggaaagtcgaggccgttgttttgaagacgatatcagaaggatccagtctgaaaaaatggagatggaggaggcactcaagggtgagattcagctgttaaaggcaggaattgagcagagagagaacaacataaaagaactcaacacaagcattgatactttaaaactagagaaagataatctccacgtagaagttggttcactcaaggaagaggtgaactccagagatggtaggattgaacactcgagccgacattgctcgaggcttcacgtggaacatgtacaactgattgctggaatggaggaggcacacaaacatgtggaagaactaaaatcaaaagccaagcaacttgaggaagaggtcgagaggcaaagaaccgtgatcttagaaggagcagaagagaaacgcgaggccataaggcagctatgtttctcactcgagcactatagagatggctataatatgcttcggcagcatgttatggggcacagacgagttccagttttggctgcctagttaataaatttgaaacgtgatcttgtatattgttttggtgctatcttcatttctgtcttgggatgttttatggttctagtgtatgagtcaaggtcatgtgtactactacggagaagtgatgaccatgtttgcatggtgtaagttatactctggcttgttagctatacgcctaataccacaatatgctgctgatgccattgctaagataacccttccttaagggctcaagagagattgaaaaatttgcttagtttgatctaatatttgtataaccgactcgtctggtcttatgtgaatgattgtgcaacttctttttttaagttattgcaacttggatttcccttacagtaaaaaaaaaatgttcttggttaaagtagtttccattttctttagccttgtgctagctctttagaaaaaagggaagctttttttt

SEQ ID NO: 121879 - DNA, 411 bp, Glycine max
  Clone ID: PAT_MRT3847_81063C.1
tttattactgatacattgaactttaagaaagttatgggaaccatatttgacaagtaacttgtgatttcaaattttcaatacattttttaattaaaaaaaagggggaaatcatcaatgcatttgtgaactgtgatcccccaagctgttatgcacattttttgtattaaaataaataattgaaacaaggcacaatcactgcaatgtcataacattaacaggtattaccaccaatcagcttagtagttattgttgtgctataatctgaatttttattattaatttgtatcaggtggatgttcggaaggaactcatacgaaattctgcaagcctgattgatcttcatcagctagatatttgatggtgcagctggatgtggagaaatggaattccttccatgttaaccatatacac

SEQ ID NO: 121880 - DNA, 2130 bp, Glycine max
  Clone ID: PAT_MRT3847_81064C.1
cccacgcgtccgacaagctaggatcaatccagaagatgcgtatgctggtacttacactcattgtgaaatccacccatcactgattttgggtgtatgtgcttccatcataccatttcctgatcacaatcagtccccacgtaatacttatcagtccgcaatgggaaagcaagcaatgggaatatatgttaccaactaccagtttcgaatggataccttggcctatgttttatattatccacaaaagccactggtcactacaagagccatggagcatcttcatttccgtcaactcccagctggaattaatgccattgtagccattgcctgttactctggttataatcaagaagattccgtcatcatgaaccaatcgtcaatagaccgtggattctttcggtctctgtttttccgttcatatagagatgaagagaagaagatgggaaccctggtcaaagaagattttggccgtcctgatagagctaacaccatgggaatgagacatggttcttatgataagctggatgatgatggtcttgccccaccaggcacacgagtatctggtgaggatgttatcattggaaagaccaccccaatatctcaggaggaggcacagggacaagctttacgttacacaaggcgtgatcacagcataagcttacgtcacagtgaaactggaattgttgatcaagttttgctgaccacaaatgctgatggattgagatttgtgaaagtaagagtgagatctgttcgtataccacagattggtgataaattcagtagtagacatggtcagaaggggacagttggtatgacttatacacaagaagacatgccctggactgtggaaggcattacccctgatattattgtcaatccacatgctattccttctcgaatgacaattggtcagcttattgagtgtatcatggggaaggtggcagcccacatgggaaaagaaggagatgcaactccttttacagatgttactgtggacaatatcagtaaagctctacacaaatgtgggtaccaaatgcgtggttttgagactatgtacaatggtcatacagggagacgtctaagtgcaatgattttccttggccctacatattaccaaagactgaagcatatggttgacgacaagatccattctcgtggaaggggtcctgtgcagatcctcactaggcaacctgctgagggacgctcacgagatggaggtctccgatttggagagatggaacgagattgcatgatagctcatggagctgctcacttcttaaaggaaaggttgtttgatcaaagtgatgcatacagggtccatgtatgtgagcgttgtgggttgatagctattgcaaatctcaagaagaattcttttgagtgcaggggatgcaagaacaaaactgacattgttcaggtttacattccttatgcttgtaagctcctcttccaagagttaatggctatggcaatagctccaagaatgcttacaaaggaggtcaaaactacaaaccaaaagaagaagggagcctgataaacatgtttgaccaaagccacttgtcttatattctgattaaaagctctcgagaatatggaacaaacatggtatctaaatatacaaatttgatttgataatgtttttcaagtctcaaattacaggaacctttcaagtgttgggtaattcacaagcaaaaatagctttgataccttcattattgatgtttcccgctgcgttttctctattcaagggtgctcattccaagcgactaatgttaccgaccgagcactgtatatataatggaagtttttcaattccgagagcttgtttcttattcactaagcagagatgggttagcagaagtttctgtcgcgtaattctagtgagccccgtcttaaatgctgtgaaaggtcttatacccaatcaaccgagaattccagctccaattttggaaatccttttgttggtttagggggaggtcacccgaattggattatttaaatttagttgcaatgcttgagagctatggtatatggtacttgtaactcgagactctggcaattttaagttcaattcttgtacaatatagtgaaatgagagaatttatttgacaaagttgatttgtgagttttccattt

SEQ ID NO: 121881 - DNA, 1610 bp, Glycine max
  Clone ID: PAT_MRT3847_81065C.1
ctggtttcttgttaaccaggtcctcaccagcttttaaatacttaaatttcaatcaatcccaattttctcacattccctttttgccctttctatctctctcgtctttctcccacaatgaacgatcttctaacggaatcatttgaaattccacgtggccaaggtcacggaggtggtggtgacattgagttaggagaatatgcaaggaattcaggagacctgggcttggatagtttcttcaagaaggttcaagagcttgataaacaatatgctaagctggataagcttttgaaaaagctccaggatgcccatgaggaatccaaagctgtgaccaaagctccttccatgaaggctataaagcagagaatggagaaagatgttgatgaagttaagaaaactgcacattacttaaagaccaaaattgaagaactggacaaggagaatttggcaaacaggcagaagcctgggtgtggaaaaggatcaggtgttgaccggtcaagaacagcgacaaccatttctttaaaaaagaaactgaaagataaaatggctgaatttcagaccctgagagaggccatccatcaagagtatcgcgaggtggttgagagacgcgtttttacagttacgggcacaagagctgatgaggagacatttgacagattggctttgcatcctgcagtaaatcgaagtgttttgcctgcttcagtaatatcattatactgcacttatctctgctatagtgcactggctagtgaaccaagagattatgagtgcaatggtcttcacaaacactcaaaagctgtttccactggcaccattactttgggtttagctacaactgttctatctgttgtttattctgctgtgcgtgctggatcttctgctgcagtgctttccccaccaagctcccctcgtgctggtaagcctttgcttccattggatgcaaaggaggatgaagagaaggagaaagcaaagccagttacatattcatatgccttcttccacttgattttctctcttgctagcatgtattctgcaatgcttctgacaggttggtctacatctgttggagagagcgggaagttggttgacgtgggctggccttctgtgtgggttcgaatcatcacttcctgggcaactgctcttttgtacttatggtctctcatagctcctatcatgttcccagaaagggagttctgagcatcatgttcctcagtttcaaggttctgagggaaaatgtgtcacctaactactatatagtcgagtggtgttgctttttataataggatatacaagtatgcatctatgccaacatacatgcgaataaattgttacgaatgacatatgattaagtggtgtgcttttaactgtatagtgaaagatttgtcccatgaacgaatctatatttgtccatatggtctgtttctgcatctaaagtatgcaatttcactgttttgtatgtgttgtgactgatctttaaaatcaaaagtagaatgaatgagacaattcttgatgaaaatgataggtgaaacacaggagagttttagtgcaaaaaaaaacagtagaaaaaaccaactacagaagttgccccaaaggagccctaaagaagtttccaa

SEQ ID NO: 121882 - DNA, 258 bp, Glycine max
  Clone ID: PAT_MRT3847_81066C.1
gttgaaggcttacttcagttgcttgaacatacttcaatattttagagggttgtggattgtgaggatcatccatattcttatttctttttctcgtaagttgcaataaacaaagcaaaatgattccccttgtttatcaaagctcgtgtgcttttgtactccgatggttgtgagtactgatgttgaaacaagaagaagagtctaatgactaatggtgtctcgaattatttttgctgtctgtacaacgtggctcgttttcat

SEQ ID NO: 121883 - DNA, 254 bp, Glycine max
  unsure (1)..(254): unsure at all n locations
  Clone ID: PAT_MRT3847_81067C.1
cttcgcgcgattcggttgagtacggctgcgagcagccgacagtagggttattcttcttacaggcctcacgttcattgcacatgactacattagtatgcatgcgcgctgacgcatatgcatgcttagggggactcaggcacggctatcgattactctgaatgaatggacgctaaacaccacttaggttggatattgggtccagtgaaatgggttagttcntaagcacgtgatacattattacttacatcggttga

SEQ ID NO: 121884 - DNA, 471 bp, Glycine max
  Clone ID: PAT_MRT3847_81068C.1
cttctcccatctactctgccactggctaccgttcaccaccatcaaagacaatttcaggcaacgaaaccagctccggtgaagttgcaacctttgcataacttcgctctccccctcttaaatggggtaagaacaacatcgatcattcgcaaccgactctccctcccccttaaaccgccaccactgcacgaagccgagcacgataacaccgacaactccgtccacaagccgtggaacctccgccttcgcaaaccgcactcctccccaaggccgccatcgaaatcggcaccggaccttcttcacccacaccacagcactagcaacaacaatgacaacaacaaccctgcactgaagtgtcagctccgcggacatgcagtgcacggattaagaggaggaaattctggataactccccatgaagacatcttcgtgttttattattttgaattttttgagagtaaacacatccgtttgt

SEQ ID NO: 121885 - DNA, 740 bp, Glycine max
  Clone ID: PAT_MRT3847_81069C.1
cacgcgtccggtaaagacacaaagaatatatagtgtataaccctagtttctaattattagaataaaaaagatatttcatgagtacacaaagatactcaaagtgccaactagcacagtccattaaagataacaaatacaaattgatatttggactaatgtaaataatgaaatcaaacttagggactattttttattttcatcaacattttgttcaatttttgcattttgatcaatttcccacactaagcttgtgcatttgtgtttgtaagagattaaattcccataaatcatagtttatttttgcaaaaataacaatgaacaatttttttaaaaaaatgagcagatgtaacctaattaaaataaaatcatgaattatgaaggggtagctcgaatcaccatctccaggattaattgggaattcaacaatacaaagttatcatccaatttttgtatttttcatcaatgtcattcccatccaaaaatgacaaagtgaacaagaggagcatacatatattataattacatattgacatagggatggaaggagaaaagtgaaaggtttgagggagagatgagattaccttgttgcagggtcaaacggtggagagattgatgcaagaacagcgctccaaagaagcaaagaaagcgatgacaactcgattacagaagccaaattgaaatcatctttgtggaatagtattttggagggaagaaaaaatatgtaaaaagtatagggaatt

SEQ ID NO: 121886 - DNA, 287 bp, Glycine max
  Clone ID: PAT_MRT3847_8106C.1
taatattacacacaatggtgcggttggcagaatacatcctatggtgtcggataagaaaagacgactaactgttacgggtaccaaaatactacccttggttatggctgatttatgacgattgactgattcggcttcaatacaacgacttaaaggtgtgtataacaaaaaactataaacgggaagtgtctattctatagttttctattaacactccaaaaaatctgttccttatactatttccagattatatctttacttcaatgtgttaaaacagataacttaattag

SEQ ID NO: 121887 - DNA, 297 bp, Glycine max
  Clone ID: PAT_MRT3847_81070C.1
ttctaatcctaccctctgcgcttctcagagcgagccaattcttctccagcactgacatctcatattgttggttatacacacatgctacccactagacaccttaagttgctatggaatctttctgacacggaaagagtagcgctcaagagctgcacaaggctgctgaacaccttatgtcatccatatggaagcagatggctgatgctgtactaaagtatattcctaactgcaccatctctctttactatcaagtactggacacaacacccatgctcggggcaagtccatctagatata

SEQ ID NO: 121888 - DNA, 407 bp, Glycine max
  unsure (1)..(407): unsure at all n locations
  Clone ID: PAT_MRT3847_81071C.1
tatgaatacagcttggtagtctaaatccctaaatccattatactcatggtggcattggaggaatnggagttgtgaaaaaattatttaagtggacaagtgcccaatcattttttcatgctnaaaaatctaaccatactatatctttaccacaacagcctttctgaatagataccttaactgttttaatcattccacttgacataccttcatctttcatataataaacttactgtaaaaataccagatgatttggtaaggctcaataacttaaaatacctcaatttgtatatcaatcacttatcttggaatgtaccataaatcattgctcttcttcagactctgacctattttatgttttttatcaacaatttatcatgtactcttcctttagactgctttcttttctc

SEQ ID NO: 121889 - DNA, 483 bp, Glycine max
  Clone ID: PAT_MRT3847_81072C.1
ggtccttagcaagtaatttctaaattattgatgaatatttgtcgttttttttaaagcaatgaatatttaccattatatattttttatcagagggtaaataaaggaaataagttttgtcaatatatttgaattttactatattttactaacacctaaggattaatttgaatttttaaaaatatttaagggactattttggtatgatttctaacacttaagaatacatatttaagtttacgcagtgatatttggactagtgcaatcgaagtcaagcatgttagtgtttcacaaacaatgacaaaaagtaaaaaatatatgcaaagaatagtaataaaaggtttaaattgctaatctctagtgtagcgtttataaacttacttcattcataaatgttaatgtaattattattaaaatttggagctgagggataccaggatagatgtgatcaaagtggactcgacgatctcgtaagtcggatcgtga

SEQ ID NO: 121890 - DNA, 600 bp, Glycine max
  Clone ID: PAT_MRT3847_81073C.1
ttgcatgcctgcagattccccaaaaattagaagtcatgagaagttggcctactcctagcgatgtgaaatccttaaggggatttcttggactcactgggtattacaaacgtttcgttcaaaactatggtagaattgcaaggcctttgtataacttactaaagaaagatggctttaaatggaatgaggaggctgaggaagctaccagaaaattgaagattgcaatggcagaaattcctattctcactatatctgattttactcaacccttcactgtggagactgacgcgtctaataagggattaggggtagtgcttatgcagcaggggagaccattggcttttctaagccaaagtctctccaatagggctcagaaaaagtcagtttatgagagagaactcatggctattgtgttggcaatatagaaatggcgacactacttaatgggctgcaatttcactatattgaccgatcagaaaagtctgaagtttttaactaatcagagattacttggtgaggatcagtttaaatggagctcaaagctaatggggtttgattttgatgtaggtcataagctgggatgtgagaataaggaagctgatg

SEQ ID NO: 121891 - DNA, 299 bp, Glycine max
  Clone ID: PAT_MRT3847_81074C.1
tcgtacgcgaccgcggacccgtgggcggacgcgggggagaaaagaacctcaagacaacgaggaccaagcacagacggaaacaaacgggcacaaaccgccaccaggcgaagccgaaccccctaagggccccatgccggatcctaaaaaattcctcactctaaaattgcacttgccaaaaacacagttggaggaaccatcctgcgtattgatctatcaggcaaattctttgacagagggcacttttagagcaagtgctgctttgcagcgcactcatcctatcaaaggaatgatcaaaatgg

SEQ ID NO: 121892 - DNA, 293 bp, Glycine max
  Clone ID: PAT_MRT3847_81075C.1
actaggaatctcaacctatccattgagacccatcaaataaaaatcgtttcgctcatgcagggactccgatcttggaaaaataatcccaaattacgaaacacaagtggtacatgccatgtcctccttttccccaaattcctaggctgttttgttgatgcgaactgttcgcctaaatagagaaagacattagcccagatcattcatgggctccacttaaagaactgtatactggacatgtctctatcgaggatggatccaaaacggaactttggccaggctgttcggagcgagac

SEQ ID NO: 121893 - DNA, 378 bp, Glycine max
  unsure (1)..(378): unsure at all n locations
  Clone ID: PAT_MRT3847_81076C.1
ggctcgagctcgttcttcttcgtcgttatcttcttcttttgttgtttgtgtgtttgttgtttctctcacctgaaaatgtcttgctgcggtggtaactgtggttgcggaagcgcctgcaagtagcggtaaccggcatgcgggagggctgctangatgtacgccagactttgagctacaccggggtcacccacaaccggaccttgggcctgggaggggcacccagtaagggttcaattcgggagtgctgaaatgggtgttcccgttgaaaacgatggctgcaaagggggagctaactgaacctgcaacccatgcacttgcaagtgaggtgttggagagctaaagcttcaagcagaaatggcccttataaataatgataaa

SEQ ID NO: 121894 - DNA, 279 bp, Glycine max
  Clone ID: PAT_MRT3847_81077C.1
agaaagtcttacccaactgtgagtgctgattaccagaaggccgttgagaaggcgaatatagagctcaaaggcttcatcgctggagaagatatgcgctcctctaatgctccgtttggcatggcactctgctggaacctttgacaagggcacgaagaccggtggacccttcggaaccatcaagcaccctcccgaactggctcacagcgctaacaacggtcttgacatcgctgttaggcttttggagccactcagagcgaagttccctattttgggcaacgc

SEQ ID NO: 121895 - DNA, 274 bp, Glycine max
  Clone ID: PAT_MRT3847_81078C.1
ggaatatgcaatatccagaggtggatctcctattagtgggagagcctgttcaatttgaatttgtagatcccacaactcaagtatgacaacatctcaatatccttcacaagtagagttaagtaattggctcactatactatctgcaagggaaatatctggtggggtgacaccgagacaattcagcttcccaaccaattgtctgtaccattatggatctaaaagtggctaatcctaatttggtagaagctgggaattgtgactcataggtgtgtca

SEQ ID NO: 121896 - DNA, 347 bp, Glycine max
  Clone ID: PAT_MRT3847_81079C.1
cctgtgaatatagggaggggacttacagcttaacaaagtcaccgtaaaaggtggtgaatgagagaaaggggtaggcgggcacaattccgctcacggaggaaaccggaagcctaaactgaaaagcatgaagtgcctaaggaggaacctaactgacaaaaacgggggggccctaaatgggagctaaccagaagggaaaagtggggggccaaccgcaataaaaaaagggccaaaacccggagagaggcggtaaagaaaaaagcgcccaacggcgggaaaaagtgaaccagaaagacgggcaaaagatgatttttcttttccgccgggcagagggaaattatgttcaagcg

SEQ ID NO: 121897 - DNA, 2404 bp, Glycine max
  Clone ID: PAT_MRT3847_8107C.1
atttgcaacccaaccttacacgaagcccctcaacggttctggaataggtggaattttctagaaccccaaccactctccataaaagcccaaaccctaatcttcttcactctgttgttgttttcagtgtagtggaagaatcactcccttatccatttccactcctcaccaagccacaccatggcctcaaccaacgctctctcttcagcctccattctacgctctcccaaccgccagtctctgacccgaagagcgaaccataatggaagagtaaattaccggaaaccgaataaccgtttctccgtgaaagcctccgccaaagagattgcctttgaccagcattcccgctctgctatgcaggccggcattgacaagctcgccgacgctgttgggctcactcttgggcccagagggaggaatgttgtgttggatgagtttggaagtcctaaagtggtcaacgatggtgtcaccattgctcgcgcaatcgagcttcccgatcctatggagaatgctggtgcagctcttatcagagaggttgctagcaagactaacgactctgcgggtgatgggactaccacggcttcggttcttgctcgcgagataattaagctggggcttctcagtgtgacttctggggcaaatcctgtgtctcttaagagagggattgataagactgtgcagggtttggtggaggagttggagaagaaggctaggcctgtcaaaggtggagatgatatcaaagctgttgcttccatttctgctggaaatgatgagttgattgggcaaatgattgcggaagcaattgataaggttggacctgatggtgttttgtccattgagtcttcatcatcgtttgagaccacagttgaagtggaagaaggaatggagattgacagagggtatatctcgcctcaatttgttacaaaccctgagaagttgattgttgaatttgagaatgcgagagtgttgattacagatcagaagatttcagcaataaaagacattataccactgttggagaaaaccactcagttgagagctcctttgcttatcattgccgaggatgtcactggtgaggctttggccacccttgtcgtgaataagctgcgtggtatccttaacgttgctgccattaaagctcctggctttggtgagcggcgaaaggccctgcttcaagacattgctatattgactggtgctgagttccaagctagtgatctgggtctgcttgttgaaaacacctcagtggagcagcttggcttggctcggaaaattaccatctccaaggattctaccactatcattgctgatgctgcaacaaaggatgagctgcaagccagggttgctcagttaaagaaggagctgtcacagacagactcagtatatgatactgagaaactggctgagaggatagctaaactgtctggtggagttgcagtcatcaaggttggtgctgccacagagaccgagcttgaggatcgtaagctccgaattgaggatgccaagaatgcaacttttgctgccattgaggaaggtattgtacctggtggaggtactgcactggttcatctctccactcatgtcccagcactcaaggacaagcttgatgatgcagatgagaggctaggagccgacattgtgcaaaaggcactgatagctcctgcagcattgattgctcaaaatgctggaatagaaggtgaagttgttgtggagaaaataaagagtggtgaatgggaggtcggttacaatgctatggtagacaggtatgagaatttagtggaggctggagttatcgaccctgccaaggtaacaaggtgtgcattgcagaatgctgcttcagttgctggaatggtgttgaccacacaggccattgtggtggaaaaacctaagcccaaggcacctgtagctggtgccccacaaggccttaccgtttaatttttaggttattagggctacggcaaagaacagttttgtgcagaaaattgaaagagcggagagaaatataccgatgatttcgttcgtttctgtgccaagaaagtaatacaccatgaattgctccagcattttcaacatcagtcaatctacatgcaagcagacgatgtgaatcctccctccatcagatttgagaaaataatgggtactcgttgaagttgtttatcttctattttagtagttgaaatgcaaacccactagggtcggcctagtgggatagtggatcataagttctaacttcaatgcaattatttttttttaaaaaatgtatggattatctcccagtcatcactgacttgttgccagttgtgcattttatataagttgttgctttttaagtcaaaaaaaaaaaaaaaaaaaaaaaaaaaaaaaaaaaaaaaataaaattatataataagaaaaaaaaaaaaaaaaa

SEQ ID NO: 121898 - DNA, 254 bp, Glycine max
  Clone ID: PAT_MRT3847_81080C.1
acccactcgtccgaactgaacagcgctccttatttcactcgaatctactcttttcctttattctataatacacgtgacaggcatcatatcatgaataaactctatacaaattactcaatcacataactcatacacttatcttctctcttacattctcatattctacacatgactaactgtatatcattaatcatctctatctaagctagattatcacataactcataacataattgctcatactcgatatatat

SEQ ID NO: 121899 - DNA, 789 bp, Glycine max
  Clone ID: PAT_MRT3847_81081C.1
aggtccggcgacccgggtcgacccacgcgtccggtgatgcgatcgacgtgaaagcgattccacatgcatcatatcacatcatattataaatccacaatcatatacacacacatccattctccgtgcgcaaaatccacaattcataataaaccctttctactttcctccaaatccatacacagcctaagcaccacgccatgaactttttcaagtccgtcttcgccgacgagcccgacgagcccgactctcctccggccgaatcggacaacccctatccgcctcagagccaccacgactccgcgtggagcttcggcggcctcatccaaaccctcgcctcgaaatccgagtccgtcctcgagaactaccgtcgcgatctcgaggaattcgggtccggtttgaggaaggaaacggcggtgatacgcgaagccgcctcacgcgccgtccaagacctgccggcgtcgctggacgtcggtgcgtcggtggcgcaggagtcgcttgagtccgtcggccaagccatcgatgacattggcagcaccgtttggaactcgacagcgcagattatctctcacggtagggactctctcttagcctctgatttcgattccgattctttcgattcgagcaattacgataataacaatgctagcaagaaactgttgagcggtagtggtagcagtgatcgtggtttggatttgaaacggtatagtaggtttgatacgctggtgcgtgcgcttcagtgtgatgtgaatacctatttggaagagcctgaggatttggggaattcaatga

SEQ ID NO: 121900 - DNA, 354 bp, Glycine max
  Clone ID: PAT_MRT3847_81082C.1
ggaatggctgcatctttatggttgcaactattttcttagctgaataaatatccctatgaatcggcttcaccacgaaatctgtctatttcttgtcatgtaaaaagaacatacctttgcgtgcatatattcaatgagttaataaactgaagacagttcatggtacgattgcagctgatctagaatatatcacacttagttgaatgtctgggtgattgaatgcttactccttatacgtataattaacggagtatcattatctgtgttggcagtctccattcattaacaggtattacggataaggctcatgaggctctgtgattggctccaagacaatgatgacaatttttctggttt

SEQ ID NO: 121901 - DNA, 736 bp, Glycine max
  unsure (1)..(736): unsure at all n locations
  Clone ID: PAT_MRT3847_81083C.1
cacatatcttgtctattctagtctttatgcagttatttagtgatgtttatgttcctattccattgctacctcaataacaagctagagactttgcttatacatttatttattttttaattattttcagatccattgttagggttgttgaagaacattttctttgtagtttgtagttgtacttattactatatggctgaattcaagtcttctgtatcctcaatcatgtctcctctttaaaatgttgccaactttgtgaaaaatgacatttctctcttaaatgtattccttctctcttagttgatagtaaacttctttttagtgcataattggaagtattttgttggcggatagcatttgggacagaagatctgttcacatatgtcaacagtgaagagtgttggttaaagcggaagcacatatatatttcatgtttggagtatttaggactcatgtgataaaagagtgtatgttggaagaaaatgattgacttttatgataaaacatcactgtcttaatgttccctgttggtgagttggttagaaatatgctgattttttctttctttgttgctgaacaggtggacatttactttggtcactatttactttgggcttgggtcttgtgtctncatatatgggtgtcgctataaacacaataaaattgattgcaccactgttaatcgtgctgatttagatactgaaagaagcacttatgtggctcctacacttgatgggac

SEQ ID NO: 121902 - DNA, 124 bp, Glycine max
  Clone ID: PAT_MRT3847_81084C.1
cctgcttctgctggtaccctatgctgacgctgcccacctgtgccatccttgtcttttaggcaaaaactaataccgaatgcaaatactatcgccactgaccaaatcttctgtctcatcattcatg

SEQ ID NO: 121903 - DNA, 353 bp, Glycine max
  Clone ID: PAT_MRT3847_81085C.1
aaatcgaagtagtgaagactaaagacaaatattgctatggaacaaacggcaaggagggaggatctggggtaacatatcaagaaatggtggaagatgaagccaaggacattaagaatgttcctttaggacctatacacaaactaatagcagagaacaccaagtcaaacagtttggttataaagaaaccacatgtggtgattcctcctcatatcatagcagaagccatatcaacgatccgtgatattgacattagatggtcaggtccaataacacagaaagaaatggaatatgttgaacagtatgtcttggcaaagtaccctgaatatgccggcctaattgaaggggatgggaat

SEQ ID NO: 121904 - DNA, 279 bp, Glycine max
  unsure (1)..(279): unsure at all n locations
  Clone ID: PAT_MRT3847_81086C.1
caactctgttccttccctcagagccggcgatnactcctcctncctacgaacatttcatccncctctggcatcngagntgaccnnantccaagcccgntctcgtctcctgnaactttgcaaantacccctacgcgacctngctncacagggagtnggaaagttgggcgacgtgggacgcaattggcgnantntgggcnggaacganggttgggagggtgnctgttncatcccaggaaagaaggggtgtnccnccaatggaaacggnnnnnngnttcngng

SEQ ID NO: 121905 - DNA, 311 bp, Glycine max
  Clone ID: PAT_MRT3847_81087C.1
tattgatgtagtaatataccacatgtaatgccatgatgtagtgaactagctaaaagtctatacccttgcacagaagaagtattagatgagaatcgtcagcatcaaatatgcattttgcctgacggaagcacaagtatcagaaaaatcctttgttgaatggtataaacttttagctagtttattatggcgtatgggatttaacatactattgtttcattgtaagaatgtgttttggacgtgctttttcttacatgtgatggtgttatgttgaggaacgtaagaacgcctttccgttgaaacttgcttctgtt

SEQ ID NO: 121906 - DNA, 656 bp, Glycine max
  Clone ID: PAT_MRT3847_81088C.1
tatttccatcttccagtctaggatatacaagcaatgtctaatatgatagaggtgagagttccaaatcttgattgtgaaggatgtgcttcaaaattaaagaaagctctcttcaagctcaaaggagtagatgaggtggaagttgaaatggaagcacaaaaaataacagtgaggggctatggtttggaggaaaagaaggttcttaaggcaatcaaacgtgcagggaaagcagcagaaccatggccatttccagggcatgctcatttttcctcattttacaagtaccctagttacattgttaaccattactatgatgcatacaaaagtgaagctaccaatggagtccactctttcttccacacccctgcagtgtattcagttgctgtggcatctgatgaagcctttgcttctctctttagtgatgataacccacatgcttgcactataatgtaattgaactaaaccaggttcatgtatacttgttttcttcacttaaggttagtttctacttgtagagaagatgaagaagcaaaattgagttaggcatcttttccaagggaattttgtgctttgtttattggttaattttttttgccagttgtcttgagtgtgttatcatgtgcctccttttcatatccattgcgttgcttggctccttt

SEQ ID NO: 121907 - DNA, 1292 bp, Glycine max
  Clone ID: PAT_MRT3847_81089C.1
aaaatgtttacgaagcggacacgtcctgtgtcgcgaaaaggaagtcaaagaggtagccactgatctcggcgtcgatggagaacggcaacggcctgtctcctgcgagcttggcctccaccgatctcgacatcgatggagaacggcaacgacgtttggaggtaggtgtagttgcggtggagaatggtggtgacatggttcctatagaggccccactccatacccttcgtcctcgccttcttcctcttcctcgcgtagatctcactcggcctccaatgtgcgtcctactcctatgcgccccctcactcctcccactcagacattagggccaacctcattaggttcgacgcttccaaggtcgcaaaggacaagcacggcggagcagtgacgtgtggatcgcttcacatgggagaaattagggttgggaacaaaagagcgaatcaaagacaccacatttgtaatgagactttccttatttggggtgctactaccaagtttaggatgggacgtgttgatggacacaatcctcatatcaagaaggatttgcccttgacttggactaatgtctatgaggaggccactaattcatctgtatcattaatgttgctttggtaggtatgttggcaccctatgctcgaatagggaaaccatcaatatctagtgggttccttggtagaatacagaaagcttatgcagccttgcctagcagtgtaatttcaacagagacttggaacatacttctacaagggtataatgtatggtgctgttggatttgcatgtggtattataggccaaggcattgcaaatatgatcatgactgcaaagcggagcataaagaaatcagaagaggacatacctgtgccacctcttgtgaagagtgctgctctttggggcgtctttctagccatttcttccaacacgcgataccaggtcgtcaatggactggaacgtttggttgaagcttcaccattggcaaagcaggttccccctgttgctctggctttcacagttggtgtgcgttttgcaaacaatgtgtatggtggcatgcaatttgttgactgggccaggtggagtggggtgcaataactcctttatcttgttctgtattgtaagtcatgtaggtgtgattttctagccatcagttttcttagatttcaagcataactgaacagtatattgatggatgaaattcagattccggaatccgtagtgagcaaaggttgaattgtgctactaccttggttaaagttgcatggttttataattatatagaaagattttccttctggcgttaa

SEQ ID NO: 121908 - DNA, 187 bp, Glycine max
  Clone ID: PAT_MRT3847_8108C.1
tttcagtttacatttcttaagaaaaaaaaagcattactttgtaagcatatacaaaagtgaccatgaacttttatattatatgtttatatatagaaatacagatgaaagtccaaaaattgtatatttgtcctgataggagttgtggaagttattataatgtgaatgctatcacgatatcccccttgaa

SEQ ID NO: 121909 - DNA, 953 bp, Glycine max
  Clone ID: PAT_MRT3847_81090C.1
ctccgttgttgtgaatcaatggcttcgagctctgcggcggaaggagtatcaatggacgatgattacgaaaccttgattgcaaccaccgacgtggagcttctgaagagagcgtggcgcaacgagaaggcggccccagagattctccgctacgaatctaaattggtttcccgcgtcaacaaagtcattcaactcatggaagaaattgtggaggaaaaatccagtggcggtactgatcctctttcggtgtctctatatcagatggacttggatagaactctctttttgttaagatcctatctcaggattcgcatccagaagattgaaaagtacgtgttccacatccaaaaaactgaagaacttaggaacaggctatctaaatacgagaaagattttgccaaaatgtgtgaaaatgacctagagcaacatctggatgagagtgttctgtcgaagttgcctaaagattataagtctgttctgaggcaatcttcaatgagtgaagaggatgacatggtcccagaaccacaactagacacatttgttttgtgtagaagtaaagagtatctcacgggcattcaactcgaagatggacctgttgatgacaggtcgaagctgtttgagatggagccaggtgtcctccacttcatatgttacaaatcaataaaggcacttgtagagagtggcaaaattgatctcctctgatatttgcaatgatgcttgtgcaagtgacatagtgaataagcaagtgatatccctccttgtttaaatgttcacaacatgggagtgtcagtgtaaaacatataacatataaggtggtatcgtgaaatacactatttattcctacatttttttttcaatattgtgtatggagctgatataggacgttgtcaaggaaagcagtttcaaacttataaagggacaatgttttctcatatagtgtcacgtgaaaattaaac

SEQ ID NO: 121910 - DNA, 448 bp, Glycine max
  Clone ID: PAT_MRT3847_81091C.1
cccacgcgtccggtcattgatacttgttgtgctacttttgctgaaatacaaaagagaggcaaagatttttgggccgaatttgagttgtatcttgcagatcttctcgttgggcttgttgttaatgttgctttggtaggtatgttggcaccctatgctcgattagggaaaccatcaatatctagtggattccttggtagaatgcagaaagcttatgcagccttgcctagcagtgtatttgaagcagaaaggccaggatgtaggttttctgtacaacagagacttggaacatacttctacaagggtataatgtatggtgctgttggatttgcatgtggtattataggccaaggcattgcaaatatgatcatgactgcaaagcggagcataaagaaatcagaagaggacatacctgtgccacctcttgtgaagagtgctgctctttggggcg

SEQ ID NO: 121911 - DNA, 189 bp, Glycine max
  Clone ID: PAT_MRT3847_81092C.1
atcacttaaacttggaacctaaggctttgagggttgaatattggtattcgtatgtatggaccttactggagcgttcaatgaccttcttcaagaacaggatggcttatctgttattaagtatgcttttagtaagggtataacatttttggatactgcgtatttttatggagtcaacgcttatgaactttt

SEQ ID NO: 121912 - DNA, 576 bp, Glycine max
  Clone ID: PAT_MRT3847_81093C.1
atgatcgcatgtctgactgactatagccagcgcatgcagacagaggaatgagccttcaagactgcccgactattatcattgactgtatgcatggctgggctcactagatgaaatgaagagacgagtatacattgcctgcagacgctggaggacctcacagctatatcagcttgaactggtctgtatgatcgatgtggctgtgacagcaagcgaaggtaggctcgaaaagaatgtcataacaaaggatggaagactggatattttgcttctcacatacaaggagtcttggagctgtagaaaacgacacatgaatcatcactgaataactcattgaacagtgatgcacaaccaccagaccggacataagctcactctctgtctatatatgtggctgaagattgcgggctcatagcttactatggagctataacatctgtgcaatcccttctgcccctacctccagttatctgactcaccgagaattgtgaatgtatagacaactatggagcaattagagagggtgccgaagagatcatggactatagaagtcttcaatgatgccaatatcatcactga

SEQ ID NO: 121913 - DNA, 363 bp, Glycine max
  unsure (1)..(363): unsure at all n locations
  Clone ID: PAT_MRT3847_81094C.1
aattctttgatgtcaaggctaagagctcagctggagccattccggtatgtcgcagatgaagcgagtccgtgggaggagaaatctgctgtggctaggcttgcaaataaagtgaataagtctaagcggaataaattgtggaggaagaaaaagaggaagcgcgttgtggagatgctggcgaaggagcacgagcaatttgaacaaattgaccgtgaagctgatgaatggatagctagggagcacgccaaggaaattgctaacagcaaggtactgaagatgaaaganattgcgaagtctaaagccagagaagagaagaagagagtagaggctgagattgagctgctcttggtagtgagaaggcttcag

SEQ ID NO: 121914 - DNA, 376 bp, Glycine max
  Clone ID: PAT_MRT3847_81095C.1
atccccctccctttccacagttcttaaacactctgccaattactttctcgggcggaaccaattatctctctctccctctctctctacaaattccttcttcactgccaaacctccatcattcacatatatccaactcaatctaacgacattctacaatacccacaaaccctaatcttagagcctaatcattctccaatacaacaccccaacgaattcttcttcgattcaaaaattctctactccatctaaatactgatcccaactcattttacgagatctgacaacacagaccaggattgacacatgtctctgaatgcagacaacatatgcttttagtcaataagctcatggaaacactttactgactgacacatat

SEQ ID NO: 121915 - DNA, 296 bp, Glycine max
  Clone ID: PAT_MRT3847_81096C.1
cccacgcgtccgggttgtatccctaaatgaccccagctcgaggtcacattaattatttcccagagagagatagagagtgtgtgtgagagagaatatatattatattccctttgtattatctcggattttactagtattgttatcaagaagaagggtgaatcggattgcgaaaaaaaaaaaaaaaaaaaaaaaaaaaaaaaaaaaaaaaaaaaaaaaaaaaaaaaaagttaatccttcttaaaagatatcaaaaattcataaaccataaaaacaagggggcggcccttttaaagggt

SEQ ID NO: 121916 - DNA, 163 bp, Glycine max
  Clone ID: PAT_MRT3847_81097C.1
cggcttaaatatgttttttattcttgatatatactggaattttgcatttgattcttgatatattttttcttcgaattgaatccctcgtatttcaaaagttttattttacatctctgttgttagttgttagttaagtatttgatggtgcaatttgcgacggctc

SEQ ID NO: 121917 - DNA, 165 bp, Glycine max
  unsure (1)..(165): unsure at all n locations
  Clone ID: PAT_MRT3847_81098C.1
taaaatacagagaagcctgacttcctttaatagaatttttgcaatgaacnnccggccccctcccttccttaacggggccaaaatactccgatggctgagatttttacaaaaagaccctccccccccccccccatnatataggcaaatatcaatccacaccccccc

SEQ ID NO: 121918 - DNA, 422 bp, Glycine max
  Clone ID: PAT_MRT3847_81099C.1
cgtacgctcggatcctttagggcggacgacgtcgacataagggggatgagagggggaactctcggggcggacctagctctagcgatgtaacaggagctggataaggttcaaaaatatgtgatggacacgccctatctcttgcctatcctcaacacgctcactttcttttacgacaacaacacttcttaagtgcgttgaaacctccgatccaccaacacgaagcgcgcgctcttcatcaactgcgaatcactaagaacctgttcacttccggcaagtggcctcggatagcgaggagaacccggtccattccctcgccgcgtgctgcgacaggataccaaaggcttcttatttgtgtatagctagcactgctgacattactggtaccacaaagaggcttagacaagagcttgaaactacatcac

SEQ ID NO: 121919 - DNA, 484 bp, Glycine max
  unsure (1)..(484): unsure at all n locations
  Clone ID: PAT_MRT3847_8109C.1
ttatacaatattgcatgacagaatgtgtctaaactgaacttttacaagcaaacaaaatcaaaaaagaaacatatatgacaattaaaaaaagagctaagtaaccaaataagaagagagtagagacagaaagaaagagtgaaaacgggttgttaatctttttcatacattgtagtactacatgtcaaccactaatgcatcaatcttggaggaatcacaagcactcctaccactgctggaaaggctccactgatcagacactatgcttgctgcagcagatacaggtaaaatgccacctgcagcaacaccacatttggctacaatcctgacactctctatcaactccttggttctagcctcttgtgacaaaatgtccatcaactnntgaggagttatcacaagcttcactttccagaacctgctgcttttactactactagtaattttgctccttttactactagnagtaattctgctccttttaata

SEQ ID NO: 121920 - DNA, 426 bp, Glycine max
  Clone ID: PAT_MRT3847_810C.1
gtggtcccaagggaaacggggtgacaaagagcagcttgcttctccaattggatcattgctcgactcgatgggtaacttctagtggtttgccggggaagctcttgtttttctttcaggagttggttggtggcatggacacctagccttttcttatttttagtatttgtttgctggcacaggtagtagattcattctccactccaccagtagcagatgtagaatctgaaaggtgggattcccggttgattggatgcttccgttagagcttcttcccctcctgtcatttaagggcacctagcttacaatcactagtgaaagagtgccaattgacccaactagcgaatctgtttacaaccattccatctttttcatttccgtgaatacgcgctcgaaagcagtcatttttcggcttgatagcactagcac

SEQ ID NO: 121921 - DNA, 210 bp, Glycine max
  Clone ID: PAT_MRT3847_81100C.1
taagtaaggatgcgaggggatgccagtgggggattcacacaactcagtttcatagtcttccatagacctgcagaactgaagcgcactaccctccttgctcactttcgcttttgaggcatcaccacctgatacgtaccttcaggaagcgctgatttcgtgctcgaatatgaacgggaaccgcttgataatggaggtatatgccatatcttg

SEQ ID NO: 121922 - DNA, 138 bp, Glycine max
  unsure (1)..(138): unsure at all n locations
  Clone ID: PAT_MRT3847_81101C.1
cgnntctatcggntcgntgtgctctcatgncaacgtnctactatgtnancagctcagaacaantctccatttcttcgcagatgnccggtcnttcaancctcaccgttcccggtttcgctggttgnttgaccaaatctc

SEQ ID NO: 121923 - DNA, 340 bp, Glycine max
  Clone ID: PAT_MRT3847_81102C.1
ccacgcgtccgggaggctgtgagggctcacatggcgttctgcaacatgttcaagttgaaccccgccgtccgcgtggccgacggcatgcgccagatgctccggaggcggtccggtgatatgtcaaagccagaatcggccaagaagtacgaatcatcagtgacactgtattgaagagttcatccatcctaaggcctgtagaccgtctagccctcttctcaggctgaaataccttccaccttttgtcagtttgctgtatgttcttcttatcatgcctatgccttcttggaatgtacatacgattcatgcaaaaaaaaaaaaaaagggcggccgctctagagga

SEQ ID NO: 121924 - DNA, 233 bp, Glycine max
  Clone ID: PAT_MRT3847_81103C.1
gtgtaccggaacaggattgtgtttgttcttcccctatcaaatatcatctttccgggaatttagattttggagagagaaaataaaaagacgcgctcggtccttcttctctttctaccactcaatttcaaacccattaattcatcttcccaattgaacggatttcacaaattatatttttcttatactcttactctgcgaaaaaatcgaagaggcataggcatttctccatcaac

SEQ ID NO: 121925 - DNA, 261 bp, Glycine max
  Clone ID: PAT_MRT3847_81104C.1
ctcttttctttttcttactacttggttttctttcttaccaatctaaatctttgcttcgtgctcttcctcttaccagggaacctttttcaaggacaattcttggttccccaagtgcctaaattcctggggtataactcctggtctaatcttccttaacggacttcttctcttaaaaggtgccaacttgctttttgacccgaaccggtggggggacaaaccataaaccggaccccgggacacgttttcccacacaagctttta

SEQ ID NO: 121926 - DNA, 773 bp, Glycine max
  Clone ID: PAT_MRT3847_81105C.1
gtttgggttgattcatagaatttctatttgaaatttaattggtaaaaaaactaaaaaagtgtaaagagttaaatagaaaccccttttgggaccaagtaacccacgcgtccgaaaagacagaacagaagaggttctgaaagactgaaactttcattcagttcgtctatccaatccaatctgttatagttccactttctcccacactacacattaacacatggggctcgactcaaatgataaatgttgcattttacaattgcaagagaccctgagctgaacaacacatgtctgtccctgtctctgtttctgtctctggttcagggttacttagttttccttcaattcagcgaccacattccaaccctccacccaaacacgccgtacttccttccacttcccgtgaacccgacactgatactaaatacttgtgtctatgagcccatttcaaatcatagctagccaagagctaccttaccaaactttccctttccgaggcttaggtcaccgactcaccggacagcaccgcaccgttgtcggatggattgcaagtacctaatctgatcgtcgcctattgaatttcaatccgaagcaattcatttcagataattggttcgtccccttcgagtttcagataatctaatatcgttatctatttgagaaaaatattgtctgtaaagtatttgatgaaatgcctaataaggatttgaatccctctacatggtttaaaggggcttttgtgattgagaaaacagtgtaagaaatggattcagacc

SEQ ID NO: 121927 - DNA, 330 bp, Glycine max
  unsure (1)..(330): unsure at all n locations
  Clone ID: PAT_MRT3847_81106C.1
gtcnngcacgcgtaggtaagctcggaattcggctcgagnattgccacacntnntannacgnnnaagaggaggtntannttacgaatattatcaatttntctntgctagnttngnctagntaattctctatnnctnaaaaangaagtaaaggttnnggcacctnaanaaaatgtccataaggttagtaattttactatatatatacacaacantcagngncanatatgnaggcacccaccaaacnttctcnnaccanagccangaccaatatggatcgaccacanttatactcncncctcnagtgctcgtgatgctcttctntctagcgaa

SEQ ID NO: 121928 - DNA, 126 bp, Glycine max
  Clone ID: PAT_MRT3847_81107C.1
caaatttacttgaatgaagccatgggatattctgtggatgtcacagctagtgatattttgatggtttatattaaggaaggttcggttgatctagctttgaggtggctgcgtttcatgggttcatca

SEQ ID NO: 121929 - DNA, 462 bp, Glycine max
  Clone ID: PAT_MRT3847_81108C.1
tgaagttcctggtcaaaatgcttatgcatacttttatccaccaactaatcctgatttccaagctagtgaagaagaaaagcctccattattattgaagagccacggtggaccaactgctgaaacacgtggaattttaaacttgagcattcagtactggactagtcggggttgggcattcgttgatgttaattatggtggaagcacaggttatggcagggagttccgagaacggcttttgggacgatggggaatagttgatgtcaatgactgttgtagttgtgcaacatatttggtgaacagcggaaaggtagatggggagcgactttgtattacaggtggctctgctggtgggtataccaccttagctgctcttgcttttaaagaaacttttaaggctggggcttctttgtatggtgtagctgacgttaacatgctgagagctgaaacctcataaatttgatc

SEQ ID NO: 121930 - DNA, 400 bp, Glycine max
  Clone ID: PAT_MRT3847_81109C.1
ccaccccaaacaaacaaagggggggattttaatggccagaaaaaaactaacttgtaaattttaaacagaaaaattttctttaaagatttccataataaccccgccaaaaaaaggggggcccctttggggttttctcccttttgggaaaatgggaaaagggtgccttgggcaaaaattaaaacttcccccgggtgctttgacccgaattataaaaaaaagggggtaaaaaaataaggccctcaaagggaaccccatccccctttaaattcctccagtatatcaggtggggggggcaatgggattatttttgggacccacatcggtaggatggtctgaaccaaaagtagagccctttttttgggggcctgaaagaaaaatttgggaaaagccctgtccaatt

SEQ ID NO: 121931 - DNA, 416 bp, Glycine max
  Clone ID: PAT_MRT3847_8110C.1
accttcaacaagaaacaagaagacgtgcttttcaataccaagaagcaattatgcatttcctcagagtcacaagggaaacaagttgctgttttccaatgtgaaagtaatggagagttagttcttgaactcatttctcgcccaagtttcaattttagaggagtaaggccagccaaagtattgggaaaaacttcaatcaatctgggggatttgcaagatgtagcatctaaattgccaaaagagaagtggttagatttgacatctacagtcaattggtcaaagcctattggtattcgcattggtttgtctttaactcctccagtttcggcaccatatgagttgcactttgtttctatgtatccattcaaaggaagttagttttccttcctgcttccaagaaagttccagcaaacaaaatg

SEQ ID NO: 121932 - DNA, 379 bp, Glycine max
  Clone ID: PAT_MRT3847_81110C.1
cttttaccattatctgcgactgtgactgggggaaggtgactcagcctaaaggaggaggccgatcgatggcacacggggtgaccttggaggacagatgtggatgctaggtggcaaccactggtcaggcgtgcgccccaggcttcaactcttactaccatcgggtgctcatctatggcagagggaggtgtgtgattctgcacacggtggcacatgaccaacactgtgtcttgcccagcatgtcggcagcacattatcttcactcttctggctcttactgggctatcagttgtcttcatgccgctcagtccaaccttggacatgccaccttgttcgagaagctatctgtctgggccatcagctatatgctatgtgaacatag

SEQ ID NO: 121933 - DNA, 1165 bp, Glycine max
  Clone ID: PAT_MRT3847_81111C.1
tacggctcggagaagacgacagaagggcgccattcttcgcagcaaacacgaaaaggttctttctaacctcctcagtccttattccacttcaatcgcaattatttaatctaacaaataattgaaatcgcgattgattgcagtgatcgagatgctggggaagacgaggaaggtttcggcgcgtggcgaagccgtggcggcgaactacgccttcggtccctccgaagatgacgtaatcatcaaacacaggcttctcacgcgcaccaccaccaccaggggtgaccctcccttgaagaagcttcagaagaagttcaccacgttcgtctccgaagtcgacaaagacgaagacatcaactacaacgactgcgagaagctggctagagcgtttctgcaggagctgacgacattcgaaattccgcttctgaagagcaaggcgattgtggaggcgaacgttagggagaaggagaacttcaacgagttgaaggaggaaatgaatcgccagatcctgctggcgcagtccgacattgaggatctcaagaagcagcttgaggagagcaaggttgagaggaggcacaaggaggagtgcgaggctattaggaagttgattgccatgcagcccccgagatccgagacaatgaaggttatttcggagttggagaaggaaattgccgcgttggatgccgagaacacggctggttcgaggttgttggagctcaggaagaagcaatttgcgctgttgttacatgtggtggatgagttgcagaacacaatagaggaagagcaaaagagccttgtcgaggagatgagaatggcaacggaggagcttaagaatgggatggtagacacaaatgggggggccgaagcaatggcaattgaccagtaactagattgaatatcagtcttcctgttgtaacatttcttacatctcaatcatgttttttttttctatagtgagtaggaaacatacgaaaatgaaacatcagtattatgctagtgcttagaccttagtaaaactaatgcattttccctaaaaaaaatggaaatactaaatgcatttcgattggatttttgtatcaaattttgtctagccattcaattatagttcagtagtgactggatttttattggctactagtagttatgaacccttcataacatgatggaaact

SEQ ID NO: 121934 - DNA, 813 bp, Glycine max
  Clone ID: PAT_MRT3847_81112C.1
caatcacaagcagccacgcgtccggagttgggtttaacttataattgcgtgatcgattccgattcgattgattcctcttctctctcacgcgaagcagaaacacgaaactaagaatccatggcgacaccagcgacgacgaagcgaaaaccggtgttcgtgaaggtggatcagttaaaacctggcaccaacggccacacactgacggtgaaggtggtcagttccaagccggtgaagacggtgagcacccgcggcggtcgaccgacggtgctagccgcgcgcccgtcgcgcattgccgagtgcctcgtcggcgacgaaaccggaaccataatcttcaccgctcgcaacgaacaggtggaccatatgaatgctggcgcaactgtaattctgcgtaatgcaaagattgacatgttcaagggatctatgagacttgcagtggataaatgggggcgtattgagcccacagaccccgcaaattttgacgttaaagaggataacaacctttcgttagttgaatatgaattagtgaatgttgttgaagagtgattttgtcttctgagagtgaatctttggggtttacgggaggttttaatttttattttgacaccattgaacaattggctgcggtgcagttttcttatggtacagtctttgcttatttagtcttaagattgctgtggttaatttaaggaatgatatttcagatcagttttgaaatgtgacaatggttaagcttaagatgcaaacgtaaatattatgtgttacctcaaataaatactgtattcagtcctttctgaacgaaaaaaaaaaaaaaaa

SEQ ID NO: 121935 - DNA, 839 bp, Glycine max
  Clone ID: PAT_MRT3847_81113C.1
cccgcgtccgcggacgcgtgggataaacacacacactctacatgtctgtctctctgcaaccgacatcctctgcttttcaattctgaccgagttatgggagatatggttgaagaaattttgactcttgctaattgtggttttagatgtatgtgtttttatcattgactcttcgttagacttgaatgataaaacggttagagttagacacgtgcgttttgattttttttttctttcttgtgtgtttgtttggataagttcctttttgttggatctgtttgtggggggtgttgattttgtggaccatatgtttgattttggttgttgcaggggtttttgttcctgaaagaattgaatatgccgggaattgttagaaacggggttcatcatgatgaaggtgggagtaatgacctgaatggggaccatgattccacctctaaggaacccttgaatctggttaagtccccgaggggtggttccgtgagtccgcaaagaggccagggtgatgatggtgctaattttgggggtgatgaggtagttgagccctccattgaacagctttatgagaatgtgtgtgacatgcagagttccgatcagtcgccatcaaggcaaagctttggatcagatggcgacgagtctagaattgattcagagttgaggcatctagttggaggacggatgagggaggtggagataatggaggaggaagtgggggaggagaaagggctgccagaagggagttcaagtagtgaaatatcttctgcattgggtggcttgtccaatgataagaagttgaatcaggtggatgagattcaggaggttcagcctgcaggcatgcaagc

SEQ ID NO: 121936 - DNA, 348 bp, Glycine max
  Clone ID: PAT_MRT3847_81114C.1
actcatccatatctccttactagcgtgccggcttctttttacaagtgtgcgaacggttttccttgattcatgacactgcctatacaccactccttcttccattgaaaaaaaactctgtaatccattcttctctagtataacacacccaactcttaattgaaggaaaatttgtacatgctgcttctggtaaaactcttccaacattaaatcctatcacacgtgaagtaattgctcaatttgctgttggtcactctgatgatctctatcgatccacttcagctgcacaaaaagcatttgatcattgaccatggcctaagatgactgcttatgaacagcaaatgatcttgt

SEQ ID NO: 121937 - DNA, 377 bp, Glycine max
  Clone ID: PAT_MRT3847_81115C.1
cgcagaggcatatgaatagggcgcgggctaatattcggtaacggcggataccatcgattataactcgactgtcacgaaggtgtggatggaaacactgtctccatactttatcatttagacgtcattactctgctttctagaccacagtgatccacacgctgctatcagtggacgaggataatatcttacacgtggagctacagaatgaacgctcaaagttggatcggtcgctcaacgaggtgactcaaatgtttggagatggggtgtgcgactacgccgacgtctccggctaaatacacgagctagtaggggactgcactgataggttgaggagtctctactcaacggtcgagccagatggctcaagaggcgaaggg

SEQ ID NO: 121938 - DNA, 340 bp, Glycine max
  Clone ID: PAT_MRT3847_81116C.1
tctcgcgcgtgtcttatatgttagcaattgtgtctctatttgtgcattcatgccttgctgctactctgaataccccttttctgaggcagatgcttacgacgatgtgaacctccagcaccagaatacaccgcgatatccttcccatcatgtatgtccccacatcaatgttgtgctacacctcactggggattggaactcccctgcaccacttggctgctatcatggatgctgtcggggaaaactcactgctcgatggcagcactcagtacaccctcatgcccttcagacctatagctagtgagctacagcacagcccccaaagaggatgtgttcagtgcca

SEQ ID NO: 121939 - DNA, 307 bp, Glycine max
  unsure (1)..(307): unsure at all n locations
  Clone ID: PAT_MRT3847_81117C.1
gcgtacgttttggtactttnaatcctcttgatccttttttttgtactaaaacacaaacatgtcagaagatgtgtttataatagatggaggcccaactccatttgttaatagggtcattattgaacttgctgaaaacggaatcaattacgattacaaagaacaggacactgaggaacaatacatctattgaactacaatgaacccactgtacatgaatattccggttctaataaacattattcaacctatctttaaatccactaatgctgctcatctcatttaagaggaccttaatgacagcaaatcc

SEQ ID NO: 121940 - DNA, 1717 bp, Glycine max
  Clone ID: PAT_MRT3847_81118C.1
ccacgcgtccgatggattctcatacaggtgatatttcgctagaattccaaatgggtattgataattttcccattaggtagggttttgctttctgagtaatctagattttggagtttgggtttgggggatacatagacatgggttcaaaagatgagaatagtaaagcatggaaatggggtttgggtttggtatacatatttgccgtggcaacaatttggatagctgctagctttgtagtgcagtctgttgtagatgctggtgtgtcaccattccttgttacttacatctgcaattctttatttgtggtgttgattccaattgttgagattgggaggtatttggaggattcttatgggagtttatggttttggaggagtgagaagagtaatccacattcgaaaggaagggtaggcgagtcagagaaggccatccttctcaaagataatgatgctgggaatgaagctagtgaatccttggttcttgaagaggttgatgttattcaagaaaggaacaatggttctgaattgcttccagcagataaggtggtaggggtatcggctgatcaagttaatgtgattgaaaatatcagtaatcaccttgatgagaaagggcggtggagtcggtgcagagtggccaaagttagtcttttgatctgcccattttggtttttagctcaactcacttttaacctgtcattgaagtatactacagtcacagaacaataattgtaagtctaggtgattcgcaatctggtttagcaacagttgcatcgaatcctcttcttggagacatttttgcacttgcttccgcaggattatatgcagtttatataactcttattcgcaagaaattacctgatgatgatggaaaaagtggtgaagccagtacagctcagtttcttggatttcttgggcttttcaatgttttgatttttcttccagttgccctcatactgcattttaccaagaacggaatcttttagtacactaacctggaagcagcttggtctgataattggtaaaggattgctggataatgtgctgagtgattacttgtgggccaaggctgttcttctcacatctaccacagtagccacagctggtcttacaattcaggtcccattggctgccattgtggataccttgactggcaatgctccgcgctttatggattaccttggagcgatagctgtcatgattggcttcactggaatcaacattccttctgatacttttagcaaatccacagaaactactgtggcattggaaaatgagaacttgaatacaaggactgaagagcttactttgtctataagccaagattcagttgccatatcattacattgtacatgagaacattcacttcagggtttagttgacgggtggtctttttgtaaccatgccagattagttgcaaaatctgaaatgtactactataccagacaggaaaatagaaaaggtagaacaacggaagatggttcactagacgaacacatgagagattgcgcctggtcagacatgtaaattgccatgtagttcagcaaattattacttggttgagattttcattgatggtttgagtgccttagtggacgaccccttaagaaagggttctcccatgtaccacatgtaatgataagtatgggattctattgattttgagatactttgtaaatgtttagttctatctcttaaacttgattaaaaggtttcaagtc

SEQ ID NO: 121941 - DNA, 263 bp, Glycine max
  Clone ID: PAT_MRT3847_81119C.1
tttttcttccgattaaaaaaaaatcagtcaaataaagtgttgttcgcattttaatgcatgatcaaatgatcaaattttcatacacacttttatcgccccttgctcttgagacccaaaacacgtgacataaacgtgaatataaatacgaactcagtttctcaacactctacaatggtgacgacgcttctaaaattctaaaaccctaaccctaaccctaaggaaaaaaaatcccaatcttcgcaagactcgatgaacgtggatca

SEQ ID NO: 121942 - DNA, 401 bp, Glycine max
  unsure (1)..(401): unsure at all n locations
  Clone ID: PAT_MRT3847_8111C.1
ttatccatattttgtcaccattgcacaccattcatttcataaaaanaacgggggtgcgtcacgtccatgtagcgtacaaagccccgaattcggctcgaggaaacctaacagcgccatagctttctctattttatagtgggaggatacgcttctcttggcacaaggggagcaccaaggggcctgtgcctgtcgttgcctaccacgcccatgtcggaacccgacacccaggcgccgtcgccgtctacgtacctgctacagcgcccgccgattctgtagactgcgtttccgatcttcaagcagcggtcgtggtcgtcggacgcctttcgagacgaggcgtggtttctccgcaaggggaactggtaaaaccgacgtaattagagcgttaccgatgaagacgttgg

SEQ ID NO: 121943 - DNA, 253 bp, Glycine max
  Clone ID: PAT_MRT3847_81120C.1
ctgtaatgtgatgtaggacatctcctattttgataaagaaagagttggtgacttgacaagcagacttgcagcagattgtcaacgactatcccatgttataggaaatgatcttcagctgatattacgcaactcttgtcagggaactggagcaataattaatttgatggctttatcttggcctctggcattatctgccttggtgatttgttctattttatctgcaattttcctggtttatggccagtatcaaaga

SEQ ID NO: 121944 - DNA, 263 bp, Glycine max
  Clone ID: PAT_MRT3847_81121C.1
gggaaattaataaaacattatgtttatactaaacatgggaacaattaaatttccatgtgatacaaccatagaagttcaactccaattatttaaattaccccccaccataaatatcttaaatttatcaaaaggcactacttaattaatgcatatcacaacaccctttcatagcttatgtacaacacatccctctacctctaacaaataagttcttcactgcgttttttttccaccccggacataccttgttatatcattgtata

SEQ ID NO: 121945 - DNA, 631 bp, Glycine max
  Clone ID: PAT_MRT3847_81122C.1
gttcgggacgcgtacgcccacgcgtccgcccacgcgtcccaaaaagcgtttgctctcgcgccagtcaaaaaccctctcagagaaagcacacaacaaagatgaccgacgaagacaaacccaaagccttctccggcggccatcacaaccaccctccgccgcagccacaacccttccccgccgcccagtatggcaccttccaaggcgtcgccaactaccctccgccgcagccgcaccccgccatcggcttccctcacccggttccgccgcccggcgccgtcgactcctccgcccctcctccgccctactacccgggctaccaagccgttcccggttatgcagttgctgaaggaagacctgtaagagaacgccgccttggttgctgtggccttggatgcggctggtgtctgtttatattaggcttctttcttgctggcattccgtggtatgttggggcaataattatgctttgttccagagtagactatcgagagacacccggatatattgcttgtgtagttgctgctgttctgggcacaattgcaattattcttggtgggaccgagggagtagatgactggtaatcttcatgtcaagagttgtgtaaagtttgttagacgagtggtgtatgtaa

SEQ ID NO: 121946 - DNA, 504 bp, Glycine max
  Clone ID: PAT_MRT3847_81123C.1
ttccgtttttgggtttttttttttttttttttttttgcataaattgggttggtaagtgtcttcaattcaatggtatctaaattgtagttgacccacaaatggagggcagatacccaaacagatcatcttgaattcaaccaaattatttttctttttccttttttggccctgggcatctctctctatccacgcccaacttgcccccaaaaataaaggtcaacacagaatactaatcttaaagggacccttcccttatctaaaggaaggttgatctccatgctaagaaccagacttatatcatacgattaaatcgacataagagtcttgtcaggaaatttgaaccttgaaacatattcccaccttaatcgcgggcctaattcacctaaacttgttataaaaaatatatataattggcttccactgttgaaagaaaatgagtgaatgaatctggtacatcgattggtcaactgatattgagctgaagtatgaacccccgaaaaagca

SEQ ID NO: 121947 - DNA, 1499 bp, Glycine max
  Clone ID: PAT_MRT3847_81124C.1
catcattgtattgtacagcacagccccaacttcttccttgtgttctgttctgttctgttctctttctctttctcttctttttttccacgcgattctttcaattttcaattttgattcaatcacattcttcttttacattctcgattccttccttccttacttaaaaattcttatattatgcatcatttctcaccaaccacctagggtttctctccgacgttaggtttttttttctcgccgggattttgggggcagacttaatctccggcagctatggcctccaacttgcagatgagtcctcaggtggagcagatccacggtgaaatccgcgacaactttcgagccctcgcaaatggcttccagaagctggataagattaaagatgccaatagacaaagtaatcagctggaagaactcacggacaagatgagggagtgcaaaaggttgataaaggagtatgatcgtgagattaaagatgaagagggaagaaatcccccagaagtgaataagcagctcaatgatgaaaagcaatcaatgatcaaggagctaaactcatatgtggcattgagaaaaacgtacatgaataccattggaaataaaaaacttgaactttttgacaatggagcaggagcaagtgtatctacagctgaagaaaatgttcaactggcatcagaaatgtcaaatcaagaacttatcaatgctgggacgaagacaatggatgaaactgatcaggctattgagagatctaagcaggttgtacatcaaacaattgaagttggcacccaaactgctgctaccttgaaaggccaaactgaacaaatgggtcgtattgttaatgagcttgattcaattcagttctcaattaagaaggcctcccaacttgttaaggagattggtagacaggtagctactgacaagtgcatcatgctttttctgttccttattgtctgtggtgtaattgccattattgtcgtgaagattgtgcatcccaacaacaaagatattagggatataccaggattggcacctccagttcccaccaggaggcttttgtatgtaaggagtggagatcattttgattaattcttatatttgaacaagagtgaacttcatcctagtcctaccaacttgattattgttctcattaatgggaaagttagaggattgctgtctggaggcattattttggtctcatcggttaatgaaatatatatatacacacacacttgcataccctgtttgtgattttatgtaaatcacacgaaagccttctgctttttcttgagtgccatgtttctttatgtaacattccaaaagtgtaggactagagagaaagcaatactgtgaaattcgttctgtatatgtctaattcaaaggagatttatccctcccccctcttcattgttattaaattttttttatttatttctgtacacattccaaactgtctgctggattggttttgtaaaattacattcagagttggcttgcagctgttc

SEQ ID NO: 121948 - DNA, 1539 bp, Glycine max
  Clone ID: PAT_MRT3847_81125C.1
ggctcgagattggtacagcacaggtcgaacttcctcgttgtgttctgttctgtttcgtgtgtacagctctttctgttctctctttcttctccaagcgattcattcaattttcaattcgattcgatcgcattcttcttctacattctcgattccttcctttctcaacaactattatattatgcatcttcgtctccctctctcaccaaccacctagggtttctctccgacgttaggtttttttttttcgtttctcgccgggattttgggggcagacttaatctccggcagctatggcctccaacttgcagatgagccctcaggtggagcagatccacggtgaaattcgcgacaactttcgagccctcgcaaatggctttcagaagctggataagattaaagatgccaatagacaaagtaatcagctggaagaactcacggacaagatgagggagtgcaaaaggttgataaaggagtttgatcgtgagattaaagacgaagagggaagaaatcccccagaagtgaataagcagctcaatgatgaaaagcaatcaatgattaaggagctaaactcatatgtggcattgagaaaaacgtacatgaataccattggaaataaaaaactggaactttttgacaatggagcaggagtaagcgtacctacagctgaagaaaatgttcaactggcatcagaaatgtcaaatcaagaacttatcaatgctgggacgaagacgatggatgaaactgaccaggcaattgagagatctaagcaggttgtacatcaaacaattgaagttggcacccaaactgctgctaccttgaaaggccaaactgaacaaatgggtcgtattgttaatgagcttgattcaattcagttctcaattaagaaggcttcccaacttgttaaggagattggtagacaggtagctactgacaagtgcatcatgctttttctgttccttattgtctgtggtgtaattgccattattgtggtgaagattgtgcatcccaacaacaaagatattagggatatcccagggttggcacctccagttcccaccaggaggcttttgtatgcaaggagtggagatcaccttgattaattcttatatttgaacacgagtgaacttcatcctagtccttccaacttgattattgttctcattagtgggaaagttagaggattgctgtctgaaggcattattttggtctcatcgattaattaaatatatatacacttgcataccctgtaccctgtctgtgattttatgtaaatcacacgagagccttctgctttttcttttgagtgccgtgtttctttatgtaacattccaaaagtgtaggcctagatagaaagttatactgtgaaattcgttctgtatatgtctaattcaaaggagatttatccccccctcccccccccttcattgtttttttttattattattatttctgtacacattcgaaactgtgctggattgtttttgtaaaattacattcagagttggcttgctgctgttcatatgaagcttcttttcttag

SEQ ID NO: 121949 - DNA, 502 bp, Glycine max
  Clone ID: PAT_MRT3847_81126C.1
gtttctttcttcatagcatttggaaattcgggtgatgacaccatcaattctgaggcttttccccacaagttggcgcagtttgaagagattcatgaaaaagttgtattgaaatatcacaagaggaattttttacaacttggtcaagtcaggtgcgtcctgcagcaactctgtcggctgatgggtgtccatatttgtatgctatggtacatgatagttcagtgtctacagataccaggagattatgttataggggataagctgacaaccatcaacaatgtagcgtgcatagggcctcaatcctgctatttgagagtctcgtcttttgggcaccatgcctcaatctatttcacagcatactgttgggaactaaatggctacagttagaacaccattgaattactattctagcaagcagagccacagccaattagctagtgaccttatcagcggaggaattttaatggacacaactagagcattgttcacacttatacaggattct

SEQ ID NO: 121950 - DNA, 312 bp, Glycine max
  unsure (1)..(312): unsure at all n locations
  Clone ID: PAT_MRT3847_81127C.1
cccccggggagaacccaccgagccaaggncacgggcancgacaacgacgcgngaacaccgngaagccaacggggggcgggacnngnacggcacnagnccaggcggcgcgncaggcggaggaggcagcaaggaggggggagcncacaangcagaggagcaacgaccgggggaaccaacngggngaggaggcggccccgaagaaaaaaaccagaaagacnagacggaagggggcaagagagacngaaaagccccaancnaangaaacnagaaagccgggaagngcaggnaccccaggggggccggngcagcccc

SEQ ID NO: 121951 - DNA, 307 bp, Glycine max
  Clone ID: PAT_MRT3847_81128C.1
gtgcctgatatacccccttcacataacaagattcaattaacggcaactatgactgatgtgaggcttgcaagccccagagccttcttcaacccatcaccctcaccggaaaacacgtacaccatatagttcgcagttacactctgccaaggcatgctacttgttagtgtcacgatgtgtaaattgatgaagatcctacccgttcgcgcatcttcagatctcatttcttaaaacgtgttggatagcttaactaactcgcaagaggcgctctcctataacccaactaccatttagtgctcctcgcctttat

SEQ ID NO: 121952 - DNA, 385 bp, Glycine max
  Clone ID: PAT_MRT3847_81129C.1
gtcaactcacattcctcccacaacatctctggaatcagagaagtgttcatctcagtttgcattcctgcaaattcatgcatatcattcaactccactataaattgtcatttgtgggaacgcgccaaccataatctttacaccatcatatctgatcactgctaattttgcaatccctcttgctcaaaaccccatactttattacataatacaaaccactgttctgattcatatagcttcaaatttatcacccttactttattacattaccataccattcttttcactgtattctcttcacccccaatgcagaataatcatattacacaaaactggataatttaccacactgattcaaaaccctgcacctattaacttgtaaatacac

SEQ ID NO: 121953 - DNA, 436 bp, Glycine max
  Clone ID: PAT_MRT3847_8112C.1
tgctaagatgaagaaattctttctaaggttgcacaagatatgtttgaggaatggtttgattgtgttgatgaggaggattcctttgaggaagtttctttaagtgcagcacttcattggagtcgagggtttggactatatggaaagaattcctcttgccacatctgagggttttcctcatgtgctttcacgcaaaaatggtgaaaaaggcaaaaggagattttgtttctggcgatggtgaacagatgacattgattccgggaaccactgttgaagaggtctacaacatcctaatatttgaccttgagaaaagtgtccctacatttggttgccattgattgccccaaggattaaaaacttcttcgtctcaaaattttttccaaaccttaagacatgcttatttacctattctccctatggagcttatacacttgtggtc

SEQ ID NO: 121954 - DNA, 267 bp, Glycine max
  Clone ID: PAT_MRT3847_81130C.1
gatgactcggggcacataggaaaaccactaggggtttatgaactgcacattagagtttttttcataattatccggactatttgcccgactcacgaaaagggatgatggaactggttgcaaaacccccgtaagttttttaatatgattaacagaagacatgttgctaatactggaagtctcaagttctacatttaaggggcgctcaactgaagggggacgctttttttcaaccaccccataaatttgcagggaggcatctttcattgc

SEQ ID NO: 121955 - DNA, 456 bp, Glycine max
  Clone ID: PAT_MRT3847_81131C.1
aattcggctggagcacccttacacggtgacttccgtgtcctgttgccatggaaacaccctcctggctgttcgatcggtcacagatgagccggtccccccctgaggcacccggattcacctctggaccaccctgatattgcttctcctctgaatgctctgaaaagtgcaggtgcccaaggcatgacttgcagctgtctcctggattgtgtcatcatggggtatcagggctggcaaaacccctgctctgcttttggccttggatatggaaacctcaaccactttgttctcctaccacctctttgcccttcctaccccttcctcccttcagtcagtgtccccagggtccagcctggctagagttagaaggcagacctagcctttggaagcagggtggcctccagagccttgccataaaaaggctgaaggcagccgggcgcagtggctcacgcctgtaat

SEQ ID NO: 121956 - DNA, 568 bp, Glycine max
  Clone ID: PAT_MRT3847_81132C.1
ggctcgagcttgtgtttttgagtttggtggaaccattagagattcagttgggttggttctgattcatgctgtttaaagtttttcttttgtgtgcttcattttgctctttgtccaaactaacttagttagaggactgggattggccagatctgtgtaagggatgggatttgtttaaatctgcttgatgggttccattctatgccatttcctcctgctttgaaaaattatgaaaaattaacagtgcttatatttgaagcatataaagtgcttcttctatttatttttatttttccttagctgaaagaaagctataagttgtagtttaccctgttactgattgatggttttagttgtctaaaggcttttttttatgattttgaattgctaagctgaaattgtagagatacttcactatatatatattgcgtattaattaatgccataccacatttcatgttctggatcgtgagtgaatggtagagagttaaagtttttagttattaccagcttactgaaatgaaattgaatttgggtgggcatttgataaatgaagtgatgaccattaatg

SEQ ID NO: 121957 - DNA, 489 bp, Glycine max
  Clone ID: PAT_MRT3847_81133C.1
aataatatatgtaaatgcaatcattcacatgctgtctatatttatgctgctgatgtagtttctgacagcaaatagtgtactcacccttaatatccacaaatctgtgtatcttttgcataactctactcagttaatgtttggtttgcatcctctcccaacaagtgattcaaactaaagaagatagcttctttgaacttgtatcttaacatgatcaagacgaacattctcaaacagtataacaaaatgccacaggggcatgaaaaaaataagtgtattccgaggaacacttaattctatgcaaaaagaccagcttctatgagggtgtgctatgtgcttgtaaagttaggagtaagatatggagaaatccatctagactaattgagcacacaattattagagtgcacttaaagacccatattaatgacatatgagattctgaaattaggcaccacagaacatgcatgactagcaacaagacagaacatactt

SEQ ID NO: 121958 - DNA, 495 bp, Glycine max
  Clone ID: PAT_MRT3847_81134C.1
cggcacgccctccccactcccccctccctgaaccattagtccacacacaaacacataactcacatattaacgcactctgcagacttttctacctaaaaacggattagttaagacctttttgaaacaaggagtacacacacactgtttaaacttcatttgatgttcactgtataacaaattacacaagttttactttcaaggtaaacattcaagatgtatttctttaatttgaattcaagacaaaaattatgttgcacagactcaaactaattacgcaaaaggtaagaaaaagcatttagaaaaggcctccgaattcgaacaacctaaaaattaataccaattaatagggaatttatataccgttcttaaaaggaatttaagaacatatgcatctgtaattgtgagtcaatgttactttgtttactatctgagttagcccctggaagaaccttccattgatctcatttagaggcttttcttacagggattaatttt

SEQ ID NO: 121959 - DNA, 328 bp, Glycine max
  unsure (1)..(328): unsure at all n locations
  Clone ID: PAT_MRT3847_81135C.1
gttatgtgnccgcggacgcgggggncaaaacccacgaggagttggaaacgggncgcgcgagctagcgggccaaagaagggccnaaggcnaccccacaacccccacccaagggctaannagggggagcaaaacananganccanccagaggcaacaaaggaggcggaaacaaagagcagggccgcacaagcnccnggaccaacaacaccncnaacccncccagccgaggctacaagacaaagccngggaccaagaacacnccaagcgccagagggccacgccagaaaagccnccccncccggaaaggcagccggaaccccccccgccaa

SEQ ID NO: 121960 - DNA, 322 bp, Glycine max
  unsure (1)..(322): unsure at all n locations
  Clone ID: PAT_MRT3847_81136C.1
cgcangcacgcgtacgtnagctcggaattcggctcganctcgagccgcncgagccgctcgagcggctcgagngnaggangagcnctcncgggccgcgnccanaggngcntnnccggngggggngactnanangacgnatnaggcgangccagnngngggggaaggnntnngcggccngnngcggnnnnatnacngnngagggagcaacgcagcggggtgaacgcccngggnagccnnngnnnannnggggacgntngcctattgnggnncnnctggagggagnggctntnnnnggcnggcnnnnngnnacntnngggggnnc

SEQ ID NO: 121961 - DNA, 394 bp, Glycine max
  Clone ID: PAT_MRT3847_81137C.1
cttctatttattaagaaggagtaagtgaatatggactgatgactttgatcttcttcatgtatatttatgatacagttgaaacaataaaattataagcagtttaggctcaacaccagaaatttttatgaacttgatacccctcgagaagaagctaccccaacctttttcacaaattatagtgaaccttcattcagattgatgctacaactatatgcctggataacattctcttcctctgctcttgtatcagccatagaatcctcaatgccattatcactagtggcactaataattgtcccactacttacacgtacacatttggactatgtgttattgtctgaacattctgtgttttttcctcttcctctttgaaaattgataaaccctgtacctc

SEQ ID NO: 121962 - DNA, 573 bp, Glycine max
  unsure (1)..(573): unsure at all n locations
  Clone ID: PAT_MRT3847_81138C.1
cttgatgcatatgaacttatgaagggttttgacttgttgggttattgtgtcatgatcagatgaggcctatattaagatgtggcctcatatgctccaggctcagatgcccgcccagcctaaacccaggcctcatctgatcgcgacaccgcgcgccctatgcttaccatgcggtttaccacgagaggagatggaggacggtaacaatcggtaggccaanatgttaaggaactcttatcggcgcggggggggacgaccccccccccgcgtagatcatttatagagtgagtcctcatgcgcagctgtgatcgatcgaagaaaacagagcccataagcagctctctgctgcgagcggcttgggaaaacagcacgaaagcaccgctaggagctcctctgtgaaaaaacgcagacttacctggtgctcacatattggtggctcaatgacgtagctgtgcgctataacacacgatccacgactggccgatgtctcgacattacaatcacctgtagacagacacaaacctgcttgaacatatggtgagctgtgttaactggacacagagacatgacgctgac

SEQ ID NO: 121963 - DNA, 223 bp, Glycine max
  Clone ID: PAT_MRT3847_81139C.1
ggcgcgagccgatctagccgagcgtcttaataaacgctaacctctgcaccactgttggtcttgacaatgcgagagcgcctttgcatccacattggccaggccggcgttcatgtctgaaatgcttgctgggagctttattgcctggagcatgccatgcacgctgaggcacagatgcctaatggtcacaccatcagtgggggtgacgatgctttcaacaacttct

SEQ ID NO: 121964 - DNA, 1695 bp, Glycine max
  Clone ID: PAT_MRT3847_8113C.1
cttacgcgtccgcccacccctccccaaaaaaaacaaacaggtatataaattaatcaaatactacttcgtgtgggggtgggaaaatgggccactctgaggaaaacagtgatgttgctgccaggcagaaggcaatcgatgattggcttcctgtcactggttcccgaaatgccaaatggtggtcttcagccttccacaatctcacagccatggttggtgcaggtgtcctcagccttccatttgccatgtcaaatatgggctggggccccggtgctaccgtgcttatcttgtcatgggttatcaccctctacaccctatggcaaatggttgagatgcacgaaatggtgccagggaaaagatttgataggtaccatgagttgggccagcatgccttcggagacaagctaggtctctggattgtggttccccaacaagttgttgttgaagttggcacgtgcattgtctatatggttactggtggcaagtcattgaagaaagttcatgataccctttgtcccgattgcaaagatattaagacctcgtattggattgttatcttcgcttctgtgaacatcgttcttgcgcaatgccctaacttgaactccatctctgctatctcttttgttgcagctgccatgtctttgatatactcaaccatcgcttggggtgcttctataaacaaggggattgaagcaaatgtggattatggctccagagccactagctctgctgatgctgtattcaacttcttttctgccttgggtgatgtagcatttgcctacgcaggtcacaatgtggttttggaaattcaagcaaccatactttggtccgaagatacaccttccaagaaacccatgtggagaggagttattttggcatacataggagttgcattctgctacttacctgttgccttcattggatactatatgtttggaaactcagttgatgataacatcctcatcacactagaacgccccgcttggctcattgccgctgctaacctctttgtctttgtccacgttgttggaggctaccaggtgtttgccatgccagtgtttgatatgatcgaaacctacatggttacgaaattaaatttcccaccttctactgcactccgagtaacaactcgcactatatatgttgcattgacaatgttaattggcatatgtatcccgttctttggctctcttcttggatttcttggaggctttgcgtttgccccgacatcatattttttgccctgtatcatatggcttaagcttaaaaagcccaagaaatttggcttgtcttggacgattaactggatctgcattattcttggggtaatgttgatgatagtatctccaattggtgctctaaggaatatcatattatcggccaaaaactacgagttcttctcataaactattgatgcaatcattgattccccaaccgattttaaagttgatgagtgaaactaaataacaagaaagcacgcagacatgcgttatacattgaatatagataagcttaataggatttgtggaagtgatacacacacaactagccttgtacaaaattatacttcttttgaagtaacaactatcttattcaccgtgtagcttattagcggaaacactgttgtacgagtttaccggttgtaaacgtaatgaagtagtgaatataatggtcatataataaccaatgcaattaatt

SEQ ID NO: 121965 - DNA, 293 bp, Glycine max
  Clone ID: PAT_MRT3847_81140C.1
ttaatatcacgatgagcacagctggttctgcctccgggtccgcggcattcgacaagtactaccgctccgtgtacaaggaccggtggccctctctgctggacggtctgctgcagccctcgcgacacgtggcgctgatcaaccccttcgcgtcgcgcccctttgctgaggaccacctcagggcactcggcgccaagccgttcaccaacgattctgactcccccgtgttcccgtccctccactgcttcgcgggcggcgatcagggcgatgattgggcgcacactccgccgccgcgg

SEQ ID NO: 121966 - DNA, 378 bp, Glycine max
  Clone ID: PAT_MRT3847_81141C.1
gtcgccacgcgtccgctcagtagttgagctagagtatcggtacgtttaaggctgggatagtcttgaaactgtacacatactttaactcataatatgcttcgcagcgtgggccataaatggttctgcccgtcaccacccgaacggtggctcctctctgccagctagaggaggacgcttcaaggttgatcctacattggaggagagagaacacttctgcgctctgaaggaagagtacacgagaggcatcacccctcacgaaaaagagtgccttgagaaagaccccatgaagctctttatggaaggtgggattgaggacttggctatgatgctccttgaggaaattgagagtctctagcacgccaaggatgaccttgatgc

SEQ ID NO: 121967 - DNA, 441 bp, Glycine max
  Clone ID: PAT_MRT3847_81142C.1
tagtttacacagcacatcgttatacatcttagtacgtattcatattactcaacaaaaatgagtaccataggcgactacatgggttactcaggagattctgaagacaaaagcggttcccagtcttcacatgttactgggaaaaagtctcctcccaccctagctggtggcatgagctacgccgaaagtccaaaagacagaaaaggttcccagtcttctggaaatggtactcagacacatgaagatgtttccatgcgtgacaaactcagccatacggatgattctaggaaaaaatatggttctaaaaaaagtcaaggaagatagatatcaagggctttgttggataagaaaagaaaataagaaggaaaaatgaagtttgtttaaacatgtctgaaactttattttaaaaatcccatgtttgtttccaacttgtttagattctgg

SEQ ID NO: 121968 - DNA, 256 bp, Glycine max
  Clone ID: PAT_MRT3847_81143C.1
aacaccaaaggggattttttaaacaaaaataaagaccatttttaaatcgattggtttatttatgcctgtcggcaaataaatttattatgtaaaaaaaaaaaaccccacataaagatctaaaaaattggcacttttttttacatctcaatttcaatcattacatattaccctgatcgggatgatccaccggagttgttgttcggcccctccctctagaatgccggtggtgactgccgccaaatttaaaccttccggg

SEQ ID NO: 121969 - DNA, 801 bp, Glycine max
  Clone ID: PAT_MRT3847_81144C.1
gcagagagagaaaaagaagaaaaacaaaacaaaaaaggaaaacccttgcttgcattgcattgcactgcagcacctcctccctaccaaccccctcttgccttgtctccgacccgccctgactcgttgagctcgccggaaactttggccaaaagggtctccgaattcgcccatggcccttgatttccgaccttagagacccttcaagttttcgcctttttcttattcgcttttcccctttttttgggtcctcaatttctgaaacctgcaactgagaaaaagattgctctgataactcgtgcctcgacgaagacatgtacgtggtgcctccaccgcagcgctccgatccggggtcaggatccggtgatttgcgggtctaccaagcttggaagggtagcaataaattttttcttcaagggaggttcatatttggaccagatgtgagatcactggcactgacaattattcttatcgttgctcctgtcgcagttttctgtgtctttgttgccagaaaactgatggatgcattttctgaccactgggggatatccataatggctgttgctgttgtgttcacagtttatgtgtgtctttttctctcaaatatgagtttttttttttctctgtatgttcaactgtgttggtaatattctatgattagaatgataagaagcattcctctatattcaacctcacacttgattgaagtgaactgttttggttgacttgtcaatcaaatacaatatggaatgatgctctctttaacatcttcatagttcatatcttcattggaaccattaccca

SEQ ID NO: 121970 - DNA, 262 bp, Glycine max
  Clone ID: PAT_MRT3847_81145C.1
gacccacacatacaatcactactatacttccttataaacaccaattacaactcatatctaccctccaccagaacgtattctatctaaaaccgaccactaaaacccactttacttaccaaaacacataccaatcattaatttaatctcatccatcttcaatttctatcttccatcttcatcaactcatatctactcctataccaaaaaatcatataaattcatatctcctcctttatataaaccaaatatcaatccaaaatca

SEQ ID NO: 121971 - DNA, 417 bp, Glycine max
  Clone ID: PAT_MRT3847_81146C.1
cgatttttcttacatataaatcgcagccctacttggtatgcaatggatcctatagatttccaacttaacggggatgcagcggaggttgaagagatgtcgcaactgagggcggattggcgtgctgaaatggctggccattttgctggcggtgttaccgaggaccatttggatatggtgccccgcgtttttgaaccggaggaaatggggccgaacgatgcgggaggggcggcccggaatgggcaggcggaggaggaatagaaacgaccggaggagagaaatgagtgaagggggacagtggaaggcgagggggcaacgtccttgtaggttttgaggaggcatggcactgttttctcggggcaatgagtgggccgtggcgttggcacttcgtacgttcatgttggttagtatgatgcttta

SEQ ID NO: 121972 - DNA, 2327 bp, Glycine max
  Clone ID: PAT_MRT3847_81147C.1
ggaccccaaaaaaaaggttatactgcttaaaatcctaatacaaataaaaggttttaggcatgaatttttaaatgaaattatagtcacgatccttaacaataaacatatcctggagttatggtctctttgtccatgttttatgggaaaagaggatccaaaaagagagatgggggttcagggttcactgatcattgcccatacaatagggcatctttagcaaatatgcaaaacataatcttcggaagggacttaattattttcaccttttacttcaatctttattttgcccactacatcagtcatcaaggggcaaaatttggtttcaacagtcaaacaactaaccactccttaaattgatctcagctcctcgggaaactggggatgtaacaccaacgaaaaaaaattcttatcaagcactaagccaaaacattttataacatcttcgagtttaggaacccaatcacaaacattcaaacccaaaactgaaactgataggctggagctccgtattgttataaccctagctcggaagaactaccatctctcgtccattgtctgcgtctcactcatcctcaactcttcctctcttttcttccaaacccgaatctggattctcctctctcccgatttcaattctcacggtcttcaccgatcgccagatctctaagcaccgctcttgttttcatcgattaaataacaaacaaaaattggctcaattttattttaacatcctaaccaaaaacaaacttttcacccgattttaacattcgagagtaaatttagtttacttattgattttttttttttgtttgttttgattaagtttctgtttctatttaaatcgataaacggcgaggtcgagcgttagaattcgaatttcggagaaaaaaagttacaggtattattaggggaatcgcgtggaagcgttgaggagagtggtttgatctgaggaaggaaaaaaatggtgggaggtggaaacaggagggaggaagggtcgttgggtgttgaacaaacacgaacgtgtttgcggcgctggatactctgaagaagaagaagaagtccgataaggagaagagcaagggttcgtcgacaaaatcgcaggcccagtccggcgaaggccgaggccccagtcgaatttgggccccggcgccgctgaacgccaagtcctgggccgacgtcgacgacgaggacgacgacgattactacgccaccacggcgccgccccaatcggtgtggggcgtttccgaacctcatcacagtaaggaggacaaacatgggaattttgaggatagtgagagtgaggaagatattttggatgaaggggatgatgaggtggaggaagagcatgatcatgaacccgaagaatctttgaaacccgaacctgaggttaagaaggatgctgaagtccctttgccaccaccaaaagagacagaaaggcagctctctaaaaaggaaaggaagaagaaggaacttgcagagcttgaggctcttctagctgattttggagtggcaccaaaacaaagtaaagatggtcaagatgagtctcaaggtgctcaggataagacaggtgttgagactgatggagatggagaaaagaaagaaaatgtccctgcagaatccaaaacttccaagaagaagaaaaagaaggataaagcttccaaggaggtgaaagaatctcaagatcaacccaacagttctgacacaaacaatgggcccgatttggccacaggcaccgaaaatgtggaggaggatacatctactgttgatgtgaaagagcgtctcaagaaagttgcttctacaaagaagaagaagtctagtaaagaaatggatgctgctgcaagagctgctgctcaagaggctgctgcaaggagtgcaaggcttgctgctgcaaagaaaaaagagaagaaccattataaccagcaacccatccggtaaaagaaccctgctccttgacatcaatacaggaatttgtatttcttgttcatatgatgatgccaaataaacagtgggctttaggctctggtgagaatggtgatgattctggtcgtatttcagtggacctgggaaattttcatctagttttttttggaaattaatgttgttcaattgttctggacttgctattttggcatagaaaattttagctttaaatattttacccgaactacataattgtgcattgtagttcttatatatctttgtggctgatcagtgatcaattagttctgactgagtgtttattttatagaaattcttgtgttgtttttacggttatattataatccttgcctaaattgatccaataactataaaaaaaaaaagaaaga

SEQ ID NO: 121973 - DNA, 255 bp, Glycine max
  Clone ID: PAT_MRT3847_81148C.1
gcaagtgctatgcaggccattgtgagaagtgaaaagtgacaaggttttaaaagccagtctttaaaggttttggaggtttttgcaaccataaagtaatagcaattgtagctgcattggtcacatctttctgcattctagtaatatcaagcattgtgattgcaatttaaaaccttgaaagtgtagctataagttcagtttctatgtattgcaagtgatttatgcatgttctttttcctcttactctcagggaagaga

SEQ ID NO: 121974 - DNA, 127 bp, Glycine max
  unsure (1)..(127): unsure at all n locations
  Clone ID: PAT_MRT3847_81149C.1
tgcctgnagnaagnagcacagnattttctgttgaanccagtncaaattgtcanatntaagangcttaaaagatttcatccatgaaagggaaagtgaangaagntnacaaaatatccccacaaaagac

SEQ ID NO: 121975 - DNA, 461 bp, Glycine max
  Clone ID: PAT_MRT3847_8114C.1
gttgttgaggcttacaacaagctaatagctgaaggtgagaaaagagatcctacagggattggcatagaatgtcccaaggatgagaaacttgcttgtcgaaaaatttttgacaaacctaagacgcgctgctgcactattctccccatggagtttaatcttgcggttcgcaagaagtttttaaattttgtgaggctcattatgaagaaaagggacaagcttagttggcaagttggaatcaacccatactccatggaatggactggtttggccaataaattactgagtaagggcaacgatattctgtgttgcgactatgctagttttgatggtttgattaccaaacaagttatgagcaagatggcagaaatgataaatagcctttggggaggggatgaaaaaatgatgcgtgaaaggacacacccggtggaggcttggtgttcaagaaaggcaatttgaaagaa

SEQ ID NO: 121976 - DNA, 483 bp, Glycine max
  Clone ID: PAT_MRT3847_81150C.1
ggggagcatatggaaattcatacccctccacggaaaaatgtttttgtacactggtcttgctttagccaaaaaaaatatggggtaccaaaatcaagcttttttaagtttcagggtttacgatcccaaaacagttagctaaaaactcattttaacagaaaatgggttagaaaccaagggcccaccccgaaaaaaacccgaccaaaatcatccctttttgacgggggaaaaaaggtttttgtttttcatttaaagcccttggcatccaaaaaaaaatctccctcaaagggtgtaaaatcctcgaaacatttggttgacgccctttttttgagttttatcaaagatgtcaaccttggggccgcgggaaagctccctttttaaaaatttttaaatcacaaattttggaattttttggccccgggaaaaaccacaacccccttcaccttaaaggggggggggggaggccaaaacacaggattttttcaa

SEQ ID NO: 121977 - DNA, 302 bp, Glycine max
  Clone ID: PAT_MRT3847_81151C.1
aaaaaagaaattttaattgacaaaaacaaacatgggtaacttacacaggagtttggacccataaccttttaaaaacctggaatataaaaaaattattcgaacaccatattatcaaaattacgggaacttttattggtttgccaaaatggggtgaccctttaaaaagggaatcaattcaagcctatatcctatattattggcacaactttttttttttttagaaagggattgaaaaaaaatttttttaaaatgtgcttgaacaaaagcggataatccaccttccttatttcccttggacgggt

SEQ ID NO: 121978 - DNA, 275 bp, Glycine max
  Clone ID: PAT_MRT3847_81152C.1
agctaccattgcccatctccatgtggttccggttctgtttcagcactcgctcaccaagagtggtgatgaatacagcaagactccggtatcgatatctgatgtcatacactcgcgggttaaagcgctcacatttaggaatccatccacagttgctgattttgcccttgcccttaaactctcgaaaaggtataggttgcttcatccgcattatattgacctcgcatatcgagaccgagctcttcacgtttcaataaatagcttcgtaacctctcgac

SEQ ID NO: 121979 - DNA, 1022 bp, Glycine max
  Clone ID: PAT_MRT3847_81153C.1
ataaataataacaacccacgcgtccgtacggctgcaaaaataataacaaaggagccgcgcgaacgaaggggaaagaagaagaactgaggaggaatcagaaaacgaagaagaagaagagagtcagggcagaaaaaccctagaaacaaaacatggcggaaaaattagcccccgaaaagcgtcacagcttcgttcacaacggtcaaaaggtgttcgagtgggatcaaacccttgacgaggtcaatatttacatagctcttcctcctaacgttcattccaagcaattctactgtaagattcagtccaagcacctcgaacttggcatcaaaggcaatcctccgtatctcaaccatgatcttactagcccggtgaagacagattcttctttttggaccttagaggatgacataatgcacataacactgcagaaaagagataagggtcagacatgggcttctcccatattaggtcagggtcagttggacccttacgctactgatcttgagcagaagcgactcatgcttcagagatttcaagaggagaacccaggttttgatttttcacaagctcaattttctggaaactgtcctgatccaaggaccttcatgggtggaatccgatcagattgatgatcttagatgctgtaatttgtatttgtctgctctaagatgatgatcagatggcaataatctgttgtggtatttgtctcctctttgttagatgtcatttaattatggcaatcttaatgcacttcctctaatctgtattgacatcttgtggtatttattaatctcttctctgacccttggcatttaaacatgtatataaaacatggagcattttttagccagacttggacaataataacttaaggtctgctgtactattttaaagtcttctatgggtcaccgattatcaaaccagattgaggaagggttggatgggatataaaatatgaactttctggttggtggtaagtacactgatcgtgtcaagcaataaaaagtaagaaaagtattgttttc

SEQ ID NO: 121980 - DNA, 1983 bp, Glycine max
  Clone ID: PAT_MRT3847_81154C.1
tccgggcttcccgggccacgcgtccgcccacgcctccggtgattttaggtcaaaaggtgttcgagtgggatcaaacccttgacgaggtcaatatttacataactcttcctcctaacgttcattccaagcaattctactgtaagattcagtccaagcacctcgaacttggcatcaaaggcaatcctccgtatctcaacgtaaccctaatttccctccactccatttcctttcccatcttctcttattttattgtaatttgccccttatttatttgtgtgtgatttttcagcatgatcttactagcccggtgaagacagattcttctttttggaccttaggtaaaggtttaagcgatttccctaattgttttttcttttttttttggctcaaatttataattatatactttttttaattaagcatttatgcccttatggtgtaaaagtttttagttgttttatattgtgatccaatcagaaactgccaatctatgtattataagtttgttaatttttataataattaccttaaaagttgttgcagtaatgatttccaatttggtggcagtgtaaaactttgacacatgtcaattaaacttatatttttagtggtattgttttggctttggaatcaattgaggaagacttttgttttcagaatcaaagatggaataaatgtgatttatttggtgaagtttgatggtgatggtgatggtgattttggaatttgacctgcagaggatgacataatgcacataacactgcagaaaagagataagggtcagacatgggcttctcccatattaggtcagggtcagttggacccttacgctactgatcttgagcagaagcgactcatgcttcagagatttcaagaggaggtgggtttttctttcatcagaatccttttccgggtgttgggatttggatttcatttgcaaccccatgatatgtgtatcatgtgcttctcagcatccttgttcgttatgttctattattattgccttcatatgtttcatctgttgggtctagccatctagctgccaggttgtgttccttcattttcaaagtgtgttctttggttgatattgttttttgcctaagctgtgtataatattgagaagaggatctgataattagcaggtattattcatttgtgcatactaattatttgtgggtagctaatgtgggtaaacacaattgatgttaagatgaaaattctacttgttaagactactgatttccaacacttgatgctttattgctagttgatgcactcccattttagtgtttgtttgtcctcaccaacaattgtcaactatgcttcaatagttggcatgagttgaattattaatgaacttggcatgctgctcccattagacttttttcaaggacaatcttgaactaggcagataatttcttatttcattattagatgcactgattagattttgatgtgcttgaatgataatatatattttgaagtttcttgctaagggttaacgggaacactgactgagtcgagattttatattctgatctggtcagcactgattattctcctaaaggaaaagtaatcttttgactcatgattcaaattgcatgatgtatcatgtgatgaatcatagacgactcttaatcttgcaatatatggatgatgatcttattgcctcctgcagaacccaggttttgatttttcacaagctcaattttctggaaactgtcctgatccaaggaccttcatgggtggaatccgatcagattgatgatcttagatgctgtaatttgtatttgtctgctctaagatgatgatcagatggcaataatctgttgtggtatttgtctcctctttgttagatgtcatttaattatggcaatcttaatgcacttcctctaatctgttttgacatcttgtggtatttattaatctcttatctgacccttggcatttaaatatgtatataaaacatagagcatttttagc

SEQ ID NO: 121981 - DNA, 269 bp, Glycine max
  Clone ID: PAT_MRT3847_81155C.1
ggcatataaacgggttctggagaaggggacgatgggtcagatttttcaaaagatcatcgtgcatggctcgaaggcaaatcatttaggattaatgctgaaccctatacagaaagggctaaggccgcataagaatactacgagatgggaagctgtctgaacagaggtaattgcatgcatcgaaattgagtacactaccaatatagctcttgcaactagcagtagtggtgcagggggcaatccgggcaggcagggcaggaggtcatataact

SEQ ID NO: 121982 - DNA, 465 bp, Glycine max
  Clone ID: PAT_MRT3847_81156C.1
tttttgtctcagctctatacaactttattttattttccaggaagaactatagaattaatacatactacatagaaacaaaagaagatgtgtgcattttgttccaaaaccatttgatgtttacataaagtccccaatccaaatatagaaagaggataaagtcaacttacaattggattgatgcactcagtgataaacagatcccctttatctttaattaattttcccaaaaaaatgaagtccaatatacagtgtacttacaaatacaaccaacaaatacccctttggcaatagaagggctatttctttgaatcatttcttttaaagaaatccacttttaaaaagaaatcttgatcatgtgtcctttgctttggcactgtttaagttgcttatgagagaccaatgtgtttgaaagtcaggctgatagccactttcctgcatggcttgcatgagctctgatgccttcct

SEQ ID NO: 121983 - DNA, 290 bp, Glycine max
  Clone ID: PAT_MRT3847_81157C.1
ccttcatccgcttaaagctgttagtgagtccttctgttgcgtggggaagggcaaatataatggcgcttggatagaacttctacaaggaatcatgccctaaagctgaagacatgatcacagaacaagtcaagcttctctacaagcgccacaagaacactgttttcttctggctcaggaacatctcccatgactgtgctgctcataggtgcgaggcttcactgttgctggactccacaaaaaggaacttgtctgaaaacaaaacagaaagaaccttatgggctgagaaattt

SEQ ID NO: 121984 - DNA, 326 bp, Glycine max
  Clone ID: PAT_MRT3847_81158C.1
cgggccctataagggggccgaggtaaatttttcaaccaaatcccccaagcccaatcaagcggggggaatggcctagtttttcaaaaaaatttttcaagcgatttaacaacccagggggggcttatctcactttaagggaaacagcaaaccccactgaaacctgggcctaatgtgaacctataatttgggggtaggccatgggcacccatgagctccttaaaaactcccaagggcctgaacccgttccaattctaaagaagccgggaaatgccctaagacccatatggaggggcaaaggaacccaaattccaagggaaccacccccg

SEQ ID NO: 121985 - DNA, 395 bp, Glycine max
  Clone ID: PAT_MRT3847_81159C.1
gcgacctggctcgaggttctgctgtttcatgttttttgtctgcgcaaaagatcttagctaaaaacccgctgggtggctgtacgaattactttctcaaaagccgcttcatagggtagccgcaccgaaccgatgtttacttgggctgaagtgcattttctcacggacccgctgtagcccaggccccctcaaaagctctggggggacttgaaggcaaatcattggtcaggcattatatgaactatggcgggacaaagccaggacgctctgctggagccacctcggaggatccaaccttaaacaaccatgcggccctaaaaggatatggatgagcccctcagtcctggtgttagacatttgcatggccccgggagcctaaccaacggcttgagaaccct

SEQ ID NO: 121986 - DNA, 759 bp, Glycine max
  unsure (1)..(759): unsure at all n locations
  Clone ID: PAT_MRT3847_8115C.1
aattcggctcgagattgcccacaggatctgtttaccctacaagggatgaaaatggcaacttactcgtgactgagtttggattgtgcaaatacaaagatcatcaaactttgtccattcaagaagttcctgagaattctgctcctggtcaactcccaagaacagtggatgtcattgcagaagacgatcttgttgattcttgcaagcctggagatcgagtggcaattgtggggatatataaggctcttgcagggaaaagcaaaggcagtgtgaatggagtattcaggactgttctcatagccaacaatgtttctcttctcaacaaagaggctaatgcaccaatctacagtgctgaagatgtcaaaaacattaaagagatagctgcaagagatgatgcatttgatctgctaagtaattcacttgcaccttctatatatgggcattcttggataaagaaagcagtggttttgttgatgcttagtggggtggagaagaacttaaagaatggcactcacttgcgaggtgacatcaacatgatgatggttggcgatccctctgttgccaagtctcaactcttgagagcaattatgaacattgctcccttggccatatcaactacaggcccgggttcttctggggttggtttgacagccgcagttacttcagatcaagaaacaggggaaagaaggcttgaagctggggccatggtgcttgctgacaganagtgttgtctgcattgatgaatttgaccagatgaatgat

SEQ ID NO: 121987 - DNA, 255 bp, Glycine max
  Clone ID: PAT_MRT3847_81160C.1
aagttataaaataagacaagatagaatgaatttggcatctatgaagtttctataattcaaacacaaagagtgcttacagcatgaagacctacagtaatagtacacagcaacagtgtcgtccttgccattcgttattcggaaactagatgaatgtcaggcttctgggccttggtgggctacatggcattcgagatagtggcggaattcgtgcctggaagactctgtagccactaacattaaagctgtaatgtaaac

SEQ ID NO: 121988 - DNA, 202 bp, Glycine max
  Clone ID: PAT_MRT3847_81161C.1
gaaataacattctgacagtgttaaaggatatcagaatttttctgcagaaaacagccctgagctgacatcaatgctttcacaaaggaataaaataaaactgtgaagatattagcttgacatcatggggaaaaaattgttgaaatggatttacatctaaatccattatcccatttaatctttgcaaaagaccctgtgatgtaag

SEQ ID NO: 121989 - DNA, 340 bp, Glycine max
  unsure (1)..(340): unsure at all n locations
  Clone ID: PAT_MRT3847_81162C.1
ccccccctccaaagattttttttttactctatataacgcctaaccgggtattggcttttacataaaatttcccaaaaacaaaaaagggggggagtgacaacaataattttgggcacaaaaaccctaactgggtcaacccaaggggttatcctaacccgacccaactccttctttcctcacttggactttttctgactgggggagtcanatacaaattctaacctaacctctcctcttctttcactctcactcaaatttcttttctcttctcttcaacttttatttctctttcatttttcaatttatagtttagggattatggggggagccatcttctctt

SEQ ID NO: 121990 - DNA, 201 bp, Glycine max
  Clone ID: PAT_MRT3847_81163C.1
cccacgcgtccgtttatccttactgatgggtaagaataaagcattatgaatcaatggcgagcactggttgttgaatttggatgtctcttgttttcgtttgattagtagtcatcaatgatatagacctggaaattacctgtgactgtgaggattgttatccttactgatgggtaagaataaagcattatgaatcaatggcct

SEQ ID NO: 121991 - DNA, 450 bp, Glycine max
  Clone ID: PAT_MRT3847_81164C.1
ctttatttgcatgtgaaggacaaattcagaaagtatacataatatagatggtggccatgatggagaggttgcggattcaaatcagaaaaatagggagttatggttgtatttttcagttactgatgtgtaattatatccccattgtctggtaaagtggtaatacccagtgtgtaattctttgggaaatgcttttttttttattttttttccttttgaattcacaggacatgtcaaaagtacttggttcatgtggtcaacatgagggagggtcaatcctcctatctgctgagaaagtcaaagatgctgccaaagcaggcctatccgctgcagcaatgaaagctaaattgtttgctgatcatgaagagcgagaaattcagaggctatgtgctaatattgttaataataagttgaaaagattggaactgaagctgaagcagtttgcagaaattg

SEQ ID NO: 121992 - DNA, 362 bp, Glycine max
  Clone ID: PAT_MRT3847_81165C.1
atgctcaaatgataagcgtaggacaaccgtgattttgcttctctaatctctacccaattgccgtggggttaatttggcaaattatgcaagcgttattatagctactacgacataatttctgggccgcctaattgcgtacagcctctggctataagagaaatgatgaagaaaatgttcataatggggacacttacataatgatcataataaggtttcttttcttttcctatgagtccgtgtggaagggctctcagatgtaaaatccaagcctaaacatttcttgaataccaccggggctaattgaaaatatgggcactggtggtaatccaacgttgcagacttctccttgtcctcctgcatta

SEQ ID NO: 121993 - DNA, 695 bp, Glycine max
  unsure (1)..(695): unsure at all n locations
  Clone ID: PAT_MRT3847_81166C.1
gctttttcctgacaatgtcacccatgttagtactcgagttgcaggaactgtgggatatcttgcaccagaatatgcacttctgggacaacttacaaagaaggcagatgtgtacagttttgggattctcatgcttgtaataatcagtgggaaaagtagtagcatagctgcatttgaagaggattatttggttttggtggaatgggcttggaagctgaaaggagaaaataggcttcggcacctggttgattcagaactaagtgaatatgatgagagtgtggtgtaccggttccttatagtggctctattttgcacccaatcagcagctcaacatagaccaagcatgaagcaagtattggaaatgctttccaaggaagttcatctcaatgagaaggcattgactgagcctggaatttacagatggcacagcactggaaagaagtgtggttctttgaatgagacatcatcttctcaagcaatcaagtacaaaagaaccgaaaatccgcatgaagcaaattcaactcactttagtggtacagatattgtgacagagatgccttcaagatgatgatggttacatgtgtatgtggtgttagggtatatattagtaggatgtggccatacttgncnttgtnnnnnattggaattagatcaatgtggttccaaagggaaatataagatcctgggaaaaaaggcct

SEQ ID NO: 121994 - DNA, 241 bp, Glycine max
  unsure (1)..(241): unsure at all n locations
  Clone ID: PAT_MRT3847_81167C.1
cttcacttttaattcgttaggttaccctanccatcactantgcttttctatctatcccccntctcttcttcctctgattccccgtatatttcttctaaatcttctctccttgtcctttttctccctacacctcacgcacacacgcacaattcttcctttctcctcttttgatgtcttaggaaccatccaatctgaatttgtgtatcatggtgattgattttccttcttcctttttgttgtt

SEQ ID NO: 121995 - DNA, 324 bp, Glycine max
  Clone ID: PAT_MRT3847_81168C.1
gtcctactgaggtgtgtgtatacaattactttcacatacacacagttgttaaggatgatcggatagtgatgaagaggacgttcatttcggcggttgttttgcgagcatgctaggtgctgggaatatcccaatacgctgatgctagaaacttggctgaaaaatcaaaggacgaggtcaagaagccagaaaattgcttacatagaaggtccatcgttggtgccagaggaattgaagacgttggtgcagctgatgaatacatccatggcgaacaatatagatcagacttcaaaacaggtaaccaacaagcttacttttatgccagag

SEQ ID NO: 121996 - DNA, 416 bp, Glycine max
  Clone ID: PAT_MRT3847_81169C.1
ttgtttcgagtgtgctcgaagggccgatctcgattaccccgtgaagatcgttgctagattgtgacatactatgaatcctcaataccatgacgttcatgctcaaacggctgcatattagcgcatagcgttatttgtagatattgacacttctagatgcatcatgtgggatatcaaactcaccaattgtaatatcggacttcggataaccactgttggaggaaccattgagcgtgacgaattatagcccacgtttccgacagacggatctgatggcgcatgtgtcgttttgcagcgctctaatagtcttatgcgaaatagtatattggcaatcacagatggtttgacattctatacaagaatacatgtagcacgtgctgttaatagatgctttaagaggcgagcctggtctgatattg

SEQ ID NO: 121997 - DNA, 399 bp, Glycine max
  Clone ID: PAT_MRT3847_8116C.1
cgcaccacaagattatattttatagggagaatagtgaagcagcgcgggttaggtttgtcaaaagtctttaaattttgtgaggctcattatcatgaaaagggacaagcttagttgtcaagttggaatcaacccatactccatgcaatggactgtattggccaatagattactgagtatgggcaatgatattctgtgttgcgattatgctagacttgatggcttgattaccaagcaagttatgagcattatggcagaaatgataaacagtctttgtggtggtcacgaacaattgatgcgtgaaacgacacacctgctgctggcttgctgttcaaggatggcaatttgtaagaaagatgttcggagagttgaatgcggaatcccttctggattgccgctcac

SEQ ID NO: 121998 - DNA, 421 bp, Glycine max
  Clone ID: PAT_MRT3847_81170C.1
acattagatttctccacaaaaatgtccttacatgccctctggggaaaatgtacactctttggactgtgcctgaatcctacataaattttatcagaaatcctcttggatttacctaaacaccccctccagagagaaagaggagtgaactttcatatctgaccagttacgaatctttttatcatgaaagctatctttttgccttgacaatggtcaacttcctctctcaatgcatctgaatgggacattttaaagacacaccgaggcaccacaggccacctcataatgggaccttgctgctcactttaaccgcatatctttacgccaaaggtatatgagatccatttctcacttatagggcgcatatccttttcactattatgcgatgtatgactttacctaacacgtgatacccagtacctgt

SEQ ID NO: 121999 - DNA, 387 bp, Glycine max
  Clone ID: PAT_MRT3847_81171C.1
tttaagaggcgggcagaaggaatgggaattgacgatcatcttggtccttctgatgaggggggctagagaatgctaatcgccgttcatgttgatcctcattcgaaggaagagcgatagcagccatgtaatgaggatgaggctctatctcgagagagcgaacaacgtgactactgtgagttccgaatacataggaataagatcccttccttcttcggctctaacaggttcgaatctgtcatttaaaaccaatatgggcgtattcgcggactccagacgctacttcaacatttctgacaacttcagaatttcccagactaccgaattctgcagttcaactgcacatcaaacaccctacttcttctgaaccatgctgacgctgattacctc

SEQ ID NO: 122000 - DNA, 370 bp, Glycine max
  unsure (1)..(370): unsure at all n locations
  Clone ID: PAT_MRT3847_81172C.1
ttttatgcatgatatataaacaacttaaaatatctttaaagtgattttttcttaaaaagaataatattgtcagggaaataantcttaaaatatncgacgttttagtaccgctttganttagttctcttatggtatgaccataaacatttattcaaaaactaaaatttaaaattcaattatgaatagcatttttaataaatctgtacaatgtgaaaattattctcatatctacaatgtttttggattcctctcgttctattgtgattcaattagggtgttactaattactatgtttgaaaaaaattattaaaaaaatgttcatactgtatgagatatttatttaacatagacttaatggtacttttgattc

SEQ ID NO: 122001 - DNA, 209 bp, Glycine max
  Clone ID: PAT_MRT3847_81173C.1
tcttcaaacctaactctaactttaatttcctattcgccctcttgtattagacctctctcgaacactactgcatctccctccaccttcatagacctcgaaggagaaagatgccgtggcgcggaagctcacgcatctgggcggtgacatcatcgaggccggcttcccccacacctacatggacgaccgtaaagaccggaaaataatgaccc

SEQ ID NO: 122002 - DNA, 321 bp, Glycine max
  Clone ID: PAT_MRT3847_81174C.1
ctttacctatctcacctacccttaatcttacttattcactactcatccccatgacaattttaaaatcaaccggcgccattaacttccttatatcattctactttatacactacttattcacatcaataaaaatacaatgatgatcttgttgacatagcatattaactattaaaaacatttattcatataacttcatcacatttcatacttattcaacttattattaactcatcatcttatttaatattactattaaatctacaatctaatcaccttctacctttttcccaaataatctctactcaatcaattatttcaact

SEQ ID NO: 122003 - DNA, 523 bp, Glycine max
  Clone ID: PAT_MRT3847_81175C.1
aaagggacaatttttttttttttgtttgtttcatggggataggcctaagggaaaaaaaacttgaaaggctagcttttttgggaaccaaagctcaaaaaacagctcgaagggacatcccacatgttgggagggtttgggcatcagtatgcccaccatatttatggaggggataatgggatacctctatatagggatgttcttagcacccttacagaaagaaaagtaaaaaactctttatacccaaaaggttgggtagcccaaaaattttaagcacctactatgtataaaaagaattccttggaattataagttgcccctatcccaccatttatttttattaaaaaaagttaacaaatattttcaaaatatgtaactatcatgagggacataaagttattgctatagtaaagttgaactaatagttgaaagaaaaagtaaatcaatgaaaagatccttcagctttatgaaaaggttcatttacttatactcactcaaacatgacttcaatggggcaaattttact

SEQ ID NO: 122004 - DNA, 192 bp, Glycine max
  Clone ID: PAT_MRT3847_81176C.1
ggctcgagtgtgactctatgcatgcttttttgcgctgttcctcatgaccagtcacttcaccgggatcatgtggtactgtatcagaaaccctacatggatcactcttcttcaaaggactgctgttgcgactatatttcacacctcgatcatcggattctgcattctattacggtaaggagtgtacttatagtg

SEQ ID NO: 122005 - DNA, 431 bp, Glycine max
  Clone ID: PAT_MRT3847_81177C.1
atcagattgtcgctggtcactgccactctccttcatttttccttatttcccccagcctgcaataataatgactctctttctagccactctcatttatgaccctttccactttccataatgaaattcaaccctttattattatctcactctaaaaaaccgatccttgtgacactattgaggccttgtttcttctggcaaaactccaatctctagttcgtttttttgttaccttgtgtgtgtgtgtgtgtgtgtgagtgtgttcttaactgtcccttgtctgtgccccctatttactgccgctgccacagtcatttcatgtggcattcacaccttaacagactcaaataatattatgatgtgcctcctctcctttgccacttacagttacattactcactcttcatcaccctcttatttcttacttgagcatc

SEQ ID NO: 122006 - DNA, 790 bp, Glycine max
  Clone ID: PAT_MRT3847_81178C.1
caagatacagctatgagttggaatttatttggatgaattacataattttggactagagaactaattaagatccattttcaattttcacacttatttttcatttaataagtttagatgcagtattccttatatatatatatatatatatatatatatatatatatatattgaaaagaaaattaaatatatttttggtacttataaaatttcagatttttagttttagttcttataaactttttgtctgttgcctttttttttgtcatcaatatctcccttagagggacaaaaatgggcaaaatttcatttccctgaaattgatgttgatgacaaaaaataaacaagagattaaaaatatagggattaaaaccagaaattagaaattttataggaaccaaatttatatttaactttcttttcaatatatatatatatatatatatatatatatatatatatataaggaagactgctgagggacgtattaatggtcactggagagagtgactatgatgtgggccacaatacggactataggacgaagatgtgtgtgaaatacaagcaggtgacgactccaagccgtgtctatgcggccgcggtgtttagcactggggatgcgcgacaacaaaggttatgatgcctgcaaaaagaagcctgcaagtctcaggagttctgatcaggagaggaaagaaggggttccttggacagaagaggaacattagaggtttttttagggaacttttaaagtatggtaaggggggatgggagaaatatctctcgcaattttggt

SEQ ID NO: 122007 - DNA, 619 bp, Glycine max
  Clone ID: PAT_MRT3847_81179C.1
gggagtaatagtatgttcatctatctcatatctcatgtttatatacatttaatgagcacaagtattagcatctaggaagctgtacttaattaatagtagcttgcgaaatgatctcctccaagtctaatacgagactataatatggatgacatgcaaaaccaatgcactactacattctcttgaatacgaagctgtttcattctgagttctttctctcaaaattcacctctctaaagtgctgcctcctaggaaatataactgcaactgaaagcctatctgttagacaaaaaataatgtaaagagaagaatagttacattcatgctgctttgaatgtgagtgcagattgaagtctatgataatttactgctaagggagctggccatatatcgagaccactgccaaaaaacatttcattgttgaagccaactttaacaagaaaggacagacaagaggccactcccactcccacttttttgccgtttttcttctcaagctttgaacaacagagacaatataatcccaagaacttatatctcattcttctatccaatcttaactttaatgttatcgattataggctaaaacagctgagacattttaccaatcccgaaagcatac

SEQ ID NO: 122008 - DNA, 397 bp, Glycine max
  Clone ID: PAT_MRT3847_8117C.1
ctcgagccgggtgggtttgagcaacgattttttgtgttgcgattatgcttgttttgatggtttgattacctagcatgctatgagcaagatggcagaagtgataaacagtctttgtggtggtgatgaaaaattgatgcgtgaaaggacacacctgctgttgtcttgttgttcaaggttggcatttcgtaataaagatctttggaaagttgaatgtgaaatcctttctggatttccgctcacagttatttgccatatcatttctaatgacatgctcattagatatacctatgaaaaattactgcgccaggctaaagctccaagtatgtttttaccattcttcaagaattatgttcctgtgtgtgtgtatggtgatgataacttaactcgtgttcatgaa

SEQ ID NO: 122009 - DNA, 298 bp, Glycine max
  Clone ID: PAT_MRT3847_81180C.1
gtgctagtgcgggagccgacctcacattttcctgcgactatgagccaatgcagtcagcacctgagggtgccattgtgacacatattcctggcttcagtgtccctctacctttcatgtctatgctgggtatgtgacggtggatgagactcatgggatgaacttgctctactattctgtagaatcagagggttacacttacaaggaccctgtggatctgcagctcattgggggacctgtctgctctagctgcgatggatgcatctttgagcgtgggacttgtaatattgaggcagcatac

SEQ ID NO: 122010 - DNA, 436 bp, Glycine max
  unsure (1)..(436): unsure at all n locations
  Clone ID: PAT_MRT3847_81181C.1
aatagatttttgtgatgaaaatgaaggggcttgttttgttggttgatcaattttggtaggatgggaatgnnatgngtacgatatgttnnnttntnnngaatgaaantggntatggtgnnngtattttggaggtgaaatgggnaagttggaggnttgttgtggaagnaanaanatntttgggtgtgagaggattnntgaagagtgngttgaagnaanaaaggaatanatnnatggngaanaatatagatnagaatnnaaaanagttaannaanaaggttatttttatggnagaganntggaagtgaatgggaaggaaaaatttgtgttgagtatagatggganggtattgtgtaatattggatattanaaaaaanatggatatggggtggagaaatttaantggaggttgnatgatgaatggggtaanaaggggaat

SEQ ID NO: 122011 - DNA, 361 bp, Glycine max
  Clone ID: PAT_MRT3847_81182C.1
ccacccgtgcggccacacagttcgccacgcgtgcgcccacgcgtcctattgataggtcatcaagtcctgactgcaacatagttggtgcaatgctatagggtgacacttatcataccaatcctgaaaatgcatgtcgcagtcttgttgtagagcctttaaaacgcggaaggcccattttattggatacatacttgagtacatatgcgacaattgaaccggacatcaattcactggtacagctatagagctccactaccaaaggtgattgtggacaaggaatctagctaagagtgtactaagactatgcaacatgagcctgtgtgggctcgaataattgtcacttcactacatcgaagaacat

SEQ ID NO: 122012 - DNA, 778 bp, Glycine max
  Clone ID: PAT_MRT3847_81183C.1
gcgcgaggtaattgctagtatattatcggattcattaaaaagggagagggttttatcactctgtgatgcttcagatgggcgtcgggttgcatctccccgtgcgcttcccctcttcttcgagaagcattttctcaaacagaagcacacatgaataactattatgagggatgtacagcaacagtgcttctggtgtggactgatggtggtgaaaatttctttgcacaatgtgctaacgttggagactccaacctgtattatcactgtgaatgggaaacaaatcaagatgtcagaagatcacaagtttacgaattattctgaaagactcagaatcgaagagacaggtgaaccattaaaagatggggaaacacgtctatatggtataaatctggcaagaatgcttggggacaaattcctgaaacagcaggattcccggttcagttcagaaccttatattagtcaagttgtgcatattgatcaagcaagcaaggcttttgctattctagctagtgatgggttatggaatgtcatcagcgtgaagaaggcaattcagctcgtgttgcagatgagggagagatgctattcagagaggcagaatacagcagaaaagattgctagtttgttgttgaatgaggctaaaacactcagaacaaaggataatacttctgtaattttcttagactttgataccttcaacagattctcttgtaaagttgaatcctagtatgaattaggaatagcgttacagaagtattaatatatttttgttccctcgagctct

SEQ ID NO: 122013 - DNA, 446 bp, Glycine max
  Clone ID: PAT_MRT3847_81184C.1
aacccatcttttgttgtctttaaattacattcattctttgtgcactcgggctacctatacataagataacaactgggtaaatatgaggccattagatacgccatcacggaagatcataccgatggggtatatttatctaacataattgggggggcgaggtaatgcagaactctaaccttaggtttgtgcaggtctcctgattggtcagataaacctaaaaggctacaatgtccacctgctgttctaactgatccctttgtgggaataggatgcccaaatcatcatagataggtcctatttaccatgggggtgaaaaaagacacccacaacattggcgccctcttagggagcgatctcataaagttgtaagatgcatctggggaacaaaattggcaactctcattttttgcagaggggtaactgactgtctttggggcctaatggct

SEQ ID NO: 122014 - DNA, 462 bp, Glycine max
  unsure (1)..(462): unsure at all n locations
  Clone ID: PAT_MRT3847_81185C.1
ttgtgaatcaatattttcatgatgaccttgatcatcatcagtcattatatacctgatgcaaaattctggggtaatgtctggtatttgcacttgtctttctatagcttcttgttttcacaaagaaagcattgacatgctattcacaattgtgttggggatgaaggtggtgatgataatgtaatttttggcaagaatgagtgacctataaatatgctgtcttgtgtaaactatgttcatgtatgcaggacaagaagctgtcgttgagaatgcacacattatcatcaattgtctgattaagcttgtgggttaccctcataagatggtatgaggaattccctgtactagttatttactgctgaaatttgatgacttaatttgtttatgaagttacttttattgccttttagacttgccagtntttggtttttcttttattgaactacggggtggggtattggggat

SEQ ID NO: 122015 - DNA, 214 bp, Glycine max
  Clone ID: PAT_MRT3847_81186C.1
gagtgcacccatggcacatgcagttatcacgtgcgggctggtgacgagtagtctgatcaatcgcatcggttacctccagaacggtggaacgccgccgtcgggatgctgcatcggagtgagaagcctcattgccgccgtcgtgaccaccggcgaccggcagacggtgagcaactggctcaaggtggggcgacaggcaaatctccggttgaaaagc

SEQ ID NO: 122016 - DNA, 290 bp, Glycine max
  Clone ID: PAT_MRT3847_81187C.1
ggctcgagctcatggccctggacccggactataggggatactggctcggtcgaggctaatgctcctatgggactcgatcctaccacatgcgtgtatggagaaaaaatgtgccctggtaagttgatagctcttggtgctatgatagcacccaggtgtcaaccgagtcatgactgctgctgcacgcacgagattcaaatcaatctatacaggtctggctcttggcgggacttttcatatgtctggcgccatttatagcttatcatgtctgagcttcgattgtttcctgcctg

SEQ ID NO: 122017 - DNA, 299 bp, Glycine max
  Clone ID: PAT_MRT3847_81188C.1
atagatcgacggacagcgtgctcagcatggcggcgtgttggtggtggtgcctgccggaattgaattgtattgaagagagatgctgattcaagagggctggacttggtagtcgccccaccttcttcgagatggcggctgctgaacaactgccggcgagcctctgcacctctttgacatactccataggcgtgttggacttacggtgacccttccttaacaaactccttgacttcgaagactaatccttgcccttactcatgctcgttctcgaatacttcaccttacgaaccacagatgct

SEQ ID NO: 122018 - DNA, 298 bp, Glycine max
  Clone ID: PAT_MRT3847_81189C.1
gcacgaggcgcctccgtccgcttcccctccagccggcgcgtcgaaggcggtggtgttcgtgatctctaatgttgacgatctgatgaactgggcctggcgcggctccatctggtcaatgaccttccgcctcctctgctgctccgaagaaatgatgtacaccggtgccgcctgctacgatctccaccgcttctgcatcattttcaggacgagccctcgacagagtgattgcgtgatcgtttctggcagtctcaccaacaagagggctcccgctcttcgcaaggtgtatgacccaatgcct

SEQ ID NO: 122019 - DNA, 700 bp, Glycine max
  Clone ID: PAT_MRT3847_8118C.1
cccacgcgtccgggcaaaaggagatttgcttctggggatggtgaagagatgacattgattccaggaaccagtgttgaagaggcttacaacaagctaatagttgaacttgagaaaagagttcctacattgattggcattgaatgtcccaaggatgagaaacttcctcgtcgcaaaatttttgacaaacctaagacgcgctgcttcactattctccccatggagtttaatcttgtggttcgtcagaagtttttaaattttgtgagggtcattatgaagaaaagggacaagcttagttgcaagttggaatcaacccatactccatggactggactggttcggccaatagattactgagtaagggcaacgatattctgtgttgcgactatgctagctttgatgggttgattaccaaacaagttatgagcaagatgggagaaatgattaatagtctttgtggtggtgatgaaaaattgatgcgtgaaaggacacacctgctgttggcttgttgttcaagaatggcaatctcgaagaaagatgtttggagagctgaatgaggaatcccttctggatgtccgctcacagttttttgcactacctttttaatgagatgctcattagatataagtatgaaaactactgcgccaggctaaagctccaagtatgtttttccatccttcaaaaatttgtttctttggggggg

SEQ ID NO: 122020 - DNA, 501 bp, Glycine max
  unsure (1)..(501): unsure at all n locations
  Clone ID: PAT_MRT3847_81190C.1
tttaagaacaagaggacttttttttataggcaaatgttagttttgttagaaatgttagttggggagattcaaacccgtgacctctcctccatcccttctcaattacaagaccaaccgtatatctccaataacaagagaactgtgtaggcgagagagacgagacactaacaaatgtacagattaacaatagatatcttcccccattagttcttcagtgtaggctgtgtagctaccagatttggtgtagctcaaccaattgttattcttttgtattttattatacttcatgtacattttactgactgttgtatatgtatgttatacactaagttctgtgcgtgtacaatagaaaaaaaccattttagtgagttcaagatattcgaatcatgcgatgagcaaaccttggccttttttttttcaaaaaaaaaaatatggnnnnnnnnnnnnnnnnnnnnnnnnnnnnnnnnnnnnnnnnnnnnnnnnnnnnnnnnnnnnnnnnnn

SEQ ID NO: 122021 - DNA, 456 bp, Glycine max
  Clone ID: PAT_MRT3847_81191C.1
gtcctgtgggtgcacatatccaaccttaacttccgccgtcgaatctttctggccattgggtgatagtaatctcttacacaactgcagacacatcccaaaatctctgcgggaattgatagattcactgcttctcctaccaacagattgcgtagttcttatgacccagttattcattgtacccatcttgttcttgatgaatttttattgagagcggaaattccttgttagaccaggttgaacgttatctcctttatgaccttctgtattcaagtaccaagtatttgattatatgagacgcattgtttatatatcacaaatgatgctatgaagcttatcaaggcttgaaatctcataatgaccactggtattctagcacctcaggcagataagaacaaatcaacgacgaacaagactgttgctgctaatgagaatgcacccttgctgacaaaaagtcat

SEQ ID NO: 122022 - DNA, 575 bp, Glycine max
  Clone ID: PAT_MRT3847_81192C.1
aattcggcaccagttaaagtttgaagtcaatgatgatgatgtagatggatattaacctgttattatgatttgggtcttgtttaactaattttgattctgatccaccaaactgtttgttctctgttacttaaattgaggcgattgaagagcttgctaaggcatgattgaggaacccttgagagttgaagtttgagcagaaaaaaagggtggggtcttgttgatgcaaatgttgttgtttagatacgtggccttgtaaagacatatcctggaacacgcagctttggttgctgtttaaatgtaaaagaacttaagaagaaaggagacccaaagtaattggatgaggcttagagatgaactcatttaaagcatctacctgccaacctaagagactggacccaaggccttagctttaggttagttagatgatatgtttacatcatgttatccgtagcttgggcagaaaaaaacttgttaatttctttgtagctatctgcatatatatacaagtagtagtgctcgagcaaaaactactttgttcattaaacgaagaacctccagcaccaccattatcattc

SEQ ID NO: 122023 - DNA, 408 bp, Glycine max
  unsure (1)..(408): unsure at all n locations
  Clone ID: PAT_MRT3847_81193C.1
aggggtgaagcaataaaaggcaatagagaaacaactatgggaagggaaaatgggaagaagctgaaaatactgggcctccaacggttcaaaacaagtgggagttttcctaaaaagcaaatcaacaaatgggattcttctctantcattcaatttgatatgggtaatatatgccatttactttgttaatgttcaagtgtttgcatgaagcatttttaaccttaagcccttgttcttagacatttcaaattcatattttattagtgttagtgctgattagcccttgttcataataattgctgatgttgtttagcttaatatagtatagtttatactgctacgtataatgtagtcttaatttttcccgagtacaaaaatatacagatgaaagcaatagaaccaaaaaagtta

SEQ ID NO: 122024 - DNA, 427 bp, Glycine max
  Clone ID: PAT_MRT3847_81194C.1
cccacgcgtacgtgtatatcgcaagccggacgccctttatttttttttttcagagcacaaatatgcaagtttgcatatctacatcagacggaacgaaacatattgattgacaatatcattcagaattgcagagcacatgattaataagattcatccctcctagagagggccaccacggagcctagggtctacatagacttgagctttgagttatatcatacgcattcatggtggagctgatcgcaatagcccgattcgtctgacactgcaaatcgccaccacagtgcctaagaacaaggtgaagcgtggattccttcagaatatatgaatcggcgagagtgcgcccgtcttgaagctgctgcccagcgaattataacacgctgctgatccggtggaatccctatcttatccggaatcttcggcttga

SEQ ID NO: 122025 - DNA, 391 bp, Glycine max
  Clone ID: PAT_MRT3847_81195C.1
ctattgtgggggcgccctttttttttttttttttttataaaaactaacctgggttttttgagaccgttttaatacagaacaactcaacaaatacttcttctcaaaaaatgataaaaagaagacaaaaatcacatttaaaggaggctcctctcttcactattgggggctcttttcaataataactattaattacatggatcaataccttcaattatgtcttgcacttattaatacaaaaaactgagcttcttaataatatcttttgaaggaacctaataaaaaactacattgatttgcaaaaaaaaatgaccagtttccttaacgaattaggattaattataatgaaataggtcaacatatgcttatcctaaaataaaaataaaagttggtt

SEQ ID NO: 122026 - DNA, 1118 bp, Glycine max
  Clone ID: PAT_MRT3847_81196C.1
gttattcacggcttcacgtccactctgtctctctcggtctctcctctcacacccccactcacagttcccttctcttgtcgttcttgagcatcaccactttctttcgtctcactctcacaggaaaacccagttctcgccgcctctgttgttgtctcttccattcacgtgaagagaattgcgtagactggtagtcaaacagaatggcagaagcagcgaagagcagagacgcccgaagacgaagaagaatcctccaacaaggttccgaccgtctcgctttcatcacgggtcggatccaaacactgccggatccactttcatcttcccaaccccaatcccaatcccaccatccaaacgttgatgactccgattccatttcgcaaaatcccgaacccgacaacaccgtaatccaaacaccccccaaacacgagggtgaaaacgagatttcaactgtccccgaacctaaacccgaacccgaacctgaacaattccaattacaaccaccccaaacagaagaaccgaaacgtttcatcactcctagtgacataacgcgctccatcaattcctctagggttacccgtctctgttgttcagttctcgtggccattttagtcattttatcttaccccaagtttttcagtactgtgataacctttaggccactctacttagttctcgtgaccaatctaacggtcgtgattgcgaggctcttttctgggaaacagaggggttctgaaagaagagataatagaggctcttccggtgatggtggtggtgaatatgcgcagcttgcgagtattttggaactgtgtgtggtggcgcagaacgtggcggatgctgtcttcatggactgtgctgtctatgctgtcgttctcgtatgtggtctttctgtgctctagacatgacacggaatgatggaatacttgtgttggtttgaacaatgtgcctcttacctttcttcattttgttctgtacatttcgtaaaattgttagtttgctagtttttgtttggggacaaaattcaaacccaccacttctagcttcaaccatcaagtcaactttataacttggtatttgtacctttgtaacagatttttggttttattcatttttggtttgct

SEQ ID NO: 122027 - DNA, 344 bp, Glycine max
  Clone ID: PAT_MRT3847_81197C.1
gaatgtaagatggacaaatggagagtgggttttggccaacagtgtactttgatttcattaatcacattccatactgttggaacattgatgactattttgattttattctctgtagtccccacgcacaacaaaattcattaacttttacgcctaagtatgggtttgatttgattccaggacatgggatacctcacggaatgtgataaatctaggaaaaaccgaacccctactaatgaagtccacagtactctgaagcaagatattctacagcttgagagaagattacaagaccaatttcatgtcagatccacgttagaaaaggcacttggattcagatcttcacc

SEQ ID NO: 122028 - DNA, 509 bp, Glycine max
  Clone ID: PAT_MRT3847_81198C.1
ggctcgtgagcggagctaatagcgccggctaagcctacgcctcgtgaagttaagaaactatcggacattgatgaccaagaagggcttcattgccaaatccccttcatacaatattatggtcataatcaagagttctccatgaaagaccctgctgaagtgatatgaaaggcacttacaaaagctctagtataatactacccctatgccggtcggcttagggaaggtgcctgccaggaactcatggtacgattgcaatggtgaatgctggccttttcatcggagcagacgcttactgtcacgctgtaacagttctgacccagttgtctacttcatccaccgctttcttgcttgtacgagctcttgcgccatgttcccggttcacgtggaggtaccaactgatcctactactaattcaggtgacgcggctctagtgtggcggcttcattatcgccctgcgattgaatcacagcatgagcgaccgattcggcatagcgaaattcatggaagcc

SEQ ID NO: 122029 - DNA, 415 bp, Glycine max
  Clone ID: PAT_MRT3847_81199C.1
attgaacccatgcatgcaaaaggggagccactttttttggaaatatgccaatcatgtttgaatttaagataccctgaggcataaaccaaccattgggtgacaagctttcggttttgctaaaagcttaattacaaattttcaggtaattaacaaataaaccgaaacttaaaagtactggggggccattaaattaccgaatcccttgaaacgaaaccttccaaaaactgggccttaaaagtaaaaaactcctccaatttaatttatatatatatgccacattatccaattttaggggaaacacacattttccaaagggagaattttcaagaaaagtggatggaggaggaggttgaaaattcttccatatttccctttgggggcttttttttcttcttgaagggatacctttagcctt

SEQ ID NO: 122030 - DNA, 369 bp, Glycine max
  Clone ID: PAT_MRT3847_8119C.1
ggctcgaggggggattccagcatgagaaagacgaaggataatatcccgaaggaagcggccacaccgaaaaagggggagtttttaggctacaaacaccgccacttcacaatcccaggggaagaggcgagccgagggcaacacatgcaataaaaccccttcgcacagggaaaaggcagcacaagcaaacatccatcatcgccggcaaggacacagcaggaagggctgggcgagagaacaaacccgacaacgagacacgagaccagcatcgaccaagaccgacctcgggccaccaccaccacaaatacaacgacaaccaccgagacaacaccaacagagacgacctagtataggaccagggccgatgcacca

SEQ ID NO: 122031 - DNA, 336 bp, Glycine max
  Clone ID: PAT_MRT3847_811C.1
cggtttttgctttttatatgcgcgcattcaaacaaaagtgtgctgtgcatagctcgatgtgtggctttaaggggcgttaggactgaggcatctttcattctcaattaagacttgattcctgcaagggtccaaatcaattttgaccaaaagctcagacaaacaagtgtatctggttacgagcgagcgaggaatctttcattctcaattaaggcttcattctggccaaggtcaaaatcaattgtggccacacgctacgaagaaaatttattattttttgacgcaacaaatcataactttagcagcgaattcataatgatactatattcaacatgattt

SEQ ID NO: 122032 - DNA, 270 bp, Glycine max
  unsure (1)..(270): unsure at all n locations
  Clone ID: PAT_MRT3847_81200C.1
ggcttcgagtaagagttnggtgatgtgtgtggtggtgcttgcattgtggcccccccttggttatattattctatgccattantcgtttgctttttaaatatgccgtggcggtaatattgttgtgtggtgtaagcggtggttataaaatattggttctttcaaccattaagtctgtgtaaatggtgttcgctgtggtttattatcacaaatattggctcggggaatcacacgggaagggctaccatgcnnctttgtatgtctgtgatttgt

SEQ ID NO: 122033 - DNA, 196 bp, Glycine max
  Clone ID: PAT_MRT3847_81201C.1
aactccagcgtttagtgtgaggtctgatagtggcaggaaggagtattatgatggacgtttgtggtgtgaggtgtcacattgaaagaggagtggaatatactaaatctgagtttttccataacgtgctttgcatgcaatcaacacttgaaagttgaaactgattttattaatgtcaaatgcaaagttgtttgatgtg

SEQ ID NO: 122034 - DNA, 184 bp, Glycine max
  Clone ID: PAT_MRT3847_81202C.1
tcccaccctattattccatgccttcttctcacgcaaaaaaggccttataaatcccacactacaccctgtctaaagccctcctctacactgttccctttcaccattccattttctaacttttctgactctgctcatggcttttcttttcttagcatcacctattctcttggtatcatagttattt

SEQ ID NO: 122035 - DNA, 452 bp, Glycine max
  Clone ID: PAT_MRT3847_81203C.1
ggaaaagggccagcgagaaacaattcacaatgttgtctaacgcagcaaaaaagctggtaataacggggaagttaataaacaccagcaccgtgtttgtgtgctgatggaaatatttggttcttgcggcaatacagggtcgctgatccatgatccggtttgaaaatgtactctaggcaggataagtaagaacgttcaaagatatgagagctcacctaacatcactaaactgctggaggacatttcacaaatgatggactgtttgtgagcgtgctatgcttacatgtttgctacatcctgttgcttacgaaataaagcactgagtataataaattcctttgagataaacgagacattttttttggaaacatacaggacatgttgtcgggacattgtcactagcaggctacacgttacaaggtagaagcgtgcatatgatgataactgattagctt

SEQ ID NO: 122036 - DNA, 195 bp, Glycine max
  Clone ID: PAT_MRT3847_81204C.1
ccctatgattttatgatatctttggctttgatttggacttgactgattttacctaaaggtgctttctgaagatgagaggaaattttaattttggtcccaaaggccggaagaaaagaggagttttgccctaccctttagcggacgcaagagaccgctcccggggctttttcctgaggcccaaaaaaaaaaaataaa

SEQ ID NO: 122037 - DNA, 2054 bp, Glycine max
  unsure (1)..(2054): unsure at all n locations
  Clone ID: PAT_MRT3847_81205C.1
ttcgtccncgtcatgggtattgtaaatctctgaacttgaagtcaggctcgttttctctctcctccctcgaagctcagctcagctccagcttggagggtccatggtccactttctggatctcaccgtcacccccacaacaccttcttcttcctaatgctccttcttcattctttctccttccccgtgactcacccgcacgggaagatatcactcgctccccatccctttcatttcgatctccattctccctgacactcctctctctgtatccgagttctagggttttggggatagaaagcataaaacacgtacacgacgtcgtttgatttgagggcggcgcaagatgccggggcaccgctcgaagtcggagaagcacgacgtcgacggcggcggcggtgagaagcagctccggcgggacccctacgaggtcctcggcgtctcgcgcaactccacggatcaggaaatcaaaaccgcgtaccgcaaaatggcgctcaaatatcatccggacaagaatgctaatgatcctaaagcagctgatatgtttaaagaggttaccttctcttataatatcctgtcagatcctgataaacggcgtcaatacgactcagctggctttgaggctgttgaatcagacaaccaagagttggagttagatctttcaagtttaggtgctgtcaatacaatgtttgcagcactttttagtaaacttggtgttccaattaagacaactgtatctgcaactgttttggaagaggcactcaatggtttagtgaccattcgaccacttccattgggacataatatagctaaaagggttgagaagcaatgtgcacacttctattcagttacaataacagaagaggaagcacaagctggttttgtttgtcgagtacaatcgccagacaaaagcaagttcaagttattgtatttcgatcaggaagacaacagtggtttaagtcttgcactccaggaagacagtgcaaaaacagggaaggttacctctgctgggatgtattttcttgggtttcctgtttatcgattagatcaaacaatgaactctatagctgctgctaaggatccagatacgtcatttttcagaaagctggatgcgtttcagccctgtgaattaacagaattgaaggctggtacccatgtatttgctgtttatggtgacaactttttcaaaagtgcaaactatacaatagaagccctgtgtgctgcaccttttagtgaagaaaaagaaaatttaagaaacatagaagctcaaattttgtctaaaagggcagaaatatcaaagtttgaggcagaatatcgagaggttctggcacaattctcagatatgacaaatagatatgcacatgaaatgcaagcaattgatgagctactgaagaatagaaatgaaatacaggcatcatacaccagtgctcctttaaaacggactacaagtaggagcaactactagaagttctgaagtaaaaattcttccaaggaggcaaaagaagatggccaagcaaaggaaaagaggagtacaagagaacggccaaagaagaagaaatggtataaccttcacttaagagttgataagagaaaggcttgctaaggaaggctttcctaaggcaataatgtcttaatataagtgaagaatttgtttatcatttggttgtcaactctgaaatacacggaaaaactattaccagttgatcagcacccttttgattgtttagcacttgtgcaagttaagaggaaggctttgctaaagcaacaacaaccaaatgatgttggaaggtttcgtttatgtctgtcactcaagcatgtcaaaaatgacaagtcctcattgtttatgtataatcccttccccccttttttatttgtctctaagtagctcattttcagaattcgtacttgtaaattgtttgatttattgatgaagcatgattaactctgcgcgggttgtaatttttgtttacaagtaatggcaaagtattggaggatagtagggtcaggtaatttcttgaaaaaaaaaaaattttaaaaaaatatattaatttaaaaat

SEQ ID NO: 122038 - DNA, 478 bp, Glycine max
  unsure (1)..(478): unsure at all n locations
  Clone ID: PAT_MRT3847_81206C.1
gaaatgcaagcaattgatgagctactgaagaatagaaatgaaatacaggcatcatacaccagtgctcctttaaaacgaactacaagtaggagcagaagtaaaaattcttccaaggaggcaaaagaagatggccaagcaaaggaaaagaggagtacaagagaacggccaaagaagaagaaatggtataaccttcacttaagagttgataagagaaaggcttgctaaggtgagaattggacaattaagttcttctgtcactcatgtattgatataagtaatgaattgttttattatttggttgtcaactctgaattccacggtaaaattattaccagtttatctgcacccttttgattgtttagcacttgtgcaagttaataggaaggctttgctaaagcaacaacaaccaaatgaagtggaaggtttcgtttatgtctgtcactcaagcatgtcanaaatgacaagtcctcattgtntt

SEQ ID NO: 122039 - DNA, 1252 bp, Glycine max
  Clone ID: PAT_MRT3847_81207C.1
tcccggccgaccccgcgtgcgctcagctcctgcttggaggagggtccatggtccactttctggatctcaccgtcaccgccacaccttcttctcaatgctcctccttcattctttctccttccccgtgactcacccgcgcgggaagatatcactccctccccaacccattcatttcgatctccattctccctgatactcctctctctctcttctctctctcccgagttctagggttttgcggatagaaggataacacacttacacggcgtcgtttgatttgagggcggcgcaagatgccggggcaccgctcgaaatcggagaagcatggcggcggcggcgagaagccgctccggcgggacccctacgaggtcctcggcatctcgcgcaactccacggatcaggaaatcaaaaccgcctaccgcaaaatggcgctcaaatatcatccggacaagaatgcaaatgatcctaaagcagctgatatgtttaaagaggctaccttctcttataatatcctgtcagatcctgataaacggcgtcagtacgactcagctggcgaggctgttgaatcagacaaccaagagttggagttagatctttcagtttagctatacaatgtttgcagcacttagtaaacttggtgttccaattaagccccctgtatctgcaactgttttggaagaggcactcaatggtttagtgaccattcggccacttccattgggacataatatagctaaaagggttgagaagcaatgtgcacacttctattcagttccaataacagaagaggaagcccaagctggttttgtttgtcgagtacaatcgccagacaaaagcaagttcaagttattgtatttcgatcaggaagacaacagtggtttaagtcttgccctccaggaaggcagtgcaaaaacagggaaggttacctctgctgggatgtattttcttgggtttcctgtttatcgattagatcaaacaatgaactctgtgagtagctactgtaaaaggatagtatttaatttaatattgtctatctattttcatttgaaaatttggttgtggaattatttctatctacagatagctgctgctaaggatccagatacgtcatttttcagaaagctggatgcgtttcagccctgtgaattaacagaattgaaggctggtacccatgtatttgctgggtatggtgacaactttttcaaaagtgccttttctaattaaccggccctgtgtgctctacctttatttt

SEQ ID NO: 122040 - DNA, 237 bp, Glycine max
  Clone ID: PAT_MRT3847_81208C.1
ggaacgaaggtttctttacaattaaaatgtgaaatgtgatttggttaaaatcctcaccttgtggtaaaccattataaatatgaacttgtaaggtccaacttttttttttttttaaaataaaaaaaattcttctacaccccagtatttatatcaacacccttttttatggtataaaatgtatctttgggggataaaaatgacattatccctataatcctcacagggaaaaacaacaat

SEQ ID NO: 122041 - DNA, 542 bp, Glycine max
  Clone ID: PAT_MRT3847_81209C.1
agaatcctcgacagcttggggaagagtgctagggttctcgagaagagcctcgaggactctgaatgggaatatgacagtgtggatcagagcactagagatccaacaaacagactcgaccgtacggaagaaggttctgagagtctggaagggaatcttgacagacccggtaagattatcgaaagccccgatgcgaagaatccagactctttggaaaaacgtccgaacagcctagaggggaggcttcggggtctggagaaaaaatctggtacgctgctggaaagctcaagaagcccggagacaaatcctgaaaacatgaaaggcccttcaccagctgcaagcagccctagccccaacacaagaagcagctcaacggacaggtcaacggactggctaagagaatggttactacacaggtcgaggaacagcttacaggacaatcaagaggacaatctagtgaataggacaaatggcagctcacagaacagcccaggaacagatcagatacaccatacagagagcatgatgaaatataaataaattga

SEQ ID NO: 122042 - DNA, 533 bp, Glycine max
  Clone ID: PAT_MRT3847_8120C.1
aagttcggaattcggctcgttaatgtttgcaaaaagctgttgagcttaccatagcacagattgaagagttgggttcgtttcagaggatgatcagtgctcctcattcaaatgataatattgatctactgttgagcattgatttgttgggtttacaaggagcaggcaaagcttttccaaacaagattgtttttgatgataagcttgtgttggctaacacacaagaattctttgatggaaattttccagtggattcttggttaccaatttttgtgaattgtctttatcctgtaagtcaattaccttcagaagctgtcgttgtaaatgtcacatgtggtagtggactgggtggtctacccaccactgcttggattagttttgcagttaacaattcgctcctcagatatcaacaaaaggattcgtacagcacttgggaaaggtaagaaaattggttttcctactagagtagatccttttgcagtagctttactggctgttctttttggtggttagaatgaacattttgggtctaacgc

SEQ ID NO: 122043 - DNA, 176 bp, Glycine max
  Clone ID: PAT_MRT3847_81210C.1
ttccggcgtggtccctcgcctacgcactctctcgagcactcaaactcacttacacgtgcactctacttaataactatcggatagaatcacctagattgaattcactcacctatacttttcaacattttgactagaacatccctacctttactccaaatctttgctcatcagcacat

SEQ ID NO: 122044 - DNA, 233 bp, Glycine max
  Clone ID: PAT_MRT3847_81211C.1
gatgcgacaacacgacgggacgggacccatcattagcaaagttgcgttgttcacaataccacggcagctgtcatcgcgtctgtgttgcctcatttccatgtcctcgttatggctgcacgcataggactgatgttcctcgcagctccataggttgcaacttatgcacagtgataagtattccatggcaagcattgatcgctgcagctatacacacgcagtgcatcatcactaca

SEQ ID NO: 122045 - DNA, 463 bp, Glycine max
  Clone ID: PAT_MRT3847_81212C.1
tgctttttttttttttttttttttttttattgtttttttttggacctatgaaaaatctatttcaatcatcatgaaaaccttttccaaaggcttttccaattagtgcaactcacttataacggtcacaattatcccttggaagttaaaatccccaattagggtttttcaaagcccacacattttcccttcctaggcttcatcttcctcaaaatcggaataatcttcattatcaaaatcattggcactttcagattcactcagtccatatgtggattgcctaccaatggccctttggggcctaactcttgctgctgggggggcaatttcaaccaccttctcagggatgcttggagaaaaacttgaagccttagaaccccccgacaagtttttacctacacttttatctttggcaggaggcggaaccctttccaaacaaaactggtttcttggaaaaggggacccc

SEQ ID NO: 122046 - DNA, 288 bp, Glycine max
  unsure (1)..(288): unsure at all n locations
  Clone ID: PAT_MRT3847_81213C.1
acgttactacatttgananaagtaacgccgaaactccagcaacatagtagngnngttattagctacacacggagttcactaaccttccccgcttctganncaaantcaaactgcgananccctaaaaccctagtacattncntttgnnaaaganaannaaantgtattcgtgtattcctcagcatctttttctgcaccttnacttgggntcttccccanacccaaaggcgtttaattctcccctacgcaatttgaggatccgtncccgtttaagccaaagagattcag

SEQ ID NO: 122047 - DNA, 866 bp, Glycine max
  unsure (1)..(866): unsure at all n locations
  Clone ID: PAT_MRT3847_81214C.1
agaaaagtaacaaatggcatttacattcttatatgtatgatctaaacctgtttacaaattgtatccacagaactaataaaaccttgcagaaaacagaagcaaaactatgtgcatagcaagtatctaaaattgaactcatatggcataatatgtacaaattgtgagagggggccggtttttcttttctcaaggaacttaatggcttctttccccacatcacttggtagttggaggcatatccaatccagcaatgattccaagtcttttgcaaagtccagtaaataccaatccagcaacttcgggataagaaactttgatatcgaaattccaactgcagcctgtaaatattctctttttgccatttcaagttcgttctcaacctgagatgctgtgtaaattctcacagcaaaagtgaccaagttccacagaatagagcaaatgtcactaagggctctgacaattcttttccataagtttcatggtttttccctccctttgacacttgctgattagaatctgatacaatccagtaatgactccaagtcttttggcaagttcagcaaataccaatccagtagctttgggatagcaaactttgaagttgaaaatccaattgctgcctgtaagtactctcttttggccacttccagttcattctcaacctgggatgctgtgtaaactctcacctgcatttggcatagttcatgacagatccatgaaaagataaatgaaaaggggatagaattttcaaatcttgatatgattttacagcagaatacaatcgcattgtttgattcatgttgccaaccccaccttatgataaaaggctgtgttgttnnttgtaatattcanagagtaatattaaa

SEQ ID NO: 122048 - DNA, 354 bp, Glycine max
  Clone ID: PAT_MRT3847_81215C.1
ggaaaaaaataataaccggtttatctgttaacgcccttcttcccaaagttcccatctaaaattagatatttttttttttttcccggtttcggacctgcggaaatttttaaacccaaaaccaagggggtttagaaggaccccccaaccatgggttaaggaaactttttattctctcctatccgggcggccccctttttttgggtttttcacctggtctaaaagtccttatttttctccttccccaagggtggcctttccccaaaccccaccctttttaaaaaaagggaaagtcttttttttaaacacctatcccttttcaccagaagggagaggggcaccttttctccccccccc

SEQ ID NO: 122049 - DNA, 569 bp, Glycine max
  unsure (1)..(569): unsure at all n locations
  Clone ID: PAT_MRT3847_81216C.1
acgagctcaccattccctccaacctctccaagcccgccgccctccgccccaaactaagcccaaagctaaggtccgccgccacaaccaccatcgtctgcagcaccaccaacaacaacaacaacaacaacgtgtcctccgacctgaaggcgttctccaccacactggccctctcctccatcctcctctccacccctctccccaccggcgccgacatctcggggctcaccccatgcaaggagtcaaagcagttcacgaagcgtgagaagcagtcgataaagaagctggagtcgtcactgaagctctacgaagcgggcagcacccccacactggccattaaagcgagcgtggagaaaacgaagaggaggttcgacaactacgcggaacangggttgctgtacagcagcgatagattaccacacctaatcgtgaacagaaaccagaagcactagagtgaattcatcacacccagaatactattcctatacatctcaggatagatcagctagataatcagagctgcctgattacaatcaaagacgagaagaaacccacctgaaaaagacatcatc

SEQ ID NO: 122050 - DNA, 334 bp, Glycine max
  Clone ID: PAT_MRT3847_81217C.1
gagagacacactccatgttcaagctgttcaatgaggcaaccaaatcggaggcatagctagggaggagatgtgagacgaacataggattgatgccactgaacactacgtaagcaagtcccatcatcaacttgagagggttaacgtgcactacagtgaatcaagaggaggaccctatgttgctcgagctgcgcttatggaccttgaaccaaggaccatggatagctagcgatgcgcagcttgtggaaagatatacagacctgacaattgcgcgttctgccataatggagctggtaacaacgtgcgtatagggcatgatactgatggagctgagctg

SEQ ID NO: 122051 - DNA, 271 bp, Glycine max
  Clone ID: PAT_MRT3847_81218C.1
ggaagggaaaagtaaaaagtggtttataacaaaatatgtgaaaaaatcatatgctggaatagcaagggaacaggaatttccctaagggagtccttacacccacacataaaccctccaataacctatcataaattggctcactaactttttacttactgcagcaccaaatctccttttttcttttttttttaacaccaagacccaatccaaatggccaatttcagccgaattcaacattccttcatctttttagaacaaagaataaaaatag

SEQ ID NO: 122052 - DNA, 270 bp, Glycine max
  Clone ID: PAT_MRT3847_81219C.1
ttgccgactagcttaactggggtctggtaaagactagaagatgctagaagtttttgttagcgaatcgtttgctgtagctttcgtacatttaggttggagcataatttgttgcatttttagaggatttttttttttggattagtattgtctctgggataggttaggcacttggttccttttggatatgaaactgttcatgagtcttcgccgtaatagcttactgtgtgtttggattgaagttggaaatgcggtgcacatggttctatgcaa

SEQ ID NO: 122053 - DNA, 493 bp, Glycine max
  Clone ID: PAT_MRT3847_8121C.1
agttcttaatggtgtcgagggtgtggactatatggaaagaattcctcttgccacatctgagggttttcctcatgtgctatcacgcaaaaatggtgaaaaaggcaaaaggagatttgtttctggggatggggaaaagatgacattgattccgggaaccactgttgaagaggcttacaacaagctaatagttgaacttgagaaaagtgttcctacattggttggcattgaatgtcccaaggatgagaaacttgctcgtcgcaaaatttttgacaaacctaagacgcgctgcttcactattctccctatggagcttaatcttgtggtccgtcagaagttattaaattttgcgaggttcattatgaagaatagggacaagcttatttgccaagctggaatcaacccatactccatggaatggactggtttggccaatacgttactgagcaatgacaacgatattttgtgttgcgatatgctagatttgatgtttgat

SEQ ID NO: 122054 - DNA, 403 bp, Glycine max
  Clone ID: PAT_MRT3847_81220C.1
ggctcgagcatataccgaggacctgacttcatatcctgaaaatatcgagattcatgagacgaacgagtttccatgatatctagactggaacagtccaaaccagctcaagcagctcggtgtaatagaaaattgccctgaccagcatttatgtgctgagggaaaagggttgccaacatgtgaggttaaaagaagttgggtgacaaaggttcacctggagaggagcatcctcgagaaaaatcttgcagagactattaatgtacgtgtgtttgacgaacgaatggatctcatgcgagcagctattgctgaagcatacggaactcctgatcatgaggggctgtctgtctttgacatatgcatccctccggagtatcccaatgaaccacctatggtgcactacacttct

SEQ ID NO: 122055 - DNA, 499 bp, Glycine max
  unsure (1)..(499): unsure at all n locations
  Clone ID: PAT_MRT3847_81221C.1
tcgaattcgctcggaatatttagttatggcctatattttttttgggacaatggaattacatttttaaaaattatataattgaatgaactgttttagcaactactagacccaagttttgcattagtcatcagttaacaaatgttctaaaatataatttctttaaaattaatgtcttcattattcacaacattgtctttactaaaagcactaaattgaaaattgaaataaaatttggcatagggggagtgaatcaattaaaattaaggtaaatagtcatttttacttttaaagtgtaaggtgttgataagtttatctccaaaaaataaaaattcaaattttatttcccaaaaatgaaaaagtgtgataaatttatttatttattaactttttttccattaggttaataaaagattatacttgctacattaatctttntatatataaaatgaaaagagtggagatagttntgaaaaaaaaataattttacgcttgtttttaa

SEQ ID NO: 122056 - DNA, 211 bp, Glycine max
  Clone ID: PAT_MRT3847_81222C.1
tcgactaatatggcaatgttgataggcattctgacgaatatggcaacccggatcataccggtatcttacttatgtagacaccaaaattgttgcaaactacaatcatgaccctaataatcaacataatattactgttatctatcccgagaaagacacctatagacatcattatggtcgtgaatactacggtcacactcacaatcaacatgat

SEQ ID NO: 122057 - DNA, 223 bp, Glycine max
  Clone ID: PAT_MRT3847_81223C.1
gaaataaaagaatttttttggtttattaaaggggaaaagaagggagttccccatgaaaaggaccaaatttcttttctaagtcccttcttccattttaaacccaaccccagcttatttgaacttttggtggttttaagaatggtttttgggagggtaatcccaaagctttttccagggcttggaagggccattttcttagaccaaaggtatttcgggaatcctt

SEQ ID NO: 122058 - DNA, 693 bp, Glycine max
  unsure (1)..(693): unsure at all n locations
  Clone ID: PAT_MRT3847_81224C.1
tcctataccatgatcgtccgcacggacgcacgggcgcaattaacagagctcattcggcaatggctcatgcagacagtccgtcatgcaggcagtccgtcccggaaggcgtcgattaaattttgacttttgtgaccggcgaggcggatcgacggaccctccttcggaggtgcgctcatagctgaaggccgagcttcccgaggacctgatgcaggagcgcgctnttgatcgcgccggcaatctcgtttcgtatctggcgccgaggaccggctcggcatcggcatcgcccgtcagaccatgctcagccagtcgctcatccaagcgggtttcaaattgtacacccatcacgccgacgagccgctcctgcatttcagcataatcttggggtaccatacgcctcaccacgctttccatggttgccatcgcgtcgctaaatagtcccgaaattccgccgcttcccgtcccgcgccgacgcctcggccctggccacatcggccctggtcacttgagacacattcatgaagcgcatgtcggngaacgtgtgccgcagcttccaggcgtncccgcaagctgggcttggtatgcaagataaaacctcgatctcgtcgacaattcgcgggtcgatcggcaccgngcanagtgagtgaccctctcgccgcgcgatccgtcaagcgcttccaagcgaaacaaaagacg

SEQ ID NO: 122059 - DNA, 472 bp, Glycine max
  unsure (1)..(472): unsure at all n locations
  Clone ID: PAT_MRT3847_81225C.1
tacttaacacactgtttaagtgagagaactattataactgtaataaaaatttaaactcatattttagttaattttttgccttaaaatttaagaccaacatacgtgagacaagtcagtgaagtaaggaagtggttgcagcagaagctacaacataaacagctgctgcagtacatttgaattatcacttctctgtaaaaaataaaacttgacacaatgactgacaccaatgcatcagctcctgatcattaaaaaccttaccaaagaaagtgttccagctgctacccttgaaacttttttttcctcgagacttgaacacaagatgttcgatggcagttgaaggaagaaaacaactcaatgaccactttcttgtaaggaaacattgaggagtggcagtgtatttatatttaattaataatataatagaactagctcaacactagcnnnacaaaatcaaattaaaaaaaataaaatc

SEQ ID NO: 122060 - DNA, 341 bp, Glycine max
  unsure (1)..(341): unsure at all n locations
  Clone ID: PAT_MRT3847_81226C.1
tttnananattttttttttttttttttttcgncccaaaaaggggggtttcatattttataggaccattggtacccccacctccccccccaaggggacaaagaatttcacaaaactaaccctaaaaccccctttccccaccacattttaatttcctacccccttttttagccgaagcctttttggggggagacttaacactttttgggtaaacaccttttacgggcgctttcttagcaggcgcttttttttttgttgccggttttccaaaaggagctggttttttccctggggaagaccgggtcaacctccttgaagccttggggggcttccctttgggctt

SEQ ID NO: 122061 - DNA, 626 bp, Glycine max
  Clone ID: PAT_MRT3847_81227C.1
ggctcgagatttatgcatgcttccaccattatttcttcttaatcttaattatattaacaattacaattaacatcatgcacctgtgactgtgattcaatattaatggtttgtcaagggtattaagaaatttgttccgttaaaaaaatatcatgtattagaaattgaggctaagaataatttataaaaacttttttaaaatcatctaaattattttaaggacaaaattgtgcatgaaagtaaaataaataaaaggcacaataccttaaatgtgtaagcctaataatatgaaggacgcgagtttagaacattgacactaggaaggctaagccatacatgtgagctgcaataccgcaagagcttctagcctctttacctttattgggaggtgttattctagtatactaaaagtgtctcacgtcttaccagaattgaagttaaaaaatttaaacacccttctttctttaaagacaaaaccattagaccttcatgagagttaatgtggacaacactacactcgagtgagattatatatttcttattgaaaataaaaaatactttaccaaataatatcatgctttaaatcttttaagatttaattacacatttaatctctataatttttaaat

SEQ ID NO: 122062 - DNA, 723 bp, Glycine max
  unsure (1)..(723): unsure at all n locations
  Clone ID: PAT_MRT3847_81228C.1
tacatttaatgtagggagaagtcatcttagcatttggaaatttggctgatgacaccattaattttgaggcttttccccacaagctggtgcannnngnanagattcangaanaannnnnatnnaaatttttacaaaaagaatttnttacancttnntcaactcanntccctcctgcaacaactctnttnnctgatgngtgtccatatttgtatgctatggtacatgatagttcagtgtccacaataccacgtgattttgtcattggtgttaagttggcaaccataaacaacatgtgtgcatatgggctcaatcctggatttcaggttctcgtcttttgggcaccattcctcagtccatttcacagcaaactgttttgaatcatatggcaacagtgagaacaccattgaatttgatcctagcaagcagagcttttgcatttntctattgccttctcgcggaggaattttagtgacanaactgagattggatacacttttacaacttctccattagtaacttgtgagagtgctgctgaacgaaggctgttatggttnaattggatgctgtatgcacnntcaaacgatgattgccctcatgtccagtgtcttacaccacaccatcccacattttatcagtattgacaattctacccatccttgaatcatctcccataagttttgcctacantgcttantttnnttcttttgccntcacttctncttt

SEQ ID NO: 122063 - DNA, 472 bp, Glycine max
  unsure (1)..(472): unsure at all n locations
  Clone ID: PAT_MRT3847_81229C.1
baggnanngattgataagtcnnnnagangatacgnnngacanacgagnanncananngncgntaagnagangatgnnacaagnaagcngnngaatnangcgnagantaacaagnggaanncananacacacannaggngaacananagagntgcagncctgannagnatanggnaannaanacagncanangnannaaccagnangnncnanacgnnantnananctanancgatgnagagangatgnngagaagaanatgaaagnnnnggtcnnannnaagnnnannaagananannagtaatcagnnaanngntngagcagccangatnacnannnncaatgacggntatncgcacnnncatnagnaganncannngnnngtcnangaggaactgagnnnanganngaanncgatgctncanagnannnancngtgagnngagntgccagangangnacnatgtgttntc

SEQ ID NO: 122064 - DNA, 458 bp, Glycine max
  Clone ID: PAT_MRT3847_8122C.1
ttgtttcattcctttgcaaattattgtactttccttttctgttctacaatagtctataatgatctgttcctgtgcataaccttgataattatttgttcataattgactttatgtggttcacattgatgattgatgattgatgattgatgagaatgcttcatgtattgattttatcagaccacattaaataactcacttagctcgtcgtttttatattaggctgaattgatatattgggctatatataaattgaaagtgtttatcaggtctttacacgtatacgccattagtaaacttgtgttcaaactagtttgttacatatagtagtagttttgtttcaattacttttatgatcaaagtcaaactgcaaccgttaagctataccgcaactgatgatgcttgcataagatttaaatgccaccaaagaaaaaaagtattaatatgtcgtttgctgagta

SEQ ID NO: 122065 - DNA, 456 bp, Glycine max
  Clone ID: PAT_MRT3847_81230C.1
ggctctagggctgaaccaattgtggaggctgaggttcaagtggagggtgaggttctagtggaggctgaggttcaagtggaaggtgagattgaagtggaggctgaggttgaagtggagggtcaggttgatgtggagggtcaggttcaggttgatgatgaaggtttgataaggttgaggtgcatgttgaaaaggaggctggtggtgtgggtgacatggaggttgttgctgactgtttggatgatattcatgttggggttgacacagttgatgatgatgtggggtctggcgaaagtgatgaggattatgttggggatgaggaagatgatgatgattgcagcgactgtactgaagattcaattagtgattttgcagaaaactctgcttggacaacatggttggagtacaagacatttactcagagtactgacgtcgattttgagcctaatctactggacc

SEQ ID NO: 122066 - DNA, 187 bp, Glycine max
  unsure (1)..(187): unsure at all n locations
  Clone ID: PAT_MRT3847_81231C.1
agtcgcangcacgcgtacgtaagctcggaattcggctcgagcntngaccctgtgttgcagcatacagnanantatnngnnatantcngctgtctataatntcntcattnagaatgtntgnaagtnctagccggannctacatgcgannacagcggtcgatatgnattctctngctggaatgtaagac

SEQ ID NO: 122067 - DNA, 293 bp, Glycine max
  unsure (1)..(293): unsure at all n locations
  Clone ID: PAT_MRT3847_81232C.1
cccacgcgtccggtgaaaggatgaccaatttttttttactaaggttgcatacgaggttgggagttgccattgccattgccatggccagtgttnnntggtgcttctcactcttgttctgccactgccactactctgtcaagagcagtaataaggaagtggaattggggaattaagggtcctcgtcgtatggtattgggccttggacttggagtttccttcttgtctatggccggtaccaaatccttcattgcctcggctaagataaagggtgttccctctgttgatttgatact

SEQ ID NO: 122068 - DNA, 308 bp, Glycine max
  Clone ID: PAT_MRT3847_81233C.1
acggctgcgagaagacgacagaaggggcatccaataacttaggctcattctgtattattgaggtcagcacgtgattttatctaattatgacaaagaagagacggtgttgttaatattttaacgtttactagtatagagaaaaaaaggacaacattagttgataattttaacgtgtgaaatctgtttttagcaagcatgatcttgaaggttgcaacctccatgattgctccaagcgactagtttattattgtgaattattttttattcttttattacgtgggattcgaatctagaatctaggctagcca

SEQ ID NO: 122069 - DNA, 210 bp, Glycine max
  Clone ID: PAT_MRT3847_81234C.1
cgaaggccgtacttgctgctctgatcattgctgacgaggccgagttcctagaggaacagcccacaccatgtgtgtacgatcctgatctgatcacggacgccgccaacttcacaaaccagacctgatccactatctcttacatgtaacacttacagtcccatcactcactatttgcatagttctatctatcactcacttaacacgctcgtc

SEQ ID NO: 122070 - DNA, 371 bp, Glycine max
  Clone ID: PAT_MRT3847_81235C.1
aaacaaaactggtgtatcagggttctattaagatatcttcgttgcaacttatacacaaatttctcgtgagtaatacacaagatatgaagttttttcttatagggggatcgaagagaactagtagaacgaagaaagccttcataaatcaaatagaatttccaccacatacaacctgaaacttgaatcattatagagagagagagagagagagagagagagagaacaattatttaaaatcactgtatgtatctgcaaaatgttgctcatattcacctttcatccaccccaatggtatagtttcagttcaatgcttcattacgtaaatgctgcaatgaaaagtgcaagaactgcaacccacataacatgccttt

SEQ ID NO: 122071 - DNA, 384 bp, Glycine max
  Clone ID: PAT_MRT3847_81236C.1
gctgcgagaagacgacagaaggggctcatcgccctggggggcgtttcacacaagcctcgaggtgatcatggtcagcctttagctttcagagctcctcctcatgccgatgctccatctacacaatgcggttttggagttgctggagagtattagtatttgtcatggttgctagaggaggattggagccttagaaaggggtctcatgtctgaggccataacatatgctaaccataggtgagaaagagaggtcacaggatatgttttactgcgaccccacggagggcgccaaatgtcacttaccaaaatccaaggctggcacacgtcagagtgaatgtggctgaagtctgctcctggacttcgcacgtcggactaagagtggtcttt

SEQ ID NO: 122072 - DNA, 530 bp, Glycine max
  Clone ID: PAT_MRT3847_81237C.1
ggctcgagcggctcgagaaaaaagatgcaatcacttggtcaaaatgaggcatctctagcatgccctcaagggtgttgccctacttctttattgttcaaccctccaccaccaccaccacaatctcagaacacaacagccaaacctagaaacagttctgcagagtgtagacacagctttgcagccacaacagcatcctcaatcttcccaaacaccaaattcaccaaccatgagtcccttccttctctgcatgaatcattcagtgagttcaagaaagtgtatcctcaatactccgagactgatcaagtggaccatgtgagagccaaagaatattaccacctctctttctccaaccaatcatgccttgactacattggtattggcctcttctcctattaccaacgccaacaccaccatgacacctcaaaaacccaacttgcatcttcttcaacaccccaatattctgataatattcccttctttagcatatcctacaagactgggaatctgaagacacttttgcttcatggggg

SEQ ID NO: 122073 - DNA, 281 bp, Glycine max
  Clone ID: PAT_MRT3847_81238C.1
aattcggctcgagctcgagccgaatcggctcgagtattagtgcaataaaattggttgagatgactaaaaataagaaccataaccttaaaagtagattctagggtacataggaagtagtttaaaggttatggttcttattattagtgcaataaaattggttgagatgactaaaaaaaaaaaaaaaaaaaaaaaaaaaaaaaaaaaaaaaaaaaaaaacaaaaaaaaaaaaaaaaaaaaaaaaattgggcgaaaaaatattaaaaaaaacaaaaaagggggtc

SEQ ID NO: 122074 - DNA, 544 bp, Glycine max
  Clone ID: PAT_MRT3847_81239C.1
gaaggtgatggatatcactggttttaagctatagtacacgaagaggaaaaaatgaagtaggtattatggtggacaaggtttggaaagaaagcatggtggatgcaaaaagaattggagacaaaatcttagccataaaattaatgagggcataggaaaagttttgggaagacttagaggggttggttcaaggcattccacaatagaagataattttcttatgtgaggatctaaatggacatgttggtagtcagaaaaggcattttacaaatgcacatggttttggagatctaaatgagaaaggatagacaattttttacttctccatggcttttgaccttctgttatatccttcatgtttttggatgaaacaatttcgaacagttttccatcatatcatttgcgaaaaagttttagaaatcacatacacactgttcaatttcctcttctagcgtgttccatctttttcaggattcaatgtgacaataacaacaaatcctatcagcttttctcacgattaagatgttggggaatccttacaaataaa

SEQ ID NO: 122075 - DNA, 397 bp, Glycine max
  Clone ID: PAT_MRT3847_8123C.1
caaaactagtgcaactttgcaatttagaaagttagcagattgtgaggttctcaagagaaactgtaaggggatgtctaatgttttatgggtggctcctgaggacaaggcgagtttatggtcacaacttcattatgtttcgtgcaataatctggaaatgcaagaagcttatcttgtcaatctcgcaaatgtgttacgcgaattgtgtttgcacacaccacaggaagctctccacttgtgaaagaaagctctctctcgtattgaatggctgcaaaaagctgatgtgcctaccatatcacacattgtagagttccatctctatgcacaggatgatgaatgctcctcattcaaatgataatattgatctactgctgagcattgtttttttgggtttacaaca

SEQ ID NO: 122076 - DNA, 361 bp, Glycine max
  Clone ID: PAT_MRT3847_81240C.1
atatagctaaaagagcctaaaactttgtcagtgaaattcagtattttttgtccataattgaaagtttaaagtataaacacaactttttgttagaaaaaattctgaactctgatttcacaaagttaaaaaaaaaaatatattttttaactattcgggtagccctattgctagaggtagagggaaaccgagaaaaactataggtgaaaccattaggaaggaccttagaataaataaaaaaccagtaagaaggatttagagatcactggtttatctaaggacatgatagaagactcaagcatcatttgatccatgtagctgatcccatctagtaagcaaagtttgttgtattgagggtataata

SEQ ID NO: 122077 - DNA, 693 bp, Glycine max
  unsure (1)..(693): unsure at all n locations
  Clone ID: PAT_MRT3847_81241C.1
ccacgcgtccgcacaggtggaagccgaaaatcctgtggaaatggttcttgtgatgactgtagaacctggattcggaggacaaaaatttatggcagagacgatggataaagtatcatcactctttcttatgttatgcttaatggttgacaacactcatcaattatgaaagttgtatatattttttcattttttttcctcttattttgaattttcaaaccaggtacgtatacttaggaagaagtatccatcacttgacatagaggtatctcagcctatttatttgtctgtgacttcttgcctgctaagttagatgcacattttcttcatggttgtagacacagtagataattgggatttttttccttggttgattctgaacttgttaaagctttcaaattttacccttttatgttctcgtctcttatttaagacaaagaacagtggtcttttatttatttcctgttgccttagcactttcaacttccttntatatataggtttctcaccaaaacttaccattcaacagtatatcctaagtgctaaattatcgtattcatggagattgggagatcatttaaggtctcattntgggaagagcctattcatagngttaatttggaccttaccttatcacataaacacttatggttaagtgggttgggaaaagctaataaaaattnaacttatggatat

SEQ ID NO: 122078 - DNA, 477 bp, Glycine max
  Clone ID: PAT_MRT3847_81242C.1
accgctcctacatgcacgatgcaaggagacggcagagggggcacagaactgtgaacactataactgccacacctataaccacgcagaaagaaggataagaaggatagaggtagcggatagaagggtgctacattagggggctctattatgggacactctgatcatacacttcattcatgagaatcgtttgaatgaatcgaaacagtcttccatatcgggattctctgtgtgggtgctggcctcgggtgcgcacctatggaccgcctacttgaacctttttctcacctttgtgtgtcaccagagcaagtcttgtgagcacatcttgtgcatgatgagacctcccgatgatacctctccaaacttggcatcatatgttgccaccatttctttacgctaatccgaaatgctacagatatgtttgagagcaatgatgatggagactgtgatataatgctgttccataatggtgatccattg

SEQ ID NO: 122079 - DNA, 643 bp, Glycine max
  Clone ID: PAT_MRT3847_81243C.1
agttcacaaattaactgagatttaattaagaataagataataattcacatgcagacattatatatataattaaaataaaaccagttcagttccattttcgatccttcagtcattatcttgttctacttcagatgcaggctcttcttcttcttcaaatccatcaatcccgtaagctgcatggccacttccaaaggctttgatgtgatccttaagggacctcttgtgcttgaaatcagatccacagatgcaataccaaagcttgccacagttcttctcatgtgttctccaatcacccctcacagcaaaggccttgccacattttctgcacatgaagggcttaatcccatgcttcctcttgtagtgtgtttggagggttctgaagtctttgaggggctttgctcttgggtgatcaatgttgttcctgcaacctggggaacagcaatagcatggaagccttagcatacctgttggttgggtacccctcagagattcaggcccttttctgtactgtgatccatgcccccacatatgcatctgcatgttgttggatctgttgaaaggtttgcaacaaacgggacaagggaactgagttgggaccatgaggatcttgagaaggggtagggaacccaggactggccctttg

SEQ ID NO: 122080 - DNA, 368 bp, Glycine max
  Clone ID: PAT_MRT3847_81244C.1
gaaagctagagcaatgcattgctgccatatgggattgaacacaccgaaaaaaaaaaaaaggaacaaaaaaaaagcgggcgctctataggagacccacttacatacacgcgcatgcgacacgatagatcttttatatagtgacctcaaaatacaacacagtgggcggcgttacaaagccttgactggggaaaaactgtggtgacaccaatcaaaagcctctggaaacatatccctttttccacatgtggcgttatcgaaaagaggcccacagatagcgcttttcaaaacatgcgcacactcaaaagggaatgtgacacgcgctgtgaaggggcatataacgcgccgcgtgtgttgggacacgcacagtg

SEQ ID NO: 122081 - DNA, 261 bp, Glycine max
  Clone ID: PAT_MRT3847_81245C.1
tacggctgcgagaagacgacagaagggcaacccatatcccatataaaagctggctctattctgaatcatggttggtgcagttcaagtatacactatacaaaataaaatggctggctaagtttttcaactttaaaaagtggaaaggataatgacaaaaaagccacaaggtaagcaaatcatgttaaaatagagatcgcatgcattcaaagcacataacctacaacaaccagggcataacatataattccagaagaaagtaac

SEQ ID NO: 122082 - DNA, 288 bp, Glycine max
  unsure (1)..(288): unsure at all n locations
  Clone ID: PAT_MRT3847_81246C.1
aancnaanacananaacacaaaacnaaacacagancaanncagaanncngaacgcnaaantattanaaatccncacaacanncaaatnatccacacttaaacaaaaccanaacananaanancnancanaannnnannacanaaanngannctcnnaanaannnnaacacaagcaaaancngacnaaanaacaaaaaaancnacaanancccaacacaannaaaanganannaacatannaaaaacncatgnaagcnacnacannnacaacangnnncnaaaacaann

SEQ ID NO: 122083 - DNA, 506 bp, Glycine max
  Clone ID: PAT_MRT3847_81247C.1
gttcgttccaggaaggtttcccgtcatcactgtatgacgtcctccttctttgggggggggggggggggaaaaccaacctaagtttaagtaggcagaaggaagcgctaaccacagactgtacgaaaataaacgaaggggaaatggcgcaaatatcaacatattggtgtagttagaggaagcgggagtccaatgtaagcactatgtataacaaaccacgatgagacgtgtggaatttcagtgacctattgcgaattgctacagccatacggtaaagaccataggtaatggttggtagttcgtgcgtacagttagtacatggccaattgcacgttggggcagggtgtgtgacggttgttcgaacgggtggcgtaccagttgtagcatgtggtaacgtaccgggatggcagcatgtgggtctatgacgtacttctgcacgtatggtacttaggtaatccgtataaatgtcgatacatgcactaggtgtagtactacgtacagtaaggtga

SEQ ID NO: 122084 - DNA, 2445 bp, Glycine max
  Clone ID: PAT_MRT3847_81248C.1
atgagtgcttcaaaatcaggtggtggatcaggtcgtggtcaacaaggtgattaccattggcgtaatcgtcatggtcgcgataaggttgctagacttgaggaaatattcaaggaatgcacacatccaaatgaagtgcgacgccgtcaaataggcgaggagctcgggcttgatcctgaacaaactataaatgagcgattagatacagatgctcttcggcttgagaatgaaaggatacaatcggaaaacaacaaaatgagagagactttggagaatctttcatgcggatcttgtgggggtcgagccatggaaccagtaaagcatcaactttccttgcaagtcttaaggggggaaaatattctattaactaaagagtgcgagaggataacctcacttatggcaaacaatgggataaatattaatccagcactacttcctgtccttccttcttcttcatcacatgatgccttaggaggaagtttactaaatcaaccagttggaattcctgctcataatcaattcatttctaaccatgataaccattatattcctgccgcaattccaactccttttcaggataatcctattgttagccctcctagccataatcaagacattaaccctgctcctaccattgatcaacacattcctactcttgatgatcccactctcattggagataattctcctttgatttcaagttttgattataatattccagctttggttactgctcttgatcgaaatcttcccgcaatgattcatcctcacgatcaaaataatagcattccttccgctgagaaagaaattcatcaagtgtctaacaattcaaacaataacctttctgctctagagttggatgcagttcaaattctaaacaatgatatgttaccccaaccaatgaagagcctaagtaaagatatggatagtgtacaaatgttgaagattgcagaagatgcaatggaagaattgatgaaacttctcagtttgaacgagcccttctggtttagatctttactagatgggaaattcaatcttcggcatgattgctacaaaaggatatttggtaggagcaattgcttaagtggacctcatgtacgaatggaatcgtcgaaagattcacgagttgtgaaaatgagtggggcacaactcgttgaaatgttcttaaattcggacaaatgggttgatctattcccaacaattgttaaaaaagctcaaacaattcaagtacttgaaagtggttcatcaggaaaccgaaatggagctctacagttggtgaatgcagaaatgcacattctttcacatttggttccgagtcgggaatttctcttccttcgttattgtaaacaaattgaagtaggtatatgggccataggggatgtgtcaattgattcttcaacatacaaaactactgtttctcacgctcgaaggcttccatctggatgcctgattcaagaaaagtcgtctgagggattgtgcatggtttcatggatggagcacgtggaagtgaatgaaaagatgcaaacccacaatcttttcagagatactatttgtgggaataacgcatatggagcagacagatgggttatgacccttgaaagaatgtgcgaaaggtttgcaagctactcagctaaaactatacctagttgtgagactggaggagttgttagatcgcccgacgtaaaaagaaacataatgcacctaacgcatcgtatggtgaaaatgttttgtgggaatttggacatgcaagacaatccaaatttcccaaatttaacccggatgaacaacaatggggttaagttatccattcgcgtgaatcacacagggccaaatgagcctaaaggcacgatcattggtgctgctatctgctttcgggttccactctctccacaaattgttttcgataacttgatagacaacaacaaacgagccaagtgggatactctatgcgatggaagtgcagggcacgagattcaacgaatctcaactggaagcaatcctggaaattgtatttcaatcatgcggcctttcatccctaaagagaacaatatggtgattctccaagaaagttatgtagatgctttgggatccatgttggtattcgctcctttttatatggaaggattggatttgatcatgaagggagaagactcatcactgtttccgattcttccctctggccttaccatatcttgggattaccaatcaaataaagttcctgaaggacaatctggacaagttggtcaatcaaggggatcactaaagaatcttatccactcatatggtaagagcataggcccaaaggacttatctgtgacgtactccgcatgctcctcaagatacaacaacaggagtgtcacgaaaactgaggcaacaaaatctagcaagcgaaaaataaatccaggaaaaaagaaaagagaagaatttcgtaaagtaggtgtggaatga

SEQ ID NO: 122085 - DNA, 345 bp, Glycine max
  Clone ID: PAT_MRT3847_81249C.1
gaaccctctaatctcaagctctaagaagagccactctacctttctattcccaacacacaagaaaaacgagagcatggaccagaggctacttcactatcaacctctgggtgtgtagggtcttccttctatggaaggtggggaacttcacttgatggcgaggactacaccatgctggccaagacagagccatcacaagttcgcatggggaaaggaaagcccaccagattgcagcctatgatgaacaatgttgatgaagggaaacgtatatttgcacctcttgtggagatcactcacaacatcattggcaagaagcgtttcacccagcttataggcagaggatttgca

SEQ ID NO: 122086 - DNA, 460 bp, Glycine max
  Clone ID: PAT_MRT3847_8124C.1
tcatgtaaagcttttccaaacaagattgtttttgatgttaagcttgtgttggctaacacacaagaattctttgatggaaattttccagtggattcttggttaccaatttttgtgaattgtctttatcctgtaagtcaattaccttcagaagctgtcgttgtaaatgttacatgtggtagtggacgtggtggtttacccaccactgcttggattagttctgcagttaacaatcgctcctcatatatcaacaaaaggattcgcacagtacttgggaaaggtaagaaaatagtttttcttactagagttgatccttttccagtggctatactggctgttctttttggcgctaagaatgaaaatctgagttttaatgccacttaccctatgttgacgcgactttttgagaactgtaagagtactaaaaatttctggttgatgagtggatcttttgcatttggcg

SEQ ID NO: 122087 - DNA, 2610 bp, Glycine max
  Clone ID: PAT_MRT3847_81250C.1
atgtttttgataattaacaggtgggaagtgggtgacaatgcaagatgcaaaaaccaccggcttttcatttgtggcaatagtgcatatggagctgaaagatgggttatgacacttgaaagaatgtgtgagagatcacctgacggaagaagaaacataatgcacctaactcactctatggttaaaatgttttgtgggaatttggacatgaaagatgacaaaaacttcccacatttaaccaggatgaataatggtgggactagaatattcaaggaatgcacacatccaaatgaagtgcgacgccgtcaaataggcgaggagctcgggcttgatcctgaacaagtaaaattttggtttcaaaacaagaagacgcatataaggactataaatgagcgattagatacagatgctcttcggcttgagaatgaaaggatacaatcggaaaacaacaaaatgagagagactttggagaatctttcatgcggatcttgtgggggtcgagccatggaaccagtaaagcatcaactttccttgcaagtcttaaggggggaaaatattctattaactaaagagtgcgagaggataacctcacttatggcaaacaatgggataaatattaatccagcactacttcctgtccttccttcttcttcatcacatgatgccttaggaggaagtttactaaatcaaccagttggaattcctgctcataatcaattcatttctaaccatgataaccattatattcctgccgcaattccaactccttttcaggataatcctattgttagccctcctagccataatcaagacattaaccctgctcctaccattgatcaacacattcctactcttgatgatcccactctcattggagataattctcctttgatttcaagttttgattataatattccagctttggttactgctcttgatcgaaatcttcccgcaatgattcatcctcacgatcaaaataatagcattccttccgctgagaaagaaattcatcaagtgtctaacaattcaaacaataacctttctgctctagagttggatgcagttcaaattctaaacaatgatatgttaccccaaccaatgaagagcctaagtaaagatatggatagtgtacaaatgttgaagattgcagaagatgcaatggaagaattgatgaaacttctcagtttgaacgagcccttctggtttagatctttactagatgggaaattcaatcttcggcatgattgctacaaaaggatatttggtaggagcaattgcttaagtggacctcatgtacgaatggaatcgtcgaaagattcacgagttgtgaaaatgagtggggcacaactcgttgaaatgttcttaaattcggacaaatgggttgatctattcccaacaattgttaaaaaagctcaaacaattcaagtacttgaaagtggttcatcaggaaaccgaaatggagctctacagttggtgaatgcagaaatgcacattctttcacatttggttccgagtcgggaatttctcttccttcgttattgtaaacaaattgaagtaggtatatgggccataggggatgtgtcaattgattcttcaacatacaaaactactgtttctcacgctcgaaggcttccatctggatgcctgattcaagaaaagtcgtctgagggattgtgcatggtttcatggatggagcacgtggaagtgaatgaaaagatgcaaacccacaatcttttcagagatactatttgtgggaataacgcatatggagcagacagatgggttatgacccttgaaagaatgtgcgaaaggtttgcaagctactcagctaaaactatacctagttgtgagactggaggaggttggttactctttattttctttgctcgatccaaagttattctaattttaatttatttaatttttgttagatcgcccgacgtaaaaagaaacataatgcacctaacgcatcgtatggtgaaaatgttttgtgggaatttggacatgcaagacaatccaaatttcccaaatttaacccggatgaacaacaatggggttaagttatccattcgcgtgaatcacacagggccaaatgagcctaaaggcacgatcattggtgctgctatctgctttcgggttccactctctccacaaattgttttcgataacttgatagacaacaacaaacgagccaaggttcaaagcctaaaattcatatacatggcacgagattcaacgaatctcaactggaagcaatcctggaaattgtatttcaatcatgcggatgctttgggatccatgttggtattcgctcctttttatatggaaggattggatttgatcatgaagggagaagactcatcactgtttccgattcttccctctggccttaccatatcttgggattaccaatcaaataaagttcctgaaggacaatctggacaagttggtcaatcaaggggttcgttggtgactctaatgtttcaacttttggcatccagtacatctaaaatagataatgtagacatgaaattaataggttctattaatacactcgtgacctcaactgtggagaaaattaaagatgctttgaattgctcaaattcgaagtaa

SEQ ID NO: 122088 - DNA, 510 bp, Glycine max
  Clone ID: PAT_MRT3847_81251C.1
atgagagaaggaaaacttcagtgcagccaattttgtcacttcaacatctctaaagaaatcaaatttaaagcattccgaatattgctttgcaacccatctgcaataaggcatttatattggctcgcatcaaccaggtgggaagtgggtgacaatgcaagatgcaaaaaccaccggcttttcatttgtggcaatagtgcatatggagctgaaagatgggttatgacacttgaaagaatgtgtgagagtctatgctattcattcttctcagtgattagatcacctgacggaagaagaaacataatgcacctaactcactctatggttaaaatgttttgtgggaatttggacatgaaagatgacaaaaacttcccacatttaaccaggatgaataatggtgggactaggttatctagatctgttcgggtgaatcacacaaagccagatgagcctaaagacatgctacctgcttttgacttccgctctctccacagaatgtttttgactgcttaa

SEQ ID NO: 122089 - DNA, 304 bp, Glycine max
  unsure (1)..(304): unsure at all n locations
  Clone ID: PAT_MRT3847_81252C.1
cgtcggaaccttttccatgcggcttccgtgagcatccccctgggaactgacgaagaagcaccgacgggtaatagtgtcacggctcgacgcctcagcgaactcatcagttgacgccgaacctccagagtacgcgatcatcacggctcgacagtgaactccccacgtgatttcatagctcgacgcacgaccggccctgcgaagaaacaaaaaagccgaacctngctaaaaaaaaaaattaacgacccaaaaggccttcgtttgggtggttgtctgaaagggtgaacctcgtagacacttactatat

SEQ ID NO: 122090 - DNA, 241 bp, Glycine max
  Clone ID: PAT_MRT3847_81253C.1
attttaggtgggattcaggagtcaatgacagaaatagaatgcgggatggaggatcgacacaaccatgtagagattttgctgctggtaaatgcagaaaacgcagccaatgccattttcgtcatgataatcataatcatgaggatagctgggaaaataagtacacggaatatggaactcacagatattctgctccacacgatggtacagacgatgctcttaagagtggtagatctcatgaagc

SEQ ID NO: 122091 - DNA, 476 bp, Glycine max
  Clone ID: PAT_MRT3847_81254C.1
ctcgagccgattcggctcgagctgctccgcaacttcgctcaccactcctccatctcgcggcatcaattgcactctcaacagccccgagaagctagggacccagcgctgtatcctccatcacaatgtgcggctccattcgcgcctacgtgctccacggcgcaaaagatctcaagatcgaaaaccgtgaactcactgcacctgcgcccaatgagctgcaggtcgccgtgagatcaaccggcctctgcggctctgacctgcactactacaaccactaccgcaatggcgacatcatcgtgaaagagcccatgtctctgggccacgagtctgctggtgtggttgtggccgtgggttcggaggcgcaggcaaacttcaaggttggagacaaagtcgcgctcgaagtcggcttgccgtgcggcgagtgcgacaggtgcaaggaaggcatgtacaacatttgcagggcatgaagttcaggagct

SEQ ID NO: 122092 - DNA, 283 bp, Glycine max
  Clone ID: PAT_MRT3847_81255C.1
tgaccctgatgatttagtgaacgcttctttctcttcaagttgcgattcttttgaaggtactgttcgttcttcttctactggaaataacaaaggaaatttaagttgttctcttaatgataatcaatcaacaaatccttctcgatcaaataataataattcttctgcgagtggtttatttccttctctctttgtcgcatttttaatttttgttaacatgttgtaaacaaaattaattgtgaaaaaaaatttaataaatttttttttgaccgaaaaaaaaaaaaaa

SEQ ID NO: 122093 - DNA, 904 bp, Glycine max
  Clone ID: PAT_MRT3847_81256C.1
ggtcatgagaccaccggttcagtgctgacctggacactttatcttctaagcaaggattcttcctcattggcaaaagcacaagaagaggtagacagagttttacagggaaggcgacctacctatgaagatattaaaaatcttaagttcttgacacgctgcattattgagtcactccgtctctatccacatcctcccgtattgataagaagagctcaagtcccggatgagcttccaggtggttacaaactcaatgctggtcaagatattatgatctctgtatacaacatacatcgttcttctgaggtctgggatagggctgaagagtttgtgccagaaagatttgatttggatggtccagttccaaatgaaacaaatacagatttcagattcattccattcagtggaggcccccgcaaatgtgttggtgatcagtttgctttaatggaagctatagttgctcttgcaatctttctacaacacatgaacttcgaacttgttcctgatcagaatatcagtatgacaacaggagcaacaatacatacgacgaatggcttgtacatgaaactgagtcgacggttgaaatagtaatatttgttcatcttcgcataggctgctaaattgtctataactatcggcgtatcaaattctttcgattttctcatttttagctagttaatataccccaaggtaatccagtaaatatgtatttgatagcaattattttccgtagtcaaatcatttatttatattttctaaatgttgtaaagaagtttaattgaatgaattgcgaagtgaagaactagtgtagacacaagtccgggttatgaaaaaaaaaaaaaaaaaaaaaaaaaaaaaaaaagggccggccgttttaaaggtcccaagttaccgtccccttccttcc

SEQ ID NO: 122094 - DNA, 388 bp, Glycine max
  Clone ID: PAT_MRT3847_81257C.1
tttttgattcaaaattgctcctggttattacaacatgcgttcttcccatcataacatagtttgcatgatttacattaacatttacgaccaaagggggaagtgatgtttgactgctttatttttacaaggtttcatgaacttttcaaagctgataaagcttcctttgttgccgatgagataacagcgtctgaagcatttggcagataataatacttgcctgcagtattaaattatttttatgaataatgttttcttctattgaagatactaaacacatcgattcagtagaattgtagtacacaaaccttgggcaactctagcaatctccttggcgaaacccgttgagacaaacttattttcagtgtcgatgacaaggagagacattcct

SEQ ID NO: 122095 - DNA, 265 bp, Glycine max
  Clone ID: PAT_MRT3847_81258C.1
ccctgattgttccaacgttcatgcgatttcctgttttgagcactgcttcgagcaatttcaagaagaacctgcttgaccttagttccttgcacgcttcctggtgtcacaaaaaccacaatgtggtaaatgaaaaaaagagttctagcaatacactctctgacacaagaaattattgtttagtctggatcaaaattcatgtagtacataacgagtttttcgatttacgaaaagagttaataaaactcacataaaaattgactcaaaa

SEQ ID NO: 122096 - DNA, 289 bp, Glycine max
  Clone ID: PAT_MRT3847_81259C.1
tgacttctgaaagatgcgacattccatacattgcatagaaacagaacgtggttgggttactacttctggcctttctgggtagttgccaggcctgataatgctgcatcgctcactgagggcgaaatgaccgagagcgtggggggggaactgatgaccatcttggataccgcccaaaattgaaagatcgcaaccctcaatagctctgaacgatgcgctttctgcagctatttggactgcgattataagttgtctatcaaatgcgacatgcttatgcgtcacatgtgaggcc

SEQ ID NO: 122097 - DNA, 467 bp, Glycine max
  Clone ID: PAT_MRT3847_8125C.1
caaatatttgccactcccatgatgcccgtagatgaagaagttctttctaaggttgcacaagatctggttgaggaatggcctgattgtgtcgatgaggaggactcctttgaggaagtttctgcaagtgcagcactcaatggtgttgagggtttggactatatggaaagaattactcttgccacatctgatggttgtccccatgtgctttcacgcaaaaatggtgaaaaaggcaaaaggagatttgagtctggggatggtgaacagatgacattgattcctggaaccactgttgaagaggcttacactaagctaatagttgaacttgagaaaagtgctcctacattgcatggcattgcatgtcccaaggatgagaaacttcctcgtagcacaatctttgacaaacctaatacacgctgcttcactattctccctatggacgaatactcttgaggctcgtcagaagtttt

SEQ ID NO: 122098 - DNA, 158 bp, Glycine max
  Clone ID: PAT_MRT3847_81260C.1
tcttctgagagtgtttggttgaaagtagcaaagatgtatcctttcgggcaacagggtcaacagattaagggggatattgcaggtaatgcagaggaatgtagtaggatatcaccaacatcaccagtgttggagggatcgttgaccaaggcttaggcttc

SEQ ID NO: 122099 - DNA, 168 bp, Glycine max
  Clone ID: PAT_MRT3847_81261C.1
ctcgagcgaatcggctcggattcaagacacaccacaacgcagtcactagctacttgaaggttgtaagaatgggcacgttcctctgagggaattgccctaaacacatccttcaagtagctagtgactgcgttgtggtgtgtctgaaatactatgtattcgaatccttgt

SEQ ID NO: 122100 - DNA, 299 bp, Glycine max
  Clone ID: PAT_MRT3847_81262C.1
ttttaacaaaacttccttataaatttaatggcgatttaaaaccttccttcttaaccagcaagggaatgggcttaaacccttttggtggttggggatttggaaattttcagcctttaccaataaaaccaaaaaccggtcttattaaaaaccaaccggcaccaaaattgttcccgccgttcaaaaccccagtttggagggttccggttccttgaattggggggccccttaaaattttaccgggtaaaccaaacacttaaaattttgcaaaattaacctccgggaaaggaccaagttttttg

SEQ ID NO: 122101 - DNA, 160 bp, Glycine max
  Clone ID: PAT_MRT3847_81263C.1
gccttcgttatttcggagttttatggatttggcaaacactaacattgggacatatcagggggcagaggttcgcgcccaaagcccccagttaataacatgtttatttggtgagtactaatacccacttcaaagtattcaccactggagctgctggatctat

SEQ ID NO: 122102 - DNA, 1031 bp, Glycine max
  Clone ID: PAT_MRT3847_81264C.1
gttgaagagtattttagttcaagaaaacatgtgaatcaaaatgaacatggacataaaactttggattgtctatttattgtcatagattttagataaaattatcttcttttttttttgtagttctaaactgatgagatgttatgatttgtgttctacaacctttaaagcagttaacttcttcaggcagttggtaatggggaagtccaaattatgcttggttgaattccattatttctcacaaagtataagtctatgtgggtgcaagagcgtgttgttctagatcgcgatctagaactagccaattcactctttttcttctcgccctctgccgtgggaggagtttgtaacatggctgctctaccaacggcggagcttagtgacgcaaatgcaacacatgtagcaagttgtgatgtgagggtgttgcatccagtgttcaaggtttacggtggggccaccgcgttctccggccccgttgtcaccgtgaaggtgtttgaagacaacgtgttggtgagggagcttcttgagacgaaaggcgaaggaagagtattggttgtgatggaatgatggaggaggaagcttgaggtgtgcattgatgggagggaatttggtacagattgcatataacatggggtgggctgggattgtggtgaatggttgcgttagagatgtggatgatatcaatgcgtgtaatattggcgtcagagccttggcttctcatccactcagatccaacaaaaagcgcactggtgaaaagaatgtccctgtttatgttggtggaacatttattcgtgaaggagaatggttgtatgcagataatgatggcatcctcgtatcaaaatttgagttgtcaaactaaaatagtttaccttcagttcaatattattgcaactttagacttttaagtcatgctttttctggtttagtttgtggggaagtgaataaaattttaagaatttcttgtgtgcactttgcctaacatttgtttctctcttattttagaggggcaagggggggttcatgttgaaaagttt

SEQ ID NO: 122103 - DNA, 506 bp, Glycine max
  Clone ID: PAT_MRT3847_81265C.1
cccacgctttcgaattaaaaaaaaaaaaaaaaaaaaaaaaaaaaaaaaaaaaaaaaaaaaaaaaaaaaaaaaaaaaaaaaaaaaaaaaaaaaaaataaaaaaaaaaaaaaaaaaaaaaaaaaaaaaaaaaaaaaaaaaaaaaaaaaaaggggggggccgttttaaagaatcaaatttaattacccggtgtttgcaaggcaaaagtttttttttaggggccccaaaattaaattcatgggccgggttttaaaaacgtcggaattgaaaaaaccttgggttacccaatttaaattgctttgcaaaaaatccccttttctcaagttggggaaaaacaaaaaaggccccaaccaatcccctttccaaacaattgcccaccttaaatggcaaatggaaccccccttttaacggcccattaagcgcgggggttgtggtgtttcccccaagtgtacccgttacttttgcaggggcctaaccgcccgtttttttggtttttttccttttttttt

SEQ ID NO: 122104 - DNA, 391 bp, Glycine max
  Clone ID: PAT_MRT3847_81266C.1
caaaaagggaaaaataattgtcatagatatggtcattaacgaaaaacaagatgagcaaaaaattactgaactaaagctcctttgggatgtaagcatggcatgtgcattcaatggaaaagagagaaatgaagaagaatggaacaaactctttcatggaagcagggctccaagactacaaaatatctcccttgaccgggtatttgtctcttattgagatctatccttagacaattatgtgttgatttatttaattattagtttcatgttatgaactgaatgatgttgtagtaatatgtatttgatattagttttaaaacttatgaatatggaagaactagtgtggagcaaaggcataggataataaaatctgttggggtttctctctcaaaaa

SEQ ID NO: 122105 - DNA, 759 bp, Glycine max
  Clone ID: PAT_MRT3847_81267C.1
cggctgcgagaagacgacagaaggggatattcttctcattttgcttctttgctttcataactttagtgcccaattggacttctttgtttgctttcaacttacaatttctgtggaggagtttgtaacatggctgctctaccaacggcggagcttagtgacgcaaatgcaacacatgtagcaagttgtgatgtgagggtgttgcatccagtgttcaaggtttacggtggggccactgcgttctccggccccgttgtcaccgtgaaggtgtttgaagacaacgtgttggtgagggagcttcttgagacgaaaggcgaaggaagagtattggttgttgatggaggaggaagcttgaggtgtgcattggtgggagggaatttggcactgattgcacataacatgggttgggctgggattgtggtgaatggctgcatcagagatgtggatgagatcaatgcaagtgatattggcgtcagagccttggcttctcatccactcagatccaacaaaaagcgcactggtgaaaagaatgtccctgtttatgttggtggaacatttattcgagaaggagaatggttgtatgctgataatgatggcatcctcgtatcaaaatttgagttgtcaaactaaaatagtttgccttcagttcaatattattgccattgggatgccattttagatttttaggtcaggctctttctggttggtttagtttgtggggaagtgaataaaattttaagaatttcttgtgtgcccattgcc

SEQ ID NO: 122106 - DNA, 395 bp, Glycine max
  Clone ID: PAT_MRT3847_81268C.1
gctcggaattcggctcgtggattcgcaaggaaaacgtcactgttttcatggtctccctgtgatagtgaagctgacggtacacaaccggtaggcgatggtgacggtggggtcctacagcgtcgtgcttgtcatcactgcgcttaagggaccctgatacgataggaagaacaccaacaacatcaagcacagcgggaacaatcttcctacacaacggcgatgagatcgccagggttatgagtcctcgctccatgggcaaggatcttagcggggccattaacgagattcttgggacttgcgtttcggttgacagctccgaatacagtaccggccgccatggtctgtggcaggacattaccgatggcgaggtcgagggtcactctcgaatgaagttgctg

SEQ ID NO: 122107 - DNA, 308 bp, Glycine max
  Clone ID: PAT_MRT3847_81269C.1
ccaaaaaaaaaccataataggttttttgatttaaaaccctccccgggaattgtttgttcctttaaaactttgggggccaataaatttcccacttgcccttgtgcttgtccccctccttaattttggggggcggcaaaagattggtaaaaattttaacctaaggcttttaaaaaaaagggctgggttttgcgttgggcaccccttccactttttaattccatttgggttacgggggttacccctttttaaggactataaaactgtttttgacaatgctaaaacaaaccccattaaacatccttgttttt

SEQ ID NO: 122108 - DNA, 245 bp, Glycine max
  Clone ID: PAT_MRT3847_8126C.1
ctaataaaaaaccaaagatcttcaaattcatcatttgattataaccatggtccatatttacaagacagtgcacatccggcaaaacttcctagtcacgtgacatcgtacccaaaataaaatattaacataataacgtagcacatttacgttgggcaagggacatctcttaaaaatgaaataaaacaatttcaaatcaaaaggaaaatcattgactactaatgtgtacaaactttgatcatatttcc

SEQ ID NO: 122109 - DNA, 483 bp, Glycine max
  Clone ID: PAT_MRT3847_81270C.1
agtacaggcttcaaggttagaatttggatgatgaatggtttaagaaaagattataagcttccagtttttcagaagaatggggaaaccaacctcgacgatattgaagctgtctttaaagattctgaagagcaccatgtgacggagaagaacgaacagcagtcaacagcaatgaatgcatttgagttaatttctatgtccaaagggctgaaccttgaaaacttgtttgatacagagcagggacttgtttcatttagtgaactaaatgaaaaagtcaatttgatgaaaaaggtgcttatgggcagagagcagttctcaagtttgctcagtacattggtgcttatgccattgctggaaggcatacccttgatactttcaacaattagcttcaaacttccttcagtgagcatcgccttctcatcctcatcgatccaagaacagatcaccaggttaaaaggaaacgagtttgactttagccacatttga

SEQ ID NO: 122110 - DNA, 301 bp, Glycine max
  Clone ID: PAT_MRT3847_81271C.1
gtgggggggagaataaaatgcccccagagcctttaattaaataaatgggggggtcggatctcacgaaaattgaagggaacccaattgtgattttgtgaccctcaaagggggaagtacccccctccagtgaacgtgggttggcatccatttacaagggaatctcaaataaaagagggcaaatgagaaccttattccttaacttacctagtgtagaaataattcttttttggggacctcaaggggaaaccttttaagggtctccctccgggataaaaaccaacattgttatttggattttggg

SEQ ID NO: 122111 - DNA, 978 bp, Glycine max
  Clone ID: PAT_MRT3847_81272C.1
aacgctttgatttcagcctcatccacagcgcgcaagaagcaacgctttgagttcagcgaggaagtaggttgtggatattgatagaaacaaatgagatccgacgccttccaaacagctaacatttatcgccttcttctcaaggcagtcaagaaacatactagcaacgctttgatttcagcctcatccacagcgagtaagaaaggaagaaagtaggtagtggatattgagagaaacaaatgagatctgaagccttccaaacagctaacatttatcgccttcttctcaaggcggtcaagaaacatattgggaaggaagagaacaagaaacattttatagaatttgtaacctcagagttccgtaacaaccgaaatttgtctgacaatgtggctatccaacagaaaataaagcttgctcgtgattatacttttcttcttaacagtgtacaccatcacaaggatttacttttttcgtacaatattgctgtggataggtcagatgaagtaaaaaggactcttggaaaatctgcttctagtgttggtcttcagcttcctgaggtttatcagccataatgattgttagtgttaatttttgcatgcacggaacatgcctttgtactacactgtagattttggtggggtgactgtttcttctgaatgaaaaaaaaaatggtttcatagctttttatccagaacaaaaaatcttaacgaagaaaaagaggaatgggattcagtgctgatgaataaattatatcaaattatatcattcactcattagttcttttctttctaataacaaaatctattatacgagtgtaatagatatatttccttcaaattaagtgcatgtctttcaaggtttcaaattttgagttgcttctacggatgtttgcaattcaagttcaggtgttggcttagcttgttgccttttggaattttatggaaagcttggcgaactccatctaataaatgtctattgata

SEQ ID NO: 122112 - DNA, 589 bp, Glycine max
  Clone ID: PAT_MRT3847_81273C.1
gaaggtaagaaatattcatatagaataatgaatatacttgaatgtgtgtgaatcgaaaggattaatactatatacattagattcaactatagagcctagatccctctaaaaagatatacaatttgattatggaaaatgatcattaaacattccaaaaagaaaatagagcccctatgataaatccaatatcttggtagctatttgtgaactcctcttttacctattgccattaccattctctttagttggtctttcatcttgaatttcttctaaatcatcatactcaagtgttctaccagcttgttgtttccaatatgcaaccaacttcttcagccgtgctacctcttttgaggaaacatttttgttggggtcattcacaatggatctcactcgtgaggcatacatgagagagttatttgtctcatccaaatttgattctgtgggagcaacattcacaaacatgagagttttggcattaccaccaagtgaatcactcattaacatggttaatttgtgattcctgtatggtgtgtgttgaccacccgaagacaaagagctaataacatctccaagtgctgataatgacttg

SEQ ID NO: 122113 - DNA, 1715 bp, Glycine max
  Clone ID: PAT_MRT3847_81274C.1
tttgaaaataagtaccaataacgtctcttgcatcttaaatttagaagtcagaagttaaacagcaattcatcactgcggtgaatgaatcacagtgaagaatccttcattcatattttcatttctcgtacatactcaagcatgacatcaaggattagtttgaaatttcatcaaccaatttggattggtctatttaatctcaatgtctagtatctagctctaaactttacatggaagaatgtagctgttttgaagaagtcaatctgtgcaaaacgttgccaaaaacatcatagaactcaatggtggcatccgtctgagtcaatttcactgacatgaagccttgtccatcatagaagaaatttacgcctcttcggttcattccttcaatgtctcctctccaagcctttgaccctgccccgctagtcaggaactgaatggggctctccgtgtcactaatgtgctcaagacaatgatcatgcccgttcatgtaaaagtgaacgttatttgcctgaaggatagggagaagccgatttatgagttcttgagtatcaccatgatgcccaacacttctaatggcatggtgaccaacaacaatcctccattttgctgttgatcccctcagtgccaattctaggtccttgagtaagttagaaatataagatttttgtgggccaatgccccgccaatcatacttgttttccggtggagcggataatcactcatcaactcaaggcgcagacacactcaagcatgacataacgagctcgttttcaattccatcgacccataaggattgccatctgctatcaatttctctaaggaccgggctcaattgggcctctgcatcacccctatagtcgtggttgcctaagacgctgtaccactgatagtgcacgctttttgcagcgtaaatagtagtgaatgaatcttgaaacgcgttgtcatggtcactagtaagtccattgcctcagtagttttcttcaatgtcaactataaagtcgatataaaccttctctccaacctttcccataagggggctctccgttctgcctggaaagtaactagtgattggttgtaagcacctcttcttccccagtcaccaagcaccaagaagctaagagcaccatcatgtttggaagagtgtgcaaatctctggagttctgcagatgcataaagaatgcacaagccaaagctgatgatgatggtaaaggtaaagagaagggacttggagatctctgtcatggctctaagtggaactggaacaccaaaacaagcgaaagcttctcacttttaaaaaaaagcttcatgttgaaaactaatgtcactctggaaaaaacaattattagatcagtaatatttggacaattggccccacagcgtcagattacacaggatagagagacaggctcatgccaataagaaaaagtgggcatcatggtgatactcaagaactcataaatcggcttctccctatccttcaggtaactaaaggttgaggatgaagaacgggagatgatcatggcctttctttcctaattcctctacctaactcttctgattttattttactttcaaattttaggcaaataacgttcacttttacatgaacgggcatgatcattgtcttgagcacattagtgacacggagaggtaaaattaaatgaattcatgcaaatttttacatgcaacgaagccaaaataatatacttatctgacgg

SEQ ID NO: 122114 - DNA, 732 bp, Glycine max
  Clone ID: PAT_MRT3847_81275C.1
ctctctctcaccaaagccttcctagaacgaaaaaaaaaagaagagcaattttccctcaccaaagaagaagaagcaaacaatggccgatcaacttaccgatgaacagatctccgagttcaaggaagccttcagcttgttcgacaaggacggcgatggtttgttctctctctctctctctcaagttttgtgtatttgatttgatttgatttatgcgtttgtggtttttgtagatcggtgttccttttcgtgataatggattaggaaaattagatgaattctgattctattttagaatcctttttttgttgttgttaatttggtagagttagatcttggataagctgaactttgtagaaagggtaagagataaagtgttaacgttagttttttttctggcgattattttcttgtctctgtttggtggacgaggagagagagaaggacgaattaaactgttgaaggaattgtttgtttccattttttgtttctttgcatatgtgaattgcatgtttgttttgttttatattttttaaggaaaaaaaggttatgttggagttttctgtttttttttttaattaaatatttcttcctgaaaaagtgagttcatagaaggttttggatcttggtcttggcgtgttgttgtggtctggttttttaggtttacgaatttttgggtaaaaagaaaagaaaagtgacaatagtaggtggattgttcatttttcttcgtttctc

SEQ ID NO: 122115 - DNA, 503 bp, Glycine max
  Clone ID: PAT_MRT3847_81276C.1
catgggaacattatgatcatttcttattcatcgaaaatgacaaactttacattaaaagcacggatattacatttatctaagaacagctctactacatattatacaatttcgttgcgtactgccttcactaacgcgaaatttatctaaaaaaaatcacaacccaaacaaggacttgctcatctaaattcaaggaagggttaaaaggcatcctatagctgaccacaatcatacaaaacatgcgaaatgaccacactctggtactctgataaaggtgtagatgatagaatgacatgatgccttggtgagctatcaaaagtgaggccagaagagacgagatacttattggaggaagttgagggagggacctattccttgcactccctttttattgatgatggcaaattacaaaatgagagaaaggggcactctggctccgacggcgttgggcaggagtagcccaagctaaggaacttggatgaggatgaaggggacatagggtcaag

SEQ ID NO: 122116 - DNA, 356 bp, Glycine max
  Clone ID: PAT_MRT3847_81277C.1
ggagagaacaatttgaaaacagcagtggcagtgtttgcattacatgcagtgtagccgaaggcaatgagttccaaagagagttgcagaagtgaacttcgcattgcgatccgccaactcagtgatcgatgtctctactctgcttctaaatgggctgcagaacagttggtgggtattgagcaagaccctgccaagttcactccctcgaacacgagatttcagcgtgggagttcgagcattcgcaggaagtacaagactcacgagatcacggggtacccaatcgcgggtgtttcgtatgttgccacgcctgcgatggaggaagatgagcttgtagatggcgatttctaccttctggcaaa

SEQ ID NO: 122117 - DNA, 610 bp, Glycine max
  Clone ID: PAT_MRT3847_81278C.1
ataggaagaactacacattccaatatctattttctcaaaattcaaagaacaagcagtacctcaggtccctatcattacaacaagatagagcagaaccaaatagaaaaagaaataatcaaacgggaagggaaagctttggcaacaattccctagccgaattaaggcacggctttattctagtaacagatcactaataaactagagaaagacactgaattattctgttgccattatttttacaccttggtctcctcttcttgctctcccgaaatctcctccaaggatctacccttggcctcaggcaccaagaaagtgaacatgaagcctaaaatgttaatcacacccaacacaagcagtgaattcctcacaccaatacctgcagggtaccctgcatctgctttgctcgggtcctgattctgtgccaaatataaaaacccgaatgcaccaaccatagccccgagcttcccagatgctgaagatattccatggcaagtggatctaaatctagctgggaaaatctccgccggcacaacaaatgtggtggcattaggcccaaagtttgcaaagaagaatgtgagagagtaaatgacccccaatcccaatttttgtt

SEQ ID NO: 122118 - DNA, 2532 bp, Glycine max
  Clone ID: PAT_MRT3847_81279C.1
aattcggctcgaggtaaaattgttaacaagtgtggaggattgcctttagctataagaacagtgggaaatatcttgcgagcgaaattctcccagcatgaatgggttaagatattggaaagtgatatgtggaacttatcagacaatgatagcagcattaaccccgctctgagattgagttaccataatcttccttcctatctgaagcgttgttttgcttattgctccttatttcccaaaggttatgagttttacaaggatcagttaatccagttgtggatggcagaaggtttgttgaatttctgccagataaataagagtgaagaagagttaggtactgagttcttcaatgatctagtggcaaggtctttcttccaacaatcaagacgccatggttcttgcttcactatgcatgatcttcttaatgacttagcaaaatctgtctcaggagatttttgtttacaaatagacagcagttttgacaaagagataacaaagagaactcgtcacatttcatgctctcataaatttaaccttgatgataaatttttggagcatatttctaagtgtaacagactgcattgtcttatggcactaacatgggaaattggcagaggagttttgatgaacagcaatgaccaacgtgctttgttttccagaataaaatatttgcgcgtattatcattcaataattgtcttctcacagagttagttgatgatataagcaatttaaagcttttacgttatctagacctttcctacaccaaggttaaaagattgcctgactccatttgtgtgctgcataatttgcagacactattattaacatggtgctatcatttgacagagctccccttagatttccacaaacttgtcaacttgcgtaaccttgatgttcgtatgagcggaataaatatgatgccaaaccacataggaaacctgaaacatcttcagaccctgactagttttttcatcaggaagcatagtgggtttgatgttaaggagttggggaatctcaacaatctccaaggaacactttcaattttcaggttagaaaatgttactgatcctgcagatgccatggaagctaatatgaaacagaaaaagcatttagaaggattagtgttggattggggtgacaaatttggaaggcgcaatgaaaatgaggactcaataatagaaaggaatgtgttggaggctcttcaaccaaatggtaacatgaaaaggcttactgttttgcgttatgatggaactagctttccaagttggtttggaggtactcatttacccaatttagtatctattaccctgactgaaagtaaattctgttttatcttgccaccgtttgggcagctcccctctctgaaggagctttacatatcatccttttatgggatagaggtcattggtcctgagttttgtggtaatgattcctcaaatcttccattcagatctcttgaagttttgaaatttgaggaaatgagtgcatggaaagaatggtgcagttttgaaggtgaaggtttgtcttgtcttaaagatctttctataaaacgctgtccttggttgagaaggaccctgcctcaacaccttccttctctgaataaattggtaatttctgattgccaacacttagaggattcagttcccaaggctgctagcattcatgaactagagttgcgtggatgtgaaaaaattttgctgaaagatttgccatccagcttgaaaaaggccagaattcatggaactcgcctcattgagtcctgcctcgagcaaattctgttcaacaatgcctttctggaagaactgaaaatgcatgacttccgtggtccaaatctaaaatggtcctctttggatttacaaacacatgattctcttggcactctatctataacaagctgaaactcgaaattgagggttgccccaagctggttgcttctagggaggactggggattcttcaaactccattctctcaaagagttcagagttagtgatgagcttgccaacgtggtgtctttcccagagtatctgttgctaccatcctctctcagtgtgctcgagttaattggatgttcaaagctaacaacaacaaactatatgggttttctccacctcaaatctctgaagtccttccatatttctggttgccctcgtctccagtgcttgccagaagagagtctccctaactctctttctgttctgtggattcatgattgccctttacttaagcagcggtaccaaaagaatggagaacattggcataaaattcaccacatcccttcagtgatgattacttggcagatgaaacatgcagcacattcatccgtatgttcatatccagtgttttatgtcaaatatttgtgttttatcttttggtggaattgaaaaaagatattatccccccataaatcataatgaaatctttcaaacccaacctagaagaatcaagcctaacgtggttcatttgattaaacgtatatagggagaatctattatctatttatctatgataatatcattttcagtctccctctgc

SEQ ID NO: 122119 - DNA, 261 bp, Glycine max
  Clone ID: PAT_MRT3847_8127C.1
tcttttaaacgtggcatgacccgtgagtggaccgcgataaaataacagaacaactccattgatggaaaatggcatggaaaaagacagaaggttaaacggggaagggttcgtaaggaggcataaagccagaaacacaatttacaagaccgaagagaaagatgagacggccagaaacaaccaaccacgatataaaatcccggcatcaaccgaaccaagaaggacaaacaaaagtcaactgtaccagcggaaagaaggctcaag

SEQ ID NO: 122120 - DNA, 231 bp, Glycine max
  unsure (1)..(231): unsure at all n locations
  Clone ID: PAT_MRT3847_81280C.1
tttgctcgagcgagatgaggctcgagaaaaaaaagaaaggtctcgtataggaagaagaagaagctgtggattccacctcttcccgtccttcgagacagttgctacgctgctcgctcttnatgttggcctgggcttcaacccaaaggatccttgatcttccctccgagacagggggggtgcctgttgctggacaaattgctacccaaattggctttttgcattccaagaagg

SEQ ID NO: 122121 - DNA, 532 bp, Glycine max
  Clone ID: PAT_MRT3847_81281C.1
gaaaaagaaaaactcatattctgatatgctcgcataatatatttaaatttcttttttccttacaaaatgaaaaggcgtcactgtccgaaacgcccttacacagaaacacaaactttgacgttcatctactgtaacggaaaacgtagccgttccatcaaacaccgcaaatccctgtcggagcttccaccctctctgacggcgtcaagcgcggccgtcttcagttgcaacgcccgcctcacttccgcgccgtttccactcaccgactcagccagaactcgactcaacacgtccgagtcaggaacggtgttctccccctcgcacaccttctttgccaccttcagttcatccacgagcaacgtggcgtccgtgtattggtccgctgtcataggccacgcaagcatcggcacccccgccaccaccgattccatcaccgagttccacccgcagtgagtcaagaacgcgcccaccgcacggtgccgaagaatcaccacctgcggggcccaccccctaatcacaagccctctctcgtttc

SEQ ID NO: 122122 - DNA, 529 bp, Glycine max
  Clone ID: PAT_MRT3847_81282C.1
gaaaggggctgcttcccccctggggcatcaactaacttccacctcctcttggactctcggagatcccagggtcctgtgtgacctttcacaacggcacctcccgccttatatgaagcgaactctcttctctgtctatgcctgtccatcagagaagccatcctatcacgtgaatgatgcagtcgatggctacccatacatggaaagccaccttaccggaaccccaatcatccctgtgatcctatggttcttgtccaacctggacgcctacagaaccgtagtgaactgcatactaatatggatcgatgtgggcctgcccgcacgatacgttatagtgggccctctcacgatcgctacgactctgatgaacaccactatagactggctatctgactctcatagcctgccgtgggcattaggcgatcctcatactgtgctgacactctatgggattatatgctacagcgacagatgccaatgcactgctccgtagctgaccttgactggacgcaagagagaacccgttcagctc

SEQ ID NO: 122123 - DNA, 247 bp, Glycine max
  Clone ID: PAT_MRT3847_81283C.1
tcggcggcacgccctattttttttttttttttctctactttttttaaattttttattttgcaagtctaagcgggggttctctatttaaaattttaactcaaaaccatgggaattaaaatatcgggagattaacattttttctcttaaaggatccatactttatattattcacttcccccggcctcatattttcttttaaccttctacgttactactatttctataaaattacccatactttaaactt

SEQ ID NO: 122124 - DNA, 276 bp, Glycine max
  Clone ID: PAT_MRT3847_81284C.1
cgggactggaacattgtctcagagataccactttaccatgatattggaaggactcaataagatcgtcacgaccgtcgggatagtattaggcactgactgaaatcggatggcacatggccaataatcgtcttgtcgcatgcccatagatcggttggcggcatacagccgtgtgtgactgaggactaacctgctgatatatccactgcctttagcgcatccattgacactgcatatcctatatgcatctgccgcttcatcgattcgagcctactcacg

SEQ ID NO: 122125 - DNA, 412 bp, Glycine max
  Clone ID: PAT_MRT3847_81285C.1
ggggttaatttttttaatttgactgtccaaccctgaaaccttttttaagatcatttttaaacctaccattttttttttgcccctaggaaattctaaaagaaaggcacgctccccccaaataccctcaacaccccccgcccccgaaaaaaaattaaaaccgtcaccaaccaaaacattcacttttcccctaccccccccccccgaattacaaccgcaaaaaagccccccccagcacaccaacccatttacctctttcgaaaacaccccccccccacccccaaaaagacattgccccccccggggccctcccccccaattcgaaaaacaggggaccccccctgaagaaaaaacccccccccatattgggcccaccaaccctgggaaagccctttttggaacacataagcttttt

SEQ ID NO: 122126 - DNA, 325 bp, Glycine max
  Clone ID: PAT_MRT3847_81286C.1
ttttgaaagtggaattaagtttagtagtgatacccaagataaccaagcattagcaaaacgccccaaacagtattttctcttcctctaccgtatggacttatgtcggtccctgcctacaatgacaacacacaagaattacatcagcttatcccagaaggcttccagattatcaaggatatttatcgtgtatcttcagcagcatgatcaatccagagtaagaaagcaatatatatgacaaaatgcttactcaatcgaacatgagaaaaacaacatttaatatagaaatgattccatcagttgatataaaaatatattcttgtcagac

SEQ ID NO: 122127 - DNA, 150 bp, Glycine max
  Clone ID: PAT_MRT3847_81287C.1
ggctcgaggcttcatggcatgagatggaactacttgtatttttggcctcatctgcactcggccttacgctttcagttgatataactattgaaactgtcattaggtggcatcaggagcctccattgggtctagctcagatggcagtttcca

SEQ ID NO: 122128 - DNA, 140 bp, Glycine max
  unsure (1)..(140): unsure at all n locations
  Clone ID: PAT_MRT3847_81288C.1
gcatactnanaggntaaggaaganctggattgtttccttgaagaagaactatgagtngaaggtactgaacaagcagnnggnacnacccaggctggtttaaaaaggnaagggnanttnnaatgggcnttggataaaaccat

SEQ ID NO: 122129 - DNA, 287 bp, Glycine max
  Clone ID: PAT_MRT3847_81289C.1
ctcgagccaatcctgcatgagctcgagccgagatccatacaggctcaccctatcagtccagaccacttccgctgtcatcaacgcgctgatcataggccttgctaccacttgtaagctcactattgctatgatcacaggccatgctctcacaatcctgcgctctcatgcaatgatagcgttgctctctacactcttaactaaatttgttacagcacaggatcaaggttcacaaattgcaacggaggctgtttatgctcacagacttgggacatcatttgggagcgttg

SEQ ID NO: 122130 - DNA, 249 bp, Glycine max
  unsure (1)..(249): unsure at all n locations
  Clone ID: PAT_MRT3847_8128C.1
agantttccattgcntgcaangcaaatacgnatnatattactagttntaatttgtnntgtcgtntgcttctttctttgattaatgatgactagctttaaggttgcatgtgtggttgccgatgatgnncaggnttgcgnnccatgntngtncnncccatggnacagggccgcaatacacgtgcgggcaggtacgccggcgacgtgtctccgtggcctcagttagcttcgtagcggcggaaaaccgtcgga

SEQ ID NO: 122131 - DNA, 326 bp, Glycine max
  Clone ID: PAT_MRT3847_81290C.1
gttggaggcaaggcatcttgtcgtaggaacttctctatggatgttgttctatccgatgctggtggacagcctgtagataaggagaagaaggttttgcttcacttttggatgccgaccccggggcaccaatggagaatacaagccatgattaaacaccccttttagctagttatgatggaataaaattttcctcttgtgaaaaacccaataactttttctgggaccgtgcttcaattaaagctaaaaaaacttaagttttaatccaatgtgaccaccaggtggttcttaatagcttttggggttccaaacttggaaattaatccttt

SEQ ID NO: 122132 - DNA, 566 bp, Glycine max
  Clone ID: PAT_MRT3847_81291C.1
cccgggtcgacccacgcgtccgatagatctctaaagcggcaaaatccgcttgaactggttcgaccgacttcagcccaacagggcatccccaccggatgactgaacccaacctgctatcctttctcctaacgggccatacacaatgcccttaggcccgacgctatgaccggcgctggaaccctacttcctaggccggcctatagcccttgccgatgagcgccatactatgtgaactcttatggcggggcaccaccctgttcaaaaccaacataaaatgcccgcggaaacagacaaaccctaagatattactcgcttgcttcgtcaacaccaccaccagacactacaaaccctccgaccccgccggcttgcctgccggtcccagcggcgacccggcggtgccggagagggagacgaggccgccgcggaccgcggtgaggacgaggaatatgggaacgaattgaatgggttcactaagagcgaagtgaccgtgatcgacactagtagccctgcgtggaaagaggacaagtacgtgttcaggaagaacaacgtttgtaaagtcacagaga

SEQ ID NO: 122133 - DNA, 350 bp, Glycine max
  Clone ID: PAT_MRT3847_81292C.1
accacacatgggaacagtaaagaaaagacttcagaccgatggttatctacttcgtgagggggggataaaagcatgctttgtgctctacatcatgtataaccgattgctattcgctacatataattatttttccttttatattgatcctctctgagaccactaatatgaccataatcttcgtttcatgagccaccaaacgaagtattaagaacgcagcactgaaaacgattgtaaaatgctgggaactgtactgcaattaagctatgtacttggagatgatcggatgaacatgtccgtgatggctaaggggatacaaaatcatcattaaacaagacacatatccaataact

SEQ ID NO: 122134 - DNA, 814 bp, Glycine max
  unsure (1)..(814): unsure at all n locations
  Clone ID: PAT_MRT3847_81293C.1
ggctcgagcttgctagtttgtttatcactcactcactcactctgcgacaggggtaaacaagtattgaattcctttcctctcatcgttttcttcttcattttgttttccactgtttccgctgatgaagtttccaagaccttcatcttccgcgtggattcccaatccaagcccaccgtgttccccactcactaccattggtacacctccgagttcgcccaagaaaccagcatcctccacttatacgacaccgttttctgcggcttctccgcagtgctcacaagccaccaagtcgcgtccataagccaacacccttccgtcctcgccgtcttcgaagaccgccgccgccagcttcacaccacgcgctccccgcagttcctcggcctccgcaaccagcgcggcctctggtccgaatccgactacggctccgacgtcatcgtcggagtcttcgacaccggcgtctggccggaacgccgcagcttctccgatttgaacctcggccccattccccgccgctggaaaggcgcgtgcgaaaccggcgccagtttctctcccaaaaactgcaaccgcaagctcatcggcgccagattcttctccaaaggccacgaagcaggtgcgggttccggccctctcaatccgattaacgagaccgtcgaattccgatcccctcgcgacgccgatggccacggnacccacaccgncttcaccgncgncggacgctacgccttccaagccagcatgtncggctacgcagctggaatcgcanaaggcgttgctcccaaagcgagattggcggtttacaaagtttgctggaaaa

SEQ ID NO: 122135 - DNA, 166 bp, Glycine max
  unsure (1)..(166): unsure at all n locations
  Clone ID: PAT_MRT3847_81294C.1
gtttcacttggngctatatntcgnttggcctatgtgtgcanggcttgtctgcnactnnggtcttgggtggggatatanttcaccatgatgatgtnacccccagaagacctggtnnnnagaacnactttgtncnggnaaaagtccccacttggatgganngtgtgga

SEQ ID NO: 122136 - DNA, 649 bp, Glycine max
  Clone ID: PAT_MRT3847_81295C.1
tttgttgctttgtttcctgtttcgtcgaaaagggtggcttccaagacgttcatacggaccgtgagcaatgtggggcccgcgaactctgtttaccgcgtaagcgtggaggcgcccgcaagtggggtgaccgtgaaggtgaagccgtcgcggctcgtgttctcggaggcggtgaagaaacggagctatgcggtgacggtggcgggggatacccggaacctgaagatgggtcagtccggggcggtgttcgggtcgctgacgtggacggatgggaagcacgtggttcggagccccattgtggtgagtcaaatagaaccgttatagagcctcgatcatgtccgttttggtcgatgcggcgcgtggcttgtgactttcttctttaagctgccacgactaatataaaaagacaacagtcaacacaaatattttgtattttcttctttccttctttttcatttttaacttaggattgtgtcttgttagagtgaaaaaggttggacttgtaatccgttgttgtacttttttttaataagttttttttttcttgggtttaatttagattcaccttttatttatagacagacttttaggggtctacgtctatctatacttataaaattataggagaaataataatttgtgatatttattt

SEQ ID NO: 122137 - DNA, 3065 bp, Glycine max
  Clone ID: PAT_MRT3847_81296C.1
tttcttttgtttttctatatatgcaagcggcttgccactgacgatcctggctccttcgttaccgactgtggacgctcgctcctcttgacgagcttgagtgttccctgggcatgagtggacgctataagactcagtgcactcactcactcactcactcactcagtgactgtgtctgaaaatgggcaaacaagtattgaattcctttcgtcccccagtggttttcttgttattcttcattgtcttttccgttgtttcctgtgatgaagcttccaagaccttcatctttcgcgtggattcccaatccaagcccaccatcttccccacccattatcactggtacacctccgagttcgcccaagaaaccagcatcctccacgtatacgacaccgttttccacggcttctccgcggtgctcacgcaccaacaagtcgcgtccataagccagcacccctccgtcctcgccgtcttcgaagaccgccgccgccagctccacaccacgcgctccccgcagttcctcggcctccgcaaccagcgcggcctatggtccgaatccgactacggctccgacgtcatcattggagtcttcgacacgggcgtctggcccgaacgccgcagcttctccgatttgaacctcggccccattccccgccgctggaaaggcgcgtgcgaaaccggcgtcagattctcccccaaaaactgcaaccgcaagctcatcggcgccagattcttctccaaaggccacgaggcaggtgcgggttcgggtcctctcaatccgatcaacgacaccgtcgaattccgatcccctcgcgacgccgatggccacggcacccataccgcctccaccgccgccggccgctacgccttccaagccagcatgtccggttacgctgctggaatcgcgaaaggcgttgctccgaaagccagattggctgcttacaaagtttgctggaaaaattccggttgcttcgactctgacatcctcgccgcctttgacgccgccgtgaacgacggggtggatgtgatctcgatctggagcatctgaatcgacggtattgcctccccatattatctggaccccatcgcaatcggatcctacggcgcagtttccagaggagtgttcgtgtcctcttccgccggcaacgatggtcccagcggaatgtcagtgacgaaccttgctccatggttaacaacagtaggcgcaggcaccattgatcgtgacttcccctcacaggtgattctgggcgacggtcggagactctccggcgtgtcgctatacgccggagcagctttgaaggggaaaatgtatcaacttgtttacccagggaaatcagggattcttggagactcactctgcatggagaattctctagatccgaacatggtgaagggtaagatagtaatatgcgacagaggaagtagcccgagggtagcaaaggggttagtggtgaagaaagcagggggagtgggaatgattctggccaacggaatatccaacggcgaaggactcgtgggagacgctcatcttctcccagcttgtgctgttggtgccaacgaaggagacgtaatcaagaaatacatttcctcttcaacaaaccccacagccactcttgatttcaaaggtactatcttaggaatcaaaccggcaccggttatagcttctttctcagcgagaggacccaacggtttaaaccctcagatacttaaaccggatttcattgctcccggtgtcaacatcctcgccgcctggacccaagctgtcggcccgaccggtttggactccgataccaggagaaccgagttcaacatcttgtctggcacttccatggcttgccctcacgtcagtggcgccgcggctttgctcaaatcggctcaccctgattggagccccgccgccctaaggtccgccatgatgaccaccgccaccgtcctcgacaaccgcaaccagatcatgaccgacgaagccaccgggaacagctcaactccttacgatttcggtgctggccatcttaacctaggacgagccatggatcctggcttggtgtacgatatcaccaacaatgattatgttaatttcctttgcggtattggttacgggcctaaggtgattcaggtgatcactcgcgcgccggcgagttgtccggtgaggaggccggcgccggagaatctgaattacccttcctttgttgctatgtttcctgcttcgtccaagggggtggcttccaagacgttcatacggactgtgaccaacgtggggcccgcgaactcagtttaccgcgtgagcgtggaggcgcccgcgagtggtgtcagcgtgacggtgaagccgtcgaggctcgtgttctcggaggcggtgaagaagcggagctatgtggtgacggtggcgggggacacccggaagctgaagatgggtccgtccggggcggtgttcgggtcgctgacgtggacggatgggaagcacgtggttcggagccccattgtggtgactcaaatagaaccgttatagagagcctcgaatcgatcatgtcgttttgatcgatgcggctcgtgactcgtgacgtaagtgggtggcacccctgtaggttgccacgactagtataaaagacaacaaaaacacaaatattttgtattttttctttctttttcatttttagatttttgtttaagtgaccaagtttggaggtgtaatccgttgttgtactttttttaataagtttttcttcttcttgggtttaatttagcttcaccttgtgtttatagactttttagtggtctatctatactcgataaaattataggagtaatttgtaatatttatgttaagccgtcattatttaattttaaccacgtttgatttgaaaaaaactttttctattacagcatattctgttttctctgttgttgattagttattattattgcaatcttaagtttgtggtttatgctgccaatcttacactgttttaaactaagcattgattatgacaggaacctagattcgttgtctaatatacttctatcgcctcctctctcgattctgttttccataatattagatgtgcatgtaagct

SEQ ID NO: 122138 - DNA, 2475 bp, Glycine max
  Clone ID: PAT_MRT3847_81297C.1
tgtctctcttctcttttgttctcgtcaatatcaccactcatctccacccacaacctagataacatctctctaaatttctcatcttctcctctgcccccatcaccttgatctgtctgtctatacactcattgtttgacaaaaaacaaaatataacactgggaagttttgtcatagctgagagctgactctagctagaggataataagattacaagagagaggaattgtttttgattggatccacaaaattcaagatgactccagttaatttggcaggccagtttggtgacacgacatacactaaggtgtttgttggaggcttggcctgggagactcaaaaggagacaatgaagaagtattttgagcaatttggtgagatcttggaggccgttgtcatcactgacaaagctactggaagatctaaaggctacggatttgttacttttcgtgaaccagaagctgccatgagagcttgtgtggatcctgctcctgtaatcgacggcaggagagctaactgcaaccttgcttctttgggtgtccagagatctaagccttcaaccccaaagcatggaggagcagggaggaactttagagtaatgggttctttccagacaggatttggagggggagtgggatcagcttttccttcagcagcaaccttccctcattacgccatccagcaagggataccttataatgtttatgggtactctccttactcgccggattacacttaccctacgagctactatggtgtgtatggaggagcaacagcacagtacccagtttatggaagtggacctgctgcagctgcaggagggatgatgagcggtggtgcagcgttctacccatatctgcagtacggaggagaagggagtggcggcggcggtacttccggacagggttatggtgtgaactaccctcctcaggctcatctttttcagtattctcccattgcttccaccgctggctatgcccagcactatggtacacctactatgtctcttgctccttcccctgccttgcaatcaggcgtgaccatgcctcttcaagctccaattcctcatcgctagagactcatcatctcaaactagctatgtcaaaacttcccagttgctcctgctccttgaagtctctcttccactcatcaacctttgccctaaccatggtgctctctctctctcacacacccacccactctttcactaacacttaaacaaagtccatcaatggcatttggactttttccagcataagaagccccccgtaggggctcaaatgtttctcctcgtttggagagtcatgcattcctttttctcaacataaagaagactctgttgcatcttcaatgaaattaaggttccttggaagaagagaaccaagccaacacaaagctatcggatatagctgacttgttggaaaaaaaaaataattaagaacagcaaagcttggcccttggaaaggccaagcccaaacgaaccatcttcttaacttgggcccaagacgggctaagtaaaagtacagaatggtttcaaaatttgtaaatggcagatcacagatagctagctcatcaactagaaattttaagttagttctgcaaaaataggtattccctccaagcaatgctaatcacctctggatgaagaggaacttttagcaatcaatatcatggacattggatgtcccagcttttttgtatggtaacatctagctagtcttaggctttagtgttaggatcagtcatgtcttcataaatatgtttttgtcaattttcagaaaaaaaggggtttaaccaaccaaccaaccaattaacaatcttccctttgggtaaggggaggcaacaactaactgctgttttttatcctgtaaattcaatgaggctaaactatgggagtttaagcccaatccactaatctttaggagggatagtgttttaatttcccgcttagcataagtagtacatttcatcatcatcttgagaactacgtcaatggatgtggtactcaaaacacttgcatgtaaccctgggagatattttggttcccttgggtacttcacttactcaccaaccatggttaggacataggtgaatctcatcactctctttctctcttctccctgctttctgtctggcaacttttacatcgagatggaccttgatactctattaattatatgtttaagcctatatggtttggattgtaattaggaatactaaagtaggaggatttcattctctatccatgctggatgagaatggatttgctactcatcctactatgcctttaatttgatactatgcttgcttctattcaacctatgtcaagataagcaaatcaagttaatgcttcgagtaatgttcaacttttttgttatatttcaatcaaggatattttattatagggcaaggtctggtttgtgctgaatgtgaagtttacactggcaaaatcttgttgatgtaatcaacttcaacatg

SEQ ID NO: 122139 - DNA, 448 bp, Glycine max
  Clone ID: PAT_MRT3847_81298C.1
aacgcaaagccctaggttgcagtgttggacaggggcagcattgcagagtgatcagggacgtgccattgggggttgcgatttacaagagggaggcgccattcgtttctgcggcttacgtaggtgtagtttccacgagaatacctgaaaacgtcacccgcattggagttttagggtgtttaaataccccatccccttcttcatttttttagcgctttccctttcaacttgatttttgctttcgttttcgtggctttggaaatttctgtggtatgaagtatttattttttaaaaaattaaattagcttttatgtttgataggcttgttaatgtgtgtttaaatgtcaaaaataaaagaaaaattgtgtaagaatgtttatttgaagaaaatattttcagtcaaaataaaatattttaaatatgaaatttgtattattttttttaattaaat

SEQ ID NO: 122140 - DNA, 1631 bp, Glycine max
  Clone ID: PAT_MRT3847_81299C.1
ggctcgaggcaagggataccttataatgtttatgggtactctccttactcgccggattacacttaccctacgagctactatggtgtgtatggaggagcaacagcacagtacccggtttatggaagtggagctgctgctgcagcgttctacccatatctgcagtacggagaaaggagtggcggtggcggaactagcggcggctacagttccggacagggttatggtgtgaactaccctcctcaggctcacctctttcagtattctcccattgcttccactgcagccgccacagctggctatgcccagcactatggaacaccagctatgtctcttgctccttcccctgccttgcaaccacttcccctgccttgcaatcaggcgtgaccatgcctcctcttcaagctccaattcctcatcgctagagactcatctcaaactagctatggcaaaacttcccagtctctcatcactcatcaacctttgccctaaccatggtgctctctctcacacacacccactctttcactaacaccaaaatgaaagtccatcaatggcatttgggcttttccagcataagaagcctcccgtaggggctcaaatgtttctccatgtttggagagtcatgcattccttttgtctcaaaaaaatatctgtttcatcttcaatggaagaagagaaccaaaccaacacaaaagctatcggatatagctgacttgttggaaaaaaattaagaacagcaaagcttggccctggaaaggccaagctcaaaagaaccatcttcttaacttgggcccaagacgggctaggtaaaagtacagaatggtttcaaaatttgtaaatggcagatcacagatcgataactagctcatcaactagaaattttaagttgcttctacaaaaataggtattccctccaagctatgctaatcacctctggatgaagaggaacttttagcaatcatggacattggatgtcccagcttttttgtatggtaacatctagctagtcttaggctttagtgttaggatcagtcatgtcttcataaatatgtttttatttttattttttattttatcaattttcacaaaaaggggtttaaccagccaaccaattaacaatcttccctttgggtaaggggaggcaatatctaactactgtttttttatcctgtaaattcaaagaggctaaactatgggagtttaagcccaatccactaatctttaggagggatagtgttttaatttcccgcttagcataagtagtacatttcatcatcatcttgaggactacgtcaatggatgtggaactcaaaacacttgcatggaaccctgggagatattttggttcccttgggtacttcacttactcaccaaccatggttaggacataggtgaatctcatcactctctatctctcttctccctgctttctgtctgccaacttttacatcgagatggaccttgatactctattaattatatgtttaattaagcctatatggtttggattgtaattaggaatactaaagtaagaggatttcattctctgtccatgctggatgagaatggatttgctactcattctactatgcctttaatttgatattatgcttgcttctattcaacctatg

SEQ ID NO: 122141 - DNA, 507 bp, Glycine max
  Clone ID: PAT_MRT3847_8129C.1
ggcttgtgcactccgtgggtaaacgaatggttctcgagcttctgttgctaatcgagaaaagggattcggcgaaggtgacatctgttggtggggcacgaacttatggtgtgacagaagccgacgggcgtgcttcaatgcctggggatcgtactggcaacgacatgaacgatgtgaaactcagggatgatacgagaaacggaagccacaaatgttgatggtatcggtgccgttacaggacatatcattgagactaccattgggggtagaaatgggcatcccaagctgactatgagctacgtggcatagcgagatgtaaggcatggatcatttggagtgggcttgcaggctaagatgctaggagtccgatgaaactgtggctctcaaaaaggtttttcatgatcaggggtacatgatccgggagctgcagcacaatgcgccttgttgaccacgcaaacgatggcgctttgaggcactgtctcttctctgcctctgaaaaggctgaactat

SEQ ID NO: 122142 - DNA, 2131 bp, Glycine max
  Clone ID: PAT_MRT3847_812C.1
aagctcgaatcggctcgagatcaattatgaaaccatgttggtcttcttccattccatctactcttggcatggcatgacctcatcttcgcgtgttgtggcttaacgtgcgccggaaatggaggaggagcagcagacttttgtgtccaaagcgagaaccgcctttcattccgccgcggccaaagcggagcgcgttctcttggatttcaaatccgatcgagatcacgataaacaatcgtcgcccaacaccttcaccggccaacaaccagaagctgaatctcctcacaccgacgaaaacgactccaagcttcatagtgaatcgaagcatataaagtggaggcctccacatttaggaattaagcaggattggcaagataaaataaagaacatccggagagggagaaaagaagttgaagatacagataaagttggggatgcaagcatggcaattccattttatgatgataatttgtacctcctgaatgtaaagaatgatctcgaggccaaggcttcagaagcaagatattcgcagaaggagatttccttagaagaaagatcgactctaatctggaggaaactgctatgacatctttgccaagagatattcatggtgcgcctcccgaaagccttgttgttaagctagctgaaatccttggaaactacaagactcttcgaaaaatggctcttttctggtgcagggttgttgctgaactaaggaaactttggttcgaggaacaatacttaccaggagtcccccaggatgagattcctgatctgaagtcatgtcttctatatcaacaatttcaagtaattaattgctgcatctctcggaaaaggttccgtattattgccactgaatctttagactctatgatgatgcaagctaattcagacataaaagaatcaactgattgtagcgctgaagcttctgcaagccctgttctatatgctagattgaatagtggggagcttgttcttcgacttggtgctgatcatcctgctggagatatgacattgttggaaactggcgagcctgtgtattctccaatcactcaggaaggacctttgcttacagaagatctaatcagggaaacagaggagtttgtgctgcggacagggagtgttggtgctgggtgctctcaattgctctcagatatgcaggctttcaaggctgcaaatcctggatgtattttggaggattttgtaagatggcactctcctcctgattggacagataatgaagcaagtacagaggatagtgatgtttttgatagtggtgagccattgtctgccagaggtcagctaagtcggcgaatgcaaaaagaaggtaatttatggcgtgaattgtgggaaacatccaaaccagtacctgctgttaagcaggcgcctctgtttgatgaggatttggcagtggagggcatcctcaatgcatttgaagaaatgcatccatctgatctttttggacagctgtttgtttctttacttggtttaggatttggaattgccgaacctatgctgtctggtaacagtgacttctcgaagttattctatgactgcaaggagtacataattactgcttgtcaaaacaacaaattgaatgagaaagttgatggtctcgtccaggtatatgaaacagtggagaaaatgttattgaatcctgaagaagctctaaaaatgattaagcagacagaggaatcaactacagttaccggtgaaccaaggagcccgtttaagaggcttagccttatctttggaggcaaagataaactattgaggaagtctgtctcaaaagatcagacaaacgacgaagaaaagtcaggtcggcaatcattctccagtttctttgacagcaagtcatctttgtttggaaagaagcctcccaagtctggatccccatctccttctgagaaatcttctatcgatactggttggccagttgtttagacaaatttcatcttccactgtttattgaggataagcaatatttttgggttccccctccccctgcagataactgtaaattttctctattcttttgccaaatacttggtggttgtattctgtagaaattttaattaatacttcattcttttttatttgagggaattgaaaatatagttttcgggcctttagt

SEQ ID NO: 122143 - DNA, 406 bp, Glycine max
  Clone ID: PAT_MRT3847_81300C.1
gctcgagagggcaaaccttcaagaggctgccagaacttacagtgtagatttttattaacaatattccaagctcattcatgaatggatcatagctagcaattggcgggggcttcttaaatttaaagagacaccagtttaaattcctattgatgaactgtagcctgctcgtgaaatagcttaacagttttgctctggagccatgagttatgggtcaatatcatcagaggcactcacagtatttacactgactataaataaaatgggaggctaatccaactcaagtcattgaatggagcaaccatctcgtcttgatcctctctcttaaagaataataaattccaaaaagacttccattaatcaagcagctaccaggagatttaaagtttcaagttactacctcacaaat

SEQ ID NO: 122144 - DNA, 2744 bp, Glycine max
  Clone ID: PAT_MRT3847_81301C.1
ccctcgcggcgaatcggctcgagcggctcgagttttgctttctcttccctcccaattttctctttctctctctttttatttttttgatctctgacctaattgtctctcttctcttctcttctcatattaccactcatctccagccacaacctagagaacaccccccaaaattcagtgggtatttctcatcttcttctgcccccatcacctagatctgtctgtctatacactcattgtttgacaaaaaagaaaataacactgggaagaattttcatagctgatcgctgacccctatctcgttgatctgtctgtctatacactcattgtttgacaaaaaacaaaatataacactgggaagttttgtcatagctgagagctgactctagctagaggataataagattacaagagagaggaattgtttttgattggatccacaaaattcaagatgactccagttaatttggcaggccagtttggtgacacgacatacactaaggtgtttgttggaggcttggcctgggagactcaaaaggagacaatgaagaagtattttgagcaatttggtgagatcttggaggccgttgtcatcactgacaaagctactggaagatctaaaggctacggatttgttacttttcgtgaaccagaagctgccatgagagcttgtgtggatcctgctcctgtaatcgacggcaggagagctaactgcaaccttgcttctttgggtgtccagagatctaagccttcaaccccaaagcatggaggagcagggaggaactttagagtaatgggttctttccagacaggatttggagggggagtgggatcagcttttccttcagcagcaaccttccctcattacgccatccagcaagggataccttataatgtttatgggtactctccttactcgccggattacacttaccctacgagctactatggtgtgtatggaggagcaacagcacagtacccagtttatggaagtggacctgctgcagctgcaggagggatgatgagcggtggtgcagcgttctacccatatctgcagtacggaggagaagggagtggcggcggcggtacttccggacagggttatggtgtgaactaccctcctcaggctcatctttttcagtattctcccattgcttccaccgctggctatgcccagcactatggtacacctactatgtctcttgctccttcccctgccttgcaatcagtctgttttgctgtgccgcaggcgtgaccatgcctcttcaagctccaattcctcatcgctagagactcatcatctcaaactagctatgtcaaaacttcccagttgctcctgctccttgaagtctctcttccactcatcaacctttgccctaaccatggtgctctctctctctcacacacccacccactctttcactaacacttaaacaaagtccatcaatggcatttggactttttccagcataagaagccccccgtaggggctcaaatgtttctcctcgtttggagagtcatgcattcctttttctcaacataaagaagactctgttgcatcttcaatgaaattaaggttccttggaagaagagaaccaagccaacacaaagctatcggatatagctgacttgttggaaaaaaaaataattaagaacagcaaagcttggcccttggaaaggccaagcccaaacgaaccatcttcttaacttgggcccaagacgggctaagtaaaagtacagaatggtttcaaaatttgtaaatggcagatcacagatagctagctcatcaactagaaattttaagttagttctgcaaaaataggtattccctccaagcaatgctaatcacctctggatgaagaggaacttttagcaatcaatatcatggacattggatgtcccagcttttttgtatggtaacatctagctagtcttaggctttagtgttaggatcagtcatgtcttcataaatatgtttttgtcaattttcagaaaaaaaggggtttaaccaaccaaccaaccaattaacaatcttccctttgggtaaggggaggcaacatctaactgctgttttttatcctgtaaattcaatgaggctaaactatgggagtttaagcccaatccactaatctttaggagggatagtgttttaatttcccgcttagcataagtagtacatttcatcatcatcttgaggactacgtcaatggatgtggaactcaaaacacttgcatgtaaccctgggagatattttggttcccttgggtacttcacttactcaccaaccatggttaggacataggtgaatctcatcactctctatctctcttctccctgctttctgtctgccaacttttacatcgagatggaccttgatactctattaattatatgtttaattaagcctatatggtttggattgtaattaggaatactaaagtaggaggatttcattctctgtccatgctggatgagaatggatttgctactcattctactatgcctttaatttgatattatgcttgcttctattcaacctatgtcaagataagcaaatcaagttaatgcttcgagtaatgttcaacttctttgttatatttcaatcaaggatattttatttatggcaaaatatggtttgtgctgtaagcagctccagtatgcaaggttttgttaagccagatcggccgccaactttggcaattggttaaaaaaaaaaaaaaaaaaaaaaaaaaaaaaaaagaacgaag

SEQ ID NO: 122145 - DNA, 823 bp, Glycine max
  Clone ID: PAT_MRT3847_81302C.1
ctcgagccgaatcggctcgagcggctcgagttttgctttctcttccctcccaattttctctttctctctctttttatttttttgatctctgacctaattgtctctcttctcttctcttctcatattaccactcatctccagccacaacctagagaacaccccccaaaattcagtgggtatttctcatcttcttctgcccccatcacctagatctgtctgtctatacactcattgtttgacaaaaaagaaaataacactgggaagtttagtcatagctgaaagctgactctagctagaggataataataagattaagatcatccatccaacaagaaagaggaagtgtgtttttgattggatccacaaaattcaagatgactccagttaatttggctggccagtttggtgacacaacatacactaaggtgtttgttggaggcttggcctgggagactcaaaaggagacaatgaagaagtattttgagcaatttggtgagatcttggaggctgttgtcatcactgacaaagccactggaagatctaaaggctatggatttgttacttttcgtgaaccagaagctgccatgagagcttgtgtggatcctgctcctgtaatcgacggtaggagagctaactgcaaccttgcttctttgggtgtccagagatctaagccttcaaccccaaaacatggaggaggaggaaggaactttagagtaatgggttctttccagacaggatttggagggggagtgggatcgtcttttccttcagcagcaaccttccctcattatgccatccagcaagggataccttataatgttta

SEQ ID NO: 122146 - DNA, 406 bp, Glycine max
  Clone ID: PAT_MRT3847_81303C.1
ggtttttgtttgtacattttttattattatataccattgcttggggataacgctaaacacagattggaaacatggttaatgcaaacctctagttgacaggatactagactcatccctaattggaaaacaaacttccattagggattttttaacagaaggggtacttcctactgaatttattccttctacttagaaggccccaggaaagaaaatagagagggcccttgaagagtgctaacggatgggaaccgagccctctggaagtgtgtatgacttataagaatgaaaactgcaatgaccttaactaaaggtacccacaaacaatttttccattaagaattgagcgtttacccaagcatggtatttattgaataaagatgtgcaattttttcccaccccctttctg

SEQ ID NO: 122147 - DNA, 232 bp, Glycine max
  Clone ID: PAT_MRT3847_81304C.1
cggccgcgcactattttttttttttttttccttatatcactgtcatatgtttggactggggagcttaatccacaacacggtcactcatcggagttaagatatctaacatcggattcaagagccaacgagaacccctttaagaccacaaatacgggacacggctattaacactacggaggaatgcaataacataaaatgacaaccgggacgtactactacttaaggagaggcg

SEQ ID NO: 122148 - DNA, 115 bp, Glycine max
  Clone ID: PAT_MRT3847_81305C.1
ggctcgaggctgagtgttaagtgccaatgcactctttgtgtgtccaaaagagatctcagtggtgaccgatcttacccacaccatatcatatgccagcacaatgtttagccatcct

SEQ ID NO: 122149 - DNA, 1094 bp, Glycine max
  Clone ID: PAT_MRT3847_81306C.1
cacgcgtccgggcggaaccatgtccttcatcaccaataaacatagtggatactgctttatcttctataaatttggtaaattctgtgactaatgcttttgacaagagaaatgactttccttccatgcttcaattgattgccattagacgaattggcattactccagttttcttggtgcccctgggtgatacactggctcccgatataattactcttagtgataggccttggttgttgcatagtgcaagacacagcctgtcctattcttctatctcatttcaaccatccacgcatgtaactcctgtttgctctgttgagtgtccaaaaggaatactatttgttgcagaaaacagtttacatctggtggagatggtccacagcaagagacttaatatgcagaagtttcatttagagggcactccacggaaggtcttgtatcatgatgaaagcaagatgttgcttgtgatgaggactgaactgaattgtggtacatgtttgtctgacatatgtattatggatcccctaagtgggtcagtactgtcgtcttttagacttgaacttggagaaacaggaaaatccatggaattagtaagagttggaagtgagcaggtgcttgttgttggaactagtctgtcttcgggtccacacacaatggccactggtgaagctgaaagttgcaagggtcgtcttcttgttctttgtcttgatcatgtgcaaaattcagatagtggttcagtgacgttctgttcaaaggcagggtcatcatctcaaaaaacttcaccattccgtgaaattgttacatatgctcctgaacagttatcgagcagtagccttggcagcagtccagatgataatagttctgatggcatcaaactcgatgaaaatgaagtatggcagttccgattaacttttgcaactaaatggccgggagttgtacttaaaatctgtccttatcttgatcgctacttcttggcaactgctggcgatgctttctatgttggtggtttccctaatgacaatcctcaaagagtgagaaggtatgctatgggaagggcgcgcttcatgataacatctttgactgcacattttactaga

SEQ ID NO: 122150 - DNA, 433 bp, Glycine max
  Clone ID: PAT_MRT3847_81307C.1
ccccactgcgacgagtggcagagctgtcttcctttacacctcatgcatacactacaacaccacagaaaggctactacagtacagggaacgctgagtcgatccccggcttgccgccactgtcttcggaggacatgctcagcctccctcctagaccgctggagcttacagtgctacgtccacctggggatcctactgagatgaacagatggaatagtcgctaacacgtatcgataagctagagaataaagctatcttcgagttgaagaatgtgatctgcatgtcattagaaacacattagactcattctttaacgacagaaacacgtaacccaactggcttgcgcatgagcccatcttgttctaacggtggaggtgaacatgactctgatgatagaggttgcataagctggctcgactcgcaaccgagactaacc

SEQ ID NO: 122151 - DNA, 142 bp, Glycine max
  Clone ID: PAT_MRT3847_81308C.1
atgaagaactaaaaaatgcttatttgagagtagcatataaaatgggggtacatttcttaatgaaaagaattgaaacactcaagtgcaccgtcaagataatttatgaacagagccattaccttttttgtattccacctttaac

SEQ ID NO: 122152 - DNA, 270 bp, Glycine max
  unsure (1)..(270): unsure at all n locations
  Clone ID: PAT_MRT3847_81309C.1
ggnaaatnctnnntcaantgctttctacagtngtgaagaaagtganatgcaanttcttctgcagcgctttaaaagtgnttttgaaaatctgactcnattgttgattgcttccaganatctggatttcttcancantggctancgctatctnantcaagttcttccngcngctgttgttgnccccctgtatttctcaggaaaaatcnaggtntggtgtaatcaatnantcacttnctgcntntaatcaaatnctggcgattttccctcata

SEQ ID NO: 122153 - DNA, 313 bp, Glycine max
  unsure (1)..(313): unsure at all n locations
  Clone ID: PAT_MRT3847_8130C.1
acgccctgcgttcacgtacttctccactatggnnaggttaatcttggtgggtcccgctcaaaacgtnnttttaaattttcggggagcgttcaattatttgaagaacaaggggacaacgggcttagttgtcaacgttcggaattcaaacccatacctccatgcgaatcggactcggtttcggccccaatagattacctgagtaagcggcaatcgatatttctcgtgttcgcgaattattgctacgttttcgatgcgtttcgattacccacagcaacgtttattgagcaacgatcgcgcacgaaatggattaaac

SEQ ID NO: 122154 - DNA, 1368 bp, Glycine max
  Clone ID: PAT_MRT3847_81310C.1
gaaacttgtgatcatgtatacctttttggcaatgactatgatgatgcaaaagacatatttgggaaaccaatgcgtggcaggttcccatatgatgagaatggccgaataatcttagaggaaggttatcttgtctatgagtgtaatcatatgtgcagatgcaataaatcctgtccaaacagagtattgcagaatggagtacgagtcaaattggaagtcttttaaacagagaaaaagggatgggcggtaagggctggtgaagctattctacgtggcgcatttgtgtgtggatacattgcagaagttttagatgtgcaggaggcacgtgataggcgcaagagatatggcgcagagcattgtagttatttgtatgacatcgatgctcgtgttaatgatatgggcagattggctcgagaacaagctcaatatgtaattgatgctactaagtttggaaatgtctcaagattcatcaatcatagctgctcaccaaatcttgtcaatcaccaagttcttgtagagagcatggattgtgaacgtgcacatattggtttttatgcaagtcgagatattgctttgggtgaagagctaacatatgactatcagtacgagcttatgcctggagaaggatctccttgtctttgcgaatccttgaagtgcaggggacgcctttattagaacctaaatctgtgtgttgttgcaaccatattttctgattttcaatttggaacacaaatgatctgctcaacattaaaagattccaacatggaatggcccaactctgaaggattccattagccttgatgtcttccaacagatgataacaaatcaatcacatgaggcaggcaacttgtgagggagtcagctgtaatttgttggctgtctggtaaattcactggattcaagtgatttggattgtttgccatgtacaatctgccgttatccccatctggtagagtaggcatgttttttgcagcttactgcacaaatgttctcctttctcttttgctttattctccaatttttcactttagtgcctgatgtcatgaaataatttggcaatcccccactccttttcttccgccttcacccttccacccactaccaaagaaagaaatccccaagagaagttcagcaaaaaaacatatatgcaattaaagctgtctggattagcaattgttacgattttccaaaattttttttcctccggatcatggttctcaatttctttcgccagtgtttcgggaatgtaaatatgttaagttttaacttattcgttcctccttttctatgttaagtaacttattcatagaaatagcttccttgtaaattgtgtcatttaaagatgagtgcagcttttgctccttttaattt

SEQ ID NO: 122155 - DNA, 518 bp, Glycine max
  Clone ID: PAT_MRT3847_81311C.1
ggctcgaggccgttgggagctctggcgcctccaactatgctgagttcagaacacataccctcgaaccgaacgtttttgtgggtcgctcgagcacgatggctcaatacaagtttcagaagactaccgtggtgccatatgggtcggatgtggtggacattatcctctatcggagccagcgtatgtcacctgccgtggtgcacacaggatttgcgattgcacgggtgcgccaggtctacatgcgcacagtgacgcatactcagctgaattttgacgactggctatacaccatacatcgcgagcgtccccggcttgacgacagtcattcattctaccgggatctcctgcatgagctctactgcagggaccattgctagcttgctatgggccgagataacactgacaggactctcattggctagattgccacagactatgcacagttattgaagtacggtgactcgctataccggtgctagtgacctaaggctgctgctcttggacgcctgtgcactgagatc

SEQ ID NO: 122156 - DNA, 495 bp, Glycine max
  Clone ID: PAT_MRT3847_81312C.1
ggaaggtttcaagtttttgaaacccccgtatcctaatcctaacccacttcgttgattacgtgttgtgttttaaatgcttcagatatatcaaccaactgaagaagaaaaacaagaagatgtcactcttgttaaagagtcaaaggaagatatgatgaaagagtatgaaaaggcagcattgcgtcttgataaagctaagctggtttgtgtagtttagtgttcaaattcattgctgttttagactatttctgctattgtttctgggataattattttctttttctggtagagtattgctttgtatttattatcactccttggggaatttggtgtagctacagtacaattgaactgttctgagttttttttttatttttttaaatgtattacttattaaaacttcaatttagactaaatgtttgtgaagatactcacatagtttgtaattgttaaagttgtaaaatagaaatatgtagtcgataatttttaattcgatag

SEQ ID NO: 122157 - DNA, 658 bp, Glycine max
  Clone ID: PAT_MRT3847_81313C.1
ttttttttttttttttttttttttttttttttttttttttttttttttttttttttttttttttttttttttttttaaaaaacccaaaaagccgctttaatattaaacctttaaaaaaaaaaaccccaagtttttatgatcaaggaaaactgaaaacaccctcagggaaaaccaccccccttgaacccttcccccccaagtttggcttaggggccaaaactaaaaaaaaaaaaggcccttaaaaaaaagtttttagtttttttttcccaacagggggaaaaggaactttttgtagcccccaaaggtttccttggcaaaaacatgccaaaaaaaaacactgttttttttggaaaaaacctttgaaattattttaaagtctttttaaacccgattaaaaaccaacggggggggggcctcctcataagttccaaccttttttattgctttcccccccccctttttaatagccttaaaaggaccattggggccccaaagggggggggacaaggccctttgaaactaaaaaaatcctttatcccccaatttttgcaaacaaaaaaggggacaaaattttcggggaaaaaaaaaacatccaaacttttttgtccctttgggagggcgtttaccgaaaacttgtgtaaccttttgggcctcttgg

SEQ ID NO: 122158 - DNA, 378 bp, Glycine max
  Clone ID: PAT_MRT3847_81314C.1
ttttttttttttttttctggaatgcacaataccaatatcaaatccaagctccatacaagaaaacgtgctggcaaatacatagctaaaaggtagacagtgactaagtcaatcaaagctgacgggcacaagcttaaccattaagcaaaagccatacacaagacttaacacaagcaaatacatttaaccactaagcagaacccgccattatgaaacctggcttgctaggaaaacaaagggtgcaaatattttgaacaattatgaaaaggatgagaggtttgctaggaagcccgataattagaaaatcctgtgattcatttaaatcatctgctgatatagacaagcatgcagaatcatgttaaacgtttttcctgtgatctg

SEQ ID NO: 122159 - DNA, 1260 bp, Glycine max
  Clone ID: PAT_MRT3847_81315C.1
gtactgaggccttttcttgtgtggccatagacccagagctattcctcaattatcaatatcttctgcttctctctctcgatgagaaacaacaacacatacagcaaaacatgacaaccaaaggaacaactcactctgaacccaacaacactgaatgttgcatgtgtggggatcttggcttctctgatcagctttttcaatgcaaagcctgccaattcagatctcaacacagatactgcagcaatctctacccgaagccagagtctcttggaacctgcaattggtgtttgagtcaaagagaggacaccaaagagaggtcaaccaattcatcaaattcttcctcatctattaggaacaatgatgatgagagcagaatcaagagaatcaggaatggtaatagctacaacagtgctcaaaatattggaccggtgaagaagggagtgaaagggagtgtccttcatctccaaattcataaacccattaagaaaccaaagtcaccggagtcatcaagatcaccatcagcatccaattctccaccgaaatcttcgccggttttggtttcaacccggaagaggattgtcaccaatggtaccttggaagagagactgaggaggactaggtcagaagacatcacaagaagtggtgcaaccaaacaggtcttcaggaataaggtgagaaggtataagcttctggatgaagtttcaagttaaaataatactaaaaattataagaataaaaggtttcgaatgaaagagttatgtaagagatgatcagtctatacacaggaaagaaagaaaaaagggtcatggtttttggttccttttgcgttttttccccttcaaagttttgtcccaatacatgtacagaacaatggtgaattaatgaaggagcaaaaagtgtttgagtttagactcattgtaacttgacagttgccattcccttttttttttttttccattttcttctcgaatgtcatcataatttacaatgaaaattaagattcagtttgtcaattgaatactaaatgcggtttgtggaagagtgagctaataatagtaatggtgaagagtttgataatttccttagttttaggttcaaatcttcattgcagcaaaaaatcacataccctcttctattttcctgcaaaatataatggcataagctgaattcaatgacttgagaggaaaaatagagaagcaaagcttgcttagcatttgtttttccaattttaatgtgaatgagattaaggtcattgaaagagat

SEQ ID NO: 122160 - DNA, 104 bp, Glycine max
  Clone ID: PAT_MRT3847_81316C.1
gcaatagtgtataatggtcttactggaccacaggttgcattaggagagtttaagaataagcatgtcttattgttcatttctggccttgaccacattgacaatga

SEQ ID NO: 122161 - DNA, 526 bp, Glycine max
  Clone ID: PAT_MRT3847_81317C.1
aattcggctcgagccgggagaaacgatcacatacggttagttgatctagaatgataagcggcaccctctgcgctgcgcaaagttttatccaatttctctatagattcgttcattccctttagtattaccctgtgcttctctccaacctctcatcatctatctatttgctccaaacatggatgctaaatctcggatctcgcccacacgtctgacagataagaagtgtgtgccatgcaatctgaaggaattgcgaccaatgagtgaggatgcagcacacactctaatgccacaggttgctgagtggaatttggtaaacgaagatggtgtcatgaagctgaggcggtcatgggcagtaaagactttcaccaaaggattggaatttttcaggatagtagctgttcttgctgaaaatgaaggtcatcatcctgatcttcaccttgttggctggaataatgttacaatagagatttggactcatgctgttggtgggttgacagaaaatgatttcatacttgctgctaagatt

SEQ ID NO: 122162 - DNA, 255 bp, Glycine max
  Clone ID: PAT_MRT3847_81318C.1
ggggatcaaggggatgacttgaagttggtgcaactcgttcttcttcagttgttgtacaaggcggctcgctgcatgatctccccgtaggtgttcttgcatgccacatcaaactgttcttcatggaaagcgatcaatcattcaatggccgtcattttgcgtattctgtaccgagacgtgatttccgttggttaacttactcaccttatcttgaatacccctttgagcacattacgtgctaattatgaggctcacact

SEQ ID NO: 122163 - DNA, 1746 bp, Glycine max
  Clone ID: PAT_MRT3847_81319C.1
gacccacgcatcaggccacgcgtccgctctctccctacttcgcaacgatgccgtattgcaacgtcggaacgcagctaccctcccccgtcgccgacgtgcccctcaaaaatgacatcaagatattctacagaacttacggtggcggtccaaccaaagtgctcctcatcataggattggccgcgacgcacgaagcgtggggcccacaaatcaagggcttgactggagcaaccgtctccaacgacgacgacgacgacgacgtccgcgtcgtttggagcgaagaaaggcaatggtggcatccatgtatgcgcgtttgacaatcgcggcgtcggtcgcagctccgtgcctgtcgaaaaatctgaattctcaaccaagatcatggcgaaggatgcaattgctttgttagatcatctaggttggaaaaaagcccatgtttttgggcactcgatgggagctatgatagcttgtaaagtagcagcaatggttcctgatagagtcctttccttggcattgctcaatgtgacgggtggaggttttcaatgttttccaaagtttgacgacaaaacaatctccgttgcttaccgtttcttgaaagcgaagacacctgaacaaagggctgctgttgacttggacacccattactctcaagaatatcttgaagaatatgttggaacagataagaggagagccatcttatatcagcaatatgttaaaggtatatcaacaactgggatgcaatctaactatggtttcgatggtcaactcaatgcatgttggacacataaaatgactgaaacagagattgaggtgatcaaatctgcaggttttcttgtttcagtcatccatggcaggcatgatataattgctcagatatattatgcaaaaagacttgctgaaaggcttcatccagtggctagaatggtagatcttcacggaggtcatttagtaagtcatgagcggcctgaagaggttaatcaagcactatttgacttgatcaaggcatcagaagtgaatatgagcccacatgattggactaatttgccaaagaaagagtcttggtggaaagagaaaagggttttgatcagaacaaacattcaggccggaagcaatgtctcccttaactgctgcatgttagaaaaactgcatctcttcctattatacctctttggtcttcttgttttagcatttgaatatggaagaaagcttctaggaagcttaaaaccagctcaagctggaggttccccctcatatattgaaagtcaataactccttttgttaataggtgtgtattgtgtaatttgataaaccctcaaactcaatgataaagattacacgaaactgagtctcatgcatgcggcaatgttgacttcgttttctcagctggtaactggggtttctctcaagcagccagaaagcaagagagaatccttgatttgtgctacttgaggcttgcttgacactaaaatatccctttattgacaagatgaattccatgtgctccatgtagccttcaaagcgggacagaagagaggatggatgatcctctttcctttatgtactgttatatgtttcattagaatgcaactctagaaatcctggtccataccacattttttttgtacatgatgtttaataagtatttagaaataaaaactatcaaaaccaaatcacaggaaaaacgtttaacatgattctgcatgcttgtctatatcagcagatgatttaaatgaatcacaggattttctaatt

SEQ ID NO: 122164 - DNA, 420 bp, Glycine max
  unsure (1)..(420): unsure at all n locations
  Clone ID: PAT_MRT3847_8131C.1
attcgtacccgaaagaaaactcattaccttttcccaaaaaaaagaaatcactccccttgccccctcaaactttctctcttcccccattcgcccgangaaaggnccanngancgacaggancaacgaacnccaagggggncngaacncncngcagaacccancnnncccnncncagaacacaaccncccacgcnaacaacnncagcaaaaggggcgcagacangcgcgccccagacgacaccggcggcagcagaagcaacagagacaccagcagcagcagccacggccgcgccaaagccccaacgcgcccagcccgaaaccaaaacgatttttttttcccccccccccccaggaagaagangagggggaaaaggangaggaggaagaaaaaaaaaaaaaaaaaaanggagggggggggggg

SEQ ID NO: 122165 - DNA, 434 bp, Glycine max
  Clone ID: PAT_MRT3847_81320C.1
ccgcccttgccgtccttttttttttattttttaaacaaaataatgaatttaattattagtaacataaaaaatcgacgttaggtctctttacattgaataaacccttcactatcattaaaatatttgttcaatttctcaatcaatatcatcaaaatgaccctaatatgctattactgggtacgtacttaccttttgaggaaggggataaatcatccccttaaccagcaaactcttcccttattaacttgtcctaatgtaaaatgtcaatgcatttaacactgtccatctactcacaaaactatgtttatttaacgaatgagttcaagatgtcaacataatgcttacctttagattaccttaccaaccaccattttcagacttatttcctatcattaactccaaaaactattggaaaatttttttttcttatgcat

SEQ ID NO: 122166 - DNA, 1536 bp, Glycine max
  Clone ID: PAT_MRT3847_81321C.1
ccacgcgtccgcggacgcgtgggcacagctatggaacgacagaaaacattgctacaacactgctatggaacgacagagaacattgctacatgaactgatgtccactgcgttccttatgttacgcaacacagaggttgctgttcgttcctttatgatgctacgccctaggttccctcatccgagtgggggtacctcaagtgccactgccccatcacagactcctggtgcaactgcatctattaagtcgagtagcctttgatttactgctttggtactgcctgttgaaaaccatctccgtttttacagcaaacagttttaagattttgagaagtatccttggtgagtgccatcagtggattgaagagttggagctagctgcttctcttggactctgagagaaatgcatccgctaatggttcctcattgttgcaatctcttcccaaggtcatgacaaatgtgcacgacttttttgttcacgtggctgcgaaggtggagagcattcatcagtacattgaatctatgaaatcagcatacctagctgatcagcgtcaccggggggaggtgaatgatccatttttggaggcagatcgacgagaaactgcaagacaagaagccgcctcaaaaagagttcatccaacattgcatttacctgcaaattcacaaccctcaactcaagttgctgggttgttttccagttcagggactcaagcagcattgactgccccacagacatctgcagcaacttcatctttgtcatcaggaagtggattctctctttttagcacaccatcttctgctccatcgtcttctatgttgtcatctttgtttacaacaccaactcctgctccaggacctcaaacctcactttttggttctacatctgtacctggttctgcatcaactccctctctgtttggtaatactactccattgtttagtacaactccagctacaaattcactcttttcaagtccatttgtttcaggcgctgcaacaggatctggggctagctttggacctggaacgaaaaatcaacgggtgaaatctagaaccgctcgacgctaataaatgtgatctgaaagcataaagttgattggaacattttctgctgccgaacaaatatgcaatgttctgcttgaaatatggttttttccttattagatggtcttaaatgggtctcggaatgtaaatgccgcattgagggcactggtatatatcgacatttggattccgcctcgtttcaatccgttgagttcttccattaggcattgtccgttggttactgttgacccattttctttaacattgtagattaatataggttaggtgattttgaatgctaaagcctgtgtagcttacgatacgttgtagcttgcttttttcctagttccagtttgagtttgatacatcagtcactgttgtaataaaagatactgcacggaagatgtttggatacattttactgagagatatttcaaacttgtagtggcttttaattgatctttaaaataccaaagactttttcactaaaaaccc

SEQ ID NO: 122167 - DNA, 510 bp, Glycine max
  Clone ID: PAT_MRT3847_81322C.1
aattcggctcgaggtggaattaacactgctatggaacgacagaaaacattgctacatgaactgatgtccactgttaaggatatgttacgcaacacagaggttgctgttcgttcctttatgatgctacgccctaggttccttcatccgagtgggggtacatcaagtgccactgccccatcacagactcctggtgcaactatagcacctagttcgagtagccaaccaacaactgcttctatagtgcctgtttttgatttctacagtggtcttccaaggaaaccgtctccgtttttacagcagacagttttaagatttgagaagtatcttggtgagtgccatcagtggattgaagagttggagcagctgcttctcttggagtctgagagaaatgcatccagtaatggttcctcattattgcaatctcttcccaaggtcatgacaaatgtgcatgacttttttgttcatgtggctgcgaaggtggagagcattcatcagtacattgaatcaatg

SEQ ID NO: 122168 - DNA, 340 bp, Glycine max
  Clone ID: PAT_MRT3847_81323C.1
agtatgatatggagtgactcaactagtagtaatagtagtctaatattgatacgtaaaatatgtaaggcttctataaaggcaggtgtacgctacataataataatagaggactcaaaagtctagatatcaaatgcaaaagatcagctgcattcctaattagttgagggtattatactaacaattgaggcgattaaaaagattatttaaatattcttatggttgtggtctttagaattaaacacattaataatatgtctagagaagttttgagttatgataagaatggtcaggggttatgacttgctggtaccaaatttataccaactaacgttgtaaatga

SEQ ID NO: 122169 - DNA, 243 bp, Glycine max
  Clone ID: PAT_MRT3847_81324C.1
tacggctgcgagaagacgacagaagggtggaaccttaatgcaactctgtcagggtaacacagtcgctacatcctcagtttgattatttgcttgctaaaaacatcatcataattgatttcaggaaaatgtttctacaacgtaaagtcttcaacatacacaggcgttcatggtatagattgaagacaataagcagctaaacataacacaaaatcaaagaatgccgatacgaaaaaaatggcgccg

SEQ ID NO: 122170 - DNA, 226 bp, Glycine max
  Clone ID: PAT_MRT3847_81325C.1
atcgacacccacatcaacagtcactccagatgccatgcatgtgccaagagacacatgagttcccttagcgtacgaaatgggcgtcacacgttcagcgctggaaatcgagttaggtctccctcggggaacgtcgcatgcatgtttgcagggaatggaggagttaagagctcgcaatgcaaattcttagcaggagcgatcatagtaaggttacccaggccactaaggc

SEQ ID NO: 122171 - DNA, 130 bp, Glycine max
  unsure (1)..(130): unsure at all n locations
  Clone ID: PAT_MRT3847_81326C.1
ggcgcgcggcgcaactactatgctgnggatacatgggcaaatatctacagttcaaacagtgaaggatttgtttgtaccttcagccgtttctctagctgttccactggctctaatgtccctgacaagtgaa

SEQ ID NO: 122172 - DNA, 486 bp, Glycine max
  Clone ID: PAT_MRT3847_81327C.1
ccacgcgtccgattttgttagacaggagatcgaaagacaaaaatcctaacaacatggaggtgccgtgattggctcctggaggaagcggaggaagcggagaaggcgtgacagtgagggttttgcaagtgcgaacgtgatgatgatgtcgaggctccctatgagtgtagcggagaggtttgttgcaagcttgagtgcagcggcatcgagattccctccgggcgtgaacacgatggcgttgaggctcctgcaagcgcggcggctaaatgtcgtgccgtcgtttcgctactgagaaacgaatagatattttttttatttgttcgatttggatttgttttctgaatctgattagttctccaattttttttatctgctatataatttttttttggatctgccatggtttgttctttggggtctgctatgtaattgattttcgggtcctcttttttttttggatcctctgtgtaattgattttcacttctgcc

SEQ ID NO: 122173 - DNA, 271 bp, Glycine max
  Clone ID: PAT_MRT3847_81328C.1
attcccgggtcgacccacgcgtccgcttcctttctctctctgaaaaccctaatcctggatcttcttttgcccctctttctctctctgccacaacaggatcaggaatcaaagtgttggaatggaagaattcgatgttgggtatgagtcaaatttcttcttctcgtgtagggttgttagcaataaaaagtggtaccagcttgcatagtctttgaattgttccgagttttgtgtaggttttgttaaggatcttgaaggattgttaaaatcttga

SEQ ID NO: 122174 - DNA, 203 bp, Glycine max
  Clone ID: PAT_MRT3847_81329C.1
gtttagcagtttagcaaacttttgtttaatgcaaatcactagcatactttatccatcatctacaactcatttcgtgagttgacttctagatgatgggtgcgggtgctattaatttacattattcacattgtggcactccttctatcccttgagccgacttttgagcaatgctgcgcatacatgccacttcataacccctttat

SEQ ID NO: 122175 - DNA, 325 bp, Glycine max
  Clone ID: PAT_MRT3847_8132C.1
gaatttggagagaggaaaaaacaacaaattaccgcttgtatcaaaaagggcgtgatgagatagaaagaaaggaattgttcgagaaaataaatcatttagtacatctttgaataatttgtcataaaggaggtaatgggtcaaaggaattaatgaaataaatttggacagaaataagtagagttaaaaatggggaaaatataaagatcatagaaaaataaaattagtgcgaagagaagagtatcgcggaaatagaggatagagaagtagacagttatgaagtggttaagtaaaatatagaaaaacggaatatcagaaggtgaaggaa

SEQ ID NO: 122176 - DNA, 435 bp, Glycine max
  Clone ID: PAT_MRT3847_81330C.1
aaaaaaaaaacaaccagaatttgccctttaaaatccgacaaacaaaatttccaaatgggggggataattatgaaaaccttaactcgcaaaaaaaaaaaaccaaagatatttagttttggggggcctaccaaacaaaaattttatacgaaaatttgaatcttaaggttttctgggaaacacccccccacttaaaaaaggtggggaattttgtttaatcaaaatctgaccccctaggggggaaccctgctttcccaacaaaattggggggagaagcttccttcttaaaaacaggttttctttttttggggagctttttctttttgggcttaacgcgctggggtttaaaaaaaaaagccatccttttaaaaaatttgggataaggattcaccttcaccaaaaaagtcaggttcttaaaaggggttttttttagggggg

SEQ ID NO: 122177 - DNA, 411 bp, Glycine max
  Clone ID: PAT_MRT3847_81331C.1
gtcccagaaataacgagcacgaattttgcaattactagtaaaaaatccagatataacggtgtgcgtattaacagtacaatgtgaaggtaaacataaaagagtggcacaaacttgttatctaacttaacagctattctgagtgagaatgaggaccaaacactgtcttcactaaaaatatttcttcaaacgtggaatctgcctgctatcatgaaatgaaaataccgcgacagcttgtgaagggggaacgaatgctaaatcacaactgaaagatgcctctctatacttttgcaggggaggaccgactgcaccagttggatattggctacaacgattggtagagactgtggttgtgctcacggcggtgacactttaggaaagcttttgtcctctcaaacagtgccctggtatttc

SEQ ID NO: 122178 - DNA, 417 bp, Glycine max
  Clone ID: PAT_MRT3847_81332C.1
gtttcgtacgggttcccatcaatgcttttaatcgtcgttttaatgttcgcctacttgctttccccgtccgggaagatgacgaccgtcttagccgcagccggttccgccgcgtttgacggtgccggtgcttgactactcggttgttcttcggctattggagtagattctacactgccctcagaatttttgtcaagattggatcctaaaatcttttcgatttcatcgtattgggaaatatcatcgttggccaacagctcgtcccattcgcttgacttaacgacttccagttgggattccaacattacctgcaggcgctgacggaagatccgggtttgcttcttcaagtcattggtttccgtggtcaacttccgggtggaagcagcagccctttcgatcaccaagttagccttttcgtta

SEQ ID NO: 122179 - DNA, 283 bp, Glycine max
  Clone ID: PAT_MRT3847_81333C.1
acggtttatctctcacacacactttctctctctctctatctcacccagatcttatatcagtgacgagcgctatcactccacgctaagagttcatgtacatggcgaacctggcttactcaacctaacgctactagcatatgatgaaattcatttaaaaagtctccgactacttcgagtaccagaatctcaccgacaacgctcgtaacctcctttccctatcctaccaaaactgcatcaacgctaccctcgcctcaccactcatcatctgctcaatctatctaaa

SEQ ID NO: 122180 - DNA, 273 bp, Glycine max
  Clone ID: PAT_MRT3847_81334C.1
agtgttttgttctttttttttttttttttgagtagcataatattaatttctttttatattaaacaaaaaatagtggtgaaaataaataatatgtaacccaaaaaaacataattttattattctaataaaagcatataatgtccagcaaaagaatctcttgtatatccgttcttaggcaaaaatcttctcgggattatttgttcttagtttgaacgtttgacaagagttatccttggttttattcaggactaaaaaaaagtctccttcaatttg

SEQ ID NO: 122181 - DNA, 399 bp, Glycine max
  unsure (1)..(399): unsure at all n locations
  Clone ID: PAT_MRT3847_81335C.1
cggcgattgggattaaaaatgaactnatgcttatatctgaacttcagcacacgaatcttgtacagcgactgggattctgcattcatgaagaaaaaagaattctaatttacgagtatatgccaaacaaaagctggatttctatctgttcgattgcactagaagcatgttactagactggaagaagcgcttcaacataatagaaaggatttctcaaggaatactctatcttcataagtactcaagactaaaaatcattcacagagacttgaaagctagtaacatactacttgatgagaatatgaacccaaaaatttctgattttggattggcaagaatgtttatgcaacaagagttcacaggaactactagtatgattgttgggacatatgggtacatgtc

SEQ ID NO: 122182 - DNA, 434 bp, Glycine max
  Clone ID: PAT_MRT3847_81336C.1
acggctgagaagacgacagaagggtggtgttgtgtattgaagagtttttcggaaagcagaaaggaatgttcaaaaggaaaaacaaaggcatagggaaaatatgccagggtggttaacaactttttaaagctaaaggcctcaccttaccacctttttcttccctctcatagtcccatgtactatttatttttttagctccttccacgacagatgctgacttggcaccaacagaagacccagaaaaaatgtgtgaggaaaaataataattattgttacaaaagattattcaatttcatgtgtctgcagcctgcaacatgatcacacaaaagtggggccatgttgcttcagccatacggagaatgaaccaccgtccagcttgataattttgaataatttgtgtttttggtgcatgttatacaattttggtttttaac

SEQ ID NO: 122183 - DNA, 485 bp, Glycine max
  Clone ID: PAT_MRT3847_81337C.1
ctgcgagaagacgacagaagggtccctctttgtctttcacacctctttggctctttctattcttatacattttaaaatatatgtttttaatgataagataagtatttacacttttattaacaatcaaaagttatcaatgaatgcgtagattagttgctatgttaaatattaggaggtggagtttagtttgttcatagcaatcttatttactatctttgagtaggattatctcctaaagatatatgtggtttcatattaaattaacaatattatcaatgaaaaacttgtataattaatcatttaagtttttacaaaattttataatttttaaactgtttttttctttattaaaaaaatagctaatgtttatttaataagattttatattagaatctcactttttaaaataaatgtttaaaaataaaattttacaaataacaatagttgagttgttttattcaaatatataacttgaaacataatca

SEQ ID NO: 122184 - DNA, 561 bp, Glycine max
  unsure (1)..(561): unsure at all n locations
  Clone ID: PAT_MRT3847_81338C.1
tcgtcagaatcgctccagctgcgtggaactttaagaggccacaatggatgggttacccaaattgccacaaacccgaaatatccggacatgattttgtcatgctcccgagacaagaccctcattgtttggaagctcacccgtgacgaccatagctatggtattcctcagaagcgattgtacggtcactcgcactttgtgagcgatgttgtgctttcctctgatggtaactatgccctctccggatcatgggacaagactcttcgcctttgggatcttgctgcagggcgctccactagaagatttgaggaccataccaaggatgtattgagtgtggccttctccgtggacaaccgtcagattgtttctggtagccgtgacaagaccatcaagctgtggaacacacttgctgagtgcaaatacactattacggatgaaggccacagtgactgggtgtcttgtgtgcgtttctcccccaaccaccacaaccccatcattgtatctgctggttgngacaggatggtcaaggtttgggaccttgctaactgcaaactcaagatcaac

SEQ ID NO: 122185 - DNA, 200 bp, Glycine max
  Clone ID: PAT_MRT3847_81339C.1
cccacgcgtccggataggtgccatctcagaatgaacagtggctatggtgcccgtactccggaggtgacatgcgcaagttggaggcttgctggtgaagcatgcaccatctttggctttgaaacgattcctgaagagtgccttgaatcaacacacgaatacatccatggagatcaatataggtcatactccacaacagttaa

SEQ ID NO: 122186 - DNA, 324 bp, Glycine max
  Clone ID: PAT_MRT3847_8133C.1
tttagacatttactgaagccgggaacctttatcaaaattgaggccaaaaaaataatagtactaacatctcacacatatgtattcacacacaaacataaacacaaacacttggaatgcaatgcaaccttcatacctatacgagaaaaagaagaataacattcccattcctatatcattgatccatgatactcccactccaacatgtaaccaaacaccatctcacatccaaatccttcatatgcttcattctccacccgcgctctgaccatgctccatacacttctgtatcatcatcatcatcctcagccttaactttctttttta

SEQ ID NO: 122187 - DNA, 494 bp, Glycine max
  unsure (1)..(494): unsure at all n locations
  Clone ID: PAT_MRT3847_81340C.1
tacggctgcgagaagacgacagaagggcaataatttaatttatgaatttggtcctcatattttgtaaagtcgtgcaatattgatctctcaaatcataattgaacgttaatcgttaacaagtaatgctgagtgttatgtgtcacattcttattggatgatgactgtcacgtgtcatgttctaattagttaatgaaaacaacaataagaacatcttttatggagttgacattcattcagaacatgatatgcggcagttatcatccaataagaacatgaaatatgaccatcaatatcactcgntaacggtcaacatccaattgtggcttggggaatcaacattgcacgatcttacagaataaggagatcaaattcgtgaattagattactgagagaccagatccgaaactgaagataaactgaaggaccanaaatacaattttgcctatatttaatcnagcatgcacacgaacaatatatattntatcattaaacat

SEQ ID NO: 122188 - DNA, 255 bp, Glycine max
  unsure (1)..(255): unsure at all n locations
  Clone ID: PAT_MRT3847_81341C.1
aggagcaaaccaatnnctctattataaggacaaaagggcaaattcacagaaattggggggaaaaaatcagnnaaggccttaagggagtaattattggttttggtttgcaaaaatttgccaaaatcaacccagaagaattttgactctagcccactgggtcgcttcttacctactgagtgaataggctgnactgattaactattatgaaagacaatnaattactgacaaattacttnacaaaaatatacaaacatg

SEQ ID NO: 122189 - DNA, 369 bp, Glycine max
  unsure (1)..(369): unsure at all n locations
  Clone ID: PAT_MRT3847_81342C.1
aaaaacccttaccttgaaataaaaagccaaccaaagggaaaaagggaaaagggctgcccccaaaaaagaaaaaatatggtggggccccccctgggggcaacggaaagaaaaactgggaagaaagtgagggtaaaaaacctgggccctgaatttgacggggaaacaaggccctccgggaataggggggtttgggaacccccggggaacataatctgaagcattcctccgttcaaataaagagggggcttcccaaaaatcttgaaaaaaactggaatgaaaaaaacccttaaaaaaatttgggaaataaaaacccccccacacggcncagattttggggcccccgcaaattccccagggggggggcacaaa

SEQ ID NO: 122190 - DNA, 420 bp, Glycine max
  Clone ID: PAT_MRT3847_81343C.1
ggacactcgaacactgggacctgctacatactttgttactgatgcctactgatgggctattattaatgttggatcatttacggcgagcaatagtcctgtatacaaaagttttgtgcctaatcaagtcactggcactgtgaattcagagctcttgcaacagcacgactttctgctcctcattaacatattacggcctgtggctggaaaatggtttttacaacatcacccttcaatttgcagaaacagctattctagattctactagaagttgggaaagccttggcaggcgagtctttgatattcatattcaaggtactcgtgtcttgaaggatcttgatatacacaaggaagctgcgggcatgttatatcaagctatccaaaggcaatatagatttgcagtgacagaaaactatcttgaga

SEQ ID NO: 122191 - DNA, 212 bp, Glycine max
  Clone ID: PAT_MRT3847_81344C.1
gttgaaaagagcaatctgatgatgtcagtcaagaacaatattgtgggagacggcgggatctggtagatatggtgcaatgtcaccgcatccaagtaggcgtccgtcatttactatagggcctcggccaaagtacgctctcacgatttcagaaaggtttctcttgggacctctggtttcactgagcacatggccactgccctgggatcctcttt

SEQ ID NO: 122192 - DNA, 431 bp, Glycine max
  Clone ID: PAT_MRT3847_81345C.1
aaaagggattgacccgaaaacccctgtgttttttttttttaaattgtttacggaccggaaaaggaacttaaaaaaaaaccccgggggttttctctccataagggggcaaaaacggattaaacccccccctaggaaacaaggggccaccccctgggtaggcgtaaaatgctacggggaaattccccccccaaaaagaactttgtaaaggggccggttggccaaatcttaaagcaatactgggccattttttttttggcaaaaagccccttgggaggcccatttttcaacattggggataccctttcctgtcgaagaaaattttttcggggaacaccccttgaaaaactttgaggggtcaattgggggtatgccccccaattttttaattcacccccccctggccctgggggttccttgggaaaaccccccgc

SEQ ID NO: 122193 - DNA, 162 bp, Glycine max
  Clone ID: PAT_MRT3847_81346C.1
ggctcgaggaacgacgagcgacttatacagatctttgacgagattggtagcgcattcataggacaaattgatctgtttcttcacccttatctccaattcccaaaccctaaaccctctgtactctaaccctaaccatctctcctacatcactcccgaagtcga

SEQ ID NO: 122194 - DNA, 1741 bp, Glycine max
  unsure (1)..(1741): unsure at all n locations
  Clone ID: PAT_MRT3847_81347C.1
cccccgcgaaaacataaaaaaccatttcccagaaataaacacgagaaaaaaaatttcacataaaaaagttagtaatatgtttccctgagtcactatatatgtgaacctcaataatcaagtatccgctcttaaagattcagattctcaatagagagaaagagagagaaatggctttcacgatttccagatctcaatctgctttgacagatagagagaaggagaatcttgacaacttagttgacaaggagtgtgcaaccacagagggtatgatatcgagccagctcaagttgaagtcttctttgtcatccaaagcgtcttctcatcaaagcatggacaaacatgcaatccttcgacgtatcaggcaacgcaggtttaataacaaagccaaaaccgctctggaagctctcataggcacctcagaagccaacaataccggcactgcccaagaacagaagtggcttcaactgggtgactctttctcatctccttaactggaaacacaatctccccccagtttgcaacccatctataaataccctctttagtttccttcacccaacaaagtcatcttttccatacgcttgcatggctaggaaaggaaatccaacccgatctttatcggcatgcttaagaaatcccactatgtatctattaactgtagtagaccttgtcggtttgctactttaggtgtgaccttgtgaataccacgttcaattgttatataaatatattatattatgatgttatatatctaatatggaaagtctaagctttgctttgcaaatgcattcccaatcctgtagcacggagagtagttagtggttttctattgagttatattgaccaaaatgatgatgaataacaaattttacttcttatgttcgcaaaagaaatagaatgtgatgtccccttgtgccttgacatgccgaaaacaatcccatcgtgtacatgagaatatcggtgacaagcttgcgtaacttcacgttcaaattcaataccttttaaatagtattaagggtcctactacctccagtattgacttcactggtttctgatcgaccaatgctgtttaatccttccctccttttggtactaacaatttaatcattttttttacgtagctgtggtcaatatctcacttgtccccagaacacaattgagattggttctctaatacgagtatcttggagcaggtggtaattgatgcaccggagatcttgattatctaaatagtcaccctatttgagagatagagagaaggagaatcttgacaacttagttgacaaggagtgtgcaaccacagagggtatgatatcgagccagctcaagttgaagtcttctttgtcatccaaagcgtcttctcatcaaagcatggacaaacatgcaatccttcgacgtatcaggcaacgcaggtttaataacaaagccaaaaccgctctggaagctctcataggcacctcagaagccaacaataccggcactgcccaagaacagaagtggcttcaactgggtgactctttctcatctccttaactggaaacacaatctccccccagtttgcaacccatctataaataccctctttagtttccttcacccaacaaagtcatcttttccatacgcttgcatggctaggaaaggaaatccaacccgatctttatcggcatgcttaagaaatcccactatgtatctattaactgtannagaccttgtcggtttgctactttaggtgtgaccttgt

SEQ ID NO: 122195 - DNA, 571 bp, Glycine max
  unsure (1)..(571): unsure at all n locations
  Clone ID: PAT_MRT3847_81348C.1
tcgatctatcgctaggaatgtgccagatgccgtacacctgaggccggtatgcccgccggcgagataacaatagacggggtaaatttcatacccaactgggccgatccaaacgaaaacaaatagataagcaaagatgtcccactaatgcaaacgcggaccaaagctgcacagctgcggcatatcaaagacgtagagtggctgctggttgaggcaacagcgtagtagctggtaggggcgtcttagaactggtgcattagatgggagtttaacgaagcgaagagcggtgcaaaaaaggcgagtgggggagagagtggcagttatggggaacataagtgtagggttgtaaggagagcgacgccggcatgataaccagaacaaaaactaaggcacggtaggcactgcaaggtaagcatgggcaaacaagagggtagcaaaaaaaaaaaaaaaaaaaccctccttcttcatgacgcactgtcgtcatttcccaaggaaggttccattccgattgctanctcgattactgggtttgagacgcacgtcgaggacactagcatcgaagtagccgtagact

SEQ ID NO: 122196 - DNA, 644 bp, Glycine max
  unsure (1)..(644): unsure at all n locations
  Clone ID: PAT_MRT3847_81349C.1
gggggcaagaaccaaaacgatgggaanagaaaagcacacccacaacangacatancanaggaaggacggagaaggaaaggaaaggaacagagaaggcacacnggggcagggacgcggacacggacanacannnnnccaaggggggggagggggaaagatttttttttctnnggngaccngaccngncctaacctaacaacagcggagctatgcataagggcgccctatgagatttgattccactgtttaatcatatcatatgtagcaggcangttcttctcacactccaataatataatatttttaatcaatcagctatgaacaccagttaacaaaacccagttcttaataaacattgcctcaccctagtggtgggtaccactaatatttacctgaccatgactcatgaatgattgcaccgggacgcagctcccagcggaacaacacactggcgcagaatcttaattggggcaccacagaaacttgttgtctggcatggcnccantggggtgggttagatatgccattgggcctggggtgcatgaaaagattggggattattggaatgagtgggggtggtttgttgtgatgattggttatgatagcgaggccgggggggggggaccccggtgggggggggtggg

SEQ ID NO: 122197 - DNA, 634 bp, Glycine max
  Clone ID: PAT_MRT3847_8134C.1
acgagttttttaattaccctccgatgatagggttgaaaaaagcacatacacaatatatatatgtgtgtgtgtgtgtgtgtatattaaatctgatgctacacgtttgagccatgcaaggtgagcggcagtagaaaattgaatttttatttttgagataaattaaagaagaaaaaaattaatgtttcctagttgtctgtagaattgggtgaactttcccgctcccgaatttactttttaaaaatttgattcattcaatcaaatggtgaaaaaaaagggcagtgcttgcagagaagattcccccacctatcctttttatcattaatgatgatagttcttcctgttgcccttttagtttagtgaatccacatcgtctcctacatttctgtgaaaaaggttaacctttgtcactacgtgacatcattttttttaaccactcctctctcctgacatcatttggcgtattgattttcaatcccctcttctctctctctctcttagcctctcctctggctgcctgtctctttctctctagaaacccaagttggtgctgaaatctttggtaatttaatttatcacacttacagttttacacgctcacatggtcacgaactttgtctagatcactgtgtctatg

SEQ ID NO: 122198 - DNA, 285 bp, Glycine max
  unsure (1)..(285): unsure at all n locations
  Clone ID: PAT_MRT3847_81350C.1
agtacaagcacatgcggttttatagtaaaggatttagtatacattggtgaataaaaaacaaacaatcagattttggattaaatttagatagctaagctttttgttgatttgtaaggtcatctaagcacacattatcattagggtgggtcaaagatttcccctcccattaanaggaacaagcagactacaataacanaagggggggggaangggaaccgccccgacnaangaagacncngnngccccnacaccanangaagganggaanangaaaggaaaaacaac

SEQ ID NO: 122199 - DNA, 370 bp, Glycine max
  Clone ID: PAT_MRT3847_81351C.1
agcctttagcatggtttagtatatattcaatttctgaccatactttttaaaaaaaaaaaataaaaataatgtttctttgccctttaatctgcatcaatggatatttgttttctttcttgttaacgactaacgtttaaccacagaaaaaacataccatatttcgtggtggaaaaatcctgctacatattttcgtttgcacaacaacttaattaacatcttatgtgttctttctatttctacttacaagatatgattaactaacttacgtttatttaaaaagttggttaatttggttattagtattaaatttgtttataattataatatttttaaaattttctatttattaataaaattttctataattgta

SEQ ID NO: 122200 - DNA, 530 bp, Glycine max
  Clone ID: PAT_MRT3847_81352C.1
aatccttagataagtagctaatcctacacaagaacctagctagctcaccaacatacttcaccaatccttagaccaggttgaagatgaagactctttgtaacttcagggcgctacaatgctgtttttttttttttttggaaagcaacattgctgttataatggccttcagctagaaaaggggtgatcttaattcttatcgggatcaattcagcgacctcaacatcttcaatcccatacataatgtttaacaataacttccaaattaattaaaaggttcatcaaaatctcactatcacgggttgttcaaaccttaaaagaatcttcactacccactatttccgttccggggtcatatttcaacactgaacaatggaaatattttattcgcaaccatcatttcttttatttggcatatcatacattatatttatacttctttctgccatttgcttaagctctctatcaccaagcaattgttggatgttccttcttggggaatagattaagaaactaaaatataaataaattca

SEQ ID NO: 122201 - DNA, 317 bp, Glycine max
  Clone ID: PAT_MRT3847_81353C.1
taccatgcgtccgagaagcgcaaggcttcagatttagtataagaggtcatgccccccatcgcttacatcatcgatggggacgactagacctgatacaacctatgttaagccggtacctgcattcagagaagacaacaccaagaatgagaagaaaaagaagaaaaaggccgttaaatccggacaaaaagaacaagacttagtgcactgaggctaatggagaaaagatagaggatactgtcatgctttacaacttcaggatttcagaacccctgttgcaaaaatataaggatatgggtatcgaattaactatattccat

SEQ ID NO: 122202 - DNA, 240 bp, Glycine max
  Clone ID: PAT_MRT3847_81354C.1
ggctcgagggaacattccgcggtcctcgaccttggctctgatacatgtcgactccaatttccctgagacaaatgtgatttactggcctgtgcacattctctataatgcagaaccgctccctactccttatcccggatactcaatgacattttcgtcctagacaggtacggattggggcacacgtacaaccctcttggccgtgggctgaaatagcctgaacccacaacaattgctgcgagt

SEQ ID NO: 122203 - DNA, 387 bp, Glycine max
  Clone ID: PAT_MRT3847_81355C.1
aaaccaaactaactgatcttatcatatgtgaaagatattactatgggacttatgtgcatgaccaaggctcataacacgtatgctattgggctaccttagtctacagaaaatttgaaacatgcacgggcacaccataccggagaacgctatagagaagcattacatcatcaaccggcttttgatgctgtgacaaaacccagaacaaagccctatatggctcgcttgatgtatgttgtaccccagaatcaccgccttaacaaactggcacacaagcctcttccatggaggcgataaaatcaccggtgttgctaatgttggcgaaagcacgactgtgcttgatgccatactggatcaatgtccaacagagagtgtgagacaccctaacca

SEQ ID NO: 122204 - DNA, 521 bp, Glycine max
  Clone ID: PAT_MRT3847_81356C.1
ttgcctgctacatgtgtagcactaccgcctgcttggggggggggggggggggggagagcatgtgccgcggagggggcaggggctaaaggaaaggatataagtatacttcgatagtatatagcacggcccttgtggttaatggaaaactacaccagaataggcctttagcatctcatatagctattattgaagaagtagaaggggatagtgggatagataaaagataaacatgggaaaggggaaaaacaacaaaacacagaaatacagtagtggaagcaaagcaaattaaaatttataaataggcctggcagggggcagcggcagcggcggtttaatggcaggaactagcaattcgggcaggcaagtatggccatggcaacccaagcctttgcaggatcattgccgccgacacgctgctaacactgctattcagcaagccgtttatttacaacagttacgcggcagtttaattaagcgttggcagcaacagcagactactattaacatgatcactacccggc

SEQ ID NO: 122205 - DNA, 1438 bp, Glycine max
  Clone ID: PAT_MRT3847_81357C.1
atagcaaacctaagcaccaaacctctttctttcaagatccttgaattcagtcccatggctccaagcataagcaaaactgtggaactaaattcatttggtcttgtcaacggtaatttgcctttgtccataaccctagaaggatcaaatttcctcgccaacggccacccttttctcacggaagttcccgaaaacataatagtcaccccttcacccatcgacgccaagagtagtaagaacaacgaggacgacgacgtcgtaggttgcttcgtgggcttccacgcggacgagcccagaagccgacacgtggcttccctggggaagctcagaggaataaaattcatgagcatattccggtttaaggtgtggtggaccactcactgggtcggtagcaacggacacgaactggagcacgagacacagatgatgcttctcgacaaaaacgaccagctcggacgcccctttgtgttgattctcccgatcctccaagcctcgttccgagcctccctgcaacccggtttggatgattacgtggacgtttgcatggagagcgggtcgacacgtgtctgtggctccagcttcgggagctgcttatacgtccacgttggccatgacccgtatcagttgcttagagaagcaactaaagtcgtaaaaaaatagtaaaaatttattttgtaaactgatttattttatattgtagtgatcatagacaagtttggttggtgtacatgggacgcgttttacttgaaggtgcatccctcaggtgtgtgggaaggggtgaaagggttggtggagggagggtgccctccagggatggtcctaatcgacgacgggtggcaagccatttgtcacgacgaggaccccataacggaccaagagggtatgaagcgaacctccgcaggggagcaaatgccatgcaggttggtgaagttggaggaaaattacaagttcagacagtattgtagtggaaaggattctgagaagggtatgggtgcctttgttagggacttgaaggaacagtttaggagcgtggagcaggtgtatgtgtggcacgcgctttgtgggtattggggtggggtcagacccaaggttccgggcatgccccaggctaaggttgtcactccgaagctgtccaatggactaaaattgacaatgaaggatttagcggtggataagatcgtcagtaacggagttggactggtgccaccacacctggctcaccttttgtacgaggggctccactcccgtttggaatctgcgggtattgacggtgttaaggttgacgttatacacgtaagtctctactctgcatttttgttttctttttgacagtattgtctaaccttttaacttaattatttagatgaaaattactcattttgattttgattttaatatggtgtttataggcttcagcaaaaagagtcatatttttctgttg

SEQ ID NO: 122206 - DNA, 234 bp, Glycine max
  Clone ID: PAT_MRT3847_81358C.1
ctttggttttttttttttttttttttttttttttttaaaagaaacatcaactttcccatttaaaaaccaaacgacgggggttcatctgtttaatatcacaggtgcttggttgcgcaaacaaaaaatcattacaccgaattccttataattccaaaagaaaatttggcggtgaagcgaaacaaggaaacagggtgcagagcctgccttaaattgcccggttgccaactttaaggg

SEQ ID NO: 122207 - DNA, 523 bp, Glycine max
  Clone ID: PAT_MRT3847_81359C.1
gcagtttcgagccagacccacgctgttcggttatgttcaatttgacaccaccaaaaataggttcttagttgctggtgacgagtttacaatcaaattctgggacatggataacacaaacatgctgacaagtgtagaggcagaaagtggattactggcttcaccctgtattagatttaacacggatggaatactgatgggtggctccacaaacgacaatggagttaaaattctagctaacgcaaaaggaattaggctgcttcgaacggcggaaaatcatacatttgatgcttctagagttgcttctgcagctgatgtgaaggtaaagagattgatattttgttaatcttttgcaagaacatcttctgaatccttcatgttaattcaggcacctactattggagcttttgcttctaccaatgaaactgttggaacacgccttgctgatagagcttctccagtagcagccatgggtgggattataatgaacttcggaattaactgatggaaaccagaattgttgatg

SEQ ID NO: 122208 - DNA, 150 bp, Glycine max
  Clone ID: PAT_MRT3847_8135C.1
catgttttggtgccgaatcatggctcatttcatgtcgggtgcttcattgttgtaaatgattgatgattcatgataacaacaaatggccgactccagatactaaattgttcactgttgttggaatgtaatcttttgcacagacttttggac

SEQ ID NO: 122209 - DNA, 578 bp, Glycine max
  unsure (1)..(578): unsure at all n locations
  Clone ID: PAT_MRT3847_81360C.1
ctcctgagcagctctctcattgaagcagcccagagaatcgcattcttttcactcctcaaaaacatacaagaggtaccaccggatttcatcttcattgactgcttgggggaaagaagcgcagtttctgatttgatattccgggttcgacctcttttctatctgcaaacaggtttcatctagtacatcatggtccgcgtatccgtcctcggcgactgcctcaacaacatctgcaatgcagagcgaaccggaaagcgccaggtcctcatcaggcccagcagcaaggtcatcgtcaggttcttgaccgtcatgcagaagcacggctacatcgacgagttcgaagagatcgacgaccaccgctctggcaagattgtcatccagctcaacggccgaatcaacaaatgcggagtcatcagcccgagattcaacgttcaattgacacagattgaaaactgngtcaacttgctcatgcctgctcgttcgttcgggtacatcatcctcaccaccagcgcgggtatcatggaccacgaagaggcgaggaggaagcatgttgccngaaagatccttngcttcgtgtacta

SEQ ID NO: 122210 - DNA, 781 bp, Glycine max
  unsure (1)..(781): unsure at all n locations
  Clone ID: PAT_MRT3847_81361C.1
atccaatattaatanntgaaannnccgtcccaatcttgaaaaaaactaccagctcaagaaagcgtagctaaactaatgcttagaaaaagcaaccaactaaaggctcttgatcatgcaaacaaacacgagccaatgaaaaaacaacttgacccagtgtatcatgtgtaacttatatgcgcttcaaatgaatcgcaagattatgccataataaattattacattattttagtgatcaccaaaatcacctattacttgcaaatatcatctttttagaacccttgccttaaagaatcaaagcctttgccacgtaaagcagacggggcggggcctatgaagcgcattcctttgtcaatatgtagtccactgcttcttctacagtgtcaaccaccagatctgctgaaaatttgtcatgattttccttccccttgaaaaccccagttctggtgagaatagaaaaccaaggatgcccagtctgtcgtgcacctttgatatcaactgcaggattatctccaatcatgtaaagtgttttaaaatatgaagtgttatcatgatttatatcatagaaatcatcataaagtgacgccacaagtttctctaacagaatttctgcattcttgaatacagatggatgtggtttgccaaaactggtatactccaaggattgagggtggatcctattgaagatggattctaaangcatccggnnngctcccattccaagacgttcagnnngaaatttagtctggtattcaaggtcatcatttgcaaatatatnnnnngg

SEQ ID NO: 122211 - DNA, 266 bp, Glycine max
  unsure (1)..(266): unsure at all n locations
  Clone ID: PAT_MRT3847_81362C.1
ctctctctcctttgcaaatgggcagcggtgaggttgcacatcaagcaccaacacagagtccagacaatggcacaactgaccngtaatcaagacccaggggacaattccggaaccagtaccagccactgaggctcctgcaacagaacaagcagcagctgaggttcctgttcaagaagaacaacaagcaactgaggtgcctgccccagaatcaaccaccgaagcaccaaaggaagataccaccgaagcaccaacaacagaagcagtag

SEQ ID NO: 122212 - DNA, 642 bp, Glycine max
  Clone ID: PAT_MRT3847_81363C.1
caacccaagaaaatataaaatattttattcatcggcagcgtagctcgtatgtttacatacttatcaagaaaaatcatgaggtccttggcagaatctatcaacacatgacgagtcttttcaaattaagtaaatcatgaagtcctttgcagaaaccatcaacacattctgactctacgttgtcgcttagtaagaagttcctcagtttgctatgattttctctcacttctcttccaacctcattcccatcatccatcacaattttcacagctttgcatacactttcttttgtgaacaacccatcttcttcacctttctcaatttccacaccaacccttaactttctactaaacattcggcaatttatgagttgatcagcacccagatgcggtaagaaaaccaacctacacttattcacaagcgcctctgtcaaagaagcagctccacagtgtgttatgaagcacccgacagaagggtgtcctaaaatcaattgttgttgcacccaaccttcatctacaatccctcttccttgaaccctttctctgaacccttctggaagtgcttcttcaatagactcaaaaccattagggggccttaagtgctgcaagaaatggaaaacctgttagctcaagaccaagcaacaac

SEQ ID NO: 122213 - DNA, 122 bp, Glycine max
  unsure (1)..(122): unsure at all n locations
  Clone ID: PAT_MRT3847_81364C.1
gatatcttagcatagcaatgctanttacgtccttgtanngntggttaagtttgtttcaggagtcagattctgctgntgtggagnatcctggaatnatngtatgttacaggctngtccacagg

SEQ ID NO: 122214 - DNA, 491 bp, Glycine max
  Clone ID: PAT_MRT3847_81365C.1
ttccaaggataggtttcccgatcatcagctgtatgacgctccatccgttcgtttgggggggggggaggggaccacacgcaaacaatagatggagcgtgacagtggcgagcgggtgcgtagagctagagttaacaggtgaaagcccaaacaaaaagtatgatgggataggcagagaagtacgtaatctggcagtgggatatagcaaagggacgttaacgtagccaaaaaataacgaataattagggggctaattagatggggaaaagcgggatatagggtaataaacaatgaacgtcatgtaaagtattagtaagtagtagtagttagagggggaacagagccgtaaaatgggggagcgacgtaacgatggagtaagtgagacaaacgtaccgtgcccaaacgtgcgtatgcgtaccgtcgtgcagaaaaccgcggaagtggcatttaaattacacacaaaatacaacttaatcgtatgcattatacaagaa

SEQ ID NO: 122215 - DNA, 965 bp, Glycine max
  unsure (1)..(965): unsure at all n locations
  Clone ID: PAT_MRT3847_81366C.1
ctcaactcattagcaatggcaacatactattaacacccctcttcctccctctccaccgtcccgcaattaagattcaaatggcatttcacagagcctcaaaggcgaagccaaaatccgcgagatcccgaattctgctcctggcggcagcagtgacagcgattgcgcttctcttgctgttctcctcgcttctttccaccaccgtctcgaaagccaacctcttacaacagcccttcgaaaagtacctctattggggcacccgcatcgactgccccggaaaacactgccgatcttgcgagggcttgggccaccaggaatccagcctccgctgcgccctcgaagaagccctcttcctcggcagaacttttgtgatgccttcggggatgtgtattaatcccattcataacaagaaagggatccttcatcattccactaatgccagttccgaggaactgtgggatgcaagttcttgtgccatggactctttgtatgacacagaacttatgtcagatactgttcctgtgattttggacaattcaaaagagtggtatagggttctatcgactagcatgaagttaggggccagaggagttgcacatgtggaaggagttagccggtttgaacttaaagaaaatagccgctactcagatttgttgctcataaacagaactgcaagccctctttcttggtttatggagtgcaaggatcgaaacaaccgcagtgccataatgttgccatattcatttcttccctcaatggctgcagggaaactaagagatgcagcagaaaagatcaaagcattacttggtgattatgatgccatccatgttcgtcgtggggataaaataaagacccggaaagatagatttggtgtagcgaggagcttgcaccctcaccttgatagagacactcggccagagtttatgctntgtaggatagcaaagtgggtcccacctgggaagaacctt

SEQ ID NO: 122216 - DNA, 847 bp, Glycine max
  Clone ID: PAT_MRT3847_81367C.1
ggtgtccacaacacaagaaaaccaacctaattccgagaagaagaaaaacattcattgtttccataaaaaagaaaatggaacgctctacaaaactcttctcggcggcgttggttctctgcgtggttgtgatggcacaccagacagcagcacaggaactaaaaggaaagaacctaatcaacaaggtttgcacaatcaccccgagcagagacctctgcgttgggatcctctcatcggacccaatcagaagccctgacgcagacctcaaggacttggcagttatctcccttagggttgctgccagaaacgcctccggcatcctcagcgaagccaaaatgttgatcgatgacgacaacctagaccccgacgtccaacaaggtttggctgattgcaaggagacaatcttggacgccgagagccagctcgaggacaccattgcttctttgttggttgattccgacaccgacacacaggtttggctcaaggctgccttggccgccatcgacacctgcgacgcttccattcccggagacgacgacgttctctccgtcaagagtgccatgttccgcaggctgtgcaacattgccattgccatcaccaagcgcttgaacaaacctcttaaattctaaacttgtcgattgtcctttcctttaactcttttttttttttttcatcctgtgtcaatcttaatctgaatatcttccgtaatttcatttacggtattaacagtgcccgagttttttccttttcctttttgtgagtaagtagtttgttacgtgagaaaaggagggctcgcgaatgtcactgcttaagaacacacatgcaaacagcgataatgataggtcatgca

SEQ ID NO: 122217 - DNA, 331 bp, Glycine max
  Clone ID: PAT_MRT3847_81368C.1
agagccgggccaatcttattttatgtttttttttaacctaattggctactgctgggagggttatcatatgcttggtgggtctcaatacatcgagaggggcaatctacaggaaaagcttttctaaaatacattattcatgcatgccccttctctcattttgaaagaaaaaattgtcacaaaacaacagtttaaacattttctctatacaatttcctctttaatgatattttacaaaaaggtaaccctttttaaatgcagactacttagcaaccatgccttggttaacaagaattaaaataacaatcggtgcccacatagggactttattttt

SEQ ID NO: 122218 - DNA, 243 bp, Glycine max
  unsure (1)..(243): unsure at all n locations
  Clone ID: PAT_MRT3847_81369C.1
ctctatattaactgagtactcccaagggggagcctatatcgtctgntgcatanggcagatagtcgaattgatgaagtacggaggctaaaaatggcattcgatgtggcaaaagggatgaactacctgcactctagccatcctaccattgttcaccgtgacctgaaatcccccaatcttttagtggatacaaattggggtgttaagggtctgcactttggcatgtccaggttgaaacatcatact

SEQ ID NO: 122219 - DNA, 308 bp, Glycine max
  Clone ID: PAT_MRT3847_8136C.1
aaaaaaataaaaataaaaattttttgggaaaaaaaaacctttttttttttttaaaccccccacccccccccttttaaacaacttttttttgatacaaagattccaaccggcccttaaaaattacaaccccgggggcacggttaatttccttatttgggcccccaaaaattttgggacccaaacatttccaacaccttaaaagggcataatcaaaatttttggaaaaaataaaaaaccaatggccccaaaaaaaaacggccctttcccttttccacaaggggccaaaacccaattttttccaaagggga

SEQ ID NO: 122220 - DNA, 278 bp, Glycine max
  Clone ID: PAT_MRT3847_81370C.1
ggccgtcgtcgttcctatcttttttttttttgtctttttatgaaaacataattacatggttaacagaccagggagtacttcaaaatacaaatggctaattaaccaactaaaagtaccaactcaatttagaaagtcctaagaaactaactgataatgggattgctttcgttcaacccctgcacaaacttcaaactttaactaagaggtagactcatagtattagagggaaaagtatttatatccgggattaaaacagccctaaattgggcacatgggaa

SEQ ID NO: 122221 - DNA, 555 bp, Glycine max
  Clone ID: PAT_MRT3847_81371C.1
tacggctgcgagaagacgacagaaggggacaacaaggaaggaagaggtcaggtttcttgctcagcttttgtgtttcctctattcccattatccttctatgtttgagcataaattcaggatcttgttctttctttcttgatactacaacccgtgttcttccaaaaacaactgtagttttctgccttagcccatgttggggtatttgtctagatacccactaattcattgctgagggatattcaactttcacctttatcttgaatcttttattataattaacttgaggattttcttcctcttttctttgtttttttctttctttcattcttttctaaaatgagaaatgcacatgtgatacatcaaccataagatgcacttgaattcagggcttcaagctaagaacctcctacttgtggttgcttttttttttttttttaaattatcttcatccatcttgaatttctcttgtgcctgataatcctgttttgactcaataacatcatgaagagcacccagggcattagtcatgccatatttggtatctttatactctct

SEQ ID NO: 122222 - DNA, 385 bp, Glycine max
  Clone ID: PAT_MRT3847_81372C.1
gttaatacgtatcatactttgctgtatttattaaacctagcacggccgcctgtaattcatgagtgtaaactagtgcgtggcgatacccgttgactactggtgactagctttattaccaacttcgaacattcggcttggctaccccgagagtgacatgctttgaacccatgctcaactttggcgtcttaattcatgtgattactatggggcgcgttcccacacacgccgttattattgttatggaactgtgcacgttgatttgacagtgcagtcacgactgtagcccccgggggaacatgaggcagcctgtgcgaggattgtgtcgatgcaccaagctgataggatcgtgcgctgatagcccttactgaccccttttattgctgag

SEQ ID NO: 122223 - DNA, 516 bp, Glycine max
  Clone ID: PAT_MRT3847_81373C.1
ggctcgaggctagaaaaccgtatttcaggaccttttcggccattgctgagaaatatggtccaattttcattctcaaattgggttgccaccccaccttagtcgtgaatagcagggaaattgccaaggagtgcctgacaactaatgactaaggttttgcctcaaggcctatcacatcagcagggaaaatcttaggttacaacaatgcagttaccggtttttccccttatgggaagtattggcgcgaaattagaaaaatggccatccttgagatcctctcaagctataagcttgaaaagctaaagcatgtgagagacactgaaacattgtctcttgtcaaagacctgtgctcatcaatatcatgtccaaagaacgtgaatggctcaacaactcacggcctataagcaatttattggagcacatgtccttcaatataattgtgaggatgatagctgggaagagatttggaggggacacagttaatcaagaagacaatgaggcatggaagctaagatacgc

SEQ ID NO: 122224 - DNA, 118 bp, Glycine max
  unsure (1)..(118): unsure at all n locations
  Clone ID: PAT_MRT3847_81374C.1
aactaagaaggnttacaacaagatctcctccagcaanaactccancaaaaactgctactgaattgcaagtaggcgatgancccaaaatggcccatataaagagggtatgagcacttgc

SEQ ID NO: 122225 - DNA, 1708 bp, Glycine max
  unsure (1)..(1708): unsure at all n locations
  Clone ID: PAT_MRT3847_81375C.1
ctcgagccgaatcggctcgagtacggctgcgagaagacgacagaagggggtcattcaattaacttatttgaaagaggcagtagtatctcttatcatttaaataacatatttgaaggttgcaatagtgcttggttggaaaaaatttgtttatatatctttctgactcaaagtgtaagtgctgctccgacaacagaggtgaaacaaaccaactacccacctatggcggcctctgttgtagtgtctacctctctgtctgtgtgtttcaactatggctatcatcgtcgtccatccatttccgctctctcttgtcattcgaattccatcaccaaaacaaacctaaaactcagttcgcaatgtttctccaactcgaattcggtagccccgatttattgccgcaagtttgttgctcgcacttcaattggagaaaacgagagcgagagcgagaaggagttagggttcgtgggggaggactctgcggtgtttgaattgggcaaacagaaagtatcttcgtggatttatttcaccgctattttgggagtcgttctctatgttcttaacgtcgcatggattgataattcaactggctacggcaaagcttttattgacgccgtttcaacgctttccgattctagcgaggtggtaatgttgatcctaattctcatatttgctggtgtccatagtggcttagctagcttccggaacactggtgagaaactcattggagaaagacctttccgtgtactttttgcagggatatcactacctttggctgtcagtactgttgtgtattttattaaccacagatatgatggacttcaactctggcagctccaggatgcccctgggcttcatcaacttctgtggctttcaaatttcatttctttctttttcctatatccttcaactttcaatcttttagaggttgcagctgttgacaagcctaaattgcatctatgggaaactgggatcataagaataaccaggcatccacagatggttgggcaggttatctggtgtcttgctcatacgatttggatcggaaattccgtggctgttgcagcttcaattgggtgtaattgcacatcatctatttggtgtctggaatggagacaggcgactggctataagatatggggaggattttgaattattcaagagtcgaacaagtgttgtcccttttgcagcaatccttgatggccgacaaaagctacctaaagatttctacaaggagtttattcgactgccatacttgacagttactgcactaacgttaggtgcttactttgcacacccgcttatgcaggctgctagtttcaaccttcattggtaggttgaacacaacacatcctgtctcttttctgtaaaatctactgtttgtccatagacagagatgaagagattaaagaaaagaaaataatagaaagcaataggttattatcacaaagttgcacctggtgttttggatgcgcatgttatatcagttttttacagcagctgcaactttgtgacacccacacattacattcttcaattatacggagtaaatgtacatgttgttagcagtgcttactaaagtgctcctttaacatttctccccaaaatgtattaatattctcaaagtgaaatcagaaaatatctatgattgattntctgaaatcggtttttttatcctacgtagtaagtgcattagttagtgaactaaaaatat

SEQ ID NO: 122226 - DNA, 385 bp, Glycine max
  unsure (1)..(385): unsure at all n locations
  Clone ID: PAT_MRT3847_81376C.1
ttttttttttttttaactcttaatttttaattnnccaaaaacaaacattccaggggaggggggaaaagcatttttgtttacaaactgaaggtactctctgttaaaaaacagaaatggaaaattaaaggcctttgacaaattttttccctaaatttaaaccgcgttacttttggttggcatatttcattactcgccccccatggctattattgtttgatagttctataaatcaaaacaactttttcaactaaaaaccttttacttgccaaacccaaaactttgttaaaacataaaacattgccccgctttttatagggatccaaaatcaccaattcaaatcctttctctgtaaatctggccccaatggaatcttttactccctttt

SEQ ID NO: 122227 - DNA, 560 bp, Glycine max
  Clone ID: PAT_MRT3847_81377C.1
attctatttcacctgcatttgtatactcaccatcacatcaaacttgactaattccaactgacaagcatctactatactcaattatacctaataaatattcttcattgacttcttatcaatttaaggcatcattcgtgaatgtacactgctttgtttcttgtgagcttggactccctacttactagtgatgggatgctctagatcttcaatacagttaactgtctcgataccttaaacatagctcttgataagcgtctgttggggactgtgttgccgtactaagaaaactagctttgatcgctttatgtgcaagactataattatccaagagcatcacaagagcatgcagctttatcatctcaccacaggactggttgtcgtttctctgggcgcctcttgcgtgatactaaaatatatactagatgtactgatactcatagaactgctcgtgctccaatctctttaaatggtaccttggctactactcacagatcacgtacgagttaagaaatttgcagtgacaagaataatactcagcttgaattctacaaagtctaatg

SEQ ID NO: 122228 - DNA, 370 bp, Glycine max
  Clone ID: PAT_MRT3847_81378C.1
gcgaacaaagagtctaaacgaacacagaacgcgttgtgaagaatcgccgaagagggacaagtcatctgtgtccacagccgtacacgactggaaggaacatctcacgaagggagaagagtccacgacattgactgtggtggattttactgcgtcttggtgcggtccatgccgtttcactgccccaattcgtgcagagtgtgcaaggtagttgccaaatgtcatcttcgacaaggtcgatgtgtgatgaattggagactgtgtacaacgagtgcggaactgaggctatgccaaccttcctgttcgtgtacaacggcaagctggtgaataatgttctaggtgccaagtcagaggagcttcaattgactctaac

SEQ ID NO: 122229 - DNA, 281 bp, Glycine max
  Clone ID: PAT_MRT3847_81379C.1
gttcatagcaggcacagaggcgatgcaaacacataacaaatggtgtagatgtgctcgcttagcatctgattatgatggtgcaccaaccatggctgtaaatgtgtcgaagtgccttgtgatgatcgtggacgaggaggacaatgctgcaccaggagttgatctttggtgcagctgccagctactgatatatcatgctgatggttataatgttgggtgtcatgaggctgggaataatcatatctgtggtgctgtttctgattatgacgatctcggggctgaca

SEQ ID NO: 122230 - DNA, 310 bp, Glycine max
  Clone ID: PAT_MRT3847_8137C.1
gggtaccagtggtaccaaatcagtaaaaagaaatcaagttacagataaaggaaggaccctaagcacaatcctttctgaagataactcgatactggtactggcgtactgctaagtagtatcagtttacatagccctttgatcccacagaccacaccacatttccctttctttctattaagacacagaacccatgagccaacaacatgtaaaagttttactgggatacaagtgtaaatgtaaacgtaaggtaaagtttcccaatgaataaaagttagaaagttaaatctcagacaaaaacagacctgaacat

SEQ ID NO: 122231 - DNA, 394 bp, Glycine max
  unsure (1)..(394): unsure at all n locations
  Clone ID: PAT_MRT3847_81380C.1
aaaaannttnaaatatgatataattggtggtggttnanattnttnagaaaattttnntgaaaaggaagatnaagaaaaannnaaaaagattgatgnnagattgagaaaaagaatagatnntnaataaaatgaggttnagggtnagatggaaanaaatttgttnaaattgtntnttgatgatgttgaaatttttaaaggttnnatgttggatnttaaaatntntnaatntaaaattgtacttnnnaagaanaaagttggaggaaanattntgngtagtgatntattggnaaattttttgaaagagggnaattttagagnaagtgttgatttgnagngnantnatngtattaaaggaatgattaaaatggtggnnanagttggtattnntgagaaa

SEQ ID NO: 122232 - DNA, 411 bp, Glycine max
  Clone ID: PAT_MRT3847_81381C.1
ctagctatctgatcgactgtccaaggtcctgcaccctcaatatatgagagaatccctttacttaagtggtccacaagtttgccttgggtgcgatcggtaagtttgtgtgggtgtgaaatatcctccaaaataagagattaggctccgactggggctatggcatggcacgcattgggctgtacgtaccgagcttgtacttggtaaaattgcttagaccattacttatctgtgggtcttccggttcgtaggtttgctcttccacttcagggcatatttctgttagactcactgccaggaactaaggccaacggatatacgatattttacttcaatagcaatctcttactcagcgttactggaaacacaaacccaggacgagatgtcattcgcccgcgatccttatcatgcgac

SEQ ID NO: 122233 - DNA, 2017 bp, Glycine max
  Clone ID: PAT_MRT3847_81382C.1
ccacgcgtccgcatgacatttgatatgactgacattttgttttgttgtcatgaatttctttcttgtctgtctcaccataattacacccaacaagcattgcttaaataatggtttttacattttcagattgttgataaactccattggtatgttcagaatggtgatacaattgtggacttctgttgtggtgctaatgactttagcattcttatgaagaaaaagcttgaagagactgggagatgttcatacaaaaacttcgatttacttccaacaaagaatgattttaattttgagatgagagattggatgactgtccaaacaaaggagttgcctgcagggtcacagttgatcatgggcctcaaacccccccctttggacttaaggcagctttggctaacaagtttatagataaacctctcacgtttagactgaagctcctgattctcacagtaccaccagaaacggagaggctagatgaaaaacggtcgccttatgatcttgtctgggacgataagaagtttctattgggcaagtcattttatctaccgggatcagttgatgcaaacgacaggcagatagatcagtggaatgtaaagccacccccgctctacctttggagtcgtcctgattggactgataagcataaggccatagctcggaagcatggtcactttatcagccagcgggggctgttaagaattgaaagctttgataaagaaaaatcaccggccagtcatactttggatgatagttctggtttcgatagcatgccaggtcatgatatcttgaatttgactgatgcacctatcaatgagggccagacgggatgctcaccacatggaaatgttgatcgagagagtcaagagagacagaaatatatggtgagaaaggctgataagacctcatggaagaggaaacgaagtgaggaaaacgatggaagaagactaggtgtgacctcaccacccaattcaattgatgggagatcctcagttgaaagttttcagctcagacctgacatgccacctcctgattatgagcttggtgataaaagttataggcatttggagcccacctcttaattacgaatgggggggattagagcagcctatagcgggacccaaaattggccaagtgttgccaatcccctttatgattctgggattacagatgtaggtgaacaccatagcagccttccaagagacatcgccaatagcatcggatatagaccctatgtcagggaggatgagaactaccttagggaattagagacaaggcaacagactcgccattatggtattcagaatcctaattctgtgatgagtaattatctatctgtgcatgatcctgctaatagccaccacatggggccaagttatccagcccttgctttagcatctgagccttatgtgatgaatacaccagccatgcagcgatatgcacctcgcctagacgaattaaaccatgcaaggatggatcctttggggtctcgcctagacgaattaaaccatgcaaggatggatcctttggggtctcgcctagacgaacctgctatagttggtagaaacggtgcttttgaaagtagtgccctcccacctggatatgggagtaggatgccaggttttgcagctggttctcaccatatgtattcacgccagaattcagcagacccgattcaatgggtagtttgaatgtccatttttttgttctcctcttctacttttgcataaaaatactgtatgccttaatctgcagaaatcataagggtttttttttttaggtgtatgctgtatgctaaatcttcggtctctatttccttcctaaagaacatttaggttttttcattttttggtgatctgtatatgcaaagaccttggagtgggtagagacgtatgcaccacccattaagtatatgataaatcagagttcgctatttgaagaatgaggctttcactcctcatctattcaattagacaccttaacattccctttaaatgtagagtaagacattcattctaac

SEQ ID NO: 122234 - DNA, 395 bp, Glycine max
  Clone ID: PAT_MRT3847_81383C.1
gaatgtataaatttgtgttaagatccgattattgattatttgagctgttagtgattcatctacattaaaacttggcaaattatcttacaatttatgatacttttttttttacgtctctagagattgactaagtgcaacattgtttacccaaaagaccataattttcagcttattttgaatacttaagtatgtaatcttttttttaattagccaaaaagacctgaaaacataattcaatgtttttcttgtattttttttaattttccgttttctagcgtgacgtgaaaatttatttacaagaaaactttgtagataagcatataaaacctacctattggctgaaacttttaatcggtaagtctttaaatatgctaactaatatatacatttaaaat

SEQ ID NO: 122235 - DNA, 312 bp, Glycine max
  Clone ID: PAT_MRT3847_81384C.1
cacgaatcccacgccactcgcaattacatttcggagttagaatctctgcttacccctttcgggcctcttccgaatggataatgagtcgatcgacccatctcgcgcttccaatgacagccgctaccgacgacaataacaaccctgcacaggataaccctaacaaaaccctagaccccgccgaaccggatcctatccctgccaccgaggacgaggccgacgacgacactaaggactacgacgcgcaaactatccctccgacctgattgtgaaacgacgcttcgctctgcgacaatcagaagaaaatgcgccgag

SEQ ID NO: 122236 - DNA, 361 bp, Glycine max
  unsure (1)..(361): unsure at all n locations
  Clone ID: PAT_MRT3847_81385C.1
aattcggctcgagcaacagtcaccggagcagagagagataaaagaagaaaaacaaaaaagaaaagaaaaaaagaaaacccttgcttgcattgcattgcactgcagcacctcctccttgtgctccccaacccaccccctcatgccttgtcgccgaccagacccgacccgttgagctcccgcggaaactttgcccaaaagggtctccgaattcgcccatggccctcgatttccgaccttagagacccttcaaggtttcgccttttcttcttcgctttttcccccttttcgggacctcaatntctganaccactgcaactgagaaagattttctgataactcgtgtctcggcaacatgtacgtg

SEQ ID NO: 122237 - DNA, 269 bp, Glycine max
  Clone ID: PAT_MRT3847_81386C.1
agtctaggccttaaatttgttcgcgagcatgcgactttgagggtaggaacacgacactgtcacctacaaaacttacgctccaattctcttataaacagaattatggtgttatatataacactgagttacatcaatgtctatttaaagagtatgtacattcttacaataacatttaatactatttctattcatatatcttataccaatcattctatccttatactgttatcataaataaaatatatttactatttataccattttttatt

SEQ ID NO: 122238 - DNA, 270 bp, Glycine max
  unsure (1)..(270): unsure at all n locations
  Clone ID: PAT_MRT3847_81387C.1
cggctctccagcntcgtcgtcgtcgtccgttgtcgttcttgangncttacagcntggatgatttgggggagnaattgaggatgttnaggccgnaggnaatgagaaatgattggttttctgtgagggagttgagtgagaggttagaaggttncnnnnnnnnnnnnnnnnnnnnnnnnnnnnnnnnncccattccaatacccaatacggtttcaataaanctgtgctagatcatgtcagaggatccctcgctcagttggatcaaaatcaant

SEQ ID NO: 122239 - DNA, 367 bp, Glycine max
  Clone ID: PAT_MRT3847_81388C.1
ggaggaggcggtcgcggtcggcgagttcggcgtagtactcgacggtgcccttctccggcggggcggggattccggaggcggtggagtgggaccacttcctgacaggctccgagtggcggtggtgcatcgtgaaggtgtagacgtggccgtggcagagggagaggaataaggacgcaatgatgaagacgaaactgagcattttcttggtttcgctctgcctctctacgctaaggcactcccaagaagaaactcagcatcgaagtggggaagaagcatggatcacggagtggtggagcctagggtttggaagagagaaagagagaggatcttggagtgatgtgattgagatcttgaatcgaaacagtgg

SEQ ID NO: 122240 - DNA, 162 bp, Glycine max
  Clone ID: PAT_MRT3847_81389C.1
atgcatgctcgtgcctctagggttatcatttctccgttttattttctctcgcacttttcaagaatcgtaagttatgggaaagtcttaccccatcgtgagcgccgcccacgacactgccagtgacaaggcgagaatatcgccaagacgtctacgctctcgtga

SEQ ID NO: 122241 - DNA, 512 bp, Glycine max
  Clone ID: PAT_MRT3847_8138C.1
gtgggcggctcctgtggacagggctagtttatggccacaacttcattatgttgcatgtaataatctggaaatgcaagaagcttatctagtcaatctcgtaaatgtgttacgagaattgtatttgcacagtccagaggaagctcgccaattgagaaggaaagctctctctcgtattgaatggctgcaaaaagctgatgtgcctaccatagcacagattgaagagttccactcgatgcagaggatgatgaatgctcctgattcaaatgataatattgatctactgatgagcattgatttgttgggcttacaaggagcaggtaaagcttttccaaacaagattgttattaatgataagcttgtgttggctaacacacaagaattctttgatggaaatcttacagtggattcttggataccaatttttgcgaattgtatatatcctgtaagtcaaataccttcagaagctagccgtgtaaatgatacatgaggtagcggacgtggtggtttaccca

SEQ ID NO: 122242 - DNA, 202 bp, Glycine max
  Clone ID: PAT_MRT3847_81390C.1
gagctatggaccaattttggattttccttggccttttaatggttaaaccttatttttgaagaaatcttcgagggtgatttgattaatagatgtattttacaagccccaacccttttaaaggttatataccataatggtttattggttgaacttaccaagaaatacacttgagggccaaaacttattaagacttggattacaa

SEQ ID NO: 122243 - DNA, 162 bp, Glycine max
  Clone ID: PAT_MRT3847_81391C.1
taaaaaaatgaaaggataatctgattggaaaacctttctgttttataacaagatcctaaacatttagcctgtacgaaaccttaaaacaatcccaaatgtgacaaagtgaccttatttataatcatatctagtttcttttatcgagccgaatcggcttgagct

SEQ ID NO: 122244 - DNA, 277 bp, Glycine max
  Clone ID: PAT_MRT3847_81392C.1
ggaagacaaaaaccagtttattttacatattgggaacggtacataaacccttcaggatgaaagggcattgccataaaaactttctacaaacaaaaaagtccaaacctttttgggcggcctccatataaaaaaccccccctattagatttaagccccccttagttttccaaaggccatttttaggggccctcaaagaagttgaccccaggggttttaaaccaaaaattgccttggatgaattgggctaccgggaacttgctggccccaattgcagttt

SEQ ID NO: 122245 - DNA, 516 bp, Glycine max
  Clone ID: PAT_MRT3847_81393C.1
gaggaataacctaaaatcttatcatctcaatgtttaaaaataaattaatttccctgtaataagtaaatatgttatgctatgaaaagattcaagtggactactactactacctttacccctcccaagacagtcacatttctacaaaagtcacagcatattgcctcttgagtgcagaagcacaacatagtgaagtcaaaaaaataaacacatctcatgatgcacttccaccttcatattctctcctaatgatttcaaacacaagttcattccatgtatcaacggggcctggcatgcaccagtgcaagcaatcctgtggtggtggccttccatcaggtccacgtttcgtaatcttattgggatcaggactcctgtaaggaccagggtgaccatcatgcctgtattgaaaggcttcagtgatatccattagcctcaactttgatccatttgttgccctttccactgcacggttaaagcccgtcacctgttgctcatgcattatatttcgtgtgcacattt

SEQ ID NO: 122246 - DNA, 445 bp, Glycine max
  unsure (1)..(445): unsure at all n locations
  Clone ID: PAT_MRT3847_81394C.1
cgctttctctccctctagtggaggatggtgtgggtctggatgtaagatgccctcaacgacgttgacaaggaggaggacatcatcgttgagtcgagcagcagtggaaacctcgttgtagaagtcgatgtggtcgggcagtggggaaccttcttgctcttcttgccctttagtggtgccttctcggtccatgaccgtgacattgtaggcggcacgaagggcgggaatgacagctcgtggatggcaatcggcttcaccttcgacgtcttggaatagtcgaactgaaactcgaacggcgcggtggggagtaggtacaacacgccggaatccccaattacgatgccaccatctcggggaactagccggtggtacttggagcggcggtggtgtttgagggtttttggcggctgtggtacttggaactggcctgtggttcgggntttttgtg

SEQ ID NO: 122247 - DNA, 780 bp, Glycine max
  Clone ID: PAT_MRT3847_81395C.1
ccacgcgtccggtggttagctgcacaacatcatgaatccctactaaggcagaaagctagagtgagatggataaaagaaggcgactgtaattctcgatacttccacctattggtcaatgcaagtcgtagaaataacacagtgagtggtgtttggattgatggtgcatggattgaggaaccaaagaaggtgaaggaggctgccagatcatttttttataacagattccgagaagagaaccagcaaagaccccgtcttgatggcattcgctttcagattatcaatcagcatcacaatgtcatgttatcgggcaggtttgaggaggatgaaataaaggaggcagtgtggggctgcgggagtgagaaaagcccgggaccggatgaaattaattttaaatttatcaagagattctggaccactttaaaaccgaacattctgagatttttcgatgagttctatgttaacgacataacggaattttcccaaggggaagcaatgcttcgttcatagtcctaatcccaaaggtggctaatccacaacatttggaggagtatagaccaatttcactcattggctgcatgtacaagatcgtggccaaaatattggcaaataggatgaagaagatcatgccagttataatagatgagagacaatctgctttcatagagggtagacatttgcttcaaagtgcacttatagcaaatgaagtggtggaagaggctagaaagagtcagaagccgtgcattgtcttcaaagttgattatgagaaaggcctacgattcg

SEQ ID NO: 122248 - DNA, 441 bp, Glycine max
  unsure (1)..(441): unsure at all n locations
  Clone ID: PAT_MRT3847_81396C.1
cgctgtagctatatgcgcaaatctagaaaaacatacgttttgtttggtagttgggtttaatagttcacactaatcttttagctgagtgaagagaacacaagagccttaaggtactctgatgtttttatcacatgatcatagggtcattttgcaatctcactttttaaaacaaagtttggtaattctaatttttaatacctttttatttttgaatatcttattagacaccctttcttcttacattctttattattggaatatgttcaagtttgtcgtactcgggataagttttgttgatgccatagtgtcacctatcaagttctaattgtcttcagttatcgtagtttacagccttttgttttccttcaatcagaagatcaagcccacttttgtgtacctcattcttattattgtatttgntatcaatcattggacaggaga

SEQ ID NO: 122249 - DNA, 493 bp, Glycine max
  unsure (1)..(493): unsure at all n locations
  Clone ID: PAT_MRT3847_81397C.1
ggctcgagataaaacattgtgcatcttcttcttcttcttcttctctttctctctctacctttgagtttcttccatttcatcacttccatgctcgcctagggtttctcgctctctgttcctcatctggattgcttttatttttcctgccctgtggattccgtttgctgaagcaccgtttgttcaatgcgcatcgtttcttcgccttcgcttgcttgcaggtttcaatgtcacgtagctggtaaagaggtggaaataccattcggacttaaaatttgatttgatcgaaatgatggtttcgattctgaacgttggattgcacaggttcactctccttgagttgtgagtttatgggtgtttgatacacctgcatgagaaataaaagtagaatcagactttctgcattgaagaaatcaaactttnnttctgttaccttctacccaccaccaaagtgagtttaagtggttaccaaatttattctcttaatgggttcatt

SEQ ID NO: 122250 - DNA, 1029 bp, Glycine max
  Clone ID: PAT_MRT3847_81398C.1
actacaactgagttgtacaatgtctgtatcttcccaacctcagatattcgtggagaagcagttgactttgataatcttttcatggcagccatttctgatgccttagatatacataggtctcttaatgcctgcttcaaagtaacaggctcagaaggtccaatccgtggggaccgagaagcacccactgtagttggttttttgaatgcacttttcatcttagggcttgtaccatcttgtaaaatgcctaaatcccttgatgaagatttaagagtaattgattcaaacagcttattaatatcatcatctagattacccttatatcccagtttctgcacaggatgcttctgatttttctcatccaagctatatccagaattggactgacatatacctgcatgtttctctgtatttaggtcttcccttacttcgacaatttcacaagtgccagagaatgaacccattagagataaacagtagcactcacttttgtgcggtagaagtaacagaaaaagtctattctactttatttctcatgcagtgtatcaaacaccataaactcacaactcaaggagagtgaacctgtgcaatccaacgttcagaatcgaaaccatcatttcgatcaaatcaaattttaagtccgaatggtatttccacctctttaccagctacgtgacattgaaacttgtaggacaagtgtcaactgcaaggaacacaaatcaaattgcacatggatgatggaaccacaacatactgcccaaaaaatctaatttctattcctttccaaaattctaacaattcggctctccctgcaagcaagcgaaggcgaagaaacgatgcgcattgaacaaacggtgcttcagcaaacggaatccacagggcaggaaaaataaaagcaatccagatgaggaacagagagcgagaaaccctaggcgagcatggaagtgatgaaatggaagaaactcaaaggtagagagagaaagagaagaagaagaagaagatgcacaatgttttattttccgaacgcgtggg

SEQ ID NO: 122251 - DNA, 161 bp, Glycine max
  Clone ID: PAT_MRT3847_81399C.1
agcatttgaagttcaaaaacttgtatcatacttaccagtctttcttgacatttctcttcccatgtttcaacacatacaacaatgggttttcgtcttcctggtttcagaaaggcgtccttttcttcaaaccaagcatcttctaaaagtgaagatgtcccaaa

SEQ ID NO: 122252 - DNA, 540 bp, Glycine max
  Clone ID: PAT_MRT3847_8139C.1
atttgaggtaattgtttctgcaacgcatgcgtgacacccatacagttgcgtcttgtgtctccattccaattccatgatctcttccttcctcacctttgacatccacaattaaggcttcaattttcatgctcagacaacccttctctttagttttgtgagagtcatgattttctagccataaagttgtatgtaaggtgcccaataagggtcaagggattgaattggacatcttggccctgcaattgttcgtatcatcgaaagatatttttttgggtatcatttgtatgatagtgacaaatgggggcgtcttcggacaacgtaactgggtttgttttggctgtctgttccagcgttttcattggctctagcttcataataaaaaagatgggccttaaaaaggctggtgccacagggaaaagagcaggcgcgggaggacatgcatacctatatgaaccttggtggtggtttggaatgatctctatgattgttggggaagtagccaattttgcagcttatgcatttgctcctgcactacttgta

SEQ ID NO: 122253 - DNA, 928 bp, Glycine max
  Clone ID: PAT_MRT3847_813C.1
ggctcgagagacaacttgaggtaccaagccatgaacattgtagctgcgaggctaggccgagctgaaccgcctttgaggaaggaggtggtggagtacatgttggatgttgattcccatatgtggagcatgagaagaagcaaggctaatttcttccgaatcatgtcccttttctctggtatgatcacaatgggaaagtggttcagtgatgtttgcctttggaagaaccatgttacatcagtcctggttcacattcttttcctcatactgatatggtacccggaattgatcctgccaaccgtgtttctctatatgttcttgattggtctgtggaactataggttccggcctagacacccgcctcacatggatactaaactctcgtgggcagaagccgttcaccccgacgaactcgatgaagagtttgacacgtttccgacttctagatcacaggatgttgtgagaatgaggtatgacaggcttagaactgtggcaggtaggattcagacagttgttggggacatagctacacaaggggagaggtttcagtctctactgagttggagagaccccagagcaaccagcctctttgtagtgtttagcttctgtgctgctgtggttctctatgcaactccattcagagtggtggctctggtgacaggtttatactttttgcggcatccaaagtttaggagtaagatgccttcagtaccaagtaatttcttcaagaggctcccagctagaacagatagtttattgtgatcttgttttttcatagttttagtttgttatacatagttacatacttttctgtttattatcatttccttctttaatatccttgttacttccacactgttgtagtcatttggatagtgtaccaatgaacttatcctttaagtaccatattatcagaattgattattaaatc

SEQ ID NO: 122254 - DNA, 372 bp, Glycine max
  Clone ID: PAT_MRT3847_81400C.1
ccttttcttctcttcactcttcatttcctgtcactactctccttcttctttgatctatatattctgccacaacagcacagcacacaataactaaaccacaacatttgaagttagttacttactttcttttgaaactttgattgtgtcaaaatgacgcagcagaatgtggtagtgtctgatactaaatccggagtttccttaacggtttttccaacaacaacacaaaagccaccggcggcgccaggagggtacatttccattccgaggaggagggttttgaagaaccttgaaatcaatggaggccaaagaatcaatgcatgggttgagtccatgagagcctcctctcctacccatcataaatacacacctttg

SEQ ID NO: 122255 - DNA, 466 bp, Glycine max
  unsure (1)..(466): unsure at all n locations
  Clone ID: PAT_MRT3847_81401C.1
gcatttgaaaggacacaccaaggaccccaaaangggggccccccgacgcncgncaaagggaaaaaacgccgntgatgacttccctgctcgcgaggcagatgaaggggaagccatactggatgctctgcctatttttttgtaaattatttactgctcaacggccggtgtctatctccaatctgatctattacctcagacagagactgatggcatggatgctaacagcatacacaagggagagctttacacagagagtttgctacaagcgatgggtgttaattggacatctataaggtcagtctacatctatggacccttgaactacaaccctgttgaagaatggcttcttccataaattggaaagagggacgcccgattcctatcccccggttcaagaatacagataacccaacttggccattgtaatgatttggcaaaagcttttatccaggttcttggtaatgaa

SEQ ID NO: 122256 - DNA, 346 bp, Glycine max
  Clone ID: PAT_MRT3847_81402C.1
cacgcaaccgtacagcagcgaaagggacactgaaggggaccttactagctattagctcaagatagaaatacttctaataccccgttgtcctagcgcttcactagtgtcatccaaaatagcatcaaaagtaccgacaatcagttacaaggaaagtcaagactctacagtgacattcgaatccttaaagtcaaagttgccgacgttcaggtcccgatcgctacattaggctgaagtcccaaatacgctgcaataccactacgttgacaagtcctcaaccattacacactgatcagcaccatggtcataatcaaaagacttccgatccctatgattatcatgatcatgt

SEQ ID NO: 122257 - DNA, 256 bp, Glycine max
  unsure (1)..(256): unsure at all n locations
  Clone ID: PAT_MRT3847_81403C.1
gggaaaaaggaaggcaaaggcgaagcctcctccaaagaagcaaatggataanctcaataccgtcttcanctgccctttctgcaatcatagcagcagcgtcgaatgccgccttaacataaagaacttaataagaaaaactatttgcaggatataccaaaaaanctttagcactaccatcacagctttatcagagccaatagacatatacagtaagtaaattaataaatatgaactaataaaccacccaaacaataat

SEQ ID NO: 122258 - DNA, 512 bp, Glycine max
  Clone ID: PAT_MRT3847_81404C.1
ggctcgagaacaaatgccatttgcatgagatagatagattgaacgaaaccgaatcaatgatggggtgggtggcgaattgggggacgggcgtcgccgacgccatatggatccagtggagctgtggcgcacacgtacaccttcagcatttactgctgcgtgctcaagtccacgcagggctactaccaattcacgctcaacaccgtttatgtcttaaaagacatcggctgccaactatcggacgttatgctccggatcttctctactacgccgccgctctctacacaacccaccgcgcctgccgcttcaagagcatatggacctcattaagcgggacctgggacgaagtcgcggtcggtaccagccaaagctgcgctggctgtatctttatatgagccttcgtcgaggacctagacagcactacagcagtgccgatcatgtgcttttttccgttgcgtgtgggcaacggactgaccttcttgaacaccacttatgttttaaacgacttgcgcttt

SEQ ID NO: 122259 - DNA, 214 bp, Glycine max
  Clone ID: PAT_MRT3847_81405C.1
ccatgtgatttagcatatggctgctcagttgacatcactgccataagggctctcaccgtaaagtacacgggagcagaggaaccagcaaatgcagtcaacgctgatctactagtgaatcgtcgatatgcacgctcgtaggttacggtgagacaaccataggaagaggtgtcaactgagcagccagtgctcgagcataagaatgtggggttggact

SEQ ID NO: 122260 - DNA, 446 bp, Glycine max
  Clone ID: PAT_MRT3847_81406C.1
ggcaatggcaatggcagggaggagaatgatgtggcgggggagagctgccgccaccgccagtccccgaggcggtcgtctcagggaaggagaaggactccaagtagggaaagagaccaatccaatggcagagaaaggaaagtgagtagatctcctggtagaagatcatctgacaccaccaatactacaaatgcaagcaacaacaacaacaacacaagttctaggcctgggaaaatggtgtctgttccagccactgtttcatctttggttatggataagagcaacagctgtggtggagattctggcaccaagaagatcactactgttaagaggaatagtggtgatgctggttcaaagggtgctgcatcaccacgtgctcaatctcctgctagagttaatggaaatgtggggagggataaaatgttgaatgagaatctggaacagcagca

SEQ ID NO: 122261 - DNA, 1835 bp, Glycine max
  Clone ID: PAT_MRT3847_81407C.1
cttggacatgcttcagttccattggtatttaatcgctcggtgttgtggttttttatctactaactatcacggttcaagcagcacaattcttcaaattttagggagaattagaatcataaccattaacattatccatgacaaaatcatccattttgcttctttactgaaatagtgaaaaagagtacttaatttccattatctagctaaactacttattaaaataattctgattctctgaagttaaggattcttgttacaattctcctctatctctaatggatttatctattttttttattctatttttttttttttttttttttctatcattcaaattcattttatttatatattaatattatatccaaatgaaataaaaagatattaaaagatactaattataagaatttaaagggaaattataaagttattaaatgattaatcaatttttttctacctgttcctgaagtaaaaagagttctatttgttctttatccgcttcctccaaatcttcttcttcttcttcttctcccgctcgcgccttctgtctcaatctcaatccaacagaaatggcaacgatagttagccaccaccaccgcctattctccgccgccacgcgcttcaattctactggcagagactcgcggcggcaaaggagcggcgcaaactcggtccggtgcgctgacgtaagcacggccacgagcgagaatcggcgagtgacggtgagtaacaggaacgattcgctggagatatgccgcgtgctgaacggaatgtggcagaccagcggcggatggggccgaatcgaccgagacgacgccgtcgaggccatgctccgctacgccgacgccggcctaactaccttcgacatggccgatcactatggacctgctgaagatctatatgggattttcattaatcgagttcgtcgagagcgtcctgctgaattattggaacaggtcagaggtctcactaagtgggttcctccgccagttaagatgactagtagctatgtaagagacagcatcaatgtttcaaggaagagaatggatgtggaatccttggacatgcttcagtttcattggtgggattactcgaatccaggctacctggatgcactaaaacacctaacagatttgaaagaagaaggtaaaatcaagactgtggctctgacaaattttgatacggagagattacaaattattcttgaaaatgaggttcctgttgtaagcaatcaggtgcaacattcccttgttgatatgcgtccccaacagagaatggcagagctttgtcagcatacaggagtcaaacttataacgtatggaacagtaatgggtggtctgttgtctgagaagttccttgacaccaacatagctattccttttgctggtcctgcaataaacactccctccctccaaaagtacaaaaggatggtagatgcttggggaggatggagtttgttccagggactgcttcggactcttaaacaagtagcttctaaacatggcgtatcgatcgcaactgttgctgtgaagtatatactagatcagcctgcagtagcaggatcaatggttggtgtcagacttggctttgcagaacatattcaagataccaatgctatcttttcacttgttctcgatgaaaatgacgtgaacagcataagaaaagccacagcgaaaggaaagggtctgcttaagggattggtgattgtggagatgatacaggcgtgcctgagtcatgttggcttatcaccctgtgaagtgctttaatttatataagaacaggggattgaaaaaaaaggagggggacaccagaaaaagtgttcaagctcaattttt

SEQ ID NO: 122262 - DNA, 595 bp, Glycine max
  Clone ID: PAT_MRT3847_81408C.1
cattcgaattcattttatttatatattaatattatattcaaaggaaataaaaagattttaaaagatcctaattataaaaatttgaaagggaaattataaagttattaaaggattaagcaatttttttctactggtccctgtagaaaaaagagttccatctgttcttgaatagcttccttcaaaaggacttctgcttccccagggaatgtctgggtaaaaaatatgatttctttgaatggaggtttattcgggtttaagtaagcacgtaactcaacaagaaatttccttacctgcccaatttctaaggaatcaagataaccattcgttccagtataaatagttattatctgttcttccacggaaagaggagctgattgggattgtttaagcaactcgcgcaatcgtggacctcttgctaattgattttgagaagctttatcgaaatcagaagcgaatggggcaaaagcttctaattctgcgaatggggctaattccaattttaatttaccagctacttgtttcagggctttaatttgagccgccgatccaactttggaaacggaaatacctacattaatagcgggtctgtttccag

SEQ ID NO: 122263 - DNA, 714 bp, Glycine max
  unsure (1)..(714): unsure at all n locations
  Clone ID: PAT_MRT3847_81409C.1
aatttctttgtattactttgctttattgaccttcagagttaagagtttcaaaccaaacataacgttaacgttttccatggcataccaaaaccctccttcaattccaatctcagaccctgaagcacccgaaatcactcctactcctactccttcaaccaacccactagccaatggtttctcagccaaaggggtggcgaacaaagtgaagaacaacttggtttttcattcaaaatggggtgaactcaatggtgcaatgggtgaccttggcacttatataccaattgttttggccttgacccttgctagggacctcaaccttggcaccacactgattttcactggtgtgtacaacatcatcactggtgccatttatggggtgcctatgccggttcagccgatgaagtccatcgcggcccaagccttatcggacaccgatttcggtgtgccggagatcatgaccgccggcatactaaccggcggggtgttgtttgttttgggagtgacagggctgatgcagcttgtgtacatgttgattcctctctgtgttgtgaggggaatccaactagcacaaggcttgtcatttgctttgacagcagttaagtatgtgaggaaaattcaggacttgccaaagtctaaatctttggggcagaggcattggtttgggttgggatggngttggtcttggccattggtttgtttgtgtttcattgtgat

SEQ ID NO: 122264 - DNA, 431 bp, Glycine max
  Clone ID: PAT_MRT3847_8140C.1
gtttcgggttgggactatctgaaaagaattcctgttgccacatctgagggatttcctcatgtgctttcacgcaaaaatggtgacaaaggcaaaaggagattcgtttctggggatggtgaaaagacgacattgatttcgggaaccagtgttgaagaggcttacaacaagctaataattgaacttgagaaaagtgttcctacattggttggcattgaatgtcccaaggatgataaacttcctcgacgcaaaatttttgacaaacctaagacgcgctgattcactattctccctatgaagtttaatcttgcggtccgtcaaaagtttttaaattttgtgtggttcattatgaacaatatggacaagcttaggtgtcaagtaggaatcaacccatactccatggaatggactggtttggcaatagattactgagt

SEQ ID NO: 122265 - DNA, 669 bp, Glycine max
  Clone ID: PAT_MRT3847_81410C.1
tagtgcatccaggtagcctggattcgaataatcccaccaatgaaactgaagcatgtccaaggattccacatccattctcttccttgaaacatttatgctgtctcttacgtagctactagtcatcttaactggcggaggcacccacttagtgagacctctgacctgttccaataattctggaggacgctctcgacgaactcgatcaatgaaaatcccatatagatcttcagcaggtccatagtgatcggccatatcgaaggtggttagaccggcgtcggcgtagcggagcatggcctcgacggcgtcgtctcgatcgattcggccccatccgccgctggtctgccacattccgttcagcacgcggcatatctccagcgaatcgttcctgttactcaccgtcactcgccgattctcgctcgtggccgtgcttacgtcagcgcgccgaacagagtttgagccgctccttcgccgccgcgagtctctcgaagtagagttgaagcgcgtggaggcggagaataggcgatggtggtggtggctaactatcgctgccatttctgttggattgcgtttgagacagaaagtcccgagcgggagaagaagaagcagaagtccttttgaaggaagctattcaagaacagatggaactctttttactacaggaacaggtag

SEQ ID NO: 122266 - DNA, 1798 bp, Glycine max
  Clone ID: PAT_MRT3847_81411C.1
ttttattctttctatttcttcttctctagatagcgccttctgtctcaatctcaatccaccagaaatggcaacaatagttagccaccacttttttttttttttttttctattttcattcgaattcattttatttatatattaatattatattcaaatgaaataaaaagatattaaaagatactaattataagaatttgaaagtgaaattataaagttattaaatgattaatcaatttttttctacctgttcctgtagtaaaaagagttccatctgttcttgaatagcttccttcaaaaggacttctgcttccccagtgaatgtcttggtagaagatatgatttctttgaattgaggtttattcgtgtttaagtaagcacgtaactcaacaagaaatttccttacctgtccaatttctaatgaatcaagataaccattcgttccagtataaatagttattatctgttcttccacggtaagaggagctgattgggattgtttaagcaactcgcgcaatcgttgacctcttgctaattgattttgagtagctttatcgagatcagaagcgaattgggcaaaagcttctaattctgcgaattgtgctaattccaattttaatttaccagctacttgtttcatggctttaatttgagccgccgatccaactctggaaacggaaatacctacattaatagcgggtctgattccagcattgaatagatcggcagataagaatatttggccatctgtaatggaaattacattagtaggaatataagctgaaacatctcccgattgagtttcaactattggtaaagcagtcatacttccttcgcctaactgagaacttaattgagaggttacttcctaaaagagataactatattcctgtagtaagcaatcaggtgcaacattcccttgttgatatgcgtccccaacagagaatggcagagctttgtcagcatacaggagtcaaactgataacgtatggaacagtaatgggtggtctgttgtcggagaagttccttgacaccaacatatctattccttttgctggtcctgcaataaacactccctccctccaaaagtacaaaaggatggtagatgcttggggaggatggagtttgttccagggactgcttcggactcttaaacaagtagcttctaaacatggcgtttcgatcgcaactgttggagtgaagtatatactagatcagcctgcagtagcaggatcaatggttggtgtcagactaggcttggctgaacatattcaagataccaatgctatcttttcgcttgttcttgatgaagacgacatgaacagcataagagaagccacagcgaaaggaaaggatctgcttaaagtgattggtgattgtggagatgagtacaggcgtgcatgagtcatgttgacttatcaacctggtgaaatgctttcatttattaagaacaaggggatgaaaaaaagggaggggacaaaggaaaagtgttcaagcccaattttgtgtcagttgaagaatttgtatgtaatacttttatggattactcagtactgatcaaaagacaaaataaatgaaaggagaaagtaatgtattctgtagtatatatcttgtgagatttatgcaaactttcctcacatattggccccctcaaagtatagaaactttggtgaatccctgaacaagaattagacattgctctgtttaagttgatttttgcatggaaggaagtagtctatgatccctcataaaaaaaaaaaaaaaaaaaaaaaaaaaaaaaaaaaaaaaaaaaaaaaaagaa

SEQ ID NO: 122267 - DNA, 140 bp, Glycine max
  Clone ID: PAT_MRT3847_81412C.1
gaactgcttggaatcacatggctacaatgagcactccattgaatgtcgagtcccgctagcagaacttgaggccattttctaatgacctccacggtggatgatttttagtggacaatatggcgatcatatcacacttataa

SEQ ID NO: 122268 - DNA, 760 bp, Glycine max
  unsure (1)..(760): unsure at all n locations
  Clone ID: PAT_MRT3847_81413C.1
ccacgcgtccgtaagcttcagacttagcagaacccaagtttggggtcatctaggccttgcccggtttcttcagagagtctctcaatatttaacaatgaagatgagcttaatctgcctccagggcttcctgacagcttgatcaatagaaatgaaactcaacaccgttgtgacttgcttaatgcatctcttgctagtcaagtgcctatacagtgtcatcaagaagcttccaataatttaagatccaataccctgacattggtttcccctggcaacttggttagcagtcgcatttcttctgttcaggatgtggtcagagatggaaatggtactagagaagtgccggatatgaacttgttttctccaagaattcatactgatacagaagatattgagactagacatactgatagacggaatggagctcgagagcctgttgaacgtaatgttcgttttagccggacattaagtgttggaaggctccgtgacagggttctccgccgaacaacagtatcggacttcacattttgccctctgcaacgagagagagatgctagtcaagataatggaagacgggcaggggagagagacacaagactgtcaccatcntggtcgtaatgctacaaattcttctacacctagatatcctctacccagtacacctagctccttgtttggcatccaagactatgaagttgagacttcacgatctagagaaactaggtatcaggacctactggagcataggtccaatttcctcgac

SEQ ID NO: 122269 - DNA, 540 bp, Glycine max
  Clone ID: PAT_MRT3847_81414C.1
gcaactaaattctactaaattaaagttcattataacccataatccaaaccttatgctcatacataattatctgaacaagggtttgtggaaataaggataactgacaaagataaagatgcttaactttttcactacaatccgaaacgcgcttagccatgaagccaaagaaggatgagctaccagatgaattaaaagctctatggaaggcggaaacttttccaccttaaaattccttttcatacgactgctgcatacttataacaaaacaatggtttgtttacttgaacattttcatatgtatggcctttaagggtctaaaaaagttatcatagcatgccgctttgatgttacacaactggtataactatcatctcttttcatcacttggacggcctcttgggttgggcaacctcctgacacgcacaaaacaaccgggtacatgaagggctcctgaaggttgcgcataagggaccatgtgaacatttgcttttacaggggcaaaggtgaacacagttccaaacttatttacccaacctacaa

SEQ ID NO: 122270 - DNA, 414 bp, Glycine max
  Clone ID: PAT_MRT3847_81415C.1
aagcgacgcatccgctgcacttcatctctggtctctggcatccttggtagcggaagaactcaatcctgtccaattccctttagcttttctattcttcaatctcatcgaattcctttctaccactctcattaacattgctgattttcataactagatgcctctccgttgagggtttctctaggtatggtttgaattacaatgtctgaagctgaaaaaatatcaaaacttgagagcttgtgcccctcagtatgataaatgttggcaagtggagcgaaattctcactaataatagatatcaacaaatcataattcaactactatgatttctctcaaagcttttaccataaacgtgattatggtagcaatatgtcaattgacagtgttggaagcttacacacaagttaccgcagatga

SEQ ID NO: 122271 - DNA, 380 bp, Glycine max
  Clone ID: PAT_MRT3847_81416C.1
tagtaaatgacaccaaattccaggtcttagacatatgagtaaagactatgaagatatatagttataataatggggtccttgggtaattctttgtgactttaatgctattctttatgattatgaaaagaaaagtggatctaaaaatgtaactcatagggaaactcaagcttttcgtgggcagtaaaaataagtaacttgatcttgtacaaatcttcattgttttgagcttgataatgtcaggtaagtacgttattcttaatattactctctttgatgttaaatctactaggagattgattaagaacgagtttcatatgaagagttttatggatttcatcttagtagcattttgatttgttaattcatttttctctccaaaa

SEQ ID NO: 122272 - DNA, 565 bp, Glycine max
  Clone ID: PAT_MRT3847_81417C.1
tcggctcgaggcacgtcaaatcaaatgcatgatgagttatactgcagtctagctatcgttcaccagactcttttgatgaccctgaccaggagaagatgaaactgttgagaatggtttataaattgcaggaacaactcaacagaacttgctatctaaacggggaaacaaatggaagactgtccatgggaagtcatgtttctgcatatcaaagccatgatcttcatgaaagaagactttatcatggtttggattatcctaggtgtgatgagatatgtagccatggaaccgactggtgccaaaagcataattttccacatgtaccttgtttaactgagccaacgagcagcatacaccatgttgatcattccttttttccttgctgtccccaacaatgccaatgctccacagagttgcctccatgtgatctttatcagcatgaagagttatgcaggcctagtccaggtcacaattgttgttcacctcaccattcctatccctcaggtccacaatggctcaaaaacctcccagcacatggccatgaaacaaaatcttgtgatcagaagct

SEQ ID NO: 122273 - DNA, 222 bp, Glycine max
  Clone ID: PAT_MRT3847_81418C.1
gtttcttatgcgtccacacggacggtcaaataggggagcctttagtagcttacgggggctgtccatcccactcctagacagaaaacttgcaactgccctgtgggaggtaatccagcgttctaaaagtactgcgtgtaactccctcccaactggaattctaaaacttcctaggttgcgaacacctgctcgttaggtacatgtgaccccatcatgttaggtacc

SEQ ID NO: 122274 - DNA, 206 bp, Glycine max
  Clone ID: PAT_MRT3847_81419C.1
ctcgagcgcaagatccacatcaaggggggatccggtcgttctagcaagctgatgtatttgtctcatgcaccattactggtacctgaatgacaagggacgggtgagctcacgtgaacttattagcacatggggtaagcatatcaaaagcaggaattgttacatctcttcaggcacgctgttctgctattgactaggcaaatcctgtt

SEQ ID NO: 122275 - DNA, 781 bp, Glycine max
  Clone ID: PAT_MRT3847_8141C.1
atgcggtgatgataacttaattagtgttcatgaatatgccaagccttactttagtggctctaaattgaaaagctttctagctggtcataatattaccattactgatggtattgacaaaactagagcaactttgcaatctagacagatagcagattgtgattgtctcaagagaaactttaagcagatgtctaatgctttgtgggccgcttctgaggacaaggcgagcttatggacacaacttcattatggttcatgtaataatctggaaatgcaagaagcttatatcgtcaatattgtaaatgcgctacgagaaccgaatttgcacagcccagaggaagctcgccaattgagaaggaaagctctctctcgtattgaatggctgaaaaaagctgaagcgcctaccatagcacagattgaagagttacactccatgcagacgatgatgaatgctcctgattcaaatgataatatcgatctactgttgagcattgattcgctgggcttacaaggagcaggctaagcttttccaaacaagattgtctgtaatgataagcttgcgttggctaacacacaagaattctttgatggaaattgtacagtggcttctagtctaccaatttttgtgaattgtctttatcctgcaagtcaattaccttcagaagctgacgtttgtaattgtacatgtggcagcggaccgggcaagtttacccaccactgctaggattaggtctgcagttaacaatggctgctcagacatcaacaaatagattcgcacagctct

SEQ ID NO: 122276 - DNA, 448 bp, Glycine max
  Clone ID: PAT_MRT3847_81420C.1
gtttcaacatcatcaagagacaatttaaacaaatttctgaatctaaaattgcacttaccaagaacacagttggaggaaccattctgcgaacagatctattggcacattttttgacagagggcaattttagagcaagtggtgatttgcaacgcactcatcgcgttaaaggaatgattaaaatggtggccacagatggtatttctgagaatacaggaatagcattggtctggggcatgaatagatattttagggggcgcgccagaattgatatttacaccatctggtctgaagactgagaatcatggaatgctgtttgcacagaagcaatgactatgttatttaatccaaacccgtgacttgatgcttggagttaggaatttgtgaagcggaccggagttcattgtgatatcatctgtgcgactggaagggctgtcacctcaatgcaaga

SEQ ID NO: 122277 - DNA, 317 bp, Glycine max
  Clone ID: PAT_MRT3847_81421C.1
gtccattgccatagccaacgcttgatctcccaaattccatcggcggtgccattctccgtgcgtctcccccccccccctccggtgctgcttttactcagctacttccgctgaacttactccctccccaccgaatggtcctcaattatttctcattagagccattctatgcttatcccttcttctgtccgcttgatgatccgctgtcattcttcagatgatgcagagtggtttatgcctttgtttacaattcaattgaattagccgaggatcaattggttcttaaccagcaaaatggccaatttcagtggtcatgaccc

SEQ ID NO: 122278 - DNA, 276 bp, Glycine max
  Clone ID: PAT_MRT3847_81422C.1
gtctaaggaggcaattacgcaaccatctttggtaacaggatatacactcttaattttcgctttccaaaaatgtgatgattatgtgcttgcttgcttattgtggtttcgaaataatagagttgattattgcacacatcactggagcttataagaggacatttattatagtaaagcaagaacactcttgggttcggcgcaggtgataacctgtccatgcgctggaactcgatttgtctctggcttcacacagatttacggaagagcgacctttacttt

SEQ ID NO: 122279 - DNA, 485 bp, Glycine max
  unsure (1)..(485): unsure at all n locations
  Clone ID: PAT_MRT3847_81423C.1
gatcatgtaaatgcagaatgctactagcatcacaagcaccaacgatgctatagttgaaaccaccaagactacctttctccgatgctcgtgtttaccatccatgtccgaagtggccattcgaacatacaaatcttgcccactttctataactcttaaatcaactaggtcaccaacccaaatagaacacccattacctcctcccctcgtgtccaagtttgaataggccttgcacgaacaattttccaaacattttgccctgcactcctcaagtgtcatactttcattaacccaagaaaacgtagtgtttggcaatttcatgctagcaaatctccgaaaaccatctttattttttaccccacaactccactcttcactgcgcacacacccttgcctccaatccatcacgttccattgntggggcgatttcggctcgaacccatctaagcactggcaaattggagacccagcaatgatgcaatttccat

SEQ ID NO: 122280 - DNA, 370 bp, Glycine max
  Clone ID: PAT_MRT3847_81424C.1
cggctcgagcaagaatatattatttctgtctcaaaacttgccatgatttcatgataatgaattttagaagactgataaatgatataggaacctcttttcccttttggtgtattaaggcttgttggcacagtgcaattgtcataaaatgaagtttgctgataaattaatgtatctatctgcagctgagcaactacaactcttttgagggagttctttattgtaagccacactttgaccaactgttcaaaagaacagggagccttgacaaaagctttgaaggaacaccaaaaattgccaagccagagaaaaatttggaagagaaacctgcagcagccaaagtctcaagtatgtttggaggaacaagggacaa

SEQ ID NO: 122281 - DNA, 570 bp, Glycine max
  Clone ID: PAT_MRT3847_81425C.1
tccgcggccgcgtgggtgagttctgaccaccgattttgatggagctgaaatcgttctcttcttgttctgtgtccacatctgaggttgcccatgttggaagatcctactccactttgatctccagtttcagacacaaagttggagttagattttctacccacttccagtgtcgcagagataaagcagtcattagttcagttggtcaagataattttgcagcagaaacgagttcccatcgaattaatggaacaaatggctcaatttcaagattctattccacaaatctgaaattacttgatgcctttgatgatgaatatgggggagttgttgttcatccagataggttaccatccaacccatatacctttgcatctgtgttgcgtttgtctctttctcagtggaaaaaaatgggaaagaagggaatttggcttaagttgcctttagaccaatctgaccttgttccaattgctgtgaaggaaggcttccaataccaccatgcagagccaggatatgtgatgttaacatactggattcctgaaggacctagcatgcttccagcgaatgcatcac

SEQ ID NO: 122282 - DNA, 527 bp, Glycine max
  Clone ID: PAT_MRT3847_81426C.1
aagggaataacaagctatagtacactcagaaaaaacgatgagtcccatgaccatgatcacgaccacgatgtttctttagacatgtcaaagttcgatacctgctaagttagagtgtgtctggttggtgagatttggcttgtgtgttgagttctgaccaccgattttgatggagctgaaatcgttctcttcttgttctgtgtccacatctgaggttgcccatgttggaagatcctactccactttgatctccagtttcagacacaaagttggagttagattttctacccacttccagtgtcgcagagggttgtttctgacgacttattgtgcctcggataacacttatttgacagataaagcagtcattagttcagttggtcaagataattttgcagcagaaacgagttcccatcgaattagtggaacagatggctcaatttcaagattctattccacaaatcctgcaattacttgttgcctttgatgatgaatatgggggagttgttggtcatgcagataggttacca

SEQ ID NO: 122283 - DNA, 728 bp, Glycine max
  unsure (1)..(728): unsure at all n locations
  Clone ID: PAT_MRT3847_81427C.1
tggaagccacttggattatcaagcttcttaactcaagcattggaagggaagctatagcacactcagaaaatcgatgagtcccatgaccatgatcacgaccacgaccacgatgtttctttagacatgtcaaggttcgatacctgctaaggttgcctagatttctgtgaagattctcgcatatacgtgcttacccttcatattatgttaacaattggtcagtgattccctgtggctaccagtgtgagatttgtcttgtgagttgagtttcgaccactgattttgatggagctgaaatcgttctcttcttgttctgcgtccacatctgaggttgtccatgttggaagatcctactccactttgttctccagtttcaggcacaaagttggagttagattttctacccacttcaagtgccgcagagggttgtttttgaggacttattgtgcctcggataacacttatttgacagataaagcattcattagttcagttggtcaagataattttgcagcagaaacgagttcccatcgaattaatggaacaaatggctcaatttcaagattctattccacaaatctgaaattacttgatgcctttgatgatgagtatggggggagtttgttgttcatccggataggttaccatccaacccatatacctttgcatctgtgttgcgtttgtctctttctcagtggaaaaagatgggaaagaagggaatntggcttaag

SEQ ID NO: 122284 - DNA, 708 bp, Glycine max
  Clone ID: PAT_MRT3847_81428C.1
gcacccaggcctctaagggatcgtggtccctatccccctccccagggtgtcagagccttccaaggcaaatttgcatttattctgtatgccagtggttctaagactgcatttgttgctgcggatgctgatgggagtgttccctttgtctggggaactgatgctgatggaaatctcgttttctcagatgagacagagatcgtaactaagagctgtgggaaatcttacgcaccattccccaaaggatttttcttttcaacatccggaggtttgagcagttttgagcatccactgaatgaggtgaagcctgtaccaagggttgacagttccggacaggtgtgtggtgcaactttcaaggtggatgctgaggctaagaaggaagcaactggcatgccaagggttgggagtgctgctaactggtcaaataatatctgattgcgactctattctgtttgaattatgggcttttattttatcatagctgcactcggctgcaagttctggacctgttcctatattatgataactttgaggctttgcttatcatattaatttatttactgaatctgacatgatttcatgaagttatacaaagttgctttgaagcaaatggttaagctcatactctcttcgcacttatcttgtaataatataaacttgcggacaggttcatccaaatgattatttaccgcctttgttttatctcgtttt

SEQ ID NO: 122285 - DNA, 1733 bp, Glycine max
  Clone ID: PAT_MRT3847_81429C.1
attagtcaagggtcgctagctatctaagtgttgtaaaaaactagctttgtcccaatgtggattatgctgaattatatcctgttggcacccacttggattatcaagctttcataactcaagcattggaagggaataacaagctatagtacactcagaaaaaacgatgagtcccatgaccatgatcacgaccacgatgtttctttagacatgtcaaagttcgatacctgctaaggttgccttgatttctgtgaagattctcgtatatacgtgtttaccctccatattatattaacatttggacagtgattccctgtggctactagttagagtgtgtctggttggtgagatttggcttgtgtgttgagttctgaccaccgattttgatggagctgaaatcgttctcttcttgttctgtgtccacatctgaggttgcccatgttggaagatcctactccactttgatctccagtttcagacacaaagttggagttagattttctacccacttccagtgtcgcagagggttgtttctgacgacttattgtgcctcggataacacttatttgacagataaagcagtcattagttcagttggtcaagataattttgcagcagaaacgagttcccatcgaattaatggaacaaatggctcaatttcaagattctattccacaaatctgaaattacttgatgcctttgatgatgaatatgggggagttgttgttcatccagataggttaccatccaacccatatacctttgcatctgtgttgcgtttgtctctttctcagtggaaaaagatgggaaagaagggaatttggcttaagttgcctttagaccaatctgaccttgttccaattgctgtgaaggaaggcttccaataccaccatgcagagccaggatatgtgatgttaacatactggattcctgaaggacctagcatgcttccagcgaatgcatcacatcaagttggagttgggggatttgtcatcaatgacaacaatgaagtgcttgtagtacatgagaggcattgctctccaacaacgcatggtctttggaagataccaactggattcattcttgaggctgaggagatatatacaggagctgtaagagaagtgaaggaggaaactgggatcgatacagagttcgttgaagtcatagcattcaggcatgcacataatgtggcctttgagaagtcagatttgttcttcatctgtatgctaagacccctgtcatctaagatcattgttgatgatcttgaaattgcagcagcgaagtggatgcccctggttgactttgtagagcaaccactcatccaagaagactccatgttcaagaaaatcgtagatatcttcattgctcgtctcgggaagcgatattgtggcttgtcaactcatcaagtagtttcaaagtttgatggcatggtgtcttccttatactacaatgtcattgacaatgcggataacaactgtgttggaaaatgaagactcgaacacgcacaactcttcttggcttctcaaatgtcagcaacaagttgaaaactgggctaaccactatactgcagatatccaatcggatatgtaaacattcaaatgacaatttattcctatagttataatgtatataaatatctctgataacaatgttcctgtggaacatgtttgatcatcacagttgttccacattttgacatttactaactaatgattcttgcaaatagaacattaact

SEQ ID NO: 122286 - DNA, 2146 bp, Glycine max
  Clone ID: PAT_MRT3847_8142C.1
aaaatttactgcaaaaatatatcaatgtgatgattaatagtacaactgtagtaaataaacatatgttattttttcaactgtagtaaacaaatgcaacctttgccggtacttctgaataagaatttaacatgtgcttcttagatctcgtgattcctcttgtcttttcttgtctctttctctgatgaatgatcatagatcagaaagggccgatggtgcaaatcatcaccgccaggtggttcgtagtgttctcctcctttctaatcatggccgccgccggcgccacctacatgttcttcctctactccggagacatcaaaatcgtcccggcctacgaccaaaccaccttaaacagcctttgcttcttctataacttatgcgccattgtcggcgtccaatccaccttaatcctccttagtttcttcaaagacttgggcggcaatgtcggcgtcctctccggcctcatcaacgagatcactcccccgtgggtggtcctcgccatcaattacgtcctcaacttctttgggtacttcattatatggctcacggtgactaaaaaaatacctatccggcccgtgtcgaccatggttcccttctgctttgcgggtggaacttcccagaacgccgccaacatcggttgcctttccacgtgcgttaagatcttctcagaaaaccgtgcggttgatctcggcattctccaaggctacgtgggtctcagtggagccatcattagacaactctacttcgctttttactacgatgattcaaggtccttgattttgctcatagggtggctcccagctgctatttccttccttttcctacgttccagtcgctatatgaaaccccttcgacagcaacccaatgagctaagtgttttctacaagtttttgtatatctcacttggccttgctgggtttcttttggtcatgatcatagttcagaagcaagtgcatttctcacaaagtgagtatggtgtcagtgctggggttgttcttttcttactatttctccctcttgctgttgtgtttgttgaacaatataaaatcagagagagtcaaaagctagcattcattgacccctccgcagtcaagatagtagctactgaaggagagtctaacactccaatttcaagaaagattgatgaagaaataataactagtactagatggtggcaaaaagtgtttagtccaccgcctagaggtgaggactatactatacttcaagcactattcagcttagacatgatactgctattcttcgctggcacatgtggtgttggtggaaccttgaccgcaattgataaccttggtcagattggaacatcgctagggtacccaaaggctagcataagcacgtttgtgtcgttagtgagcatttggaattatatgggaagggttttttctgggtttgtttcagaacactttctaaaaaagtacaagttccctcgaccactcatgctcacgctaaccctcctcttatcctgtgtcggtcaccttttgatagccttcgatgtggccaacggactctacgtggcctcggtgatcattggcttctgctttggcgcgcaatggcccctggtcttcgccataatctcggagctctttggactcaagtactattcaacgttgtacaactttggcggtgcagcgagcccaattgggctttatgtgcttaacgtcagggtaacggggtacttgtatgacaaagaagctctgaagcaattggcagccacggggatctctagaaagattgacaccgaattgacttgtgttgggtccagttgcttcaaattgtccttcattattatcactgcagccaccttttttggcgccttaatttcactgattttggtggctaggacaattaagttctacaaaggggatatatacaagaggtaccgggagcaagccgaggaagaagccaccgctgtcactgagatggctgtggtccaaaatcgcgccgagaaattagaagaaaccaaagttattggagcgtaattggtatagggtatagatagtcatcaattcctcctcagccactcccacatcgactggaaaccaaatcaaagttgttgttcatgatatatgtagaaaaataaaatagaaaatatatgtagttgggaccactgttttattttcccttcaaa

SEQ ID NO: 122287 - DNA, 1214 bp, Glycine max
  Clone ID: PAT_MRT3847_81430C.1
cggccgctcagccggcggggaccgggcgtgcggctgcctaacgttcattccgctcttcgctttctttcacatccaatcaacgaaaaatgctggctgttttcgacaaatcggtggcaaagagcccagagggtcttcagagccctcactcaaattccgtctcagccctaaaagacggttttctcgcagagcacttctcttccgttcaccctggttccgtcaccgttaaccttggctcttccggtctcttggcctattctcttcacaaacagaaccccctcctcccaaggctgtttgcagtcgtggatgacattttctgtttgtttcaaggtcatcttgagaatgttgctaaccttaagcaacaatatggattgaacaaaacagcaactgaggtgatcattatcattgaagcatacaggactctaagagatcgtggtccctatcctgctgctcaggttgtgagagacttccaaggcaaatttgcatttattctgtatgacagtggttctaagactgcatttgttgctgcggatgctgatgggagtgttccctttgtctggggaactgatgctgatggaaatctcgttttctcagatgagacagagatcgtaactaagagctgtgggaaatcttatgcaccattccccaaaggatttttcttttcaacatccggaggtttgagcagttttgagcatccactgaatgaggtgaagcctgtaccaagggttgacagttctggacaggtgtgtggtgcaactttcaaggtggatgctgaggctaagaaggaagcaactggcatgccaagggttgggagtgctgctaactggtcgaataatatctgattgcgactctattctgtttgaattaagatcttttattttatcatagctgcactcggccgaattttgagttctgtacctgttcccataatatgataactttgaggctctagcgaggcttagcttatcatattaatttatttactggcttagcttatcatattaatttatttactgaatctgagatatgatttcatgaagctatacgaagttgctttgaagcaaatattaagctcatactctcttcgcactcatcatgtaataatgtaaacttgcggacaggttcttccaaatgattatttactgcctttgtttcttgcggacaggttcttccaaatgattatttacggccttacaaaaaaaaaaaaaaagaacgaa

SEQ ID NO: 122288 - DNA, 438 bp, Glycine max
  Clone ID: PAT_MRT3847_81431C.1
tcctttttttttttttttcataaaaacttttttttttttttctcacagccaaggaatgaatcctacatgaacacaggaacattctacatctctcttcaccaccaacaggacaatagcttctcctcatttgaaacaacacaattatattccccactcatcttctctccacatgcaagaatggcaacgccggaaatccacccacgaaaaacgctccggaaacaaactccaatccccgcatcttggggccatagagacaacacatcaaacccgaaactgttcaagatcgcactgccgggcacttagatgttgaggccgcacttcttgtcgacaagagacaggtagcgcactttattgacgatcaggccttccaagccattgtggaagatggagagccgatgcaaccacagcatacccttatggatggtctcgtggttgagc

SEQ ID NO: 122289 - DNA, 255 bp, Glycine max
  Clone ID: PAT_MRT3847_81432C.1
gcggcatgtgtactacctaacgtatgatgacttgtttctgtattattcgacataggagcaggaggctcgagagcagttctgtgtacaagatcagagctattgggtataataatcacatgaggaggttgaagaagaagcgccataaagatgagacatagatctaggtaagtgctaggacaaggtgtggagatgatgtgcttatccatttgctaccagcttcatgacattctatgctgtcatgattcttatgatgat

SEQ ID NO: 122290 - DNA, 325 bp, Glycine max
  unsure (1)..(325): unsure at all n locations
  Clone ID: PAT_MRT3847_81433C.1
caaaagtgcanaangcttcaaaaacaaatgaagcaaatccattccctcataatcaccaatggccacctccatcaacaccaaaatgttccatcatcatcattatcccttccatggatgcctactcttctctacaatgccctcatcagtgccttccacattcacaaccacaacaaggctctttccattttcactcacatgcttgcanaccaagccccgcccaatagtcacactttccctcctcttctcaaaatttccctctcctttgggtgtacctcatcacagacctcaggtggcttttattgnggttcattataacctnncctgc

SEQ ID NO: 122291 - DNA, 510 bp, Glycine max
  Clone ID: PAT_MRT3847_81434C.1
cacaaaagaatactttattttggctcaaactttatattactttcaaatttgatatttgaaccaaaactgacaaaaactcctgtcaactagaacatatctaggtgtcctttcttttaaacataataaaagcccgcttacagcatttttttatacgccggacggagtcacaattgttatattgccattggagccggctatttaaaaacactggccactacaagagatgcttataatacttttgtaacaatccatgcagcattttatggttggccaatccatcacattcccaagagaatgcatcgcatcttgtacatatgacccatgaaataagttcatcaatctatacactattacacaagttaatctctatccattggtggttgaactgggaataatactcgaataaacatattgaagaatattaccttggttgtatgcagtgggatctgacagtggcggtgggggctggggggccgtgtggcgtgggggcgtgtggggggaagaggctgg

SEQ ID NO: 122292 - DNA, 377 bp, Glycine max
  unsure (1)..(377): unsure at all n locations
  Clone ID: PAT_MRT3847_81435C.1
ggctcgagccccctcanccttcactctctctttcctttttatancccttcctcctcaagctatatattatttctacaacttacaacccacccctttttataattctaatctcttttaatctttaacctcttcaattattaccattccatcacaaccccattcttaataaaccatttcacccatatccacatcttattagatcaataaatacagatctgcctcttttatatataaaaaaaccccaatccttttcattattttcaaatataattctttttttacttatctatttacaccattttacaattcttacataattatttccctccaattatatttcccacatattacatatacacttctttaattaacattat

SEQ ID NO: 122293 - DNA, 588 bp, Glycine max
  Clone ID: PAT_MRT3847_81436C.1
ggggagggagcccttcattgagtctccgaggaaccctagactccaaattggtaaatctctctttgcaaaatctccgaggaacccaacggcattgctaaatttctttgctggaatttaagggcagggttgctggtgatgcatttcttagtggggttatctttagcttagcttctgaccaaagtcttttccagggctagcatcactgacaacaacaatcatgggttacttcgacctcaacatcccctaccctgatccttcccctgccaacaagcccactgagcaaggtaaccgtacgaggctggcagtgaaggccatggagtttggctacaccggaatcgcttacaaccgcacgatcaagggcgtcatgtccgatcaccaccgttgctccatctctcccctcaccctctcctctctcctcaacgtccttccctctctctccctctccgccaacctccaccgccacctactccatgtcccactctccacccccttccgtcagtacactcgtctcaccgtctgcgtcgatagtgcttcccaggctcaagccctcaattcgggtaaccctattttgaaaacctatgatctggt

SEQ ID NO: 122294 - DNA, 911 bp, Glycine max
  unsure (1)..(911): unsure at all n locations
  Clone ID: PAT_MRT3847_81437C.1
ctgaaacatcattagaaaatagaaacaagtcatctaaatagaaaatagtagagaagaagtcatttgttatcttgtactcatatgttttaaacttttccattgcactttgacaaggtataatagttagttagtttgagtgtttgactaggggaagagttcaaatttcaacattctccaaatcataattaattatatttccacaaaaatgctcgatattatcagtaagtcacaccctccccagggtcccaataaagtcaatgaaaatattgctgaggaagtgttttgatggcattcattttatgttatttgggaggaactttaacattatgcccaaaggttttccatttgttccggcacaaaaacacgagagattgggaacttttggctggggaattaccttaactgaggatttatcaccagcaactcgcaatttctgctctagatctgtcacttgtttctgtaaaagagagatatcatttttcttagtttcaagttcttcaagagaatttttcaaggctgcctcaagttccaacttctgagcttgtatcattggtctggctacctactttcttaaacttcaggtgctgtggacaagattgtacctagcttttctccaagttacttcataaaattatggcacatgttttcgggtgaatgtaatgcaatttctgtatttttattgatcctaaggagggcatattagagtaggagggccattatagcatgtattaggcatttcacatccttccgtataaatttgtaaaatgattttgctggatccaaattagctactgaattagcaagatgtgatgatttgaagcagatgactatgttcagttttttttttttttccnagtgatatccctacttacagttttgttttattacaggaactaaaattgagacttgtg

SEQ ID NO: 122295 - DNA, 185 bp, Glycine max
  Clone ID: PAT_MRT3847_81438C.1
tgtttttttacaccataataacaatttcttgagagcggagaatgataatcaaatggcttcctcaatgatctcttccccagctgataccaacttcaacctttcctaatccgtcttggttgctccattcactggcctcaataccaagtctgtctttcccaccttgtagaccaacaattacattacct

SEQ ID NO: 122296 - DNA, 584 bp, Glycine max
  Clone ID: PAT_MRT3847_81439C.1
ttccctttttttttttttttttttttttttttttttttttttttttttttttttttttttttttttagggccccgccaatttgaatttggctctattcatttttaactttaaaagggaaaacacacaaaaacaatataggcattgccccacaaagggggagggaaaaagggggaccaaaattcatctaatgccgcagctttttggtagccacaaaaaaaggatcttaaaccctcactggccaaaaaaaacggggaaaatgggaaacccaaggcaaggggcttgccgccccccgttattggccaatttacaacattggtttcagggggaataaaaaaaaataccacaaacccacgggcctttaataatgaatcaacagacaagatttgacccaaatcatcccaagaaaaaatcttggaaccgaaaaaccattatgcccaaacccggatttttggggccccaacccagcgggcataatccacccacaatagggagcccaaaaaaggggttccaggtctaacaaaaaaaaaaattgcgcctaaaaaaagtttgggcgggggcaacaaagggtcaaaaaaccgggggt

SEQ ID NO: 122297 - DNA, 1070 bp, Glycine max
  Clone ID: PAT_MRT3847_8143C.1
tgggcttcttgggtattctcttgcattagtgatgataacctggtccacaccaccataaaaagtgcagagaaaatccctatgctacatcgtgaccagagtaaggatatgctctctatggctagtgggatgaatcatctaatggaggcctctagtggcaaatattcctatggccaaggcaatactcggctactgctgatattttgtttcatatttcctcaaaccactgcattgggcttcttggatttctcttacaagagtgatgataacttggttcacaccaccttaaaaagtgctgagaaaacccctatgctacatcatgaccagggaaagagtaagctctctatatctagtgagatgaatcatctaatggaggcctctagtggcaaatattcctatggtcaaggcaatccatctgaacgggaaatatctcagcatttgacacaaaaatctgaaaatcatgaacagactaatcatgcatgggatattcaaagtgaaagaaaattgtcatcctcagcagttcagtgctctgacccaatgaaagcatctcagttgggttatctcacggtcaaaactggtaaagaaaagggtagaagaaaaaagaggaagagtcttggtgccaaattagcggcattgtctgaagtttcaagcagtcaaagtggtaattctacaccctcgtctcctttatcccctactccctctgctacacctaaatgtaactggccaatgtctccggacgaggagcaaccccctgaggctcctagttcaatgacacaggtggctacccaacattctgccaatgatcaagcttctgccgctgttgctgtgtcaaatatattgaagcctgcttctacacaaaggtgcactaatagtaagtcttctcaagtaccacattcagcttcaagaagtgctactagtttacctgttcagaaaccttgtgctacttctcccattcctgcaagcacttttccatctttcttggggtcaaaatctactgttaacttgcatgctcgagcttctggatcccaactttacaaccaaacagctgttcaagcacgagagacaggacttgc

SEQ ID NO: 122298 - DNA, 164 bp, Glycine max
  Clone ID: PAT_MRT3847_81440C.1
ttgctctatgaccttgataatgcataagcgacttaaatagagccactcatagagaggtaaacgtatcatgtttacttggactgaaggctactaaagaatacataccggatctacacgtcgcatatctttattataaataagaaatcctcatattctcaatagtt

SEQ ID NO: 122299 - DNA, 245 bp, Glycine max
  unsure (1)..(245): unsure at all n locations
  Clone ID: PAT_MRT3847_81441C.1
tttttnnaacagccctaccaaaaggatggaaagactgaagacacgtataggacaaagctcgcaagcccagaaagcaaacgccaggccactcgagggaagaggcacgaacagtgaaaaaaacccatacaactaaaacaagctgccattaacccgcacgccagcatgactgacaccacaagaatccttgcgacagaactaaacacggaacagaaacaccatgacagacagcaccgacataaggacag

SEQ ID NO: 122300 - DNA, 313 bp, Glycine max
  Clone ID: PAT_MRT3847_81442C.1
accgcgatcacaggatgccgcaccttaattaccggaaacaaaagcattcgttacttgattacaagaagatttcaataacttcctactactttgtggacgacgacttaagggaaagaagatcactctttgtgctggccacagactacgtgaatcattatcttttccactattggtggattagctgaacactatcctattagatataggactacttgtcagactaaaacaactcctgccgctttctcagcagtctgttgaattacaagatgaagctggtgaaaacttggattagagctcctactcttctatctgg

SEQ ID NO: 122301 - DNA, 435 bp, Glycine max
  Clone ID: PAT_MRT3847_81443C.1
gacagggggaaaacgacatctcgattatttcctccatatggctgaggtcgaaagatcccgggacatactctattgtgcccccaccaaaaaagatcgacttttggtaaccttgttttctaccaccgacttcgagtgcttctccaagggccgcaagtttgggtccttttccactctctggagccctcttggtcttccaccgtttccacaccggcgcttttgcaatatgtttgcttttaagaaaacaacgcttcattattattggcgatctgtctaatggcgccttggggtttttttttgtgaccccccatgggcgggccctgaggagaacccctgcgcgcccttggaccctccgcccttttggggtaaagctgtttggctttttttttggggttttcacctctccactttggcttccttgggggttgccctggggcc

SEQ ID NO: 122302 - DNA, 272 bp, Glycine max
  Clone ID: PAT_MRT3847_81444C.1
aattcgggtcaaccttgaaaaacccaaacttctggacaaaacctgctaaggctgtaagaaaagcatatactagaactgattctacattttagaaaatcaggctaaattgcgttcacggggttcaactgcggttacaacaagattgatcaactgttacaagctatcagtagccaatactggggattcccgggctgtcgtatgtaaaaatggcgtaaccaaacaactatcggtgggttatgagccaagcatacaaagtgaagatttaaaaaaca

SEQ ID NO: 122303 - DNA, 547 bp, Glycine max
  Clone ID: PAT_MRT3847_81445C.1
ttgtttttccacgcgtccgtacggctgcgagaagacgacagaaggggatgactttagtttcttccagccgagacagaaaatttgaacatatgttccttttttgttacaacgttgttgtttccaacggtacaacggtagatgatgggaacgctatctacgcaatttcgttccatcaaacgcccaaattcaaaccctaaactatccaaatcgtcatctcctacaaaatcagaaattaaattcaacgctaaaccaaaaccaaaatcagagtcagagtcagagtcatggtctgtttatctcatcctctccaccaaccatcctatcaaaacctacgttggaattacaaacaatttccctcgccgtttgaagcagcataacggtgaacttaaaggtggtgcaaaggcatcccgtgctggaagaccttggatttgtgcatgcataatttgtggttttacagaccgaagtgaagctagtgtatttgaatcaaaatggaaaactttctcaaggagagctccccgcaaaaatcaaaatgacaatctctccaagcaaa

SEQ ID NO: 122304 - DNA, 329 bp, Glycine max
  Clone ID: PAT_MRT3847_81446C.1
ttacgctttcgcccacgcgtacgaccacgcgtgcgacgagctaaaggagtgtttgatgaccgaattagctcacaaatatagtggttgtgacactgtaaacagtgactcaattgagttggacactttgaatttttcaactgaacttggcccctcagcttggtaatacattcactgataccaaaaaactgtttctgaaagcagtggtgaggggcaatttctgtttgctgtacctgactatattgcagttttgcatgcttaattgttagaactcttttatacaatggactaatttttctgctattatcatttgacgttctgtaaccaaggat

SEQ ID NO: 122305 - DNA, 139 bp, Glycine max
  Clone ID: PAT_MRT3847_81447C.1
cttcggcgaccgcttgggaaaaaattacctttagaaaaggaaaattcctatgtgcttcgctgggtttctagattgtgccttaccctaaaacctacctttggccaccgctgatacttatttcaacataaatggtgatttc

SEQ ID NO: 122306 - DNA, 287 bp, Glycine max
  Clone ID: PAT_MRT3847_81448C.1
caaccctatggatttgcaaatgcaggtaccaactgatactgctactggagccactgcccgctctgacagaagaagagatctacactatccccatactggtcgggtggggacagtagaccacgctgtggacgggctcaagctagggtatcttcttaactaggcagggtcttggtttcagcatcgatcataatcttgttctgcctagagctgagctggggaccggatatgataaggggactgttgaggttttttatctatgcatgatcttggtgttgtcgcagaatgat

SEQ ID NO: 122307 - DNA, 297 bp, Glycine max
  unsure (1)..(297): unsure at all n locations
  Clone ID: PAT_MRT3847_81449C.1
aagtcgnangcangcgtacgtaagntcggaattcggntcncgctnancttaaganntgngnnncngaggttnanacatatntagctangnaaagaaganaagggagtggnttngcagagatngngntagnnngtggnctttanagganatnntaggaaaagcntncaagcctcnagtgaattngtggngagcaagagttgancttaaatatctcanntnanaattccattgacgagtgnttatcaagaaattgccaatggggtaatngatgtnccagccantnttgactnnatggng

SEQ ID NO: 122308 - DNA, 1019 bp, Glycine max
  Clone ID: PAT_MRT3847_8144C.1
gcccaatgagctaagtgttttctacaagtttttgtatatctcacttggccttgctgggtttcttttggtcatgatcatagttcagaagcaagtgcatttctcacaaagtgagtatggtgtcagtgctggggttgtgctcttcttactatttcttcctcttgctgttgtgtttgttgaacaatataagatcagagagagtcaaaagctagcattcattgacccctccccggtcaagatagtagctgaaggagagtctgcaaatggtaatacctctaacacgccaatttcaacagagattgaagaaactagatggtggcaaaaagtgttaagtccaccgcctcgaggtgaggactatactatacttcaagccctattcagcttagatatgatactgctattcttcgctggcacatgtggtgttgggggaactttaaccgcaattgataaccttggtcagattggtacatcgctagggtaccccaaggctagcataagcacgtttgtgtcgttagtgagcatttggaattatctgggacgggttttttctgggtttgtttctgaacactttctacaaaagtacaagttccctcgaccactgatgctcacgctaaccctcctcttatcctgtgccggtcaccttctgatagccttcgatgtgcccaacggactctacgtggcatcggtgatcatagggttctgcttcggcgcgcaatggcccttggtgttcgccataatctcggagctgttcgggctcaagtactattcaacgttgtacaactttggaggtgcagcgagcccgattgggctttatgtgcttaacgtgagggtaactgggcacttgtatgacaaagaagctctgaagcaattggcagtggcggggataccaagaaatgatgccaaagaattgacttgtattgggtccagttgttttaagttgtccttcattattatcactgcagcaaccttttttggggccttaatttcactgatttttggtggctaggacaattaagttttac

SEQ ID NO: 122309 - DNA, 264 bp, Glycine max
  Clone ID: PAT_MRT3847_81450C.1
ggctcgagattgcatccaatatattaatatatgttgagcacgttgaagatgattaacgaagatttataatttgacgagggccctcatgagcgcataaagattatctcgtttggtcatgtggcacgagtggcccttatgtcctcaaaccaggttagtgacccttatctatagtaccgccttacctagcgctcggatagaggcttagttaaagagaatgagggactctcatagccgattcgtagatagaggcataaggctctggtt

SEQ ID NO: 122310 - DNA, 271 bp, Glycine max
  Clone ID: PAT_MRT3847_81451C.1
gtgttgattgctcttttttattatgaatgcttattggtgaagtgaggtcctgctttttatattgatcgcaactacctggcaggcggaaagaagaaaggaaagtctccttttattctacggcccctaaggatgtgaccggtgcgataggccaggtctacaatcattccaccgttgctcaaaaaaagaagagttttatttcccattgagatgtgctacattgttagcgtcaatccacttgtagtgagttttggcctaaacttttcttattttg

SEQ ID NO: 122311 - DNA, 2173 bp, Glycine max
  Clone ID: PAT_MRT3847_81452C.1
cgagctcgagccgtcaagttctcttctgaaattaaatcatgtgttgctattagcattttctcttctttattttgttattatatattgtttgtgactatccacgtgttgctttcaaattctcattttcaagctgtttggtgtaaagatgggacaagtgcttggttgtgttcaagtgaagcagtcaactgtagccgtcaaggaatgtttcgggaagtacgatgatgttcttcaacctggttgccattttgtgccatggtgtcttggctgcggtgtggctggtgtcctttctacgcgtgtcatgcagctaagtcttcgttgtgaaactaagacaaaggacaatgtgtttgttaatgtggttgcctcaatccaatatcgagcattggcagaaaaggcatcagatgcttactacaaactcaccaataccaaagcacagatacaatcctatgtctttgatgttatcagagctactgttccaaagatggaacttgatgctgtttttgagcagaagaacacaattgcaaaagcagtggacgaagaacttgggaaggctatgtcagcatatgggtacgagatagttcagactcttattgtggatattgtgccggatgagcatgtgaagaaagccatgaatgagattaatgctgctgcaagattgagggtggctacaaacgacaaagctgaagcagagaaaataatgcagataaagcgagcagaaggggatgcagaatcaaagtacctagcaggccttggagtttctcgtcagcgccaagccatagttgatgggctaagagacagtgttctagcattttctggtaatgtgcctggaacatcatcaaaggatatcatggacatggttctcatgactcaatattttgacacaatgaaggagattggtgcatcctccaaatccaatgctgttttcattccacatggacctggtgctgtgagtgatgttgcttcacaagtaaggaatggtcttctccaaggaaatgcaacaacagagtcttgaagacatacacatatatcatcataccatgatttcctcctccaggcacttgtagtttagctttgcaactaaatctttatatatgctactattatgaatcatccatggcaagttggcaactaatgccttctatatgtatatggtcttcctaatcaaccatggcaactttcttaattttatccactattatgaatcttcaacttttatgatatctcattaaatataatataattacatacccacgcgtatgaatgatttcaaaaaaaaaaataaaaaaaaaccccctttttagtttgtgaatatagtaatgatagtgggcaaaattgctttatttgtgatttatagtttgtgtttgcgttaatgttatgtagatttaccctttgctttgtcttctatgagaatgagaattaccgaaaaaaaaatttttcctaagtggatagtgctttcaaatcagatgacgagtttgccctacgagaaattgggaagacattgtcctggattaaggacaatgtatgcatcacaagttgagccaaccatttctagaccagatataattttcttagtgttacaagttgagtcaatatatgcagcaacctcgcattcctgacttacatgcgatccatcacttgatagttgatatcatgtatctcaaactcaaagtagctcctgctcaaggactattgtttcttgtttcgaatcctcttaatttgtgtgcctatgtcgatgatgactaggttagttgcttggaaactttctaggcaatgcgctgatctctttggaagtccaagaagcctactgtgtccaaatctgcaatttgcaagtgaactggtgtagctcaaaatgctcattctccattttgaagttcccattcagtacttttcaatgactttttgtgacaattagtcaacacagtgacggatctagaatcctaagctaggaaggacaatttattaaaaaaataaaatttaataattaatattatgaaaggggtaaaaaattagagtgggtgtcaaatacacaaaattaggggggcagggggtgacggacaaaatttctacactcaacatatttatatgttattttaaaaaaatgagggaatgtagcattaatacattataatgtggatctaccactgagttagcgattcatctagcatcgaacatagct

SEQ ID NO: 122312 - DNA, 1421 bp, Glycine max
  Clone ID: PAT_MRT3847_81453C.1
ctctttgctattatcaaattcaagttctcattatcaaggtgttttgatctgttgagggggtttaatactgaaaatgggacaagtgttaggttgcgtgcaagtggatcagtcaagtttggccatcaaggaggttttcgggaagtacgatgatgttctcgaacctggttgccactgtgttccatggtgtttcggcagtcgtgtggctggtgctctttctttgcgtgtcaaacagctagatgttcgctgtgaaaccaagactaaggacaatgtctttgtgactgtggttgcttctatccaatatcgagcattggcagaaaaggcatcagatgcttactacaaactcaccaataccagatcacagatacaatcctatgtctttgatgttatcagagcaagtgttccaaagatggaactagatgctacttttgagcagaagaacgaaattgcaaaagcagtggaggaagaacttgggaaggtatttcctttcattttatttttaaattaagaatggagaactatgtaatctgtttggttttactttctaggctatgtcagcttatgggtacgagatagttcagactcttattgtggatattgagccggatgagcatgtgaagaaagccatgaatgagattaatgctgctgcaagattgagggtggctacaaacgacaaagctgaagcagagaaaataatgcagataaagcgagcagaaggggatgcagaatcaaagtacctagcaggccttggagtttctcgtcagcgccaagccatagttgatgggctaagagacagtgttctagcattttctggtaatgtgcctggaacatcatcaaaggatatcatggacatggttctcatgactcaatattttgacacaatgaaggagattggtgcatcctccaaatccaatgctgttttcattccacatggacctggtgctgtgagtgatgttgcttcacaagtaaggaatggtcttctccaaggaaatgcaacaacagagtcttgaagacatacacatatatcatcataccatgatttcctcctccaggcacttgtagtttagctttgcaactaaatctttatatatgctactattatgaatcatccatggcaagttggcaactaatgccttctatatgtatatggtcttcctaatcaaccatggcaactttcttaaaaaaaaaaaaaaaaaaacaaccacatccaaacgttttttgttttttatatatatgtcgttgccatctttgtcctctgggtttctatctagttcaatcctttttagtttgtgaatatagtaatgatagtgggcaaaattgctttatttgtgatttatagtttgtgtttgcgttaatgttatgtagatttatcctttgctttgtcttctatgagaatgagaattaccgataggctcatttttcct

SEQ ID NO: 122313 - DNA, 473 bp, Glycine max
  Clone ID: PAT_MRT3847_81454C.1
tttttttttttttttttttttttttttttttttttttttttttttttttttttttttttttttttttttttttttttttttttttttttcaaaaaaaaacggcccccaacgggcggcgggggaaccctttgaatgtttttgcatttgtgtgagttcgcccaaggcaaaaatgggggcccccctggggggccccacccccccccagtttggagccagggcccggggtcctctgggggggaaaaccaaaccaacggggggggaaagaacccctttggggtcaaagcccaacaaaaacaaccccgggaaaggcccattgccccccccccaaaaatccgggggaaaaatgggggatggcccccccaatttaaaaccccgggccctaaaggggatggcccaagttaaacgttgtccccaaatagttctaaaagcccaaacccggggtttcccccggaccgggctatttttataacccc

SEQ ID NO: 122314 - DNA, 960 bp, Glycine max
  Clone ID: PAT_MRT3847_81455C.1
gccccgtacgtaagctcggaattcggctcgagcgatgctttcggcaaatggcgaatcttgcattctgagcttccgagtccattaactcactgagtcaaacagccgagtcgagatcgcttaacatgttggacggaatactcggcagaggcttcaccgcgaaatgcaaatcgttgatcaaattgacgaacaggcgaatcgatgtgatacggaggaagagaagagcgacagagaagtttctgaagaaagatattgctgatctattgctcaacggtctcgatatcaatgcctatggaagggcttgtggttgagttaacactgtcctcttgctatggtttcgttgagaattgctgtgagtttgtgttgaagcatctccctgcgatgcagaaactgagtgtccttgccgctgccattggtctctcttcaccacgccactgcgctgccgtgccacctcgccactgcaccgccacccttagtcggccattgtgttagatggttgggtgtgtgctttctttttggtgctttcttggtctatggaggtaattgacgcaagtgttggtcatgctgatccgcgctacaggggttgtataacataacagcagaaaactggtgctgctttggattttgtttcctgtgatgactgcaaatgaaatttgtgtaactttcttcatgtctagtgtctagattttgtttatctagtgtttgattaaatgtttatggagattttggcttattgtttgacttgttttgaggattttagtttctctcatgtgtggtgatcaaacattatggcggaagttgatccatgtagccgaccccacctagtgagataaggcgttgttgtggtgatcaaacattattcattcgttagcttctgtcatgagtggttaagtcttgattattgttagtttataaagtgtttgtaaaaaatctttatagaaaacaaattttatgatttttcta

SEQ ID NO: 122315 - DNA, 561 bp, Glycine max
  Clone ID: PAT_MRT3847_81456C.1
gtgaagtaggcatttaattcattgaaaactgggagatctgtgaagtagtgatcactatctaaaactagttactatatttgttgtaaaacaagtagtaatttgtgcagggtgtgatggcagcagattggggcccagtggtgatatcagtggtgctgtttgtgctattaagcccagggttactgtttcagcttccagctaagggcaaggtggtggcatttgggagcatgcaaactagtggcttatccatcttagtccacaccatcatcttctttggactcatcaccatctttctacttgccattggtgtgcatatttactctggataatcaatcatcccctagcaatgtaccactatatgttgttttattctctatgattggtgtttttctttttgttcttttttattctggtttaaattattttgttgtaatgtaacttttaagatgtgatcaaggattgatgacttaattaatttcttctttcatttctctttcccatggaatattgatctgtgtgatgtacttcactttgctgatttatgtagaagaatatatgaattgg

SEQ ID NO: 122316 - DNA, 780 bp, Glycine max
  unsure (1)..(780): unsure at all n locations
  Clone ID: PAT_MRT3847_81457C.1
ccacgcgtccggcagtttcccagccaggaaggagaggccgcaatgtggaactccgccgagaacgccttcgccagatcgtcgtcgttcagggaggaaactgaggacgaggaagcgttgcgctgggcggcgctcgagaggcttcccacgtacaagcgagcgcgccgcggaatcttcaagaatgtcattggcgacatcaaggagatcgacgtcagagatctccaggcgcaggagcagcgccttcttcttgaaaggctcgttgactgtgtcgacaatgatcctgagaggttcttccaacgcatgagaagccgatttgacgcagtaggtttgcattttccgaaaatcgaagttcgatttcaggacttgaccgttgagacttacgtacatgtcggtagcagagctctgccaacgattcccaatttcatttgtaatatgactgaggctcttttaagacagttgcggatgtacagaagaaagagaagcaaattgacaattctagcagatatcagtgggattattaaaccttcaaggctaacgttgctgttgggtccgccaagctctggaaaaacaacactactattagctcttgctggtaggctaggacctgggttgcagatgtcagggaacattacatacaatggacatagcctgaaagagttcgttcctcagagaacctctgcctatgttagccaacaagatcggcatgtggcagagatgaccgtgagagacactctccagttngctggtcgctgtcaggcgttggattaaattttgatatgtgct

SEQ ID NO: 122317 - DNA, 258 bp, Glycine max
  unsure (1)..(258): unsure at all n locations
  Clone ID: PAT_MRT3847_81458C.1
attgtctaatttttttttttttaaaanaaaaaaaaaacaaacggttgataaaatcagatttcatattttatgggaccatgtgtaaccccaactaccccaccaaggggacaaagaacttcacaaaactaaccctaaaacacactttgcccaccacattatgactttctaccccctttcttagacgtagcctttttggctggagactttacactttttggtttaacactctttactggcgctttattagcaggcgctact

SEQ ID NO: 122318 - DNA, 386 bp, Glycine max
  Clone ID: PAT_MRT3847_81459C.1
aagaaggagaacattttttttgggttctaatataaaaaatagattaagccggggaaaaattgaataaccaaatacccttgtaaaagaaagaaaaaaagtaaaccccgatcaggccaatgcagcagcagcagctaaagccattttttttttcacattaccccctacgaccgggaattttcataaacctacaaaaccgttcaaaaaaagaaaggagggaccctttcctttccaaaaaaaaaaaaacaatttcaaacctttcagtacttataatccttaacatgaaggggctcaaaagcccctttcccaagggggggattccccttataaggtcccaggggagcctccgaatttgccttggacctaaaaaagaacccgcttttggcctt

SEQ ID NO: 122319 - DNA, 1695 bp, Glycine max
  unsure (1)..(1695): unsure at all n locations
  Clone ID: PAT_MRT3847_8145C.1
gtgatcccggatctcaggtgtattgcaaacttgctttttgcttctaattatgttcaggaatgctccaatgcttatattattgtccggagggatgccttagatgagtgcctcttcattcttgaaatggaaaggctcagcatcgaggatgtcttgaaaatggagtggggtactctgaattcaaaaatcaaaagatggatttgggctgtgaaaatttttgttagggtgtatcttgcaagtgagaggtggcttagtgaccagctttttggggagggtgagcctgttggtctatcttgttttgttgatgcatctaaggcttcgatattgcagcttctgaatttcggtgaagccatgtccattggccctcaccaacctgagaaattgtttcgtgttcttgacatatatgaggttctacaagaccttatgccagacattgatgctttgtattcagatgaggttggttcctcggtaaaaattgaatgtcatgaggttctgaagagacttaggcgattgtgtgagggtgacatttcttgaaatttgaaaatgcccagggcctcaagtgtttgcgtccgctccttttgtaggtggtgggatactatcctttgaccaaatatgttatgaattatcttagagcccttaccgactacagtgacatactcttgctgcttttgaaggtgaattatgaggatgccatttcgctgtcacctgacataagccctctgcttctggaggaccaagacgaggatgccatttcgctgtcacctgacataatggcccgtacagaggaagatagcgcaagccagggggatccaggtagagtttcctcaatggcccttcacttccgattctccttgcagatcttgttcttaatgaacgaggtgaagtccaagttatacaaagaagtctccttgcgaactcaggctcgtacatggagatgaatggattcgaaagcgcaactggaagtttcagcagcatgcaatgaaatatgagagagctagttggagttccattctcaacttgcttaaggatgagggagtttttgttccgggtataacttcggtctcaaaaagtcttgttaaagagaggctgcgaagcttctaccttggctttgaggatgtttacaggatccagacagcttggattatccctgattttcagcttcgtgaagatttgcggatttctatatctgtcaaagtaatccaagcttataggtcgtttgttggaaggttcagttcgtacacaagtgacaaaatcattaagtacagtcctgatgatttagaaaactaccttttggatttctttgaaggatctcaaaagttgttgcaaaatcctcataggaggtgatagcagataggcaagaataatcctgttctcttaacacaggtttgttgtatgtgttcataaacaggttagggtccatgtcaaaaccttattgtcccacttagtatgtattatattaaatgattgtaagagtttcagagttatgctgcccttttgcaatgtattcttttgatttacttaaacttgtttccaaaataggagtaataggatattctgttttctttctctttcgatattctgttttctttctctttaaggtttatgtgttcaacacatgcaataaatctaaagggtatggtcattattggccttaacgaanaaaaaaaaaaaagggcgggccgccactagtgagctcgt

SEQ ID NO: 122320 - DNA, 123 bp, Glycine max
  Clone ID: PAT_MRT3847_81460C.1
ccttaagtcagttctggcaaacatgcatggccctgctcttacttacactctggctatttgtaaatctgtacagctctttgaattatcgaaatgatctacgcactgtgagttgttttaaacgta

SEQ ID NO: 122321 - DNA, 426 bp, Glycine max
  Clone ID: PAT_MRT3847_81461C.1
gattggatacaagcgcgctctaaccattcagaagaaactgaggtgcatacgctatggcctagctagccataattgccgacgcccgagtacatgacccaaaagggttagaaatggctaggggggctccttgaccctacggtgaggataagatgagctcggaggaaatgaaacaagtatatactgaactacactgagagctaagtcttgctagctctagcaaggactggtgatgccggttgtgcacaaaattttagatcgtgcaggacctcagctgctaggggctcattgtttaaggatctgaccggtgagctcacacaagtgagtgcactcaacgatgcgagaacatagcctaggactgtggagatggatctcaacttatatgtgcaggagcctgtgctaaactttaatgctcttggagagcttgtc

SEQ ID NO: 122322 - DNA, 233 bp, Glycine max
  Clone ID: PAT_MRT3847_81462C.1
atcaccaacaataattactgcattacacaagtgctaattcatcaccactggctagaattttatacatgggggccggaaataaactatcgcaacctatacatattaaatcatctattaacctatctatcagccctcctaaaatttatcctagttcaaatataatgacaagaaaaaccatctttgcgactaatattataacataaccacaaatttttccacaaaaactttttttt

SEQ ID NO: 122323 - DNA, 868 bp, Glycine max
  Clone ID: PAT_MRT3847_81463C.1
aatgatatgatggaaacaggtaaaatattagtattagaaacaagtcattttgtttcggtcctttcttttaatagaaacataaatacgttaaatagataatagacatagttacattataagaattggtctaacaaactcctaacaatggagatttagctctcttataatcaaaggttttacacttcaaggactaatgcagatgaaagaagggattagatgactagaagaaagaaaaagaggaatggataaagcatgagggtttcctttatgaaataggtttagactttagatttttactagagaactctaagacccaatatgtattttattactacttactatttactatttcataggcctaatgtaacttatttttcacgctgagcacacgttcctgagtttaatgagaatgacagtttaatcacacacttaacgccttattggtgctaaaggcgaccttgacatttctcttgaaccttagcttgtcactaagcaagcacacacactgagtcaatgtcatactaaacaagttgttcacttctttcagcttttcttcaagatttctgtccatttttgtatcaattttcttttaaagcacttgaattctttttttcccgaacaagaacaagctcaaccctggaaagtgctctccacatgtagacgttttatatgacgaacccccggccaatcctcaccggatctctccacacaccttggctttaacaacttgcagttcgaaattcgcaaggtttctagagacttaagatctttcatcgcttcgggcagcgactccaatttttcgcatccagaaatattcaggctccgaagtgaggtgacttggcctatgcaatccctaatagaagttaac

SEQ ID NO: 122324 - DNA, 303 bp, Glycine max
  Clone ID: PAT_MRT3847_81464C.1
ccaagagagggaccccgggggagaattagaaaaacgcgggggcgcgaatacaccaaacggtacgagccagaaggagccacagaccgcgacaccaacaagcaaggaacccggcacaccccacgacgagagaagcacgaaaaccatcgcaccgctaacggggaccggccaccaaaaagcccgcgctcaccccaaaccaccgagcagccccaccaacgcctggaacaaccgcaggggagagaaaatagacgccaaccacaccgccaagagaaggacccgccccaaaccaaaaacaagcctccccac

SEQ ID NO: 122325 - DNA, 505 bp, Glycine max
  unsure (1)..(505): unsure at all n locations
  Clone ID: PAT_MRT3847_81465C.1
gtgaaaaaagtgcttatgctcattccaaatcccaagctggaagacccctaagtaatattgatgatttggaaaacatctggccgacagaaaaaaatggtatgcgtgagctgccagatcttaacttgtctgagggaaagtctgctacccaagcaacaaagtctgaaaacatgcacaagaaagagggttctagtgttaggccaaaaacttcaatgcttgaaaaggctcttcgtgagttggaaaaaatggttgcagaatctaggccaccagcagtggataaccaagaggctgatgctacattcccaggcagtncaaaaggaggttgcctagagaaataaagctaaagcttgctaaagttgctagactagcggcaacgcatgggaaagtatcanaagaagtaattaaccgtcttatgagtattcttgggcatctgattcagctaagaacattaaaagagaacttagcaatactgatcaatatcggtcttttagccaagcaggaggaggat

SEQ ID NO: 122326 - DNA, 271 bp, Glycine max
  Clone ID: PAT_MRT3847_81466C.1
gatcgtaagattgaccacaatctcttcgttgaattggctttatctgcaaaggaacatcagaaggggggacattgggatgcttttttgggtatctaataggctctcttgtcctaaagtcgacggttttggcatcttatcattaaagatgtccccaaccggagagctttgagctttctttgccacctgcattccatgccttaaccgcttcctgacactggttgtaagctccaattaatacttgtcactccacccacccctcctttctccccat

SEQ ID NO: 122327 - DNA, 385 bp, Glycine max
  Clone ID: PAT_MRT3847_81467C.1
ggaagggggcaaaaatatattttctttttctcaaaaaaagaaaaattcttttgtggccccaaaacccaaaacatgttttcccaaacaaggaccaggggtttcccccaaaataggggttggggggatcatcaaaggaataccttccaatcaaacccaacttttcttttttaagacttttgccccaaataactttttttattaaggggaccccctcaattgcggtgagaaaataaaagcatgcccccgagggcaattaacttttatttttgggacataaacatgggctttccacagagtgtttttagccttcccccccccattgtttgagccctggacccatttgtttgggcaaaaggggttccatcctgccccaaattagtgaaaa

SEQ ID NO: 122328 - DNA, 491 bp, Glycine max
  unsure (1)..(491): unsure at all n locations
  Clone ID: PAT_MRT3847_81468C.1
actcagaaaaattaactattactcaaaacaaatggaattacataagtactctcttgnnnaaacttgaactctagaacattaattaaattaaaaaattatcaactaattcacatattcaggggtaatactcgtttattttaagaaaatattttttttaattacaaaatagtagcccataatttctttgcattttcagtatagctttacttttgtgactaataaaatagtagctttttttccagcataactattaaaaaagtaggtataaatttttaattaattagcataaaaagttaataaatttactgaaaatatcaggttgtaattagatgagcgtaactcctttcatcgtgagtgaataaaacttttttttatcttttacattgagtttcttgaaactctaaaaaaagtattttatatatgagtatacttttatatgagatttatttcttaaaataagttaaaaattatttttttaaaacaaaaataat

SEQ ID NO: 122329 - DNA, 221 bp, Glycine max
  Clone ID: PAT_MRT3847_81469C.1
ttggtgggcattttttcaatctaatgaggagagaaggattacatagagagagggtattgtctttgaccgtaacaggacgtcaaaaaatcacactcagacacgaatggagcccagctagcgcccaccaaatgaagcgaattgtgggtggggaaatttgagccctcgatagtaacaggaagaagccccggcgggaatatagtcacctgcatttgaacagacaa

SEQ ID NO: 122330 - DNA, 838 bp, Glycine max
  Clone ID: PAT_MRT3847_8146C.1
gcgagtttatactttctaagtttgcacaagacatggttgaggaatggcttgatcgcgttgatgaggaggattcctttgaagaagtttatttaagtgcaacacttaatggtgctgagggtttggactatatggaaagaatttctcttgccacatctgatggttttcctcatgtgctttcacgcaaaaatggtgaaaaaggccaatggagatttgtttctggggatggtgaagagatgacatcgattccgggaaccattgttgaagaggcttacaacacgctaatagttgaacttgagaaaagtgttcctacatcggttggcattgatatgtcccaaagatgagaaacttactcgtcgcaaaatttttgacaaacctaagacgcgcttgttcactattctccctatggagtataatcttgtggtccgacagaagtttttaaattttgtgaggatcattatgaagaaaagggacacgcttagttgacaagttggaatcaacccatactccatggaatggactggtttggccaataaattactgagtaagggcaacgatattctgtgttgcgaacatgctagatttgatggtttgacaaccaagcaagttatgagcaagatggcagaaatgataaacagcctttgtggtggtgatgaaaaattgatgcgtgaaaggacacaccagctgttggctagttgctcaaggatggcaattagtaacaaagatgttcggagagttgaatgtggaatcccttctggatatccggtcacagccattcgcacatagcattattaatgagatgctcattagatatagctatgaaaaatcactgcgccaggct

SEQ ID NO: 122331 - DNA, 221 bp, Glycine max
  Clone ID: PAT_MRT3847_81470C.1
caagttttactgaggagagaagctgtctttaggtccggatgtagcttacctgtttcttacaacattactaatagctgagacctagcattgcattcgagagtaaagatatctcttaaaatcaagaagaccgatggactcattcatgatcaccagggttcctgtatagactgtggattcaattctgactgcttaggatgtaatattactacctctgacttctg

SEQ ID NO: 122332 - DNA, 928 bp, Glycine max
  Clone ID: PAT_MRT3847_81471C.1
gagaaaagcatggcatgttggtccaatgtttcttttcaacagggttaaagaagaaaaagcacatagaggaatggatgcatctattaatgatgagcatgagtgcttaaagtggcttgacacgaaggaaccgaattcagttgtttatgtgtgctttggaactacaacaaagttaactgattctcaacttgaggatattgccattggtctagaggcttcagggcaacaattcatctgggtcgtgaggaaaagcgaaaaagatggagttgatcaatggctacctgatggatttgaggaaaggatagaaggtaagggactaatcataagagggtgggcgcctcaagtgttgattcttgaacacgaagcgattggcgcgtttgtgacgcattgcggatggaattcaattttggaaggagtggttgcaggggtgcctatggtgacttggcctattgcttatgagcaatttttcaatgagaagttggtggccgagatcctcaaaattggagtacctgttggagctaagaaatgggctgcaggagttggggatactgttaagtgggaggcagtggagaaggctgtgaaaaggataatgattggggaagaagcagaagaaatgaggaacaaagccaaggggttttctcaactagctagacaatctgtggaagaaggaggatcttcttactcagatttggatgctttaattgcagagttgggttcactctcctactcaaatgagtaatgttatagttacttatatgtttctactaatcctcctattgctctataaaataagtattaaataaaaaaggaaatgtatttgatttgtttgagcatctttaatggagatgttttaagtgatgtgagcttaataagaattttgtaagtgtgggtgaaataccaaaaaattacataagcacactgcgcatatgct

SEQ ID NO: 122333 - DNA, 278 bp, Glycine max
  unsure (1)..(278): unsure at all n locations
  Clone ID: PAT_MRT3847_81472C.1
gcaaagttcaaaggnttttntccaaaaccaattcctatagttaaaccaattccaaagccnatttcctattattaaaccnntttcnantccangttaanaggcnaatncnaaaacnanttccnattgtnangcctattccaangtccaattcccngttgctangccaattcctaatgaggaggaanaattcaanggatttattccaaggcnanttccnataattaggcctnttccaaggataaatccnnattgttaaacctattccaagggatantccc

SEQ ID NO: 122334 - DNA, 501 bp, Glycine max
  unsure (1)..(501): unsure at all n locations
  Clone ID: PAT_MRT3847_81473C.1
cacggtggagacaccggctaggccagggggcctgcccttgggacaggtccagacccatggagccccccgggaggagcagcagccttcccttttcccctcccgcactcactctcaccttcttgcccccatcgcccaccctgccacttccctccctccctgtctctctctctgtctctctctgtctcttgctgtctctcaggtccacagcgtctcatactctacaccagtattgctgtcctactcaggtccttgactccatgaagcttaccccctcaggcaggctggcagagagcagggaagaggaggaggaggaggagactgaggaagaggaagaggaagacgctcaccagttctgctgtccggcctccgagtgcagtagtccctcctctcggtaactgagaggacaagggccattttctatgcagaagcaaaagccttaaccagcccctncttccncccacccacccccccgcagattcccccatgggaccctgtcccctg

SEQ ID NO: 122335 - DNA, 115 bp, Glycine max
  unsure (1)..(115): unsure at all n locations
  Clone ID: PAT_MRT3847_81474C.1
tcgcacgcacgcgtgcgtggcactcggctcgaggaccgctcgctcgcactgtgcagatcttaatcaagaggagtgagttncgtctttccagccatgacgacgctggtcctgcatg

SEQ ID NO: 122336 - DNA, 556 bp, Glycine max
  Clone ID: PAT_MRT3847_81475C.1
tttaccgctctacatgtgtagtagtaccaccttcttgggggggggggggggggggggggggggggggggggggggggggggggggggggggggggggggggggggggggggggggggggggggccccctaaaacccaaaggggaaaaaaccccaaaaagaaaaacccttttgcaatccccaaggggcgggaaatttttaactggcggttccaaacaatttttagacgccccccaaaaaaaatcccttaataaggaaccccccaaaaagggaaaaaaatggttttttaggcccccgggctaaatttaattgaataaatacccgcccttaaaaaagggtttgggggggccaaaaattccccccccgaaaaaattccaaggaaaggggggcctgcggcccaaactggcaatttttgaaggccccaaaatttttggggccaaatttggggagggcgggcctttttaaaagccggggcggcccttgcttttaaaggaccccccaattgggtttggggccaccccctaaaaaaaccttcaaggccccaaaatttcccccccc

SEQ ID NO: 122337 - DNA, 338 bp, Glycine max
  Clone ID: PAT_MRT3847_81476C.1
gttctagcgcaggctaaaaaaaaaaaaaaaaatagcttgttttgttacaaagggaaggggcagactgggacccaaaccccacggtggctttgttcttggggaaggcataaattcccacgttagttaaatacggtactgagttctacgcccgctatttacatccacgcacttttagttggccagatgttttttaacccaccttttttaaactaaaccttttttaaaaaagaggttttcataaggggatttgccttgactaaagaggcggtttttttcaaaacgaaatgtttatccctgattttttggccggccccctacggggtcacttccttccctta

SEQ ID NO: 122338 - DNA, 351 bp, Glycine max
  Clone ID: PAT_MRT3847_81477C.1
cgttcttttttttttttttttttttttttttttttttttttttttttttttttgcttttttggttttttttttttttctttttctcttttttgttttttctttttgatctctttttgaaaaaatccggggcaaacccctcctgccccccaacaaggggcccacccaccggggggctctagacttccaaggaaacccctgtcaacggggtgccctacggggctgcaaaaacggggccggcgcgaccgctgaagggcgccccccgttccacaggggcatctcacacgacccaccccaccggcgccggaatctccccccgggccggggcccccttcccaaaggggcccccacac

SEQ ID NO: 122339 - DNA, 319 bp, Glycine max
  Clone ID: PAT_MRT3847_81478C.1
tgtcaacctgctgcgcaattgttcgatataagactgatacttcgttcatcagtccatccttcgtttacaactctcgctgtatagcaattccacacccgttacctcgataaacagtccgatcgatcttctgaggatgaagtccttcgccgtactcgcccttgctgccactggcgtattggctcagagctctcctccatcaggatgccaggcttcgcgtgctggaaccttcaacgtccagactgtcaatgtcacccgttccgcgaagcgtgagctcgcagcgcgccagcaagctggtactttgaccttgactctacaagat

SEQ ID NO: 122340 - DNA, 783 bp, Glycine max
  unsure (1)..(783): unsure at all n locations
  Clone ID: PAT_MRT3847_81479C.1
cccgcctcgacccagcgtccgatcgctcttctgcgtttctgaattttgaagttagctgttaaattaccgagaatcagtcaatgaaagctgaacgtgtgagttcccggagaaagtcaatcagtctatcaatcatgatgcctgatgatgttgctgcacaagcatttcatgatggtgatagggttgaagctcaggcaatgcataggaatcaatcggcgtggatggctcattggaagcaaacaagttataaatcagcaacccctgcttgcaagaatttaggggttgattctgaggtgagaaaagagaaagaagacagcggtgctgagcagcatgatttacttggtgggttagatagttccatgcgtgctggagcagttggagaagcagctagggccacaagtgttaccttcagcaacgaggcagacgatgaaaaatctaagaaagcaggctgtgatcccaaaccatttcctacattcaaattttctcgaaagttagatggaagattgtctctgcagagggaacagcacgacggggaaggtggaaaatctgaaaccgaaccctgctctggagatggcaatgtttctctcaacagagctgggacttctggagtaggcttatcattagcatctgcacatgctcctcctaaaatagaagcactagcaaaagagtgccaagtattgtctcaagaagttttaccgacagctctggtgatgaaatctncttgngatgttgaacagaagaacctagctgnttcacatcacccatgaatgactntgcaaatcagct

SEQ ID NO: 122341 - DNA, 257 bp, Glycine max
  Clone ID: PAT_MRT3847_8147C.1
aggggcgggctttatcacaaggtgagttcgggaacaaattgttctttaaacacatgttttgtcttaaatacaaaaacgggatggtttttgtaaagatgcaaagacctccccattataaaaaatatttatttttgaaaaactgtccaaaagaaaaacttttaccaaaaaagctgaaaaaatagctgcttggcggtgaacataagaaacttgtctttacacaaaaaaatcccttgctggacccagaaaaactttcacct

SEQ ID NO: 122342 - DNA, 685 bp, Glycine max
  Clone ID: PAT_MRT3847_81480C.1
ctgggataaccgacaaggtagttgtttcctgtgtgtgtatgcgaggaaacaaactagttcctttggaagaacgcatcatggcagaagaccacccacagaggatgacgctagaggactactctagctttgctacacctcagtacttgaccagcatagccagactagatgtgcaagcggccaacatttcatatccacattccctcatccagctaattcaagggaatatatttcatggtctgccgagtgatgatccatacatacgcacacctggccacatacattgagacttgcaacacggtgaagctagcaggagtaccagaagacgccattcacctcaacctattttcttcctctttggcaagtgaagcgaaaagatggcttcactcattcaaggggaatagcctgtggacgtgggaagcgatggtggagaagttcctgaagaagtacttcccgaagtccaagaccgcttaggggaaggtggaaatctcatttaatcatgtagaagaaaatacaaataataattcaagcatgctcaacaaaagtgttcataagtaatcacatagaggttcaaccttctttgataccactaaatgtgacatcctctatcccgacatacatataaataagaaaaacatatttaaatgtgggaatttattaattgaaccaattttatttaaatcacata

SEQ ID NO: 122343 - DNA, 426 bp, Glycine max
  Clone ID: PAT_MRT3847_81481C.1
atggtgtacttcttaagagttttcaaacattttattacctttcctttaaaaaaaaaaagaaaaattaaaaaaaaaaaaggaaaaaaaaaaaaaaaaaaaaaaaaaaaaaaaaaaaaaaaaaaaaaaaaaaaaaaaaaaaaaaaaaaaaaaaaaaaaaaacccaaaaaaaaaaaaaagggccccccttcaaaaagacccaatctttcccccccctcctttccaatataaaaccttttttttcgggcccctaaattaaattcaatggcccccttttaaaaaccttcatacctgaaaaacccttccctaccccaatttaatcccttttcaaaaaaacccctttttcccattttgccataatcctaaaatcccccaacctaatcccttttcaaaacattttctcacccaaatattctaattgaacccccc

SEQ ID NO: 122344 - DNA, 312 bp, Glycine max
  Clone ID: PAT_MRT3847_81482C.1
acccacgcgaccgcaagcatccctctacattagcattatggtttgtgcttatagataaaagttgtgactcatgaacatttttactcagatcatagtctgtatcactgtgttaaacaatggctaatttctttgctgctatgatcttcacactcatttccattaccatgcttcaaacaatggttatggcttctaatgagcaatgaggccacttgtatgacaacaataacatatatgatagtgagattttcaacatataccattgcccatcacaatgctcgaagagatttaaccagacccaataccacaatccct

SEQ ID NO: 122345 - DNA, 532 bp, Glycine max
  unsure (1)..(532): unsure at all n locations
  Clone ID: PAT_MRT3847_81483C.1
ttccttccaaggaaggtttcccgtcatcactgtatgacgtcctccttctttgggggggggggggggggggggggcaacgagcacatgcgaggggaacggcccaaaaccataacattattaggttaccttatggccaacagcccgcctacgtccatgtaatgagtgttattccacctaatataaccatcacaccggtagtaaacggcccccgaaatgaaaaagagagataggcacccgtgtcgaaaatttatggtttacagtttaccgtagtaagataggcaagtaccggcaaaacaacgttgctacgatggtttgcagcagttacgcgtaaggcgtatagagagagtgatataatcccaccatgataaacgacgaacaattgcgaaagttgcaaatgatgaattgatgatgagagtacaaacggaaaaagtattcagaaaagagcggatagaagatcaaccccaacgccagaggatagataggagtgggcggantagacataaggggatggggtaaagagtaggggtgtcta

SEQ ID NO: 122346 - DNA, 1032 bp, Glycine max
  Clone ID: PAT_MRT3847_81484C.1
cggctcgagctcacattattattcatatctctctctctctcccccaagaaattcaacagagttttgattaacttgaaattgttcaacaagaaatggagaattcattgggaaagtacggaaaagagcttaatctcgaggctacagagttgaggttggggttgcctggaagcgatgagcctgagaaacgttctgctgttagaagcaacaagagatcttcaccagaagcaagtgaagaagagtgcataagcaagggcaacatgaattcttctgatggttctgatatcacaagtgatgaccaagacaacgttgtgccacctgcaaaggcacaagtagtgggatggccaccggttcgatcatataggaagaatagtctacaacaaaagaaagaagaacaggctgaaggggctgggatgtacgtgaaagttagcatggaaggtgcaccttacttgaggaagatagatctaaaggtttacaagagctacccagaactcctcaaggccttggaaaacatgttcaagtgcacatttggtcaatattcggaaagggaagggtataatggatctgaatatgctccaacttatgaagacaaggatggggattggatgctggttggagatgttccatggaacatgtttgtgtcatcctgcaagaggctgagaattatgaaaggatcagaagcaaaggggttgggttgtttttgaccctaaataaaaaaacaaagcaggaccatcatgcatgcccatatccaaaacatggagcaaagcaattttcagtgacgtcatccaaaagaattttttctgtttggaatatgcaagagctaggcacttggcctctgtgaaatggttatatttagcttattaaaaagagagatgcacatacccgattttattttccccttatttgtttatttcaaaaggtaggtgcctttttagacctgcttccttccgtaaaatattccaaattttcaatgccgaaaaaaaaaaaaaaaaaaaaaaaaaaaaagcggccgctctcccggccccaagcttacgt

SEQ ID NO: 122347 - DNA, 671 bp, Glycine max
  Clone ID: PAT_MRT3847_81485C.1
aagatcatcacatttaggtgattattatttcaaataaaataaaatggaatcatgcttctgaccactgttacttttcagctttgctatgcatatactgaattgaatgaccctgtagtacaacgacagagatttgctgaacaactcaaggtaatggaatttgacacaacagtactatgtactgtgctctaattgttgagctttttcttaataagaaatattaattgcaactgtttgttatttgtttcacatgtcaagatcggcaatctggcgatgatgaagtgttggcctcagatgaaacattttggagaattctgaagtaatcagaagcaaaggggttgggttgttttttggccaaataaaaaaacaaagcgggaccatcatgcatgcccatatccaaaacatggagcaaagcaattttcagtgacgtcatccaagagaatttcttctgtttggaatatgcaagagctaggcacttggcctctgtgaaatggttatatttagcttattaaaaagagagatgcacatacacgattttattttccctttatttgtttatttcaaaagctaggtgactttttagacctgcttaattaagtatactattccaaattctcaatgccgaaaaaaaaaaaaaaaaaaaaaaaaaaaaagcggccgctctagaggatcca

SEQ ID NO: 122348 - DNA, 1893 bp, Glycine max
  Clone ID: PAT_MRT3847_81486C.1
ccacgcgtccgcaaaaccctagttgttctacactctcgttccgtctttctccaacaatggaagttccttcggaagcgccgccgtctaccggcacctggagaaaccatgagcaaaaatgcgctgaagcggtaactcaagacaaactggcgcgtcggctgcgagaagacgacagaaggggacaccacaacttgcatctcatttctcatttctcacattattattcacatctccatctagatctctctctctctctctcccaagaaattcatcaacagacttgtgattaatttgcaattgttcaagtgatctatcaagaaattgataattcaatgggaaagtacgaaaaagagcttaatctcgaggctacagagttgagattggggttgcctggaagcgatgagcctgggaaacgttctattgttagaagcaataagagatcttcaacagaagcaagcgaggaagagtgcataagcaagggcaacatgaattctaatggttctgatatcacaagtgatgaccaagacaaccttgtgccacctgcaaaagcacaagtagtgggatggccaccggttcgatcatataggaagaatactctacaacaaaagaaagaggaacagggtgaagggtctgggatgtacgtgaaagttagcatggcaggtgcaccttacttaaggaagatagatctaaatgtttacaagagctacccagaacttctcaaggccttgggaaatatgttcaagtgcacatttggtgaatattcagaaagggaagggtacaatggatctgaatatgctccaacttatgaagacaaggatggggattggatgctggttggagatgttccatggaacatgtttgtgtcatcctgcaagagactgagaattatgaaagcatcagaagcaaaggggttgggttgtttttgaccaaaataaaaaaacaaagcaggaccatcatgcatgcccatatccaaaacatggagcaaagcaattttcagtgacgtcatccaagagaatttcttctgtttggaatatgcaagagctaggcacttggcctctgtgaaatggttatatttagcttattaaaaagagagatgcacatacacgattttattttccctttatttgtttatttcaaaagctaggtgactttttagacctgcttaattaagtatactattccaaattctcaatgcctaaaccagaattgaaaactgtaatgatgaaatgagaagaaaataaaaagcaaaaatgctattttaattgtatagactatatatagagaggataaacatatatatgaaaaactactttcatttgtcaggtcagtcaaaggttcaaacgttcggggagtggggtcttttttttaggctgtgtttcagtgtttcggtggttggcccaaatgaaaaaatggtttttctggacgtgaacccggggaggtttttcagtcttcacttttcaggtggccaataacaggacgaaataataatatggatgatgatgatgatggaaaatggaaattggaaaatcaagggagggactgaagccaaaataggcttatggaatttggagtttttgtttagctgttttgaatgcctttttacagtccgtcttctttttctttcgacccaatcaaaattttatatgcgctgaagcgcgaactcatgaacaaacagaaagaagaagataggaaacgcaaggaggaggacaaggccaaaaaggcagctgacatgcagaaggctaacgataacacatctgcacctgctgatgaagatgatatggacccaactcaataccttgagaagaggcataaagtatcttgcagttcataaggcagaggggaataacctatatcatgacaaatactatgtcactatgtctattgatcaatacatca

SEQ ID NO: 122349 - DNA, 414 bp, Glycine max
  Clone ID: PAT_MRT3847_81487C.1
ctcacacagtctttgattttttgaaacccagggacccagagactcggtgaggggggcttctcgaccaatggctctggtgctgttacaataggcgaagacgctgggataccccaaccaagtctcgattttgaaaaggacctcaattcactttttgttcattaaagatgtcacacacagctgatcaagttagccgtactcgcaagcgtaaccgtaaacattaccatgggatctttaaccgctactgcacccatctgataaggtgtaaacagcctttaggcatagccctccatgtgtcctggcacttgttacagaagcaaaaatggctgctccctggccgctgtcagcctagataccgccgacttcactagcgtacactctaatgcgaatagcgttgggtcatgggactacggtttt

SEQ ID NO: 122350 - DNA, 342 bp, Glycine max
  unsure (1)..(342): unsure at all n locations
  Clone ID: PAT_MRT3847_81488C.1
gcgccctttttttttttttttatttttttattcttatttatattattatataaagatagtctataatcactagaatttctatatatttatacttagtatataataattctagtgattatagctaagccaatatatatcataatataatatacccttttcttagggggggggggagggctattccttatcattnttantnaaanaaaaaaaattggggggggggtgtaactnaatagtttggcccctcaaaagatgacgcggggggagtttataaaatgaggggggcaggattggatgtactaggggttataagtttttgaatggggggggttgcgagaaaac

SEQ ID NO: 122351 - DNA, 264 bp, Glycine max
  unsure (1)..(264): unsure at all n locations
  Clone ID: PAT_MRT3847_81489C.1
atacccggtcgaccgacgcgtgcgcacagccttntccacatttgacataatcacataaagcgaatattgctgcaatgtctgtattcggaacttggatacttgcatgataatgctgatccacatattattcatcgggacatcaattcaacgaactgtgctaatttcttgatgatgatcgccgctaaatattgcagacttttgatttatcaaatcagagctccctgacattggccgaaccgtattcacttctacgtcgtcgtcctt

SEQ ID NO: 122352 - DNA, 639 bp, Glycine max
  Clone ID: PAT_MRT3847_8148C.1
ctactagctaagagaggaacttgagaaaagggttggtacattgttgggcatggactgtcccaaggacgagaaacttcctcgccgcaaaatcatagacaaacctaagacgcgctgcttaactatactccctatggagtttaatcctgtggtccgtcagaagtacttaaattctgtgaggttcattatgaagaaaagggacaagcttagttgccaagttggaatcaacccatactccatggaatggactggtttggccaataggttactgagcaagggcaacgatattctgtgttgcgattatgctagttacgatggtttgattaccaagcaagttatgagcaagaaggcagaaatgataaacagtctttgtggtggtgatgaaaaattgatgcgtgaaaagacacacccggtgttggctaggtgttcaaggatggcaatttgtgagaaagatgtgtggagagttgaatgtggaaacccttatggatttccgttcacagatatttgcaataacatgtttaatgagatgctgattagatatagctatgaaaaatcactgtgccaggctatagccccaaggatgttgttacaatctgtcaaaaaatatgtgtctttgtgtgtgcatggtgaagataacttaat

SEQ ID NO: 122353 - DNA, 439 bp, Glycine max
  Clone ID: PAT_MRT3847_81490C.1
ctcgaaactgatgagttttaattaaactatgccatggtaatgaaaccgcgtttttggtgtttcacactttgttcttgacagagtcaccccaaaacaaacctaaatcgccttctctctctctcgttcttttggccttgaaagttgaaagctccaatcttttgcatttttcatttcccttaatatttgattctttgtggagattttgcatttattcactttccttaaagtttgtttccttgtttgcgttttgtggcaatttctgattggttgagagtgaattctgaattctcacaccacctaccctttattctcatattttgtaacctctgatcattgtaaagttttgctctttctgggttttgaattttgccacttccaccctgaaattctacaaggtgtttttgatgttggtatcatcataagtcatagactatggttt

SEQ ID NO: 122354 - DNA, 143 bp, Glycine max
  Clone ID: PAT_MRT3847_81491C.1
ttttcgagcaccatgtgcacgttagcacaaactatcatggccacggaaacggcaggggcctcctcgggcgtgggggggacgcgtctccttgaggcttactcctgagcggtgcgagtgcactccccattcagcttctgcaagaa

SEQ ID NO: 122355 - DNA, 397 bp, Glycine max
  Clone ID: PAT_MRT3847_81492C.1
taacaaaaaacaaacccttttttttaaacgaaacaaaagaaaaacgctaaaatcaaagactcccctccagaccaagatcacataagcgaagtaacttgaaactcaaaaaacaccacaacttacacttcctggttaaaggaaagggggataaaccacccaaaaccaaattccgcaaagggctttttttggtttaacagcttttggaaaaaactccaaggggggggggggatccatttccttttaccaaccctttgggattaatttttccctttggggggttgggaggaacagcttttttcttcaagggggcttcaaaaaactttggaaatggaactggcccaaaagggaaaaaactgggcttggggacctggtttgggaacagggggtccttggactt

SEQ ID NO: 122356 - DNA, 364 bp, Glycine max
  unsure (1)..(364): unsure at all n locations
  Clone ID: PAT_MRT3847_81493C.1
gaagcccatagacatcnttggaaaagccaaagaagacgcttctcttcctaaagcaacaataacgaaaattattaaagaaatattacccccaaacatacatatcaccagagatacacaggatttattaatcaagtattatatcaaatttataaaccttatctcgtcagaatccaataaagtctataacaaagaagaaaaaagaacgattacaccgaagcacatatgaagaactgttaaaattctgaaatttagcgagtacattagagaaggggatacagcatatgaacaacacaaagtgaaaacaatgcaacattctntaaaagatgcagagaagaacaacagacctgagatnactgaagaagag

SEQ ID NO: 122357 - DNA, 213 bp, Glycine max
  Clone ID: PAT_MRT3847_81494C.1
ccgtttattctatctggacggaagctggttgactagctgtacaagaactgctaatgatggtgcctcatgccggctttaatagaggccaaggataaatgtgtattatgttaagaaagaaggggtgcctgaagggctcgatctgagaaatactgttctatatcatccttgctccttctgactgtctttcaatgctctagttatgcgagacaaatg

SEQ ID NO: 122358 - DNA, 389 bp, Glycine max
  Clone ID: PAT_MRT3847_81495C.1
aaaaataacccaccctttacacattttttccacaattaaaagagggggggaaattttcaaatagggcgagccttctcaacaagaggggcatgcctaatttccttttttggaataaacaaaccaaccagccaaaaaaaaccccaattcccaattattccaagggtttcccatttttaaaaaaatcgggcataccccttggaaaaaaaaaaacctggcttaaaatttttccccccattttcaaaattttgaaaaatccccaaaaaaatttcaaaacctgtaaactgtttgggattgccaaaaaggaaactcaaagcccctgaagtttgttttgccccctcaaaactcccctatttaaaaccttttttgggaccccatccctcttttgggaa

SEQ ID NO: 122359 - DNA, 234 bp, Glycine max
  Clone ID: PAT_MRT3847_81496C.1
cccacgcgtccgtacggctgcgagaagacgacagaaggggggggaaggagcaagaaaggaggtatcccatgatatctggcaataccgtaactattgggcttgcatgaggtattgaatgttttggagtctatgggggggggccaggaattatgtccactactatttgtttttgctacttcttgttcgcttgttggggaaacatttaaagtacctcattcatgttttttggacaag

SEQ ID NO: 122360 - DNA, 308 bp, Glycine max
  unsure (1)..(308): unsure at all n locations
  Clone ID: PAT_MRT3847_81497C.1
ggctcgagacaacctctagataaatggggaacaaaagctcatcaacttcaaaggcacaatatagtagtaatagccagggagaaaaggttgcttcaacacaactacaatatgttgctgctccacacccgaggaaaatctccacaaataatccaaaggatgtgagtcaaacacaacaacatggtaagaagccactaggtaatgatgaagctttcaccacttacattaaagatgctagggttaaaatgaagagcaagtcaaacatcggtgtccaccatgaggaatcgaacaacgttatanccgtagatgtg

SEQ ID NO: 122361 - DNA, 207 bp, Glycine max
  unsure (1)..(207): unsure at all n locations
  Clone ID: PAT_MRT3847_81498C.1
gatgctgtcctccacgcttgccttgaacagtgccgataccgcaggttggctgcgaaacatgcagcgtgaccaacttgggcatggtcttcggagagatcaccaccaaggccaacgttcactacgataagatcgtgcgtgacacctgcaggaacatcngaatacttctcacacgatgtgggacttgatgctgacaactgcaaggtcctt

SEQ ID NO: 122362 - DNA, 404 bp, Glycine max
  Clone ID: PAT_MRT3847_81499C.1
ctggattctgatcgagcttatattgagaagatgcatgcctatctattataatctgggatgcaaattacataaactgtatctcaagatctgaaaccactctgagggagcaatgtgaggagaaagatgcttcttggatatcattgccacagcttggggactgggatcagaatggacaagtgccagactactctctagatttctctaaacaccgggaaaggaggaagcagaacatgacaaaggtttacagggccagtcttgatgatgaataggagctcatggctggtcctggcactaacaattctatcactgaacacagagatgaccaccatcacccccactaccaccagatctactgtccaactgctgagaggagcatactgagctacttcaactgtggcataaaa

SEQ ID NO: 122363 - DNA, 203 bp, Glycine max
  Clone ID: PAT_MRT3847_8149C.1
ggcaaaaacctcccttttcgtttggaatggggatcttttctgatttaccaagtcccttggcttctgccttcacatttaaaatgcccgtgggatcaacttcgaagggcacttcaatttgaggggggccccttggagctggggggattccccacagatcaaatttcccaagaaggggacaatcctttgtgggactccccttacct

SEQ ID NO: 122364 - DNA, 430 bp, Glycine max
  Clone ID: PAT_MRT3847_814C.1
ctcggcacctagagacgacgcagggccttttaagcggcgaaatgcttaggcgagtacagggtaagcgtatatccggggattcctgatatacgtgaacctttcggactgctggtgaattcacgggcaggcaagagacaacctggtgaactgaagcatcttagtagccagaggaaaagaaagcaaaagcgattccgagtaatatcggcgagcgaaatgagagcagcctagaccgcgataacagagctagtgcagatctatacaagggtctagctgctagcgcgaagcagcagagaatgctgtgccctagatggcgagagtgcagttgccgaacgcattactagcttacgctctgactgctaatagcatgcatcacgtggaatgacgtgtgaatcagcaaggaccacgttgcaaggctaaagactgctggatg

SEQ ID NO: 122365 - DNA, 416 bp, Glycine max
  Clone ID: PAT_MRT3847_81500C.1
ggagaggaaaaaaatccacttattgcttactagggattttataaaaagttcccaataccttgcccgccacaaaattgcggggggcctttgttttcaaattgaaattgacaaaaccaaaacccattttagctttttataaaactttttttatcccctaagcacctcggcccaaataaaaatgcaaagcccctaaaagggcaatgttcttcccatctattttttttactcaactaagggtttacttcacccaaactaagttttttggcttttgaattatcaggggggggcaaaaaaaagggcccccttttttgcactcccggggcataaaaaaccctttttcatgttgaaaaacaaaaaaaatccacttttcccgggatccccaaccaatttttgggcaaaccaagggaggataattt

SEQ ID NO: 122366 - DNA, 138 bp, Glycine max
  Clone ID: PAT_MRT3847_81501C.1
attatgtaaaagtaacatttttcatagttccaggttttcaccaattttattaaccttttactctacatcccaaaaaagagattaatttaagacgccttaccaaataccaaaacaccgtcatttaaaagataaaacgtt

SEQ ID NO: 122367 - DNA, 1299 bp, Glycine max
  Clone ID: PAT_MRT3847_81502C.1
tcaagatgcacaaagttctcatgttacagcttttaattcaggtgatggatcctcaaagtcggacaacgaacgggatgttcatatttcaatgcggttaatggaggactttcttgatcttgctaaagaaaatacagaaaaggatttggaaacttgtggtatacttggtgcctatcttgagaagggaaccctctatttgactaccctgatcataccaaagcaggaatcagcttccaattcttgtcaagctacaaatgaggaggaagtttttaaaattctaaatgaaagatccctttatcctgtgggatggatccatacacatccttctcaaagttgtttcatgtcatcggtggatctgcacactcaatattcctaccaggtgatgattcctgaggcatttgccattgtcttggcaccaaatgatacctcaaggagctgtggattatttcgtctgaccaaacctgaaggaatgaatattctaaaaaattgccaggagacaggatttcacccacacaaagaaccagacaatggcagccccgtatatgagcactgctccaatgtgtacaaaaactccaatctaaggtttgaaatctttgatttacgccaaaaatgactttgatggcaacacactgtatcatatgacagatagaagcatagttacaaaggaatgtcccagttacacctgaaagaaaaaagctgaatactgaatacaacagttgtaatgtttggtttaatgtaataaggtaggtttagtaagttggataccaactaactatccacgctaaattcaaagctttaggaaataaatttaatgaggattactttgccatggtgcagcggtaaagttgtgccttggtgacttgttggtcatgggttcgaatccggaaacagtctctttgcatatgcaagggtaaggctgcgtacaacatccctcccccataaatggggtacgaagttttttataaatttagtcgcaatatttttgtttggtccctacatgaaaaattgcttacaaattagtccttactgtttaagttttaatggtgttagtttttagtttttttcatataaaactaaaaatgatctgtcgggtgtagggaagtgtaaaattttcgctttataactaaaatgaaaaacgatgttattttgtaaaatagagaggggccgaatctaataccgttgtaatgtttccaaacagcagggatcaaatcataaatgtttgttcatgtaggaactaaaatgcacaatttatgtaaggtgtagaaactaattttttaattttaccttcttaatattatggtg

SEQ ID NO: 122368 - DNA, 743 bp, Glycine max
  Clone ID: PAT_MRT3847_81503C.1
gtcgggagcaggttcctgcctgtgacatggacagatgtaaagaaaactgtgtctccaggcctgttaagaccactgttcccttcggtccgaaacgcgtcttggtgactgagcagattccatctcagaacctaggatctgctagcagtggccaggcccagcgggtcctgtgtccttctaactcccagcgtgtcccttcacaagcccagaaacttggagcaggtcagaagccggcaccaaagcagttgccagctgccagtgttcctcgacctgtgtcccggctcaataacccccagaagaatgagcagcctgcagcctccggaaatgattctgaaaaggagcaggcatccttgcagaagaccgaagacacaaaaaaaaggcagtggactttggaagattttgacattggccgcccactaggaaaagggaagtttggaaatgtctacttggcgcgggagagacaaagcaagttcatcctggctctgaaggtgctgtttaaaacacagctggagaaggcgaacgtggagcaccagcttcggagagaggtggagatccagtcgcacctgcggcaccccaacatcctcaggctgtatggctatttccatgacgccacccgagtttatctgattctagaatatgcgccccttggaacagtctatagagagctccaaaactctccagtttgacgagcagagaacagctacttacatcactgagttggcaaacgctctgtcttactgtcattc

SEQ ID NO: 122369 - DNA, 339 bp, Glycine max
  Clone ID: PAT_MRT3847_81504C.1
ctggtacgcgtgggtcaaacctgccaagaaagctaatttaatgaacacacgcgcattgctggagtaaactgggagcgaattgccctaaacaataccctgcatgtgctactccccttgcaggtgatagggaattccttgtatcacagcttatatgcaagaaccaaagagcaagacccatcataatggaccctgctctttacttatcaaagaaagctgaactagcacagagtgctcaacgaagaacactgcccacgtgctacaaacagcccactggactggctataactataagcaccaaacacctataaattctaatgtctactgcaaatttaaagaaag

SEQ ID NO: 122370 - DNA, 207 bp, Glycine max
  Clone ID: PAT_MRT3847_81505C.1
cttgactgtctctctctcgcgtagataaggcagagaggataaggagagatgcttgtacctagagagataagaggcgacaataatacatggggtagcaaggtctatacacggtaggagctagaatactcgatagcaccgacagacatccaagtttccgatgagcttttgggcagccacggtggcttcaacggtggcgctcgtatttgc

SEQ ID NO: 122371 - DNA, 316 bp, Glycine max
  Clone ID: PAT_MRT3847_81506C.1
gaaagttctattttttttattactttgattgctaattgttcacattcttagttttacaaggaccgttaatggacccgggatgcacactttcacaaaggccccgatcttataaaaagaaaagaccagattatacgactttcacattctttaggggccaccaaagaagggacctgcacaccattctcaaatttaaaaccctccaaaaaaacacaagacagggtgaagagttcactctttcttgatgccccacacagaaggagcccttccatccttcagatgcttcccaccccaaatcaacctctgagggggggggggg

SEQ ID NO: 122372 - DNA, 814 bp, Glycine max
  Clone ID: PAT_MRT3847_81507C.1
ctttctcgtgttcttacgcggaggcggactcgtgggcggacgcgtgggcggacgcgtgggtggagatgagctttttaaggatgaaatgacagacgctcaaagggaaataaaacagaacttatttgaggatcaacagcaacagcttgaagcaaatgttgaaaagctctctaaaattttggaagagccttttgaaaccttttcagatgacaaggttgttgagataaggatgcatatactcaacctttctacaattattgacaaactttgtcaaaaaatgtatgaatgcatcgagaatgatctattgggttctctcaatcttggcattcatagtattgctccatacaagtcaaagggcattgagccgatcagaactttcagtttgctggaacaacaaagtcaataatactggtgtaacagaagaacttgatcgaccatctggatcagggagttcagaggatagtggatgctcttctcgtaagcgtcctagaaaagagggtcttggaggaggtggtttttttgatctaaacttgccagcagagtttgtagacagaaattgactttgaaggacaccttattatacgtacaggcgtacaggtctaacaacataaaattgctttgctgcctttggaaggaaggaattattctttttggatttcacaccccatttgctttctcatatctttcttttagccatatgtctctgctgagataagatatgtttccaaagtttcttattcctatgccatctacctttctgtttgaaatcctagcgctgtatatagataccttggcatttatttgctagtagttttat

SEQ ID NO: 122373 - DNA, 2903 bp, Glycine max
  Clone ID: PAT_MRT3847_81508C.1
ggctcgagtccgtctctctctcttactctctctctttctctgtgttcgtgagtggagtggcgtatgtgtagctgcgctctctatcgccggcgctctcgtcggaatttccgttattgatttttccgatcaccggattcgatccaatccctaatccctaatcccgcgattccatcaattgaaaaaattgaatagccattgaaccgtttcgtttcgggggtagcggagatggacgtttacgcgagcagcgacgaagattaccattacgactccgaccacgaggactccgtcgaggcctacgaaaacgacgagaattacgccttgctctcttccaagggcaccactactaaggtgattacaaaggaatcactgctagctgcacagaaggaggatttgcgcagagtgatggacatgctatcggtgagagagcaacatgctcggacgctgcttatttttcatcgttgggatgtggagaatctgtttgaagtgttagtagacaaggggaaatcatttctctttgctgaagctggtgttagtgtggatgaacatcgcaactctgactcacctgttcctcctgcattcatgtgctacatctgtatggaggaagttcctagtagcaaaacaacgagaatggactgcggtgattaattttgcaacattagttggatagagcactttattgtcaagataaatgagggtcaaagtaagcgcattagatgcatggaacacaagtgcaattccatatgtgatgatgcccttgtaagaactctactcagtagagagcaccctcatatggcagagaaatatgaacgctttctgcttgaatcttacattgaagacaataagagagttaaatggtgccccagcacacctcattgtgggaatgcaatacgggtcgaggatgatgaactgtgtgaggtagaatgttcatgtggtgtacaattttgttttagttgtttgtcagaagcacactccccttgttcatgtctgatgtgggagctttgggctaagaagtgccgagatgaatcagaaacagttaattggataactgttcatacaaaaccatgtccaaagtgtcacaaaccagtggagaagaatggtggttgtaacttggttagctgtatctgtggccaagcattttgttggttgtgtggtggagctactggccgagagcatacttggtcaagtatagctggtcatagctgtggtcgatacaaagagcaagaaaaaacagctgaacgtgcaaagagggatctatatcgttatatgcattatcataaccgatataaagctcacacagactcctttaagattgaaagtaaactgaaagagactatacaagggaagattgccatttcagaagaaaaagattctacactcagagattatagctgggtaaataatggactctccagacttttcagatctaggcgagtcctatcatattcatatgcatttgcattttatatgtttggagatgagctttttaaggatgaaatgacagatgctcaacgggaaataaaacagaacttatttgaggatcaacagcaacagcttgaggcaaatgttgaaaagctctctaaaattttggaggagccttttgaaaccttttcagatgataaggttgttgagataaggatgcagatactcaacctttcaacaattattgacaaactttgtcaaaaaatgtatgaatgcattgagaatgatctattgggttctctcaatcttggcattcatagtattgctccatacaagtcaaagggcatcgagagggcatcagaactttcagttggctggaataatggagtcaataatactggtaaatgtcttttagggggtttgtttgaataattagctttaccaaaactcttttgcgtcagcattgccaacataaattgtctttgctctcataatgaattaacaggaaatctttttagacttccaaccttacttgctttctcttatctttcttttatccagatgtctcttgtagaattaaaactgtttccaaagtttcttattcttattctatctatatttctgtttgaaatcctagtgctttttaaaaaaaccttagcatttatttgctctcatttttatgtaaattgctagcgcttgggaaattttaatggggcttttattcctattttatggttttatttgactttgtggatgctcatctgaaattgttactgagtgaaaaggattattgtatatatgctgcaagcgtaggtgtaacagaagaacttgatcgaccatctggatcagggagttcagacgataatggatgttcttctcgtaaacgtgctagaaaagagggtcttggaggtggtggtttttttgatctaaacttgccagcagagtttgtagacagaaattgactttgaaggacaccttattatacgtacaggcgtacaggtctaacaacataaaattgctttgctttgctgcctttggaaggaaggaattaatctttttggatttcataccccatttgctttctcatatctttcttttagccagccatgtctctgctgagataaaagatatgtttccaaggtttcttattcctatgccatctacctttctgtttgaaatcctagcgctgtatatagatagccttggggcatttatttgctagtagttttatgtaaatggctaccttgaggacaactaggatgcttttattcctattttatggagttataggtggaggtaacttcactgatttttcttctctcatgtttacactattttaacttgtttaagttacaattttcaagcgtctagggtgcttttattcctatcttttgaagaaaaatcagtgaagttacctccaccctcttccataacttgcttcaaaatggataaagcaattgtctcggcttcttgaagggttaggc

SEQ ID NO: 122374 - DNA, 212 bp, Glycine max
  unsure (1)..(212): unsure at all n locations
  Clone ID: PAT_MRT3847_81509C.1
gtggagctcatgatgtccatcatcattgatcgtgagtatgtactacgaatctacgatcgtgttgacaacttaacgatttgctgacaatgcttttaataagggtgtgagagttttattggaaccattgccccgaatncaaaccggcccggtaaacggggggggatttttcaaggcgcaagtgcggatgcaaaagcccggtaacccttttaaag

SEQ ID NO: 122375 - DNA, 851 bp, Glycine max
  Clone ID: PAT_MRT3847_8150C.1
gagcccatactccatggaatggagtatgggttgatcccatcttcacaactactcttgtcccttttctgcgtgatgaacccatactccatggaatgaactagttttggccaataaattactgagtaagggcaacgatattctgtgttgccattatgctagttttgatggttcgattaccaaacaagttatgagcaaaatggctgaaatgataaacactctttctggtggtgatgcaaaattgattcgtgaaaagacacacctgctgttggcttgttgatcaaggatggcaattcgcaagaaagatgttaggagagttgaatgtggaatcccttctggatttccgctcacagttatttgcactagcatttttaatgagatgctcattagatatagctatgaaaaattactgcgccaggctagagcttcaagcatgtttttacaatccttcaaaaattttgtttctttgtgcgtgtatggtgatgataacttaattagtcgtcatgaatatgtcaagccttactttagtggttctaaattgaaaagctttctagctggtcataatatcaccatcactgatggtattgacaaaactagtgcaactgtgcaatttagaaagctagcagattgtgattgtctcaagagaaactttaagcagatgtctagtgttgtgtgggtggctcctgaggactaggctagcctatggtgacagcttcgtcatgactagtgcaactatgtggtaatgcaagatggcaaactgggcaatctcgaagatgaactacgagcataggattaacgcagtgcagaggagcgcctgacgacagggacggtatgtggtcactactatagtatgg

SEQ ID NO: 122376 - DNA, 431 bp, Glycine max
  Clone ID: PAT_MRT3847_81510C.1
aataactaaacaattcatttaacatttcaaagtttggttaaacacagtaataccaaattcgtgttttcctgatataaaactagcatgactgttgtttgcttcaccccttttttggggtccgaaatgttaaattccatcaggattgttgacttccaaaatgatccgctctagaaggttaaaaaaaaaaccaacttaaccagccaaaaattcatgcatttgtatttttttttggggttttactatcttttggatttttttcagaaaaataataggagggttaacccaattcaccttactcaagttggtggttgtcaattacggaattcagagtacttgactttgtctttgacaagatcatgagcacaacattttcagggcattcaaggcacctttccctaccttgctcaacacaacatcacataaggcgatct

SEQ ID NO: 122377 - DNA, 296 bp, Glycine max
  Clone ID: PAT_MRT3847_81511C.1
aaaaaccaatcaaaccaagcgggggtcattttataaaaccgagcacgtgcacaatgcacatgtgagccaaaaccaatgtataacacctaactaaacagggggtgagcaagcgcgccaacacactggagaaacttgcttaatgagactgcacgaccatccattcctagtccacaacaaaacatggtccttacagtattaacacacaatcatagattaatgaaactggcacacactcgctcatggactaccactttttttccgacacataagcgaccacctttttcgtgttggacaca

SEQ ID NO: 122378 - DNA, 763 bp, Glycine max
  Clone ID: PAT_MRT3847_81512C.1
cccacgcgtccgtacggctgcgagaagacgacagaagggggctcttggctgatatttcctgataagtggacagacgcttaaacagagaaactaacacagatttgcatgcatggggaaaataacgcacattgtagtaattcccagtgcagggtacagccacttcgttcccgttatccacttctcaaagagacttgttgagcttcacccagaaattcacgtcacatgcatcattcccattctggggtctctcccaagtgctgcaaaacccattctccaaacccttccacaaaacatcaacacggttttccttccaccggtgaaccctaatgacctaccacaaggtgttcccgtagttgtccaaattcagctagcaatggctcactccatgccctccatccaccacaccctcaagtccataacttcaaagactccctacgtggccatggtggttgattctttcgccatgcatgccctagatttcgctcacgagttcaacatgttgtcctacgtttacttccctatatcagccaccacactctccatgcacttgaacttgcccttgttggacgaggaaacatcatgtgagtacagatatctgccggaggctatcaaattaccgggttgcgtgccgtttcacggccgcgatctctatgcccaagcccaggatcgaaccagtcaactctaccagatgtcgctgaagcgttacaaacgatgctggttcgttaatgggatctttatcaacagcttcctggcattggaaact

SEQ ID NO: 122379 - DNA, 556 bp, Glycine max
  Clone ID: PAT_MRT3847_81513C.1
gtgcggtttccaagcacgactaaaaacacctttttcctctcacaccgacagtttcaagaagcaaggaggagaattcacataaatcatggtggagattcacgaagaaatcgacccctttgatcaagaagaacatgaagaggaagaaaccgactatgatcagctaaagaagcggatgcagaaggatcggatcctgctgcagcagatgaaggagaaacgccccaaagaagaggcaggccaacaagaaaaacaagaagcatctaggcggaagaagatgtcaagagcacaagactctatcctcaagtacatggtgaagattatggaggtttgcaatgctcaaggttttgtgtatggtattgtccctgagaagggaaagccagtgactggttcttctgacagcttgcgtgagtggtggaaagaaaaggtcaaatttgatcaaaatgcaccaggcgccattgcgaaatacatgccactccttgaaacagatgagttggatccaagttcctacatacatctccttaatgacttgcaggacacaccgctggtgggggggctgctg

SEQ ID NO: 122380 - DNA, 572 bp, Glycine max
  unsure (1)..(572): unsure at all n locations
  Clone ID: PAT_MRT3847_81514C.1
ccacgcgtccgatcttcaaaaccctcgttatcggaaacgcgcaaacacagagtgatcgagttcgaagaagaagaagagagcacgcggcgcgagcgaaaccaccaccgcttccgccaccatggttagggctcgcgagaactgggagaagctggttcgcgcgacgctgaagagggagcaacataggaatgcgggccaaggccacgccagagtccccagcggaatcgccggcgcggttccgccgtcgctcgcgcaaaccaccaacattgacttgatcttgcaggccgccgacgatattcaatctgaggatcccaacgtcgccaggatcttgtgtgagcaggcatatagtatggctcaaaatcttgatcccaacagtgatggtaggggagttctgcagttcaagactggtttaatgtctgttatcaagcaaaaacttgttaagaaggatagggtacggattgatcgcaaccatgacattgaacacctgtggaagttntatcaacactacaagncacgccatagagtggatgacantccacgagaagaacagagactggcagaatctggaactttta

SEQ ID NO: 122381 - DNA, 330 bp, Glycine max
  unsure (1)..(330): unsure at all n locations
  Clone ID: PAT_MRT3847_81515C.1
ggnangngtangtaagnncggaattcggctcgagtgaanccagggnaanagntanataaatanaaatngnnangccggtangtcgtcttnagncatntngntgaggagnngnagnattagggttttacatntgnttcaatggggaagggaanagggagtntnggtaagagaaggaacaagagtcanantntgctgtgtgaggtgtggnngnngnagcngtngatnnnnagaagagtnggncnngangnttgtgntttnanngangnacgnattaggaaatataannggagngtgaaggnaatcngnagnanggagnanggnanggcagga

SEQ ID NO: 122382 - DNA, 387 bp, Glycine max
  unsure (1)..(387): unsure at all n locations
  Clone ID: PAT_MRT3847_81516C.1
aaaaattaatgctgcagtctaacggtcntnaagggtnaagactncnnngnatatntgctggggntgcggagagtggnnaatatgnngntngntgnngtantntgcttgtgttagatnntggcnantgtagcgcganggtntgtgtgngtcagagancggttagnggtnggaggagagtcctggttgtngngtcttggatggaangtggcncnctttggtggtnggcttaaagtgcatgggncagggcttcatgccctgcnctgnttcaacgctgctcgccaaggtggtgntctgccctntgatgcctctccancctgaagaagacgatccctctgcagtccagtttacaatgganatggctngctccgnagctgnnatnntgcnaaa

SEQ ID NO: 122383 - DNA, 616 bp, Glycine max
  unsure (1)..(616): unsure at all n locations
  Clone ID: PAT_MRT3847_81517C.1
aattaaaatatctatggcatctctattcctcgtagtacaatttaattataacatagcaaaagaaaattcttaaatataacgagcatgaattgaaattcaattaatgctagatagatggagaacctttaaataaatgcactatcagagagagttataatatctatcgagagttacaagtacatgacagcaccaacacctaaaattagcaaggcaaagaataatattgatgaggagggctctaagagacctaactcaccccttgtaccacgtttatgatgagtcagtcactgtttgactctcttattcttgaggccaccgccaagaacatcaacagcatgcggcatagggaacaaagattccaaatctttggacagatcaagcacaattcttggtcgacactcttttcttttcgtgtctggctttgattttgtcttcttgggtgcacctgngcactctaggatcaccgggattttgtggtccgaagatgttggagtcttcaacccgtcgtcatcgttctctgatcccacacgcgaatacggaatctctagtttcaagtttataggaggacacaccggttttgctgtaacgatcatgttggtgcgtcgttgcttttgct

SEQ ID NO: 122384 - DNA, 542 bp, Glycine max
  Clone ID: PAT_MRT3847_81518C.1
cttccggcaactttcttaaccgtaggcttgcccagaacctccaggacaagcgccagaagcccctccgggtagctactaccctgaaccccccaatagtggagggcagtatggtagtggcctaccccctggtggtggttatgggggtcctgcccctggagggccttatggaccaccagctggtggagggccctatggacaccccaatcctgggatgttcccctctggaactccaggaggaccatatggcggtgcagctcccgggggcccctatggtcagccacctccaagttcctacggtgcccagcagcctgggctttatggacagggtggcgcccctcccaatgtggatcctgaggcctactactggttccagtcggtggactcagatcacagtggctatatctccatgaaggagctaaagcaggccctggtcaactgcaattggtcttctctcaatgatgagacctgcctcatgatgataaacatgtttgacaagaccaagtcaggccgcatcgatgtctacggcttctcagccctgtgga

SEQ ID NO: 122385 - DNA, 363 bp, Glycine max
  Clone ID: PAT_MRT3847_81519C.1
ggctcgagttcacccatatacatctttatcttttaatcctaaacgtctaccttttccgggatgggggtaattgataacatacccgatctggttgacgttaccctgtagatcgtaaatgccaacaaagctgtctcttgagttcctggacacttacggctttcaatgacaaatgtgatgtacccgaatttcaaaaaattgataacctttgtttaggagacagcactacttggcgttaacaagatctacatgttgatgacaaaagtgtctaatttcatgaattataaagcacatatgggatctacaataagttctacaactgtccacttcactggtaaggcactaaaaactccagacttactttac

SEQ ID NO: 122386 - DNA, 193 bp, Glycine max
  Clone ID: PAT_MRT3847_8151C.1
agctcggaattcggctcgaggtgaatcttagaccacactacctggttttcaggaccacgaatcactactactacgggggtgtttttttcgaaactgctatcggacacttgagggcagggtggggctcaaaagggtcggaatttgaggcactgactactgactgtaaaatcaatgaatggcatgacactgatag

SEQ ID NO: 122387 - DNA, 360 bp, Glycine max
  Clone ID: PAT_MRT3847_81520C.1
caaatcaatcattatttgaagaacaccattcacaacatggaccattgttctcaaccaagcaactacaaggcctaatgcaactccaagatctccaaggcaacacaaacaactccgattcttgttcagttgctgctcctaattccaatcttttcaacctaagtttcttcccaagtagcaatattagcactggcaccataatccctgatcaattcaacaacataagtggtggtgaccaaggaacaacaacaacaacaacactatatggcaatgcaatagaaaacgtgacatcccctcatgttggatcgagtatttgttctatctttggcaattcgatggaaaatgtgtccgcccctcatatgt

SEQ ID NO: 122388 - DNA, 795 bp, Glycine max
  Clone ID: PAT_MRT3847_81521C.1
tagctattattctctttttcatttctcagtttcgtttccaaaataacattccttctggatagagaatctataagctttttgctcatagcctcacaagcaccttgctttctctttttcccattgttagtggtttttattgatttctgggtcagtgtggttttttcctgttccacgagtttggtcaagtttccagtgaatttgttaggtgtgatccatgtagccgatctcacctagtgggataaggctttgttgttgttgttgtggtggtggttttgtgattattgggctgccatggatctggttggatcttctggtttgagtcctacagggtccaagtgaaggtcaaagtttcgttttttatggtgtgagtgattcagctgctgaatgagtttgaaatggtgggtcagttttagctgaaaaaaggggtgtgaggatagaaaatgaagcgcaaggtggttcagcacaagtggaagaagaagctttttgctttgatcttggtggtgttttgtttaggaagcttgttgtttatgcagacacgttaccatcatgttgcggggttggtttcattgcaacaccgttttgtttctgagcccgaggttcaagggcccaaggttgcgtttctcttcattgcacggaacaggctccctttggaaatggtttgggatgctttctttaggggaggcgatcgcaaattctcaatttttgtacactgcaggcctgggtttcttctcaacaaggcaacgactagatcaccatattttttgaatcgtcaagttaatgatagcgtacaggttg

SEQ ID NO: 122389 - DNA, 310 bp, Glycine max
  Clone ID: PAT_MRT3847_81522C.1
tgttcccacgcgtacgaacagatgcgaggaggcgacttatatggtacagacgggggatgacaacaaaaagggcaccattcaaacgcacactacttatgacgcaaagctctcgctagaacgaaaaaaaaaagaggagcacattaacctgaccaaagaggaagaaccatacaaagggggctctactcaccactgaacagacctaccagaccatagaagccttgaacttgcccaacacggacggcgatggatgcatcacaaccactgagctagtgaccgtcatgcacccattggggcaaaacccatctgagga

SEQ ID NO: 122390 - DNA, 1116 bp, Glycine max
  Clone ID: PAT_MRT3847_81523C.1
gagatgtgcacacgagaattatgaagagaaactatgaacaagtacctgaatggtggtttgttagcattttgcttctaatgattgttgtatctttgataacttgtgaaggctttggcaagcaactccaattgccatggtggggagtcctaatgtctcttgtaattgcgttagttttcactttgccaattggggtcattcaagcaacaacaaacacgcaagtcggactcaacgtgattacagagttaataattgggtacatttacccaggaaggccacttgctaatgtagccttcaagacttatgggtacatcagcatgtcacaagcactcgggttccttcaagacttcaaattaggccactatatgaaaattcctccaaaatctatgttcgttgtgcagttggtaggtaccatagtggcttcaggtgtgtactttggcacagcatggtggcttctgacaagtattccacacatatgtgatgaaacaagcttgccagctggtagtccatggacatgccctggtgacgaagtgttttacaatgcttcaataatatggggagtagtgggaccacaaagaatgtttaccaaggatgggatttaccctgggatgaattggtttttcctgattggcctacttgctcctgttccagtgtggctgcttgctcgcaaattccccaaccataagtggattgagctcatgccgaatcggttcaagattgctggtggtggtggcatcccaccagccagatccgtcaactacataacttggggatttgtgggaatcttcttcaatttctacgtttacagcaagttcaaggcatggtgggctagacacacttacatcctctcagctgctttagatgctggtgttgctttcatgggtgtcattctctattttgcccttcaaaattatggtgtttttggtccaatatggtggggtcaagatgctgatgaccactgtcctttggccaaatgccccacagctccaggcgtaattgctcatggatgtcctcttctctgatctccatctattctctcaccttcatccattcattcatctactgtatatatacctaacatttcattttatggaacaatattacgtgaaaccaccttac

SEQ ID NO: 122391 - DNA, 106 bp, Glycine max
  Clone ID: PAT_MRT3847_81524C.1
tataatctttgcgattgcagaaatgtgtagcactagcattagcataggttccttataccaaagctttctcaccaaaggccttatttcaccaaatgtcaggaccacc

SEQ ID NO: 122392 - DNA, 827 bp, Glycine max
  unsure (1)..(827): unsure at all n locations
  Clone ID: PAT_MRT3847_81525C.1
acttganatggnacttnattttatatcntgtannnnnnnnnncagnnnagatgtcccattcagttcnnnattattagttagnnnngttcggcgtaagtcccaaatttcataattaaaagaatagggtttacatgtttttnnatatgcatatattctttgaatcaacatgccatgtgttgccgctattgttgcaaattctgccccattgttnnncttttattatcatggtttatgaaagagttgtgttattcttacaatatattttcttaaaactcaaattttctctcttacttttatggaatttcttcttccaatttttcagaactttgcacgaaagaagaaactctgaaggaagtgcatgcatcacttgtaaaggaaggacagaaggctcgtttggagaaatttgagattcctgcaaaaattaaattgctttctgatccatggactcctgaatctggcctagtcactgctgctctcaaactcaagagagaggccataaaaaagacttttgatgaagaactttctgagttgtatgcttcataggcttaggacactagttaatctttttacacctttttcccatttgcatatagcaggggttgaggtgaggagaggtttttgaatttttttgttgctaatcatttttttttttcatttgaagtttatcatgcacagtgaggcttgttacgtgcagaaggccaacatgttgaatttactttagtgacaatgtaaaatgaactttattagacattattgttatagagtttcttccagagtaatgagaattcaaaggtatgcatatttgcctcttttcccttttacaaaaa

SEQ ID NO: 122393 - DNA, 531 bp, Glycine max
  Clone ID: PAT_MRT3847_81526C.1
ccgggaatctgttggtttagattggagtttggttttcattgtccatgccatggcttctcttgtacttattttatcttttctagtacgaccaaaagttaaaaaccaagcttccattgtcacttctacctcatttgacactattaaagattattcaagtttgcttgcaaaaggggcacaacacagggagtgtgagaagttggagatgggtgatcagaatattctagaggaaccaagagtttgtatctatttagtatagctagctagagagatgcatgtactccagaagtgtgatggttcgtgaataatgtcatcctagcaatttcaacaatttcagatccagtgttcaatcaataatgtcaccatactttacctttttatttgcttctgctctatccctcttctctccctgctttcatttgctaattaactgtctacctttgaatacaaaaaaaaaaaaaaaaaaggccccctaaggcccccggcccgctctaaaaacctaggggattcccccgggcctgcagggaattccaa

SEQ ID NO: 122394 - DNA, 293 bp, Glycine max
  Clone ID: PAT_MRT3847_81527C.1
tacggctgcgagaagacgacagaagggccatgtcaacctcgttgagattctcatggatgtggtatgtttctattctcttattctattttcaaaaaggttttgtggacaccattcaggtgtcttccctggagagaaaaagaaagaaaatgttcaaggtacacgtatgggtggaaagaagagagtcaaagagaaaagttaaaggaagaaactaggactcataaatataataaatgatgtgatagaaaatgaaaagagataaaaaatgataaatgtgactaatatgatgttgcaag

SEQ ID NO: 122395 - DNA, 257 bp, Glycine max
  unsure (1)..(257): unsure at all n locations
  Clone ID: PAT_MRT3847_81528C.1
gcactacattatgaatatagtatacaaatgtactgnatgtatactctaatattagtatattacnaaactaaacaaaatgtggtttgaaatgctatnatgtgcctgaaagattttanggtgatgcaacaatcaacnagatgtagccaaacaatcagtacaaatattagngccaatatggaactngaggtnccccgctacnggncatcctgaangaaatncaggttngncggagtatnaaaaatcnggtgaatcccnaa

SEQ ID NO: 122396 - DNA, 118 bp, Glycine max
  unsure (1)..(118): unsure at all n locations
  Clone ID: PAT_MRT3847_81529C.1
tcactccaaaccactccactgtccttctacctcatnattnncgnnccgaactcataatngncaaggaagataaacggngcagggagacaggggctgaaatctggngcggcgggggtgc

SEQ ID NO: 122397 - DNA, 471 bp, Glycine max
  Clone ID: PAT_MRT3847_8152C.1
aatcaaaaaaaacagcccctaaaaacggccccttaaaaagccaaaggggggggcaaaaggaagggactttttcaaacgcatacgaaacaaaaaaacagaaaaaaaataggggccaagaaataccccccaaaaaaaaaaccctaaaaaataaccttatggaaggggttaaaagaaggaaaaccaacaggcaccaaaaacaaggagggggactagtggagggttctaaaaaaacttttgaaaaaagggattgaaagaagtttcaaaaagggcttttaacctggccctttcccagggggcattaaaagaagggatgaacaaggaggcaaaagatgcgggggatgggaaaaccccctaagcaaagtaccggagggatgcctttggcggtggacttggccaaagggaaaccaaggagggccccccaggggggcccccccctggggaacccacctaggaaacaactcgcaaaccttg

SEQ ID NO: 122398 - DNA, 118 bp, Glycine max
  Clone ID: PAT_MRT3847_81530C.1
ggctcgagcgcagacactgcttccatttcttaatatagtttttgaaacgcaacataagtactgcgatgtttggcgagacgcctggaataataaaacaggagcgaccaccattcttttg

SEQ ID NO: 122399 - DNA, 645 bp, Glycine max
  unsure (1)..(645): unsure at all n locations
  Clone ID: PAT_MRT3847_81531C.1
cgggggatggggtcaatcaagtgctgcagacaagggtcaagcatctagttgaaagaatcagcaatagatggtagaaaagaaataacgataaccgaatataagtccatcccctccagttatcctttctcttntgttttattattaaaaggaagacgtatttgttcaaaataaaattaagttactatgcaaattaatgattttaatttgcatcattaatttgcagttcagaatcatcattaattataatttaacctaaaaatcacaacataattaatttaatgttttaccaaatttaaatttacatgaggtttattctcaccttaattcataaacttgtgactatcattatacgtagatgcagcaggttcttggggcaagaaaaatgacaggggtgacaaaggtggatggtaattgctttcttgaacgtgctagatgggccaaagaagggaattgagttcgggcattttgtaactaatggcaaacctttttttctctttgtaaatccgtataaatctgtgctgagacttaatttttaaaatattctaaacagatctgatggatgactaatcctttctgccgtatgcagtgagcgttacaatgttcttttctgtgattgtatggcttgcagtgctttcctattttgtt

SEQ ID NO: 122400 - DNA, 192 bp, Glycine max
  Clone ID: PAT_MRT3847_81532C.1
gacaccttcgaattttcttttccttcactttcccgagaaaaaaaaaaacactctttcactttcttgactacggtctcacttcgacatggctcgtactaagcaaactgcccgcaagtcaaccggcggcaaggcgcaacttaaccatttggcaaccaaggccccccgaaattccgttcccctaaccggagaatt

SEQ ID NO: 122401 - DNA, 255 bp, Glycine max
  Clone ID: PAT_MRT3847_81533C.1
aggaagctcaaccacatccaatacctcagaccacacaacagtgtagaagggagatttgaaagtgcatgtgaagaaacgcattagaagagaaaaaagatgagcaaaaaacagacggtgaaattagacgaggagcaaatcgcagaattgcgcgaaatctttcggtccttcgatcggaacaatgacgggagcctgacgcagttggagctgagttcgcttctgcgctcgcttggtctgaagcccagtgcagaccaactc

SEQ ID NO: 122402 - DNA, 858 bp, Glycine max
  Clone ID: PAT_MRT3847_81534C.1
gtttaccgactcgagccgaatcggctcgagtacggctgcgagaagacgacagaagggggcccaccactgttcttccggttaaaaaccttcgggtgggtggcacacttcttccctacaggcagcgtcagctaagaattaagccaaaataattaattaattcttggcaaaatcacatggccgccgccgcagatgggctcttccggccgatctacgagggctgcatctccgcctacgacaacgacgtcgagcgccgcccctaccacaagaactgcggctgcgctctgcacagcaagtcgaggaggaacagcagagcgtgcacgcacaagttgccgaaatgcaacaacgtgtcctaccccatgaggagggcttggagtgaagggagcttgtcaatggcttcggcaacaacttccgcgcattcctctccttcttcttctcccgccgctgggttcaggcctcaacacgacgaagagggaaatagtaacaaattaggagttttatttgagatgtgatcaggaaattgagaataattaataattaattaagtaattaagcaatactaccatgatctttttgataaaactcctattttgttttgtttcctctttctttcttttttcttttagttttgaataatttgagtccggttcggttgaggtcttggttaacttttttttttttatctgttgaaggtcgtcttgggattgtattgatcatcttaagccattttgatttaggggttcctgatcaattcggttggttctgaattggacgtcctcatttcttgtaacgaagctaattgaattttttttactatataaaataatctttttagtgtatatatctaccaaaaaaaaaaaa

SEQ ID NO: 122403 - DNA, 1609 bp, Glycine max
  Clone ID: PAT_MRT3847_81535C.1
gggtgcattccggacttgctatcttcactaacatgtcctctttaacgttcacaacggaggtagcatccagcttcctcggcctcgcttatcacaatcccaaacccttcactctctcactccaaaccactcttctccctcttctacgcagaacaaccactcattcccgatcgctaacatttcctctccgaccctctcgccgcttcttcgttacctccgccaccactgcacctcctcaatccgaggattccgacgtttccaccgtcattcctcccgacaatcgcataccggcaaccatcatcaccggctttctcggctccggcaagacgacactgctgaaccatattctgaccgcggaacatggaaagaaaattgcggttattgagaatgagtttggtgaaattgatatagatggttctttggttgctgcgaaaactgctggtgccgaagatattatgatgttgaacaatggctgcctttgctgcactgtcaggggtgaccttgtcagaatgatttccgaattagtcgcaaagaagaaaggaaaatttgaccatattgttattgagactacaggtttggcaaatcctgcaccaataatccagaccttttatgcagaggaaaatatttttaatgatgtcaaattggatggtgttgttactctggttgatgcgaagcatgctggttttcatcttgatgaggttaagccaaaaggtgtggtcaatgaggctgtggaacagattgcatatgcggatcgtataattgtaaataagactgacctagttggtgaatcagacattgcttctttggtccagcggataaggaaaataaacagcttggctaacttaaagcggacagagtatggaaaagttaacttggattatgttcttggcattgggggctttgatttggagaggattgagaatgccattaatgatgaaggtgcaaaagaagatcatgaccacagccatgaccatgagcatgagcaccatgaccatgatcatcaccaccatgaccatgatcattcccatgaccacaagcatgaacaccatgatcatcactctcatgatcatagtcacgatcctggtgtttcatctgtcagcatagtttgtgaaggaagcttagaccttgagaaggctaacatgtggcttggcaccttgttgcttgatcgtagtgaagacatttataggatgaagggccttctgtctgttcaaggaatgaacgagagatttgtctttcagggagttcatgacatatttcaaggttcacctgaaaggttgtgggggccagatgaaccaagggtaaacaaaattgtattcatagggaaaaacttggatgctaaggaattggaaaagggattcaaggcctgtttactatgatactaagaagttcactacagtgctttaattatatctctttcggccaatgatacacgttgaagatatacgagtgtgcctatattccatgtagaactctatactgatcgactgcatatttagtggaaaaaatgttccatttctagaataaaaaaaaaaaaaaatgtggcttcaaaaaaaaaaaaaaaaaaaaaaaaaaaaaaaaaaaaaaaaaaaaaaaaaaaaaaaaaaaaaaaaaa

SEQ ID NO: 122404 - DNA, 199 bp, Glycine max
  Clone ID: PAT_MRT3847_81536C.1
accaacttcttgcagcgctagtgcattatctgaggacatgttccattggccaacaacactaatggctcctgctgattgtccttatgctggaggcgtatttctattcactattgactttcctgcggataatactgtccagcctactaacgttgccttatggactaaggtgtctaacccgaatattaatagcaatggtagc

SEQ ID NO: 122405 - DNA, 451 bp, Glycine max
  Clone ID: PAT_MRT3847_81537C.1
tagagacaaggtagcagttgaagaggctttaaggaattggcggtccgagggtcaaaaaaagcgttcttctatacacaactctactaagttcaaaaactgttgcttgtctcatcatcgaagagatcctcgattactcgatgtaaatggaatgcatttggtaaatgataaagccagaccagttctaaagccaaccctatcaataggacaaatacttagcaagaagctacttcaaccacaatagtttaaagccagagaaagaatctcgataaaacagaatgtatcactgagtaagatgcttgacaaacagaacaataatcaaccagttaacagacaagtggagaaaaaaactaaccatgagctattttctaccaaaagaaagaaattgtaatttgcacgattctcacatattgtatcaaaacagaagaaaaagaagccaaccctgaatgtgaag

SEQ ID NO: 122406 - DNA, 2704 bp, Glycine max
  Clone ID: PAT_MRT3847_81538C.1
cccgaaccgcaacggaagcaatgaaggttaaggcctctgtgattatttgctatacttaatacggaagagctgcgaggtttcattgtatcttcttctatgatgcccctgtattaaaaagacgtcttatggctgggattgttgatgccagattgcgcatttgtcaaattctttctctcagtaattgatttccatgtcacatataatgtatcggcactaagttattctctattctgttgcaattagatgtcatgctaacatattaagctttcgatgattgtgtgtctatgggaattggcttccgcccacgcggaatcggtacaacactttctatatttatcgtccattctctctcactccataattgcttcttgctttggtcgatccattcggtgatcactgatcagtggtttggtgttgttgatagagaaaatgcattccagccctttgcttcttgaggaacccattaggatggcatccatccttgagccatccaagcctactttttttccggctatgacgaaaattgttggcacacttggtccaaagtcacgatcagttgatataatttcccattgccttgatgcaggaatgtctgtggcaaggtttgacttttcatggggtgatccagaataccatcaagagacattggaaaatttgagagttgctatcaaaagtaccaagaaactctgtgcggttatgctagatactgtgggtccagaattacagattgagaataagactgatcacccaatcacccttgaagcagacacattagttgtcttaactccagatcaaaataaagaagctagttcaaatctcttaccattaaattttaccgggctatcaaaggctgtgaagaagggtgatactatttttattggaaaatacttgtttactggaagtgaaacagcttctgtatggctggaggtcagtgagggtggaaggtgaggatgtcacctgtctggtaaaaaacactgctacactctctggatcattgtttactgtacatgtctctcagattcacatcgatcttcctactcttgctgataaagataaggaggtaataagcacatggggtgttcaaaacaatattgacttcctttcattatatacccggcacgttgaagatattcgtccatgcacgtgaatttctctctaaattgggtgacctgaagcagacacatatttatgcaaagattgaaaatatagagggaatgaaacattttgatgaaatattgagagaagcagatggtatcatcctcgctcgtggaaatttagggatagaactcccacctgagaaggttttcttattccaaaaggctgctatttacaagtgtaacatggttggaaagccagttgttgttacacgtgttgtggactctatgactgataatctaagacctactcgtgctgaagcaacagatgttgccaatgcagtgttggatggaagtgacgcaattctccttggagcagagaccctagcggggcacaataccctgtagagaccatttctatagttggaaaaatatgtgctgaggcagagaaagttcataatcaagatttgtattttaagaaggctgtaaaatatgtgggagagccaatgagccatttggaatcaattgcttcctctgcggttcgggcagctatcaaggttaaggcctctgttattatttgcttcacttcatctggaagagctgcaagattgattgctaagtacagaccaaccatgcctgtgatatctgttgtcattcctcaattgaagacaaatcaactccgatggacgttcaccggtgcttttgaggctaggcaatctcttattgtgagaggtctttttcctatgctggcagatccacgacacccagctgagtccagaagtggaacaaatgaatcaattttgaaggttgctttagaccatggcaaggcttttggcatcataaagccacatgaccgagttgttgtctgccagaaagtagctgactcgtcagttgtgaagattcttgagctcgaagattgaatgattacaacttatgcgttatttgatgcataataataaagattcttgggcttgtgtttgataatcggagcgatatccagttttgaaatcaagcatggtgtgctgatctttcggctacttatgttgtttaatagtaaaccatccgaattcgaaaacgaaattgattatcttctaatgaattttatgctgaaaagaaaagtatgaattataagacactttgtaaacactgagtgtgccagataaacttgtgagattattttagcttaatcatgagttcaaagtatacaattgtgttgaatactttgataaagttttaggtgccccacaaattagtggtcatcaacaaatgtaataatgtatttgaggaaattgttgggtctctttagattggagtgaggttgtatccccttgataggaaaacattttgtaaagagtgtttccgattaaaatgaaaaaagctcacccttttcattctagcgtttgtgtttcattgaagtccaataccaaccacataccattgagatacatattgtagagtgggaaagagacttttttgtttgattgtttttttaataggcaatcccagttttgagctataaataatggtattggtatggaaataaaaaaaaatgatgttatatcagtaaaaaaaaaaaaaaaaaaaaaaaaagggcagccgctcgcgatcta

SEQ ID NO: 122407 - DNA, 402 bp, Glycine max
  unsure (1)..(402): unsure at all n locations
  Clone ID: PAT_MRT3847_81539C.1
aatacataaatcatcttagcaatcatcacccagccctctaaacccaacaacatggacaattatttcctcctcttcatcatcttcctctccctcttccaccaccccatttccgcatcaaatctccacaaactcaagcaactcactccaaatttcccccctgaacctttatcctccaatgaccctccaccacccactgaatactttgaggtagcaagacccattgaacaccccaaaacaaaaccttgctctcaccacattctccaccacgacttcggctacacctatggccagcccccagttctcgccacctacacccctccttctcattgccccttcaacacattctcccanatcgtgctggaatggaaggccacttgcaaaggaagaaatttgaccgcattt

SEQ ID NO: 122408 - DNA, 827 bp, Glycine max
  Clone ID: PAT_MRT3847_8153C.1
ccctcgcgttctgaggattcctttgaggaagtttctttaagtgcagcacttaatggtgttgagggtttggactatatggaaagaattcctcttgccacatctgagggttttcctcatgtgctttcacgcaaaaatggtgaaaaaggcaaaaggagatttgtttctggggatggtgaatgagatgacatttgatttccgggaacccagtgttgaagaaggcttacaacaagtctaatcagttgaaccttgagaaaagtgtctcctacattgtgttggcattgaatgtcccaaggatgagaaacttcctcgtcgcaaaatttttgacaaacctaagacgcgctgcttcactattctccctatggagtttaatcttgtgggccgtcagaagtttttaaattttgtgaggttcattatgaagaaaagggacaagcttagttgtcaagttggaatcaacccatactccatggaatggactgggttggcccatagattactgagttaggggcaacgatattctgtgttgcgattatgcttgtttttgatggtttgattaccaagcaagttatgagcaagatggcagaaaagataaacagtctttgcggtggtgaataaaaaatgatgcgtgaaaggacacacctgctgctggcttgctgtcaaggatggcaatttgtaagaaagatgtttggagagatgaattgagaatcccctttggatttccgctcacaggttatttgaatagcatttttaatgagatgctcataggaatatctgtgaaaaatcactgtgcccggctaaagctccaagttggcttttacaatctttcaaaa

SEQ ID NO: 122409 - DNA, 239 bp, Glycine max
  Clone ID: PAT_MRT3847_81540C.1
gatgatcacttattggatagttccttgttccactgaacactcaaccctcaagcagcaatcagggatttagtatttggagaaacaatgatcagtgatatggagattcctgttgcctttgcgcttgtccacaggaacgctcatcactcggcaattggctatcgtatcgcttagtatgaaacgcgctacaccctacatagtacgcattacgcatgccgtgggtcatgaatcctgctctcgtc

SEQ ID NO: 122410 - DNA, 165 bp, Glycine max
  Clone ID: PAT_MRT3847_81541C.1
ctatacacctcgagaaaacttgtgacaaaactattgattgcaatggggaaccttttgttctttcttaaaacggggcaaatagtgtctctaataatataaaggcaggcggcgtcaaaactttcataaacatattcatatgccctcataaaaaaataaaatgaaacc

SEQ ID NO: 122411 - DNA, 1101 bp, Glycine max
  Clone ID: PAT_MRT3847_81542C.1
tcgagtgtggtccttacgaatgaaaattgccgtagagacagctagtgcattggcttatcttcatgcttctaaaatcattcaccgtgatatcaaaactaacaacattctccttgacaacagtttctatgttaaagttgcagattttggcctttcaagactattccccaatgacatgactcatgtctccacagcaccacaagggaccccgggttatgttgacccggaatatcaccaatgctaccagctaactagcaagagtgatgtgtatagctttggagttgtgctcattgagctaatatcatctatgccagctgttgacatgaacaggcataaggatgaaattaacttgtctaatctagccataaagaagatccaagaaagggcattgagtgaactggttgacccttatctgggttttgattcagacaaagaggtgaagaggatgataattgaggcgacagagttggcctttcaatgtttgcaacaggacagggaattgagacctcccatggatgaagtccttgaggtattgaagagaattgaaagtgggaaggatgagctaaagcatctagaagaagcagttcatggttctggggtttcgcataataataatgtaacaacctcaacagaattggatgaagctggattgttgaagaataggaagccaccttcttcaccaatatccgttcctgatagtcgggaaagtaaatccactacgcctaatgccagttcttaatcacttggcttattatcagttagtgatacataatccattcttgcctaacaagctttcagcactcattgttagttgaaaatgagtgaatctaagcttcatttatcttgtcatccacttgtatagttataggatgattatattaagcggaatatcatagtcaagttaggagttgagagaatataaatttgaatattcagaataaaagaaaatataattgttgattctaaaaaaaaagaaaatgtgttgtcccttttaagctgtaaagcatgcacagtatttgggtgttagattgtcacacactccactccaacattgacacttccttaaaattcaattaaaaattaattttttatcgtcattgatat

SEQ ID NO: 122412 - DNA, 314 bp, Glycine max
  Clone ID: PAT_MRT3847_81543C.1
attacatcttgtgtttgttttaaaacgattatgcgcttgcatgaaaagcgaatggtgatgcacggttctggttgaccatgatgcaaacttaactcaccctgcataccaacaacaaactgctcgagttgttcgcacgagcggcacatttcggaggcaaagctcgatgggggtctgagctcaaggaacagggactgatttgaccctttctcacatgagcctgccacagtggttggcacgtttggtatacgtccaaacttcacaggatgggtcttcgttccgtatggagagagattatgtatttcgcttgagcccag

SEQ ID NO: 122413 - DNA, 208 bp, Glycine max
  Clone ID: PAT_MRT3847_81544C.1
aggatttttgccccaggggactgaaaagccacaagccttatttgatgatgaaaatgcgtgcataggttgcagagaatgtgtgcatcatgcaagtcatacattcaccatggatgaaactcagggaagtgcacgggttaaagttcaatatggagacaatgaccaaagtattgaggtttctgtagagtcatgtccagacaattgcatacat

SEQ ID NO: 122414 - DNA, 223 bp, Glycine max
  Clone ID: PAT_MRT3847_81545C.1
ggcaaggatccagggccacctttgaatttttggactgagacttgggggggttgacaagttactatggtcctccccgatcgaggaattatatcgcctagaacagttggccggcctgcacttatccaagggacagcttgtcgttgctgcgcgggaaacccagattggaggcctggctgattgactttggatcttaggctgcccctgcctgcccatctccaaaggg

SEQ ID NO: 122415 - DNA, 274 bp, Glycine max
  Clone ID: PAT_MRT3847_81546C.1
ggggaaaaccccctttcaaatttcaattaaacaggcaaaaaccgaacaagaaagttggcctttttttgagaatacattttcattaatcttgggggggaaaaggtccctaaaaatcaaatttccccatcggttaaaagatcccaaattggattcaacaaccctttaacttttaacagcaagacccggcaactccctccgaaaaaatagcaagaaagcccctctagttcttaacatgacacaacttttaaggccttgagagggaaaatttgacttt

SEQ ID NO: 122416 - DNA, 170 bp, Glycine max
  Clone ID: PAT_MRT3847_81547C.1
attaaggaatattggaccaggaaatggtattaaataaacactcttggcaccacccgtagtccgggagtgtgttaagggacttgggctagctcctagcaaaaatatttcattttccacatattttacccactggcacacccgattgcacgtttcttttttccatgtacttg

SEQ ID NO: 122417 - DNA, 271 bp, Glycine max
  unsure (1)..(271): unsure at all n locations
  Clone ID: PAT_MRT3847_81548C.1
gagtctcgacagtctcagactcagagggaagaaggaaaatggctcagtcttaccttctctgttgttcttcttcttttcctcttctnnnnnnnnnnnnnnnnnnnnnnnnnntccattatcgtaaacaaatccactaataccacttctatcccctcttactcttcccgccattccaaacttnccaacttcncttcttcccatcaatccaaaacccttctacaagacacaatgctngatgacccagatgcaaagtcttcgtctttatccaaaa

SEQ ID NO: 122418 - DNA, 519 bp, Glycine max
  Clone ID: PAT_MRT3847_81549C.1
actgcaaatttcagcaacaaatttcaccaacaaattatatttaattgaaatggataattgacagtaccaacaaaagctgctattacactacaaaagctacttcctattacaaattcttcaacaaaacaacaattgacagtagcaacaaaagctgctattacactacaaaagctacttcctactacaaattcttcagcaaaacaacaattacaatatcaaaagctgctattacacattttacctaaaatacattccccctaaaactaacattacaattaaaaatgaaaaacctaacaacacaatgtttgttaaatttctcattttcttctgcaaagcttcaatttgtagcctcaaatcagtcactaccattgtttctcttgagacagaagacgaattagaaagttggttttcttcttcaacccaaaaaaaaaaaagacagacctcgtggtctgttcggggtaatgcacaagtgtagataaccttcctgggtttctccttgttcttgcagatcgaatagct

SEQ ID NO: 122419 - DNA, 561 bp, Glycine max
  Clone ID: PAT_MRT3847_8154C.1
gtccggtttgtttttgttgacgaggaggattcctttgcggaagtttctctatgtgcagcactcaatggtgtcgatggtctggactatatggaaagaattcctcttgccacatctgagggttttcctcatgtgctttcacgcataaatggtgaaaaaggcataaggagatttgtctctggggatggtgaagagatgacattgattccgggaaccactgttgaagaggcttacaacaagctaatagttgaacttgagaaaagatgtcctacattggttggcattgaatgtcccaaggatgagaaacttcctcgtcgcataatttttgacaaacctatgacgcgctgctacactattctccctatggagtttaatcttgtggtccgtcagaagtttttatatcttgcgaggttgattgtgaattaatgggacaagctgagttgtcatgctgtaatcaacctattctctatggaatggactggtttggccaatagattactgtgtaagggcatcgatttgctgtgtggagattatgctagttttgatggtttgtttaccaagcaa

SEQ ID NO: 122420 - DNA, 349 bp, Glycine max
  unsure (1)..(349): unsure at all n locations
  Clone ID: PAT_MRT3847_81550C.1
ntctcngnnnangnaatnccggaattcgnctcnacncnaaaanngnannacanatanntcctcgannngccangntcgcnggaatacnacanggtgcctgcgtgnnancgtggngagctcaantngcnattcgganggnngtanatnnncnccgtcgtntctnangcaaatngtacngtcaattattggtgaggtacttctancgtnangatcttgcaagaaatnngncangtgggcgactgcagcgnctttgcncacngtcaaatnggnnnacggatntcatatgtcnggaantnntangngnnggcanantcaggncgancgngggcggtggntgngtnncatgtnn

SEQ ID NO: 122421 - DNA, 496 bp, Glycine max
  Clone ID: PAT_MRT3847_81551C.1
atatgtaccacaaaaccaatgcgacgtgttagcttttgtgtgcgttcatgctggacctgggaacgatttgcttggagagggtctcggttgaagagaactgatttaagcggcgaagcctatcgcagtaatcggaggcagaaattgccaccaggatgcacgtccgaagacgggtgaaccaaacacaaaatttcatccggcacttatattttcagtccctacctcacatgtgtgaataaaatgtcaggtactaaattcgaatctcttagcatctactgctagtagtatggaacaaaaacaattagaaggtagtggagtgttcatgtttctttttttcgcctgttgactctgacagagggtgagaacagcaacggtggcgcggaggccattaacacgacactgcttaacggaaagtactagctggtccgtctgttatgacaaagaaccttctctgaagcgaaccatgttaggaaggtgaagacgggaaaaagcgtggtat

SEQ ID NO: 122422 - DNA, 347 bp, Glycine max
  Clone ID: PAT_MRT3847_81552C.1
ccaggaaatttttttgcataaaaaatgatgattggaatgcttttgccaaacccctgagcttgggctttttcaacatttttagactaaatttttataagctttttcctttcccgccagggggacaattttgaaagaaaaaacttacttggaacccaacttttttattaaacatggggggatcatcatgacagatcaaattctgggaacttaaagcaaattttatcttttgaaaaatcatggccctcgattttttagggggggcacctgtagccaactcctcatttttttgggggggaaattccttcaattttgggtctaaaagggcccctaaagcataaacttttaaa

SEQ ID NO: 122423 - DNA, 209 bp, Glycine max
  Clone ID: PAT_MRT3847_81553C.1
gtctaaaaaaaaaaaaaaaaaaaaaaaataaaaaaaaaaaaaaaataaaaaaaaacaaacagactgacttctcctttctaacatacacattcatacaccttccttactattatataccatcacctaaattcaatttaaaatccaattactttacaacgctcttaactaaaaaaaccctgtcaaaacccatcttattcccattttaatac

SEQ ID NO: 122424 - DNA, 698 bp, Glycine max
  unsure (1)..(698): unsure at all n locations
  Clone ID: PAT_MRT3847_81554C.1
tgttaatgtattttgtgttgtgtgcgtttgtgtccattatagcctttcgtcattcatccttttgaaatttatgttgtctttaaagttagattatcaattctgaaaagaagatatattgcaacaagagataaacattagaacttaagtagtaaagtaagattctctaagcactacagggtgtattcttgcttttcagtggagtgaaaacgtgtcgtataaaccattgaaaagattgagataatcaattaaaaaaatcaattattaatttggcattccagggatgagaagtgtatttaattgattgtaatttctatattaacgattatataatgaatcaatgttttgtacttttataaaaaaaaatgaaaaaatgaaatgaaacaactccggtttataccttaattcttaattgagttgagtaaactagtaaatactgacccatgccattgatgcaaataccaaaggcattagacaaccaacacattctttnctcattatttcatctcaactagataatcccatttttttaacttctgcattttcactttctcttatctatttctcactcatttcactcctactaaacacagggttagacagcatatattgcagacatcacattcttatgaaaaaatatttcgtaggggttttactaataaatgcattaaacgccccttttagaaaacagggaatgaaaa

SEQ ID NO: 122425 - DNA, 1059 bp, Glycine max
  unsure (1)..(1059): unsure at all n locations
  Clone ID: PAT_MRT3847_81555C.1
ggctcgagattagtaccacaatggctgataggcagtggaaatgacagtagggtggctggtataaacaaccaattcacatcatcgtcatactctgatcatattacttattctggtcgccaatggagttctagtagcaaaggtcctggccactcaaggtcatatagtagttctgagagaagctggcaggatacatattgggagaaagatattggcagtgatggcctgaactcagcatcacatgatattcctatgacagttagcaaggctatgatgatgcatcggtataatgttcctacaagcacatcttctattactccgggcacaatgggcctcagtatggccgagacattggctcagggtccacctcgctctcactcaccacaattatctgctagtactcaaaagcttgaagagttggcccttaagcaatctaggttattaatccctgtgacaccatccacaccaagatccctggtttctagctcctcagagaaatcaaaggtcaagacagggcagcagcagtattccttctcccattcacgtcgacccaatcattctttacatggtgctcatccgaacttagatatacagaaaattagttctggtaattcccttagtgtcaatacttcccgagagtggaatggtgtctcttcagctgcaaaggacaacttaagtcccaatagtagagttgtgcttagtccagttggtgccactagatccacttctctatctgctccttctaggaacttaggtaacaattcaaccccttctgcatggataacattggagaagaggcctacttttcctatccagagcaggaatgatttcttcaagaatctttcaaggaagagttccttggaaaaaccttgttctgatgttttgtctattgacatgtcttgtgccttggagaattctgaagccagcatgaggaatgtctctagttgtcccattctggagtctagagatgcttctttagtggatacctctggtttgacatgttgactgactacngatccacaattactgagaacggcaatgctgccaatgaacctttgaaac

SEQ ID NO: 122426 - DNA, 317 bp, Glycine max
  Clone ID: PAT_MRT3847_81556C.1
cctgggataactgtctgtaaccttacatcagcaccgtgaagcggtgaaatttgaaccacctcacaaccaaaacaaagcgaactacaagactcaaggattaaaaacaaaacaggcccctaagacaccaagcggacaaaaaaccaccggggggcccaccaaagctaaacaccaggcatacggaaaaaagaacacctacagcatgggaagaaaaggaagaacagtgccgacacacatattctggaggcaccagcaggcctaaacaccaaaaaacggggcaacccatttacaagccgaggttggcaaaagcctacaaccaa

SEQ ID NO: 122427 - DNA, 391 bp, Glycine max
  Clone ID: PAT_MRT3847_81557C.1
cctacgcgtccgcggacgcgtgggcggacgcgagggattgtttggagcgattatgctaggatggaggggatgagaaccaggcgcgttattggtgatatggttgaaatgatagatagtgaatgtggagaacatgaaaaatatggtgcgcctaagggcacaaatgctggctgttgacaagttcaaggatggctaaggtgtaatatagatgcaaagatgaggagaatgaggcaaagcttctggagtgaccttcacacttattagcaataggatgttgtatgagggtgagcatatatatggctatgatataagactgcgggaaggataagctgtaaaaatgtctatacaggcacacgaagaaattgtttctttgagtgcatgtgatgacaaaact

SEQ ID NO: 122428 - DNA, 371 bp, Glycine max
  Clone ID: PAT_MRT3847_81558C.1
agggatcgcatttgagatcactcatcctcagtaccatcacgaaagcataaccgaaaccttttttcgaaatcgctgacattcccacaggcaccggctaacgcagagtagaagccagtggagatgacaccaccagcggatcaagcaacagcggagaagaagccgaaggcggagaacatgatcacgaatgacggacgcagcgagaagctgaagaagcgcacgaacaagaacgtggagagctaggctatctacatctacatcgtctcacgcaagtacatgctcacattggtacgtccagcaacgccatgggcatcatcaccagcctcatctgcgacatcttcgagaagcttctcaacgaagcgtcgcgtttggtc

SEQ ID NO: 122429 - DNA, 233 bp, Glycine max
  Clone ID: PAT_MRT3847_81559C.1
ggaccaaaaaaaaaccatttcctgcaacaaactcatttggggttaagagtaagagaccccttttttattctgcaaatctttaaaaaaaaggttaatttcctcacccaattacttttattaaaagtggggcctatttccctgggttccttgggccaacacgagcaacaaaaccttccttgatggggccaactgattttcctgatccacccttttaacaccggaaaaagcggccc

SEQ ID NO: 122430 - DNA, 713 bp, Glycine max
  Clone ID: PAT_MRT3847_8155C.1
tgttctctttcacgtttaaatggtgaaaaaggcaaaaggagatttgtttctggggatggtgaagagatgacattgactccgggaaccactgttgaagaggcttacatcaagcttatagttgaacttgagaaaagcgttcctacatgggttggcattgaatgtcccaaggttgacaaacatctctcgtcgcaaaatttttgacaaacctaagacactctgctgcactattctccctatggagtttaaccttgtggtccattagaagtttttaaattttgtgaggatcattatgaataaaaggagacaagcttagttgtcaagttggaatcaacccatactccatggtatggactgtttgagtcaataggttgatgagcaagggcaacgattttctgtgatgcgattatgctagctttgatggtttgattaccatgcatgttatgagcaagatggccaaattgatcaacagtcttttgtgtggtgatgaaaaattgatgcctttaaggacacacctgctggtggcttgttgttaatgatggctatttttaaaaaaaattttcggataggtgaatgtgaaatcccttctggattttcgcttccaagctttttgctattgcattcttaatgagatgctttattaatatagttattaaatattactgctccaggcttaagctccaagtatgtttttacaatctttcaaaaattttgtt

SEQ ID NO: 122431 - DNA, 424 bp, Glycine max
  Clone ID: PAT_MRT3847_81560C.1
gggctaaataaaaatccaaattttagtgcggggggatgactaacaaatttataccactgcttgcgactgaagaaaaagggcaaagagaatattgaatatcatttttcaactagacttattatcacaactcgaatgatacatttaatggagcgaatggaaaacttcaactatttaatcaaatatcaaccttttctgaaaagattatgttctaaaaaaacataaagaaacttattcacctgttactagcaatttataaaatataatcaaactcaatctattattaaatatacaggcgttttctgcttaaaacatcaatttagttcgtgtcatcaaatccctatacatgcaagaattcttcagctaatagtattgtcccccgatgtagccattgagtccctttaattatccaatattctgctccata

SEQ ID NO: 122432 - DNA, 1008 bp, Glycine max
  Clone ID: PAT_MRT3847_81561C.1
gaggagagagagaactagtctcgagttttttgcttgattaatattgaatgattgttttaatgccttttggtatcacttgattctcatacgtggcgaaaagtggtaacatctttctcctctctattcatgatttgtttttgatgttgacaaagggggagagaaagataaaagataaaatagtaagaaaaattatctattgtttatgagacaatttgtttacatatgaaaaatatgatattttcaactgtctcatataagcaatcattgcaaaaccaagggggagtaaactatatgcaaatagatattttttctttgttgttgctcctaacctataggtggttgtcatcatcaaaaaggcggagaatgtaaatcatgaagattttgatgatgtcaagaagaattaagaatttgcttgagaaagggggagaatgtaaatcatgcaagctttgatggtgttgagaagaaatcacatgtttgtcatcatcaaaaaggggaacaatgtgaatgtatgtatacatgattttgatgatgtcaaaagaagaatcaaacaaggctcattttgcttcaagattaatacaagattgtttcaacgaacaaagccttgatttaagatttcttcaagatcaagccttgcctcacaatgaaaggtttgaagtcattcaaggcacatgtaatcgattaccaatacatgtaatcgattaccaatggtttgaaagtgtgtaatcgattacacatcatatgtaatcaattacaagagactctgaacgttgggaattcaaattttaaatgaagggtcacaactgttcaagaaaaacaaccgtgtaatcgattacactaattctgtaattgattaccagagagaattttcaaggaatatcgccaacagtcacatcttataatttgaattttgaatggtcatcaaaggcctatatatatgtgtgacttaggatgaaattgaagagagagttttgcttgacaaaaatgtcttatcctctcaaaagacaatga

SEQ ID NO: 122433 - DNA, 393 bp, Glycine max
  Clone ID: PAT_MRT3847_81562C.1
gccgaaggcgcaggccccgatctcgccgcgcccgaagcccaaggccttgcgcctgccgatgccggcactccccacggcgtcgccaacactgcggccggtaaggagtcgttcgacgaggtcttcaggcaggacaaggcgtactcgggcgagtgggcgcagacggccgggcgcttcaagccggcgtacaggcctgtgccgcagcggtggaagaacagcgagatcctggcgcgtttgaggtcgcatgtcaagtcgcgtagtgcgggtggtgtgctggaaggcgagggcgtggaggcgaaggcggacgatgcgaatgctgggaagggaatgggttttatgccggagttgaagaattatgatcgtgcttgagggccttggttcggatgatgggtattg

SEQ ID NO: 122434 - DNA, 422 bp, Glycine max
  Clone ID: PAT_MRT3847_81563C.1
ggcataaaaccaccgcggccgccccctgttgttgcaacaatgatggggggagagcgggcaataaaccaccaacaaaaaagaaaaaaaaaaaaaaaaaaaaaagattccctggggttccacaaaaaaacaaaagaccacaaaaaccacgggggggaagaaaaaaacaacccaagaaaaaaacggcacaagaaaaaacgccaaagaagcactattcaacaaaaaaaaaagagggggcccaacaacagccgccccgatgatgggggccaacatattggagaacccaaaaaaaacaagaagggaagcccccctctgcagaacaaaaaggttgccgccccaaaaactcttccaccagggggtaaaaacaccagcccccccggagggaaggagaacaacccccttgggggggaccccaaaaacaacca

SEQ ID NO: 122435 - DNA, 203 bp, Glycine max
  Clone ID: PAT_MRT3847_81564C.1
gtattaactcaccgcagcaaaaacgaggcctgggcaattctcatgctgcaatgagaggacattacatatgtccgcctttaaaggagaagtagacgttcatcactagcctcgatccaaggagccagcaaactcagaatcatgttacattaacaccctagagacggaagatccatccttaaatagaacatagtggagagtcatgc

SEQ ID NO: 122436 - DNA, 232 bp, Glycine max
  Clone ID: PAT_MRT3847_81565C.1
gaattttatgcaagcaagcactctgtgaatgtaaagaaggaagctggtgtgcttcctgtcataaatgttgacatgggcacagtccagctgactagaactaatggagagaccactaataaatgcctaaattggctctatcagcattgtacccattactacgaagctgttgcacattgtgccaaatggcgtgcagaagtgaagatcggtgctaactagccatatgatctgacta

SEQ ID NO: 122437 - DNA, 298 bp, Glycine max
  Clone ID: PAT_MRT3847_81566C.1
cggccgccctttttcttttgttcttgtttccatgggttgattcttatgcgcgggaccatacctacatgggaagaggcgaatgggcgcctgaccacataaaggggtgccattctccctattgtcttctcgggtaagaaaaatatataggagctcggtagtgaagaggttaaagctattatcgccatggccttagtcttaactgctccaaactttactcatgttctatgcattaacgtggcacaaccaacagattttattcgtggagcctctgccccattttaacgctctgactgattgc

SEQ ID NO: 122438 - DNA, 230 bp, Glycine max
  Clone ID: PAT_MRT3847_81567C.1
agcttcaattgctcgtattactggtaaacctttttagttcacaaccaattgtcatcatcgatttcaaaatttactcccagaccgaaccggaaactgtggtggaccccgaggccaccacccgtacatcccacaaaagagcgtacctatcgcggaaagagaacaggttctcctacagagaaaaaaactaacagaccgggaaggtatttgaaaacgcgatttgctgttcaaaa

SEQ ID NO: 122439 - DNA, 334 bp, Glycine max
  unsure (1)..(334): unsure at all n locations
  Clone ID: PAT_MRT3847_81568C.1
cagcttncttcaaaatcgatacaaggnnatcgtnagtttgtgtatgagatgggttnatatctggantgcaacatcccaatactagnnaagctttatggatgttgtgtggagggcaaccngctnatacttatatatgngtacntggganacaattgtcnnnctcgcattcnttttggcanggatccaaacaaaacaaaacgtnactggncaactaggangnaaattgccttggtagagctaaagnttggcntatctacatgaagagnccagnatnntaatcatacatnnggagttaaggctagtnatgtttgctcgactaggatttatgctaagc

SEQ ID NO: 122440 - DNA, 213 bp, Glycine max
  Clone ID: PAT_MRT3847_81569C.1
aacattgcaactgaagtctccacctaatcgacgaaatcaagtaacaaatcagaagttactccgttggttggtatctcagctcttgcaggatctaccatgatatgttacagctacagatcctatgagggacttagtggaaggacttgctgacacccctgcacagagttgtgagctttgtatgtcatttgagtagtgtcactggatgaaacatcg

SEQ ID NO: 122441 - DNA, 694 bp, Glycine max
  Clone ID: PAT_MRT3847_8156C.1
taataaatggcagaggaatggacagattgcggggatgaggttgattcctttgaggatgtatcatcaagtgcaacacttaatggtgttgagggttcggactatatggaaagaattcctcttgccacatctgagggttatcctcatgtgctctcacgcaaaaatggtgaaaaaggcaaaaggagatttgtctctcgggatcgtgaagagatgacattgattcccggaaccagagtagaagacgcttacaacaagctaatagttgaacttgagaaaagagttcctacattgcttggcattgaatgtcccaaggatgagaaacttcctcgtcgcaaaaacttctgacaaacctaagacgcgctgcttcactattctccctatggaggaaaaatcttgcggcccggcaaagtctttaaattttgtgaggttcattatgaagaaaagggtcatgctttagtgtcaagttggaattaaccccatactccatggaatggactggtttggccaattagattactgagttagggcaacgtatttctgtgttgcgattatgcttgttttgatggtttgattaccaagcaagttttgagcaagatggcagaaatgataaaagtctttgtgggggtgtgaaaaattgttgcgtgaaaggcacacctgctgttggtttgattgtcaaggatggcaatctgtaagaaag

SEQ ID NO: 122442 - DNA, 504 bp, Glycine max
  Clone ID: PAT_MRT3847_81570C.1
ctaagcaatcactacgcatagctccaaactggaaggtggaggacacatgaacgaaaacgcaattcatggggctccgaaaaaggttgagaatggagaattgcactaagcaatcactatgcatagctccaaactcgaaggtggaggacacatgaacgaaaacgcaattcatggggctccgaaaaaggtgaagaatggagaattgcactaagcaatcactacgcatagctccaaactcgaaggtggaggacacatgaacaaaaacgtaattcatggggctccgaaaaaggttgagaatggagaattgcactaagcaatcactacgcatcgctccaaactcgaaggtggaggacacatgaacgaaaacgcaattaatggggctccgaaaaaggggttgagaatggagaattgcactaagcaatcactacgcatagctccaacctcgaaggtggaggacacatgaatgaaaacgcaattcatgggctccgaaaaaggattgcgaatgga

SEQ ID NO: 122443 - DNA, 139 bp, Glycine max
  Clone ID: PAT_MRT3847_81571C.1
ataaactaaacatagtatacaacaatccctaaatgaagaaagtccaattaaaaatgcattcaacaattatgggcacttttcgccactttttgtaacaaaaatgttcctggaccccttttgtcgttttttcgcaaccgta

SEQ ID NO: 122444 - DNA, 253 bp, Glycine max
  Clone ID: PAT_MRT3847_81572C.1
ggtttcggaatatcccgggtgcgactccactgcgtctcgctgagacaacctattttatattaatacctaaaatatattgtcagctttcagtgcctgttcggtagagtattctgtatggtacgttttctggggtttcgccacttcacatctcagtatgtatgggttgtgtgcacccttttaactctccaacaaccttcaaagctctctaaggcatacaatgaacacattgtcaatgcttttataccatactcat

SEQ ID NO: 122445 - DNA, 338 bp, Glycine max
  Clone ID: PAT_MRT3847_81573C.1
gggaaaaaaaccaacttggtctgggttttatttttgcccttcacattacccccacgtgggaaaacttttgggttccccacaaatcttcccttaaccccatgcttggccctaaaaaaacaagccctctttgtattgaacctttccggctcaaaaagggaagggagcaactttttgaagacctttaaccggagcaaaccccaggggttctgattcctttttggggggggttgaagcgaaataattcatccccccccctcctaataaattacccgggtttttttggatcccaaggaaaccattttttccccaattttctccccaagaatttttccctttcc

SEQ ID NO: 122446 - DNA, 354 bp, Glycine max
  Clone ID: PAT_MRT3847_81574C.1
gaattcggcacgagctttgaatggaagattacgtggcctaaggttgtcacggtctaggaaactttccttaggagttgtggtgttgtcgagcagaattgtaagactgtacaatgaggttgtcaaccaaatgatgaacatggaaaacaagtatcctgctatagctctcaccactcaatggggccttcccgttctctctttttcctcacacgtgtgcagaaggagggtcttccctcttgacagaaaagtcactctctgtcagcaacttggattatgttttggctcatagagtcacagtgtattctatagtgaatccaattaaatatatgtaatcagcttcatgcatatattattatc

SEQ ID NO: 122447 - DNA, 174 bp, Glycine max
  Clone ID: PAT_MRT3847_81575C.1
ggaagcagatagcaggacatatcataacattctcgggggcgttcactcttgtcccttacaaattagatagcttgttttttctatacatatatgttagaacaaatgaaagtttgaaaaaaaaaagaaaggaaaaaaaaagaaaaaaaaaaacttcaagtcctacatcgttcagga

SEQ ID NO: 122448 - DNA, 479 bp, Glycine max
  Clone ID: PAT_MRT3847_81576C.1
ctgtgccgcctcgcggtccgcgattccgcggattcccgcgctcgactccacgcgtccgcccatttttaataagacacacgggtcgttaggttcctcttgaagagaaatctgggcattgaagcacttaccacttttacaggaactgtggtgtgtgagttttataagccccaccgcaccctccagaatgaacggtttcataccggactttaacttgtgggggaataccggctgtggagcaagaaggatctttggggggtggacaaaccggttagccgcatatccgaacatacacggccggattttctttacctttaacaagaaaacacccgcgccgaatctctagggcgaggctcttttctctatgaaagactcttacgaactactttacgagatctataacaagacttggtacgtgctggccctcaccgctgagaatatgatctagcgccgcctttagacactcgtattcatatccggga

SEQ ID NO: 122449 - DNA, 440 bp, Glycine max
  Clone ID: PAT_MRT3847_81577C.1
aaagcaaaaatgatgaagcaaagttagcaagagaaacaaagattgaaaaagttatgatggacgaagaagttgacccattgataaagagggagacagcctacgaaaatacagtgaagaatgtgagctgcgaagacaattttcttgataacccaataacggagttgatcaagaaggaagttgaaggtggagatgcaaccaagcctcattgtcttcaagattcagattttcataaaaagatcggtatgatgaaacagaaatcattgctggacccagatatgatcatgaaggtggttggaaaatcaatggtgctggaatcttggaatttcaacttgctaagtgagcctcttgcattaaactttgttgcatctatggctgacagctcaacaatggagcttaggcagaaggaatgtactgaggcagcatggtgattaaaagtatat

SEQ ID NO: 122450 - DNA, 204 bp, Glycine max
  Clone ID: PAT_MRT3847_81578C.1
cacaaattctacaaaaccctactactgagtggatggttttgactatcaccagcaataccaccatgctcctacatgccatccactcagtagtagggttttgtagaattgttacacaaattttcttttccctctgtaatgctataactagtgattcgacgtttgaaacgtagatccattgattcttaaattggtttcaagaaattt

SEQ ID NO: 122451 - DNA, 409 bp, Glycine max
  Clone ID: PAT_MRT3847_81579C.1
aaaaggaaaaattggggggatcgggtcatagaaaaaaaaagggaaaaagagaaccaaataattttaaaatggccccaaatgggaattaaattaaaggaaccaaagggacaaaaacagggaaggggggaatttcccggggaccaggaacccaaatcagggggggggaccggccaaaatattaggggcccaaagggcattaagcggacagggctgtttgggggccaatcgagtccaggggttgccactaccggaccaagggaaaaaactcacaggcccagcgggcaggtcccgggaactccccttgacggtatcgccccccaacccagggggggtccacctgggctcaatgggggccccgggtcccgggaacaccaacaaaaacgggggcaaaaaaccccgcttggaaaac

SEQ ID NO: 122452 - DNA, 184 bp, Glycine max
  unsure (1)..(184): unsure at all n locations
  Clone ID: PAT_MRT3847_8157C.1
ggagctaantggangaagataataaaggcatnnggntggtggccganacaggtaggcncgcntcgattagnttccgcgtggttcgntttcttcgacatttgggctcntcgtctcgccgtnttctccaacactnnaatggcnnangttcatnggcgcacatttggaacnncagacactanngacc

SEQ ID NO: 122453 - DNA, 356 bp, Glycine max
  unsure (1)..(356): unsure at all n locations
  Clone ID: PAT_MRT3847_81580C.1
ggccgcccttttttttttctttcttttggtttttttactttttttttttaaacaactaagcacattcaatggtgtcaaatccatttcctaacccaaaatcatatcaaaaaatgaagaccatatttgtacacccaaataataacttatatcttacactactatcaatgaatcactctgcttcatctcaaatcacaccaatgacaccttagacatgatatgcttattcaactccaccatcatgtcttttctcacccgcttttcctaacttaatgatgtcgtagctgtctacaactggctttacaacactttctctcttcccaaaatntttagcttggttcttcccctggtgcacctat

SEQ ID NO: 122454 - DNA, 673 bp, Glycine max
  Clone ID: PAT_MRT3847_81581C.1
atatttgccagacaaaggttcttccatacaaatcagagaaaggttcttccatacaaatcagagaacagtgactgaatgagtcaagattccattcttcatctacttggactacctcttctattttaatactggctataaattgaagatcgggacaggactgtataaacaagaagctaattaaggtgaatgttactgtataacaattgatagggtgtgattagttccatccacgtaccttctttttttttttagtacaacttaaagcacaaaagtttataaacataaatatttaacaaactacttatgctccatgcaccactaagcagcttaagctttctattttctcttcagtgggagagaaaggatgacattgctgagatcattccacaactcaaatgccttctttgatcataatcagggaaatgctttacgtgttaagcagactttgcatgcaaaagcttctccgagtaaacacttctctttgcaagcatgactgttaggatgataggaaccattgcagcagacaaatgcttaagtgtgtgaccactgacaatgtgaaacgtcagtaaataaatcactctatcggcggtctcttgcagcatagctagaacataaaatcctgaagcccagagccaatatgctgaatgcgtgtacattggaggcaataaagtag

SEQ ID NO: 122455 - DNA, 519 bp, Glycine max
  Clone ID: PAT_MRT3847_81582C.1
ccaaaaaagggcttggtttaaagggaaacccaaccagggcccccaaattagacgggaaggaagcctttttttggtgggttggccggcaagcatcctcccccttttggcaacccggggaaaaaaaaataaacccggcccccaatggggggggctctgaaccaaaaaaaataaaatctggccccggggaccaaacttggggggaggggggggccccttttgggggggaaaaaggcccccgggggggggggcccggaagaaggcagggggggaccccccccccaaaaaaaaaacctggggaaacaacccccttttggggaagggggcaaaaaaggtcccaaaaaacttcctttaaaaagggttgtaggggaaagggccttttaacccaaaaaagccccccggccccggggggggccccaaaccccccaaaaaaaagacccccactttgggaaccaaatttggtacccagggcccccctccggaagttttgggatttaacagggggggaagggggcttaaaaa

SEQ ID NO: 122456 - DNA, 818 bp, Glycine max
  Clone ID: PAT_MRT3847_81583C.1
attttccaaacttctcattctcaccatattaaagaaagaaaagaaaaaaaagtttaacttttgttaaccgaagtgttcgccggcacaatccattattggatcgccattgcaactttctgttttttattcttttcagcagctatccaaacaaaacaggttcctcgttgactgagtgtgtcaggtcggaacagtgagtagagaataagctatgcagttcaatatcacatcacaattccttcatatcttctctcttaccttcttccttatcattacctcttcactttcacaatccaaccagttttgtgatgctgggactgaaattccatcatccaagttgttgatcaagggaggcacggttgtgaatggtcaccaccaacagatggctgatgtttacgtggaagatggcatcattgttgcagttaatcctaacttcagggttggagatgatgtcactgtcattgatgccaccggcaaatatgtcttgccagggggcattgatcctcacacccatctagatatggatgttggttttactgcaacggttgatgacttcttcagtggtcaggcagcagcattggctggtgggacaacaatgcatattgacttcgttataccacttaatgggagtttgacagctggttttgatgactatgaaaagaaggcaaagaagtcttgcatggattatggttttcatatggctattaccaaatgggatgaaactgtttccagagaaatggagctcatggttaaggagaaagggatcaactcttttaagtttttcatggcatacaaagggaattcttatgatcaatgatgag

SEQ ID NO: 122457 - DNA, 232 bp, Glycine max
  Clone ID: PAT_MRT3847_81584C.1
tcctaacgggaattctttttctacattcaaaacctatcccatgccaggttacattacaacgtgggcttgcactactctgacacatactcattatccatacatcaacaactcatctaagatcacggtccctttaacgtacacttcatacataatcttatcgtactagaactttgattaccatcctcattataactacacattcatatataagcccatcatccccaactcccta

SEQ ID NO: 122458 - DNA, 908 bp, Glycine max
  unsure (1)..(908): unsure at all n locations
  Clone ID: PAT_MRT3847_81585C.1
ggctcgagtccaaacagaacaggctcctcgttgactgagataacaactccgactcttgagttgagtgtgtctggtcggaacagtatgcagttcagtatcacatcacaattccttcatatcttctctcttacaggaggagcagagtatcggcatagcgtagccatggccatgggattgacctcacaactcctcctttctttgttcatcagtacccttcttcttcttcttccctcttccctttcacaatctaaccagttttgtgacgctggaacttcatccaagctgttgatcaagggcggcaccgttgtgaatgctcaccaccaacaggttgccgatgtctatgtcgaagatggtatcattgttgccatcaatcccactattacggttggagatgaggtgacggtcatagatgccactggcaagtttgtcatgccagggggcattgaccctcacacccacctagagtttgagtttatggatacggaaactgtagatgacttcttcagtggtcaggctgcagcattagctggtgggacaacaatgcacattgactttgttataccacataaaggaagtttaacggctggttttgaagcctatgaaaagaaggcaaagaagtcttgcatggattatggtttccatatggctattaccaaatgggatgaaactgtgtcaagagaaatggagctcatggtcaaggagaaaggtcatgatttatttccttgataatttggctgattatgtggcaataaccctttggttntgagtttatgtggaatttatttcagctattgcatctatgttttgtaattgcaggcatcaactcttttaagtttttcatggcatacaaaggagctcttatgatcaatgatgagcttcttctgggaggatttaaaaagtgcaagtct

SEQ ID NO: 122459 - DNA, 385 bp, Glycine max
  Clone ID: PAT_MRT3847_81586C.1
aaaaaccattttgctctcactattgataaaagaaagagttagaatgattacacatggtgctatatcactatttttgtttttgtttctattctattattgtagcacatacatatataacatatcccgatgctatttgaattagggggtaaatgctgtgcacccgttgaacacaactccaacacaagactggcttggccaaaatttggtcattgaactctttaagtcaaattctcaattaaaccatatgaaaaattttccccctttgcttcattaattagtagtacctgttcctctatatttgtacttagtggcccaatacaagtagtgtaggaagttcaacccacttagcacacacatgagccaatagaacttctctaggtgatag

SEQ ID NO: 122460 - DNA, 269 bp, Glycine max
  Clone ID: PAT_MRT3847_81587C.1
tctcgattggtcgcgtgacgcgtccgctcactcgtgcaccgaaacttaggaagcgtacgaatgtgtccctatagtgtgtcgtattaggagctcgaagtaaacatggacatagctggttcctgagcgaaattgctgggaaatcacagttgacacacaattaaatcgcgctatagcataacattgtacaatttctggcagtgtctaatagatgagagctaaggtccataaagatcgccgttctcaactgtctgcgtcagaccatgaatgga

SEQ ID NO: 122461 - DNA, 233 bp, Glycine max
  Clone ID: PAT_MRT3847_81588C.1
aagacgacagaagggggatgtgagagaaaaaggaggaacgcagaccgaggcgtttccagttcgaaaggtgaggaggaagtgtacgagttgtcgtcgttgcaactaatttaggtgcatgactggttgggacctacaattcgttcgatctccggtagctctgtgtgaacggtctctatacgcgggacgtgcactgcacccgttggaagcttgctctcggaccaactgcatctttg

SEQ ID NO: 122462 - DNA, 1310 bp, Glycine max
  unsure (1)..(1310): unsure at all n locations
  Clone ID: PAT_MRT3847_81589C.1
aatgcggcccccgacctggtggcccggtgccggggggccgggtgccttccttacccccccaaggccgggggactggtttgggcctccataactcccccggtctcccttattccggaactcttttaacaaagtccaagtccaagtggatccgtatgaaaggagatagcagccacatttcttcacctcctgtccttcacccacagactactttgtttctgcaggataaatcggatgctggggcgtcaactctcctaagtggtggtcatcctttaggggtaaatcaagaacagaagcttctcactaaccctgctaccattaaaccagctttacctcctatttcgatcaagaagcctgaatcaagatggacgttagcaactgacactggttccggatttacctttcctgtttcagcatccacttctgtattctctgagccaccaactccatccatcacgcctccgcctgctacggctgcgagaagacgacagaaggggaagatattagaccatattgatagaaacactcccacacctaaagagaaatctgctgagctcaagctggcaacgaaatggaagaaccctgaatcttctattgatttcagtactatctggtcaaatgaagataatggtttgcttaaattagatgatgttagcccttataaatatgatgggcttgaaggaaaggaatctactctatggaatgaaagtaaggggaagtaccatgttgatatgcaacctaaggagagtactgataaatctatcgctgtcagaaaagtaggaactttgttgtctgatgtgaatgtttatagcagcatccctagacttggtaatgatgtaagcactacgcaaaatttgtgttcttctaaaaaggatgctatgaagacaactcccccaagtggtgatcatccttttggggtaaatcaagaacagaagcttctcactggccctgcaaccattaagccagctttacctcctatttcaatcaagaagcctgaatcaagatggacgttagcatctgacactggctccggatttacctttcctgtttcagcatcctcctctgtgttctctgagccaccaacttcatccatcacgccttttctttttggtgggnnnnnnnnnnnnnnnnnnnnnnnnnnnnnnnnnnnnnnnnnnnnnnnnnnnnnnnnnnnnnnnnnnnnnnnnnnnnnnnnnnnnnnnnnnnnnnnnnnnnnnnnnnnnnnnnnnnnnnnnnnnnnnnnnnnnnnnnnnnnnnnnnnnnnnnnnnnnnnnnnnnnnnnnnnnnnnnnnnnnnnnnnnnnnnnnnnnnnn

SEQ ID NO: 122463 - DNA, 187 bp, Glycine max
  Clone ID: PAT_MRT3847_8158C.1
tctactcgttcgtccactctgtctgtatttcttggtcgaggtatcacactcagaagccacataataacagagtgcctcctctaacaacactctatcggcatgaattatgagctcgaaggcacgaccgactgttctgggcccgcggataaagaccacgacccaacatattgctccgccgatagaccct

SEQ ID NO: 122464 - DNA, 1406 bp, Glycine max
  Clone ID: PAT_MRT3847_81590C.1
ccacgcgtccgcgcaatttggaacggagaaggcagcacagtactactcgagcgagcttaaaggcccacacacgcaacgcaagtcgcacctctaatatcattcattcatttccatttcaaccttttcaaacgccaacgcaatacaaattgaaattagaatagacgctaaggcaaagccaggcatacaccacaacgtgtgcgtgagtgagtaagcaagccagtcccccatttctttcaaatcaaaaccctagctagggttccttccatcgatccatcgatcatggcagacgaggttccttctcctccagcagcatctgcttctactgctcctcttggttccagcgtgatctcccttgtgaaccgccttcaggacatcttcgcccgcgtcggaagccaatccaccatcgacctcccccaagtcgccgtcgtcggcagccagagcagcggcaagtccagcgtcctcgaagccctcgtcggccgcgacttcctcccccgcgggaacgacatctgcacgcgccgccccctcgtactgcagctcgttcagaccaagcgcaagcccaacctcgacaacaacgacgagtacggcgagttcctccacctccccggccggaaattccacgatttctccgagattcgcagggaaattcaggctgaaactgatagggaagcgggtgggaacaaaggtgtatcagacaagcagatccgacttaagattttttcaccaaatgttcttgatatcacactggtagatctcccaggcattacaaaggttcctgtgggtgaccagcgtgaagatattgaggcagccatcagaacaatgctcatgcgtatttcaaacctcacaccatcagcaggcttttaaggacttggaggagctgcctctggaagctgacacagttgaaagaggatatggtttgcctgaaaaaactggtttacctaaaattaatggattaccaacgtcatccatgtactctgcaagcagttcaggagactattatgcagctttttcgaagtaccctaagtcgaaaaagtcctcccattctggggagcttcaatcaccattgcatgctgatgcagattccaatggaagtggaaggccattgtatatataaaattgagtctgtaccttgggtagtaaggcttttatttgggaagctaggaataacaaatttaataacatgtttagaaattagtgaagagcctaatttatgatgattttgaggagttaatgaagttgtgcaaacaaaagtcccagtattttctttgggatcttttgtttcttgaaagatgtcctcaatccttcattcacatccatcaccaatttttgtccacctttgaacatatacgtgaattttatactaaaattttgtattctttattaacataccacaattcaaaatttaagtt

SEQ ID NO: 122465 - DNA, 165 bp, Glycine max
  Clone ID: PAT_MRT3847_81591C.1
tttctcgagcatgataacgctcacagcatttatatagcgtgttaatgatatgctggtggggcgtcaacacaaaaaattactgcgccaggctagagctccaagcatgtttttgctattttttgttttgcttaagctctattttgtgtctctttgcacgtgaatgat

SEQ ID NO: 122466 - DNA, 494 bp, Glycine max
  Clone ID: PAT_MRT3847_81592C.1
ttgatttcgggcgcgagctcctcactcggctgcgggcgccccatttggacttcaataaatgaatttttagacccacccggcgtttccaacacatggagagcaacggcggcactccatgactcagacatggctagagccctcggactgagcattttctcttcatagaggctggagggattgttaccattagcaggagtggttcctgctgttacccacttgggcttgcaccccggacgtcctccaccaaagttgctcgcattttgtgcatcataaggatatgcatatatctggatatgctccagtacgcccaccaagcgctgtcaaaagcgatattcttaataatgcgtgttgcacaaaaattgcagagagattggggaagacaccctgacatgttgcccttcgatggggcttgcgcgccagtcatagcgtgctccctatgagcactgatgtgaccagaaccaatggagatctcgatctcttcgactgggctattc

SEQ ID NO: 122467 - DNA, 406 bp, Glycine max
  Clone ID: PAT_MRT3847_81593C.1
ccttcacttcacataataccctctctacccatactgtttgaccctcttcacttcctacctccccttgtccaaaaaaaaaacgggggaggggatacattaaactttttactcattcttaccaaaaaatccaacacattttcttctaaatactttatagcacaaaccatcctcaaaaattaaaattcatcttacatataacaccccactacctatataccgtaataataacagcaactgtctattagataaacatcactcctatctcttttactatttcactcataaccacttcccttacaaccacataatgatcttttttgattcacaattttaaacagaagatatacatcttctcataaaatccattttcctaataaaaattacttatctcccacaaacttttttt

SEQ ID NO: 122468 - DNA, 400 bp, Glycine max
  Clone ID: PAT_MRT3847_81595C.1
ttttttttttgacataaaaaactaatgagttgaaaagtgtttatatgcacacatcccatagctggcaggtagcacaaaccggatctacccacactgaaaaaaagaggccaataaaataattcggaaaacagacaaacaacaaatacaaaacctataataaaaaaaagtacacatggccttctaccaactggattcggggcagtctcctattccttgccctcacacagttagggcatttgtaaccattgaataaagatcggacaggtcggatctcaaatacgggttttatgtctaatttactgagatagatgtccgatctttatgtaatggttccaagttagtaattgagtgaatatgtggaaaagacattgcagaagatcctcattttttgggggtcttg

SEQ ID NO: 122469 - DNA, 625 bp, Glycine max
  Clone ID: PAT_MRT3847_81596C.1
gtggtggctgcgtggcacttcttggtgctgccaaattggtgttggggttggtgttgggaacttctttggcacacattttgaagcagtttcctgtggggattttaggagtgttgcttttgtttgctggaattgaactagccatgtgtgctagggacatgaacaccaaggaagattcctttgtgactcttgttatcactgcagtttcacttgtgggatcaagtgcagctcttggctttttgtgtggaatggttgtctatgtgcttcttaggctgaggaattggacaaaggataacccactttctactatttggatgcagaaaaggacctgagcaagtttgaagaaaaggaggagtatgtacataatgctgttgtttttgtttgttattgcaaattttaatgcttttaattttgtttgtacataagtcaatgtgtatggctttcaaaagtgattgttgtatgaaagtaaggttggaagggttaagaaaaaaagaaattgtatgtaaataataaataatataattggaatacattaacagcgtaaatcttgtttacactgttatccaattatgaattgtgatgtaattggaagtgttgatttaagtaatttctaaggggtttacacttt

SEQ ID NO: 122470 - DNA, 614 bp, Glycine max
  Clone ID: PAT_MRT3847_81597C.1
gaattcgagctcggtacccggggatcctctagagtcgacctgcagccacaaataaaaatagcagctcaaatttaatattggcaatcatatggtgaaaaaatctggttttgcacagataaacggagggaaattaaaggaaatgacataacaggagaggaagcagtatgataagtggtgataaatcaacacaccttaagctgatagctgttgtaatgacgaaggcaattgcaaaaccatacaaactaatactgacaagaaggccactgagccgtccattacttattcctgtaaccagcataagaggatcttattttactatagaaagatattaaatgttccaaatggtgttggtacacatgatagtaaggagtattctggatcggtgatcgagatctggagacacttgatgtagaaggaagagaagaaagggaattgtaggtacctaaatgcaaatgaacaacatcaaggtaggaggcacttctgttgggaccgtattcggaatggggatggcgataagtgttgcatagaagaaagaagagaagagagtggtggaagcaatgagaaggatggaaaaggggcctgcaggccacccaagctgtgcagtgctccatggc

SEQ ID NO: 122471 - DNA, 1081 bp, Glycine max
  Clone ID: PAT_MRT3847_81598C.1
ccacgcgtccgcagatgattcgtggggacattagccgcaacacgctcctcgccccgtccgacaaagcgtgcaccttccctcaccttgccgaaacccacgcgcagctcatccgcaacggttaccagcacgacctcgccaccgtcaccaagctcgcccagaagctcttcgacgtcggcgccacgcgccacgcacgtgccctcttcttctccgttcccaaacccgacatcttcctcttcaacgtactcatcaaaggcttctccttttcccccgacgcctcctccatttccttctacacccatctcctcaaaaacacgacactctcccccgacaacttcacctatgccttcgccatcagcgcttcccccgacgacaaccttggcatgtgtctgcacgcgcatgctgtcgtcgacgggtttgactccaacctctttgtcgcgtccgcgctcgttgacttgtactgtaagttttcgcgcgtggcgtatgccaggaaggtgtttgataaaatgccggatagagacaccgtgttgtggaacaccatgattactgggttggtgaggaattgttgttatgatgattctgttcaagtgtttaaggacatggtggcgcaaggggttcggttggattccaccacggtggcgaccgtgcttcccgcggttgccgagatgcaagaggtgaaggttgggatggggattcagtgtttggctttgaaacttggatttcattttgatgactatgttttgacgggtttgatttcggttttttcgaaatgtgaggatgttgacacggcgaggttgttgtttgggatgattaggaagccggatttggtttcttacaatgccttgatttctgggtttagttgtaatggtgagactgagtgtgcggtgaagtattttagagaattgcttgtttccgggcagagagtgagttctagcactatggttgggttgattccggtatcttctccatttgggcatttgcatttggcttgctgtattcaagggttttgtgtgaagtctggtactattttgcaaccctctgtttcaactgcactcacgactatttacagcaggctcaatgaaat

SEQ ID NO: 122472 - DNA, 624 bp, Glycine max
  unsure (1)..(624): unsure at all n locations
  Clone ID: PAT_MRT3847_81599C.1
nttgtgaaaacattaacccccaaaagcaattttttttataaatagcataatcttctcgtttccttcatacaacgagccgagtgacatcaaataacccaaaatttgaacgaaatatcaggctattggccactcctgtacgattcagttagtttctactcagtttttttttggctttcttgtataatttgtgtcaaacaaggggtaccaagccaataggttaagttgggaagttgacaaaaagtcataaaacctgtaacatttcaaaaatccacaaattacctaaactaattctacatcaaaaatagtccacaatctgtagcatctaacagattttcagcgctcaagttcactagaatgctatcatttcccgaagagtagtctttgttttttggggctgtttttttagagttaccatctgtttttagggggtttcactttataaatacgaactatccaattctgtgtagggaaagcctcttccaagtactcaagctttatgtctttatttccaatttcaacacctctagcacgatcatacccagggggtttgccatattctgttgtcagctccccaaaccgataataagacagcttgtacataagacagttcaacatctttggagc

SEQ ID NO: 122473 - DNA, 211 bp, Glycine max
  Clone ID: PAT_MRT3847_8159C.1
ggggctaggcgttaaccgtaatatcgattccaatttcgattctcagtcagaagctttctgctaaaatgcaggtttctactcatctatttcccctctcattgaaatgcactcagagtcatgcacacaaaaagaaagctatcgcatgccactacgtatatgatactatgtgtagacacatcagtctgatgagattaattgtttacaatgtttt

SEQ ID NO: 122474 - DNA, 1531 bp, Glycine max
  Clone ID: PAT_MRT3847_815C.1
atgaaattgggaatcattcattaatcatacgaggaaagctcgtgttttgtgttcattcaatttacataaggatgcttgaaaagtactattatctcgcatccatcattgaaattgtcacttcatttgtagaataagattttccgtttcctactaatgcattcttttcatttgcacatgcgtcagtaaaatatgcaggctgtttagggacagggaggaagagagtttcatttgcaagcattgaataaacttctaacatgcttggtctatctgctgcattggcctgtacacataacagggcaacctgagtgcatcgcaatacttcagctgtccggcatgattcaagcattgatgaatctatcaactcaacacctttaccttcattccatagttgccatgcaaatccaataaggttgagggggtaatcagcctgatagcgggaattatttttcttcccacttacaatctcaagcactaggactccatagctaaacacatcagtctttgttgagataatgccttttatgacgtactcaggagacatgtaaccaatttatgttccaacaactctttttgttttcacttctactacttctgaatccaatattactgccatgccaaaatcactaatttttgggttcatttcataatcaagtaatatgttacctgccttcaaatcgcggtgaatcacttttaatcttgaaaaatgatgaagataaatcaacccatgagctataccttcaatgatgttgaatcttttctcccaaactattttttcccttcttttagaatcaaagagatgaaagtctaaacttttgttgggcaagtactcgtagattaatatgttttcttcattttgtatgcagagccccgaaagccttacaagattagtatgctgcaattttgctaccagttcagcctcattcttaaactccaccaacccttgccccgatctactagaaagtctctttattgctatttcttgtccatcaggaagtactcccttgtaaactggtccaaaaccaccctgccctaacttgtttgcaactgaaaagttgcctgttgcagcagcaatgattggaaagctaaatatttgcatttcatagttgaccttgctacgttttctgtgtctttttgttttgtgatacacaatgcaagccacagaactgactccaatttctaatagtagttccttctgcttcttttttctgtcagcttctattttgcattttctccagatgatgcagcacaagtagccgaatataagtacaacaaaaactcctgctatcacaataagccaggcccaccatctgcttttcgtgtgattggtatgcctcgagccgaatcggctcgagctcgagccgtgtgcagggctttaaaaagagtaaatcaccattttcattcctagaagatcttttctgtaataatatcacattattcccacgcaaaggttccctcagtgattctttatcattcaagttcatccccacaagtcattcaaatgcacatttggcattttaaaatttccctttgc

SEQ ID NO: 122475 - DNA, 330 bp, Glycine max
  Clone ID: PAT_MRT3847_81600C.1
tataacaagaagctatagacgtccgctatgcaccgcgtacgtagagcttggtatcctatagagcgggcgcccttttttttttttttttttttttttaaggagaatgaaaacaccacaagcatggaatttttaatcgaagcattatcaggcaataagtttatttggaaacaaaaaggacataagggaagcaacaaaatcagactcactaataagccagcggaaggagttttcaaacgatcgcttttcctttggccagtgatcgaagcattttttgtatcagaacgcgagacaaagaaaatgccatccaaatgacatgagctaggcaaatag

SEQ ID NO: 122476 - DNA, 1728 bp, Glycine max
  Clone ID: PAT_MRT3847_81601C.1
ctcgcccccaaaagcaatatttttttattaattctcttgttcccttcatacaacgagccgagtgatatcaaataacccaaaatttatttgaaggaaatatcgggctatttgcacagttctattctggctatcttgtataatttgggccagacaagtggtgccaagccgataggttaagttgggcagttgactaaaagtcataaaaactgtaacatttcaaaaatccacaaaattacctcaactaattctagatcaaaaataatccacaatctgtaatattgctaacaagattttcagcgctcaagttcactagaatgctatcatttcccgcagagaaaacagtctttgtttttttggagttaccacctgtttttagggggtttcactttataaatacgaactatccaattctgtgtagtgaacgcctcttccaagtactcaagctttatgtccttatttcccatttcaacacctctagcacgatcatacccaggtggtttgccatattctgttgtcagctccccaaaccgataataggacagcttgtacataagacagttcaacatctttggagctgctcctttatctacacgatactctccattgacaaggtaatcaggctcctttatcacaggaaaaactccaccaccaattctcaccatccagagaaatttgttaatatcatcagaagaataaccagtaacaccaccaaacacgactaatacatagtcaacatcaagtgatctcattatctcataagcctcatcctcataggatgacattgctcgcccaacagtggctatgtgtgtgttattccaggtgttattgtcaacaataactgttctgtttcccatggcagtgatttgataaccataatcccaccatgacatcaccttcgcatctggtggagtgttctggcgaagccaaaagtaagcttcacgataatcatcaaagatgaccctgttgccatgggcacccctcgcagccaagacaattgagggagatgagtaagcctctgatgtgacccaagtgcagtgaatgacatatctactgagcaaatagaaagcaccaaggagtaacacaatagcaccattcttttggaaaggctgggagttgtcaactacacccttggaagagctttttgcagagttagttcctttagtagatccactttgaacagctgggcttttggccctcactacccgagccaaattcttcacagtggcagaaaccgctatagcactaatgaggcacacagcaggggtagccacaagaatcaaccgaaccataaccccagcaaaatacatgcttgtaagaccatacattactaaaaagattgtggcatcagacaaacgcttgaagcaaaaatagaggccagcagggaaaaggaacagcaagatgtggaaatcaaacatgaaggacgaccaagcagttggctgatgctcagagacagatgcaataattggaatgtgatccttagcatatgttggatcaagcaaggagtaaaacctcccagctcgagcagaattataaccagacgccatgcccactcccaaagcaacagcaccaacagcaaccgcactagtcacagttatcctcaaaaatgcctgaaacaacttggtgtcactaagcaaatgcttcacccaatccaagaagaaaaacacctgaagcaagaaaaacacgcccatggcggccatgtgttcgccggactgaacatgctggaaccga

SEQ ID NO: 122477 - DNA, 324 bp, Glycine max
  Clone ID: PAT_MRT3847_81602C.1
accacaacgtccgaccacgcgtcagaccacacgtccgctgacatgatcgacgtttatcacagctaacgttcacactcatttcaacgaacaccatcctaacattgcatctgacgataatcacatggtgcacatttcaagagaccttgatattgctaaagatgctctaatgcatgtacttacgcaggtgaaaaccaatcttggtgaaatggaaggtgctctctctacaatccttccagttctgtcatagaccactgtctcagcagatggattaaatcgacgaaactattctggtagaaatggtcagagaaattgacttcgacattc

SEQ ID NO: 122478 - DNA, 404 bp, Glycine max
  Clone ID: PAT_MRT3847_81603C.1
ggccgcccttttctttttaaatgtccattgtagcaaatcacgaacatcaacctggcaaaaagtcaaaccgtcataacattgatgtttcaacaccatatttggatcttgatagctctagctaggacttcggatcacagatgctgatatacacatatggagtaggtaaaatgatattatgctgaagaccacctttctgatcacagcaacaagagtctataatctacgaccccgttgtgtgtggaaccaaagcgtgacgcaatcaccaataccagcactatggaacatcagccaaggcccggagtccctctttacatgcacgaacttcgtgagcacatccacaagggggcattactagtataactccgccctgaatcacaagggttaaaacacactagccggacatg

SEQ ID NO: 122479 - DNA, 623 bp, Glycine max
  Clone ID: PAT_MRT3847_81604C.1
agaagaggtgctaccaacgagtgggaatacctagtcagtcagttgttagacacaatagtcaggttcattacaaaaagcgccggcctcacccttccttaccctccgtttctcaatctcgccgccggcgcaactgcttcatctctccggcgaacgcaaccgaattcttttcccatggcagagaatctgatagcgccgaagcttcccgtcgaaggaaagcgcaacattctcatcaccagtgccttgccttacgtcaacaacgttcctcacctcggcaacatcattggatgcgtgttgagtgctgatgtattcgctcgctactgtcggcttcgcggttataacgctatttacatctgcggtactgatgagtatggaactgccactgagactaaagccatggaagaaaactgctctcccaaagagatttgtgacaaatatcatgctattcataaggaggtgtacaattggttcaatataagttttgatgaatttggacggacgtcatcccctgagcaaactgaagtttgccaagcaattttcagaaagatattccaaaacaagtggctatccgagaacacaatgcagcaactttactgcaacacctgtgaaaggttcttggctgatag

SEQ ID NO: 122480 - DNA, 352 bp, Glycine max
  unsure (1)..(352): unsure at all n locations
  Clone ID: PAT_MRT3847_81605C.1
accaggaaatgttgaggaatgtctgtttattgtcttgcaaagtagaaaaaaaattatttccgtcccaaaggtcacattaatttattgttacaattaaattacctatgattttgtctcatattggttgttggctggctgtgtttagatttaaaatcactttgatttatgttacacacgatttcattataaatagactacaacttttgtttgtgtttaattgantatttctgaattcaccaaaaaatattaaatatttattgattttttttttctactttttatcatacaactctaattaattcttgtctaacatttaaatcaaatcacacatctcatttaatccttatatcta

SEQ ID NO: 122481 - DNA, 511 bp, Glycine max
  Clone ID: PAT_MRT3847_81606C.1
catgctcgtatccttttcatatatggatagcgggcgactacaccactgtgtttgctttccgggtattgatgtttgttgataacgggctttctgcaggaatgggtttgtaaggcctcccatccatgttttaatataaatattttggttttcttcaatttacattggatgtatgcactaattcaattgaaattcgagtatgatggataagggctggtgtttcaccattctttatgtttctcggtatgttgaattgcaggttagccatatctatgaagcacggatacttctccctgttcaaaatgtcaccgtgtgtctgacatgtttcagttcttcattagccatatctgaatgtgcaataacttgcattctgtaactaagaatagctagcattacactctatcaaatacactattattggctggaatttatcgacactcataaataatgttggatcactccctaattcatgaatgagtgtcacccagaattttgcgacttaataaatttagtc

SEQ ID NO: 122482 - DNA, 684 bp, Glycine max
  unsure (1)..(684): unsure at all n locations
  Clone ID: PAT_MRT3847_81607C.1
tcctctctctctctatatatctctctctctctctctctctatatatatatatatatatccgtcatcgttcaatgcgcgtgcctctcttcctcgatgtagagtctggctcgagaaagaattgtatgacatgtttgaattgaatcatctccatgaatggttaacttgagtgggatcaattaataggagcatgcagttcgaaaattcaaagagagtagccataggcattgaatattctataaaataagaaagaaagtagttcattttgagagatgtttccctcgtaccagtggggaccaatacaataaacgataataatgaataaaagtggtcctagcgagcgagaagataatggaagcaataaggacggtaacccaggtgacagtatagagctagctggccaattgtagttggctctgcaccaaaaaatgcaaagtgggaacaaactatgcaagagggccaaaaaccaaaagatcccacacacaccatgcaatggttgctattcgtacgtagccatataggccaaaacttgttaaatcacttcgccctatcttctccctttcctttcaataatacagatgcacgcttcgcttcaccaacgaatcgtcccccacacccctcctcatcttgtccacgataaggactatgatntcatttatagtgtatgttacatccagaatattacta

SEQ ID NO: 122483 - DNA, 553 bp, Glycine max
  Clone ID: PAT_MRT3847_81608C.1
cgatcgggtggtagactcagaaacaaacagggcactgagtcaccgatgcaactcagcagcaacgtactgattccggcgaacaaacccccaagaccgttattcttcaaaccccgattctgctccaaccccaactcgcccgagtcgaactcgctccaagccgagaccctcaagactctagaatggggctccgtgtgcaagcagctctcggcgttcacctccacctccatgggctctgccgccgccctcaacgcccgcttgcccatcggccggacacgccgcgacagccagaggctcctcgaccagacctccgccgccagactcgtcgccgagcccctcgacttttccggcgtccacgacttgacggagattctcggcgtcgccacctccggccacttgctgaccatccgagagctctgcaccgttcgccacacgctcgccgccgccagggaactcgatgctttgaaacgcgtcgcttccgcttctaatcatccacaaaggtacttaccccttctcgatatactccaaaattgtaatttccaagtaggctttgagc

SEQ ID NO: 122484 - DNA, 490 bp, Glycine max
  Clone ID: PAT_MRT3847_81609C.1
tcgggaacattatggtaaacaagtttttaccgctgatcattttcgtttttctgctgattgacaccgccatatgtcgccatcaccatcggcactcccatcatcaccatcaacaaaatgagcagccggagatgatcagcgttccgcttcgccgcatggacaccgtccgcgcccgtctggcgctcaccggatcgcttgaacagttccgcaagcatcgcacggagtcgttgcgccgtaccgtggagcaaatgaacaacaactacaacaacaatgaagagtacagcagcgcggaatcggaccaggaacagatggaaatggcacaaaacggggccagagttggcacggaaattgacgaactgttgcgcaactacatggacgcccaatattacggtgacattttcatcggttcaccggcgcaaaatttcaccgtcatcttcgacaccggttcatcaaacctatgggtgccgtccaaaaaatgtcccatttatgacat

SEQ ID NO: 122485 - DNA, 521 bp, Glycine max
  Clone ID: PAT_MRT3847_8160C.1
cttttactatacttctctctctactctctcttgcgagcaaaaaagaactatgctcagaattaatgcaatacgtggaatacttatctgccagcctgctactacttacgacaaatttgaagtgtaaaactggctccccatagcttttatcatctttcagcacaccccatattacgcgaaacaccacctttccttgggtctcagcggaaggcaccagaacttttgtcttttctactgaacgcgtgaattgactaacctgaattctcaacaacaaacaattattaagctccatggttcacacttgtattccttgcctgcaggctccctgaggcgtttcgtccgattgggtggagccagagggtctgtagaaattaacgaaacactgcacacgacacaactgtaacttcatccaaggcagtaccttctctttcacgacgaccgtttgctctcactgacagaatgtgaactagcctttcctattcagaagatcaatccaagtgatggtggctgaattatgctgaata

SEQ ID NO: 122486 - DNA, 244 bp, Glycine max
  Clone ID: PAT_MRT3847_81610C.1
tgatgagctcaccttggagggtatcaagcaatcacatgtctatgctgaaaaagatgaatggaagctggacacactatgtgatctttatgatacattggcaatatctcagagtgatatatcagcgaacaccacaagaaaggttgattggctgactgacacgatgcaaatccgacaccacacagcatcagtgacccatggagacatggtctatactaccaaggacattataatgcatgaatatcga

SEQ ID NO: 122487 - DNA, 179 bp, Glycine max
  unsure (1)..(179): unsure at all n locations
  Clone ID: PAT_MRT3847_81611C.1
acngnccgccagggtcgagaatttcaattaatcgatggatgggaaacaatgggatcatccatacaatcaagaaagaataaatactcgggaaacatgacagaagaaaactttagaaaatttgatcgcctttttacaattttgactttctatgaataccttaattatttagactatatgtg

SEQ ID NO: 122488 - DNA, 318 bp, Glycine max
  Clone ID: PAT_MRT3847_81612C.1
atgtcagagataaaaaaaatggattgttttgaggaccaaacgtcgggtaaggacagcgacgcatactcgcccttggaggaacgcgaacatgctcaaactcagaaggcgagtcaactggtgttgaccattttgagggtcaggagcgcgagtatcaaaactttactactctcagcgagtgggtgtgggtgcgcactacagagaagtaataagcgaatgaatggggtactagttacgacttacgaggtggagcagctcacagccatgcttagacagttttggagaaggccttatctgacacctcattacagatttaattaa

SEQ ID NO: 122489 - DNA, 162 bp, Glycine max
  Clone ID: PAT_MRT3847_81613C.1
ggcaatactgttcccaagggctatgggttaggtattcatctgagcctaattaaactttgtaggtcaaggaggaaaaaaaataaggtatacaggattgggaataaacctttgttcattgagaatggaatggaagcagggaaatacaatatggtttactctcaa

SEQ ID NO: 122490 - DNA, 250 bp, Glycine max
  unsure (1)..(250): unsure at all n locations
  Clone ID: PAT_MRT3847_81614C.1
cccacgcgtccgcccacgcgtccgacggctgcgagaagacgacagcagggtctcatgcccagcactggaccaagcgggaagcgcagctgggggatagcctagtatcctttaaactcccagaaattattactgttgtgtctttaaagtaaatatcggatgcctcatctaccctaaagggggttcgagtaagcgaacgccaacccgtagagagcgcatacttgtgtcttccccnnnnanaaannnnnnnnna

SEQ ID NO: 122491 - DNA, 132 bp, Glycine max
  Clone ID: PAT_MRT3847_81615C.1
ggatagaaagtccaataagcctatagtatattaaactcataaatgagcctataataaaggtaaaacgctaaactgacatgtacatgtgactaccatgaaaataggcaataaaggtgccattgctgtggggaa

SEQ ID NO: 122492 - DNA, 1068 bp, Glycine max
  Clone ID: PAT_MRT3847_81616C.1
gggccatgccgggtgctgcgtctggcactgccgtggcgccgttggctcccataccggctcagctgccggtgggcccctgtcccccctcttcaattccgggggctcatgctggtgtgggctccgcccgatggacgggcccgctcggacgcctctttgctcgcctcacccgtctggcgccatgcatggccctcgagtgttctgcctcccactctggctccaagcgatgttctcccatgcctcgactccagccgctgagcccgatccccacgacatcaattgcgggtgctgttgctggtgttagctctaccctatgtacataccctcttgaactactcaaaactcgcctcactgttcagagaggggtgtacaagaacttactcgacgcatttgtgaggatcgttcaagaggaaggtcctgcagaattgtataggggcctcgcccctagtctaattggtgtaatcccttatgctgcaccaaactactttgcttatgacacacttagaaaagcttacaagaaagctttcaaaaaggaggagattgggaatgtgatgactcttctaattggatcagctgctggtgcaatttcgagtagtgcaacatttccacttgaggtggctcgtaagcatatgcaagctggggctctaaatggaagacaatatgggaacatgcttcatgcacttgtgagtatacttgaaaaggaaggagttggtggcttgtatagaggtttgggaccaagttgcttaaaattggttcctgctgctgggatttctttcatgtgctacgaagcttgcaagaggatacttgttgaaaatgaacaagattaattacaagtggatcactgcatattctttccatgggatatattggcattgttttgtgtttatgaagagggaaataatttgtcgagctaatttttggttttgcagattttgcttttccctgcatatttgaccatttcaactagggtgtttcttttaagttgcattggctttaaggaaaaaagttgtattgattacagcctctaatttattttccaatccattgtgtttcataatttgtttttggtcc

SEQ ID NO: 122493 - DNA, 145 bp, Glycine max
  Clone ID: PAT_MRT3847_81617C.1
ctctctcgggcttatcttcagagacgagcgaaatacacactcgtcgactggacaccctcaagggggaaaaatttgcctgatgctggtacccgtaattaccaattccccccaatttttaggcactcgtctgggcttggtggcgata

SEQ ID NO: 122494 - DNA, 433 bp, Glycine max
  Clone ID: PAT_MRT3847_81618C.1
tcggtcgcgtgggaaaaaaaaaaaaaaaaaagagaagaggtttattttaaaaaaaaaaaaaaaaaaaaaaaaaaaaaaaaaaaaaaaaaaaataaaaattaataaaaatataaatgggggggggggccgttttgggggtcccagttttccttccgcttgtttgcaagttttttttttttttttggggccccctaatttaatttccggggccgggtttttcccccgtggggctggggaaacccttggcgttccccatttttttcgcttggcggcccttccccttttccccggttgggttatttgcgagggggcccgccccgttcccctttcccaactgttgcccaccttttttgggtatgggccccccccttttagcggcctttttggcggggggggttggggggtttcccccagggtgcccttttcttttgcc

SEQ ID NO: 122495 - DNA, 212 bp, Glycine max
  Clone ID: PAT_MRT3847_81619C.1
ctgacgcgtgggtgttttttaccaaatggggccaaggaggactcaccagcgcgagaaatgttaaagagaggacggatagatagggtcttgaacgcaaagctatagtcgaacgtagcaaagctcagacagtgcatgttttgcgggtgaacacataccacacacacagattcgactgcaattgcttaaaacttgcactgggcggatgagattga

SEQ ID NO: 122496 - DNA, 288 bp, Glycine max
  Clone ID: PAT_MRT3847_8161C.1
ggggtttgcgtgctatgatgtgtgtgtttgctacgcttctccgtctttgggggggggcgggggcctgtggattgggaaggcccaggtccaggtagtaacaccgctataggagggaatgtggtattaagttataggaagatgtgcaaagtagggtagggcattgatggtccacatagggccccaggctttactcggcgcgccataccgtataaccgcagtcctcaacagtgctaagccatttgggaatcgcataagccttgcaatggccaactttgatagacacaatag

SEQ ID NO: 122497 - DNA, 436 bp, Glycine max
  Clone ID: PAT_MRT3847_81620C.1
tggaaaggctacaaatttaagaggacaagtgtctttaccaaccttgggagctggcgaagatgcatacgatgttcattttgaatgggacagacgacttctgaattcccggggcattttacattcataacttgatgcctggtgagtcatatctcaagtctgtaactctcggagacatctcaaaccacggaaccattcactgggtgtgcgactgctgggtttacaactcaatatcctaccattctgatcgcatcttgtttggcaacaatacatatcttacaacgcgagacaccggctacacttgtcaagttcagagaagaagacctgcagaatgtaagatgggatggctctggcgagcgcaatgaatgggataggatctatgattatgacgtctacaatgacttgtgcgatgcatatgagggtgaaaggtatgcacgcc

SEQ ID NO: 122498 - DNA, 551 bp, Glycine max
  Clone ID: PAT_MRT3847_81621C.1
aattcggctcgaggtttctcgcaagttcgctcaggagcaagagttctttcgccaaaccgctctcatctccaaaaaagagaaggaaaaggtctgaatcgcatcctttctctctgcatctttcctctctcctaggccgtcgatgaatgaagaaaaaaagaaaccgaggcccaaggtagacagtgcattgcatgattgacagcaggagttactcagtcatcatagcgagaaatcaaacaaaaagaagtagattcacagcaagagtgaaatgtgtaacttggcctccctttccatttttaatgattctattctctttatctttataaaacagaataactataatgcttgttacacttaaaaaaaaaaaaaaaaaaaaaaaaaaaaaacaaaaaaaaaaaaaaaaaaaaaaaaaaaaacaaaaaaaaaaaaaaaaaaaaaaaaaaaaaaaaaaaggggggccccccaacaagaaaccccgccaccccgaaaataaattcggaaccggacccggaaggggaacaactttcccctaaaggaagccgaataaaacctgg

SEQ ID NO: 122499 - DNA, 438 bp, Glycine max
  Clone ID: PAT_MRT3847_81622C.1
cgagcataaaggactcgtgtgttatctcagaagtactgcgatgcatccatgttagtctcttgtgtgtgcaacaatacccggaggataggccaaccatgacttcagtaattcaaatgttagggagtgagatggatatggttgagccaaaagaacctggtttctttccaaggagaattttgaaagaaggaaatctatgcacaaatctaaaccaagtgacttcaaacgatgaattatccattacgtcattaagtggtcgatgaaaatgcagtaaatgattatgtttggcaagtcgcttagattgtcttgtatctgtttttactagttttaaagtaatgttttaaaaatactaacttctaatttttatgtttttatattttattcccctaaattctttaagaggtcgatgaaaatgtagtaaatgattatgtttggcaagtc

SEQ ID NO: 122500 - DNA, 1000 bp, Glycine max
  unsure (1)..(1000): unsure at all n locations
  Clone ID: PAT_MRT3847_81623C.1
ttcggctcgaggaaggggggaatctaatctaggctcaaacaacacggccccagaacaaacatggtttcttccaacactgccgagctgctgagagaggagattcctgtgaagcaacaacctctgactttgtctgcagacatcataaccggcctcgtactcgtcgatgttgtcaatggcttctgcaccgttggagctggcaatttggcgccgaaagaaccagatgaacgaatttctcagatggtaaaagaatctctgaggctgtccaaagcattctctgagagaaagtggccaatttttgctttccttgattgccatcaccccgacaaacccgaacccccttatccaccacactgtattataggatcaggcgaagaaaaattggttcctgatctgctgtggttggaaaatgacccaaatgcaacactcaggcaaaaagaatgcattgatggattccttgggtcaactgagaaagatggctctaatgtcttcattgattgggtgaaaaataatcaaataaaacaaattttggttgctgggatatgcactgatatatgtgtgctggattttgtctcttctgtcttgtctgtgagaaaccgtggtttccttactcctctggaaaatgtgatcgtgtcttcccaagcttgtgctacttatgatttgccattgcatgtggccaaaaccaacaaggattttgtatctcatccacaggagttgatgcatcacgttggcctttacatagccagtggaaggggagcccatatagcttcagaagtgttatttgaataattgaggggtattgcggaataactgaaagaccgttaagtgttaagtgttagtgtacgtaattcaggattggaataaatgtgagcatctcatgttatataagaatgatttaaaccgaaaaaaagaatatgtgtgaattacatgagaacgagaaaaaaaattatgggaagtacaactttgcgtcttccaaaaaaaatattcttagncttaattagta

SEQ ID NO: 122501 - DNA, 750 bp, Glycine max
  unsure (1)..(750): unsure at all n locations
  Clone ID: PAT_MRT3847_81624C.1
gccgccctttttttttgttttccgttttttttttttttttttttttttttttttttttttttttgcccggtgtgggccccccagggcctggaataaacttgggggaaaatttgccccaattgttttacaagggaaattataccactttttttttaaaattgtcccgggaattttgggggggggggccctattctgccctacccaaaaaatctttttgtactcagggggaattgggacaccggnaagacctcccaaggggtaatctaggggggctgatctatttggtgatgccccggccagaacaaaaagccctgctgggaacaaaaaacctgggggcatttccccctttgcctaaaatttgaaagacaaccgcccttttgtggggcaccaattgggggcccaaaacccttaacgaaggaacatccttctgaattctccctaaaattggggttttcaccccccccttctgcttttgtttatttgcccaaaacccaggggtttgactttccaggccccgcaaaaaatccccccctttcaccccgggtgtttcaatttcccggggtttctaaaaaaaaccttgcatccttaaaatccccttgggnggttcacccggccttctgggtacccaaacccttttgcccaaaatgttaatggccaccgcctgtttggccccttttttggcgataaaaaaatctttccaccctcttgggggcacccccccaacacaaacttttttccaaaaaattttcc

SEQ ID NO: 122502 - DNA, 190 bp, Glycine max
  Clone ID: PAT_MRT3847_81625C.1
ggcatcaattcaaaatatatcatcaattataagcatgggtttgtggaacacgatgaatgcagtgtcctgccgctttcacaagcttggtgattaacagaagtatctggccttccagtgtgattgcacgtcatcgtccatgggcactgagctcacaaagttagacggtggtggaaaaccagtgggtggcact

SEQ ID NO: 122503 - DNA, 384 bp, Glycine max
  Clone ID: PAT_MRT3847_81626C.1
atcaatcgtgcgattcataacaggcgatgatacattcaacgatgaaatgaactccgctgcggcttatgatactctatacacagacctagttaccgatgccgacaacgttatccaaaacgctcttgatagccttcaacagtgttgaaaacgctgagcgaaatactgtcccaaaaaccactaacaagatcactgtacttgccgatggagaaacccacatagtgctgcgcataatagaaagcatcgatgaggccaacttcggatacagctacagcactgttagcggcagctgcattggcaaacacgacgtttaacatcacattggactccaaaccgaatgctggtcccaatggaaggcctactgggaagctcaatgtcaaatgcgac

SEQ ID NO: 122504 - DNA, 320 bp, Glycine max
  Clone ID: PAT_MRT3847_81627C.1
caaaactcaagcattgcatccctctttatttgtactttgttttgtgctttagataaaagttctttcaaatcaagaggggttttaagatcatagtgtgtgttttgcaacaatggctaatttctttgctgctatcatcttggcactctttgccatttccatacttcaaacattgttaattgctgctaatgaacaatgaggccacttgtattacaacatgatcaaatatggaagtggaagtttcaagagttaccaatgcccatcacaatgctcgaggagatgtatccatacccaataccacaagccctgcatgtttttctgtc

SEQ ID NO: 122505 - DNA, 446 bp, Glycine max
  Clone ID: PAT_MRT3847_81628C.1
gggatccagctaggcacccactgatggccctacggtacatacgtcctatatagcatgtgtagctattgacctaatgactgaccagaatgatatctatgaggctatcagaccaatacatgactctcaatacaaagatatatgtacaagagaaagacacatatacataccagacttagattatccatagaagactaaatgaatgagaaacagagacatttgatatgggtgtgaagtactgatataatatcttatggaccctgcacaggttgcatatgcacaatatggaataatgcgcactttgataccaaaaatgaaagatgatgaagaaggggggaggccacttaaaatgtgtattgaaaagctaaatataatgggattgactgcaaatgaggattggagagaaagtgaattcatgtcacaatgcattgattatgtatataaagatg

SEQ ID NO: 122506 - DNA, 787 bp, Glycine max
  Clone ID: PAT_MRT3847_81629C.1
ctcaaacacaaacatccctcttgatttgaaggttgttttgtgcttatagataaaagttctgccaaatcaagaggggttttcagatcatagtgtgtgtgtgtgtgtgttaaacaatggctaagttctttgctgctatgatcttggcactcattgccatttccatgcttcaaacagtggttatggctgctaatgagcaaggaggccacttgtatgacaacaagagcaaatatggaagtgggagtgtcaagagataccaatgcccatcacaatgctcgaggagatgtagccagacccaataccacaagccctgcatgtttttctgtcagaagtgctgcaggaaatgcctgtgtgtgcccccggggtattatggtaataaagctgtgtgcccttgctacaacaactggaagaccaaggaaggaggacccaagtgcccttgaacttcaacttcatcaaattgttgcttttcactatatttttatcatctcccttgggccaatttaatgcactagcttactttccctactattttacccgtcctaaccaaatgctccccttttggtggcactctacgatatatgtttttatgtattttggtgtatcctccttaggccttgtttgcctttaatgagagtggttattaatatcaatatatcaactataaaacttattgctagcaaaaaaaaaaaaaaaaaaaaaaaaaaaaaaaaaaaaaaaaaaaaaaaaaaaaaaaaaaaaaaaaaaaaaaaaaggaaaaaaaaaaaaaaaaagggggccctaaacccccact

SEQ ID NO: 122507 - DNA, 288 bp, Glycine max
  Clone ID: PAT_MRT3847_8162C.1
ggggcgaggaactgtggcgacgtgcttgtcgggacaaggacagcggaacaggttggcgtcgatccatggcagactacgacaggagcgtccagcaccagtcgaaagaaacagccttccaggccctgaacagcataatccaccgccacttcgagaagaccctggagaacgagcgtgccatcgaccgccagaagaaggagctctacaagctcgtcgagatattcttcatcttcctgggcctcgtcgtcctgatcctggcccactccccccgccgccaatgccgccactgct

SEQ ID NO: 122508 - DNA, 340 bp, Glycine max
  Clone ID: PAT_MRT3847_81630C.1
acgatcaccggtcgcaagatcatcatcgatacttacagccgatggcttgctcatggtgggggtgccttctgcggggaggatcctaccaatgttgatagtagtggtgctcacattgtgagacactctgctaagagcattgaggcaagtatactacccacaaggtgcattacgcaagtgtcttatgccattgctgggcccgagcctttgtctgtctgtgctgacacctatagcacctgcaagatccatgatgagtagattctcaacattgggaagctgaactatgatttcaagcccggtgtgatcttcatcaacccttatctcaacaggggtgggaattaca

SEQ ID NO: 122509 - DNA, 1404 bp, Glycine max
  unsure (1)..(1404): unsure at all n locations
  Clone ID: PAT_MRT3847_81631C.1
gtttgttttgtgctttagataaaagttctgccaaatcaagaggggttttaagatcatagtgtgtgttttgcaaccatggctaagttctttgctgctatgatcttggcactctttgacacttccatccctctcgatttgaagcccacgcgtccgtcaagcattgcatccctcttgatttgtagtttgttttgtgctttagataaaagttctgccaaatcaagaggggttttaagatcatagtgtgtgttttgcaacaatggctaagttctttgctgctatgatcttggcactctttgccatttccatacttcaaacagtggtaatggctgctaatgaacaaggaggccacttgtatgacaacaagagcaaatatggaagtggaagtgtcaagagttaccaatgcccatcacaatgctcgaggagatgtagccagacccaataccacaagccctgcatgtttttctgtcagaagtgctgcaggacatgcctgtgtgtgcccccggggtattatggtaataaagctgtgtgcccttgctacaacaactggaagaccaaggaaggaggacccaagtgcccttgagcttcaacttgttcaacttcaattgtcgctttcctacatttttattgcttccttccttgtgccaatttaatgcactagctaccaaatgctactagtcccttttggtggcattctatgatattatgtttttatgtattttggtgtatcactccttgggccttgtttgcctttaatgagagtggcttattaatatcaatatatcacctaccaaacttattgctagcatataacagatgtgtgaaaagaggcgagtcaaatggctattgattattgtattgaccataatgcttgttttgtttattatcaatggtcatggtgcgtctcttattctctttttggaatctgatatgaccagaatgcccatcacaatgctcgaggagatgtagccagacccaataccacaagccctgcatgtttttctgtcagaagtgctgcaggacatgcctgtgtgtgcccccggggtattatggtaataaagctgtgtgcccttgctacaacaactggaagaccaaggaaggaggacccaagtgcccttgagcttcaacttgttcaacttcaattgtcgctttcctacatttttattgcttccttccttgtgccaatttaatgcactagctaccaaatgctactagtcccttttggtggcattctatgatattatgtttttatgtattttggtgtatcactccttgggccttgtttgcctttaatgagagtggcttattaatatcaatatatcacctaccaaacttattgctagcataaagaagggcggccgcaancaatgagctcgtcgaaccgggaattaaaaccgggccagtgcc

SEQ ID NO: 122510 - DNA, 613 bp, Glycine max
  unsure (1)..(613): unsure at all n locations
  Clone ID: PAT_MRT3847_81632C.1
gatacccttgatgatttttgcaattgggccatgattctcgctggctaactgactatactgatatctgccaaactggcctcctccctcccctgatgatatgtacgatgatactgatacttcggcttgctggcggctattgaaggattggattgggtttttttcctttcctatttcatggatcctatgatgctatgggatataagatcacctccaaatgcctccaggatctaaatattccgtgccaaatggaaaaagatgatatatatttgccatatgatcgagaaaaccatgataggttagaccgtgaacggcagcaaaaggatatgggaagataaggaccagataagacttttgaaagatagggaggataaagatagataaccccagcgacttgatatggaaaggcaagacggccgtagatatagcctcctagatatacccgtgaaagatcagctgctgaagcacgccaaatatctgagatggcttgcttgttgagaaagttaacgctganactcgnaggaccttgctgnngannntgnnnngcaaagggcacaagctgaagctcgagataaggctgctgcagatgcgatagatagatctgaaaaagctgctg

SEQ ID NO: 122511 - DNA, 662 bp, Glycine max
  unsure (1)..(662): unsure at all n locations
  Clone ID: PAT_MRT3847_81633C.1
gacctcctagtttatatacatcaatttttggaaattgcttaggacacccagcaacttacatgaaaggactataatgtccttcatcctttgctatataatcaaacagtggttcatctgtatgagtcattattcccccataaatgctttttcttcctcgtttattaagcttccttccttcttcttcggcttcctgcttcttgttccatcttcgccttggtgcttcttcttcttctactactttatctttctcattttcaacattcatatcaacttcttcatacatcatattatcatacattcactctcttcgtccatcttaataaaacatttaacaaatttaatttaatgacaaaaaattatataatcacctcattttttattgacacaaatataactgtttacaaaaatattgttgtactgcacatttttattaaaatgtcatataaatctaataaatgcagcattcaataaaatacataattgaattaaagatgtaaatacataatcattnnnataaaaatttgtttaattatnnnntcattagtattttaatttttatgcaatctaatgttatttaattattaatcattagtatttttttccaccattctaattacttaatacattttttatatcactacaaaaattaatatcaccatatc

SEQ ID NO: 122512 - DNA, 1571 bp, Glycine max
  Clone ID: PAT_MRT3847_81634C.1
ccacgcgtccgagttaaacttcaggcccccacttcagttttctacttttcctttcatcctgagacctccttgacactttcatttcgtcgcataacccttaaggcgccgcacacaccggcacggcctccctccctcgcgagtctcaccgccatcgttaatcacggttgtcgtcggagctctcgtagttgctcctcacagtcccagattgtcaaaaattgtggcaaatcatggaaaatactgcgggccataacgatgatagcaagcaaaaagaagcgcctaagcttgcggcgttgttgaaagaaatgaaggaaggacttgatactgtaaggcgtaaaattcaatctttaactgccacggtgaaagaaggccaatatcctacagcagatggatttagttatcttgaagctaaaaatttgctgcttttgaattattgtcaatcccttgtttattatttattgcggaaggctaagggattatcaatagaagatcatcctgttgttcgaagtgttgtagagataagattgtttttggaaaagattcggccaattgacaagaaacaacaataccagatccagaaactaatacaagctagtgaaaatgcaaccagaagtgatattcaaaacaaggagccagttgcatccaataagagcgaggacgtgtcaaagtatcgtcccaatcctgacatgcttgttagcaaagtagacctaaccttgcaggatggcacatgagtattatcaacctgtaaaatttgcgcctacttctatggatctagagaaatcttcaaagtatgaaagaaatgccttgcgaagagaaaaagaaattctgaaacaagctaagcagagtgattatattaggacattgatgaatgatatggaggaaaaacctgaagagataagagattttgagggagctagcagagaagttgatagatatattgccaagatggacgaacgtgctcggcaagaggaggagctgttcacgcgtgttcctcttacgaaacaggagaggaaacgagaaaagtacttgaagaaatcaagaaatgggttgcaaggtctaacagaaagtttctatgatgaaatcaaaacattaccctttgaagataaaactggagagcaagtagtgggctctagtaatggtagcagaacaaacaatagactgaagaagcgaaagaggaaacattaaaggaagaaaatttgggttttgagctaaagggcggaaatgcatgctatctgcagaacagaccactgcatgctgttggaggaagtaatgctagatttaacgaaaacgacagagttggtgttggtgctttcctccgtgtttgtttgtagattttagttacattattgtctttttatttatttatttacttattattattattattataggctcgggtgcttaattgggtacgtgaatttgagattttcgcagagatgaaatgtgtttttttttttgctattacagatgtgcacccatttttgcgatgcaagtggatttttttaacccacctttatatatttaggtggagtacaaatagtattaaacttcatatttagtaggaatactgaatt

SEQ ID NO: 122513 - DNA, 411 bp, Glycine max
  Clone ID: PAT_MRT3847_81635C.1
gggggaaaaataacggcttaatcccattgttttcaaaatgaagggcccatttcacgatgcgagaagtttgagccgtttttaagccgggcatattagcttttctaagttctaccttacatatttttaggggggccttgaacataatttcatttgtcacatacttggcagaatcttgtcagcctaacttggcaaacatgcagcgcaccatccatggggggatgagaaaattgccccttgggacggtttgacccccacccgtttcttccacgggggttcctccttgccttggctcactgggagttaaagaaggaaccaccctttggggagatgggggagggggtacctgtgaaaaaaataaattgaggggggatgaatcaaaccctaaagtttttgggccgttgggtggacctt

SEQ ID NO: 122514 - DNA, 274 bp, Glycine max
  Clone ID: PAT_MRT3847_81636C.1
ccggtgtgagaaaacaacacaaggggaatggggacacatttttcccgtttccacacaattgggtgttggagagaaaagaagaaccccgcgaaaccacccacgttgtctttcgattccttcgtgcgggcgatacttctgatatttcaaggcgacgcaccgacaccggacccatcttcggcgacatcttaccaatgttctgcgaatcccccggccccactttatttcctcgaaatgaatacccagtatgattatttgttcaagctccttcttattg

SEQ ID NO: 122515 - DNA, 513 bp, Glycine max
  Clone ID: PAT_MRT3847_81637C.1
agccgctaaggttcataactaatagctgcctaactaaccaactaacattattttcttatttatatttacaaattacatatgtcaggcaagcatctagatagggatgttggtagcattggatgggtgttagggatgatttacctgttctatcttttgatccttcaacaactgttttgtgtcatccaattcattcgtagtttccaatagcttcaaccaccaacttgaagcttctttaactgcacattgaacgaaattccactcctaaaggacattgttctatccactaaatggttcttgccattgcttcttttaccacaagcataatttaagcttgtttttctcttggcctttttctaatttttaggctatttatggacttttaaaaaagtagtaaatccgtgtggtcctagacacttttggccttcttgggagtaaccaaaagtgagtttttttgcacctattcatcctcctcttcctcatcatcattttccccaaacctcagccaattatgag

SEQ ID NO: 122516 - DNA, 317 bp, Glycine max
  Clone ID: PAT_MRT3847_81638C.1
ttgagttctattctattatttcaaacactccactgcaataacttagaatcgctggggaggccattaatggcaggggatccctatgaactatgttatttttcccaaggcaaccggaaaaaaataaacaacgtttgacaattagcgacctataactgtacaccatacaacaacagctgaggctacggagctctaccaatgatactgagtgtattgacacttaactgaaccccgaggaggattcggcacttgagaattacatagtactggacgacatttatcttttctggtcaagaacaacaatggatggtgcgcttcaa

SEQ ID NO: 122517 - DNA, 589 bp, Glycine max
  Clone ID: PAT_MRT3847_81639C.1
aacgacatcaaatatgaaaattatcatgcaacacactgaggaaaacaattcaaatttgcataagaaaatgcacctagattctagactttaacaaaaaactcggttggttgaacatggtacatgggttattgtaaaccccttgtcccagtcttcgttttagacggaaatgcttgttaaaagaacaggagtgtatgctacctctgctcttcctcttacaatttgaatgtttgaggaaccgataacaccgacaacgtgctccaagaagacgcaccgcttgttcatagactccatcagcgttacatcccactctattccattgaaccacgagtcacaacgaactccaccgaggaattaacacaaattcagatcgcaaataaatcacataagaactcaccagggcgtgttatggccaaaactattccgggaaggccagcgccagttccgacatcgacgagactcagcttattgcacgaagcgccgcagtgcgagcggagtcttccacgtgtctttccatcccttcattcacctctctaactgctgtaaggttcatgcgcagcaattgcaattgttatgtgtaacatgtcaaggg

SEQ ID NO: 122518 - DNA, 179 bp, Glycine max
  unsure (1)..(179): unsure at all n locations
  Clone ID: PAT_MRT3847_8163C.1
aagttaatgaagantacgtaagatcggaattntgctcganananaaganncggtttganttatnccntttgngtngttntcgggacgaagaagtagatggtntcaggntctngaatctcgcgnaaaagcgggngntngtntnacgcgcntcannatatncatgggtcgtctatnntacc

SEQ ID NO: 122519 - DNA, 525 bp, Glycine max
  Clone ID: PAT_MRT3847_81640C.1
gccgggaatttgcgtggtacatgtgtagcagtaccgcctgcttggggggggggggggggggggaaggaaaagtggggggatgagggaatgacacccggaaaaaaagaagatgcaaacacaaaataaatgttaatgtaaaacaggttagttgctaatcaggcagatgtagctgaatggcaagatgatgctggtaattgtagtcgtttgggccaggtggacgtgtacacaaaatagtagttccgagtaatataaaacaggttagttgcttagactgattagtgttagtatggcgtcgctgtaagttacgcggtgtatgataagtgcacccatccgatattcactggatggatctggctagctgatcgtagactgtggtgagactcgtattgaaaggtaaggtatgccttcgccagggataatcgtcgcatgcccaaaatttgcctcggatttaatggaagtcttggctactatagattttgggtcttactgcctcgaagactcaacagctttcaattcagtcattgg

SEQ ID NO: 122520 - DNA, 334 bp, Glycine max
  Clone ID: PAT_MRT3847_81641C.1
gccacctcgccgcctctggcacctgcctcgtcgctcgcctcgagcccgtctacgcctcgccgcatgaagaagtcctaccacctctaagggcaggctccggttcgcgtgcctcgctcgctatttggtcgcctgcggggttatctcgggttttcagcgggtggggcacggggggaggactatggggtttaccagatcgggggggggtcctggggctttgggatggaactggggggtgtgggcaagtgtgttactatgttgaagagttatatcatctgggtattgatagaacgcgattcattattatcttttttggttctctttggtgaattcgttt

SEQ ID NO: 122521 - DNA, 198 bp, Glycine max
  Clone ID: PAT_MRT3847_81642C.1
aattcggctcgagccaaaatttggtgctcatatcatcttacaaattaatagatgacactacaacttatgtaagatgatatgtcatctattaatttgtatcctgcacacctaattatctccattcctttcttatgttctaatctcttgtatttatagagggaaacctctttattatattgaatgctatttttatttcct

SEQ ID NO: 122522 - DNA, 404 bp, Glycine max
  Clone ID: PAT_MRT3847_81643C.1
gacgatcaaacaacaaaaaacactgcacctgggcttctgggtacgccactttttttttttttttattcttctttttcttcaacccctctattcgcaaaggaatcgattctgttcagttttcttcgtttttagtttaaattcacagtcttttgaggaaaaaaattaaagggtaaccgctcgtttaatccaccaagctcaatttccatccctccacaaaaaaaaaaaaaaatcaacaaaatcagcttttttattattattattatgcataagatttctatggaggctttgacttatatcgtgggcatcgaatcgggttattgattgatgaggtttgatgggtgtgatcagatttggtgaagaagaagaagaagttgaaggattatgaattgtgatgtgatgattat

SEQ ID NO: 122523 - DNA, 308 bp, Glycine max
  Clone ID: PAT_MRT3847_81644C.1
tgtggttgtaactcgttcttcttattttgttgttcgcttaaaataaaactttaacacatcccaggcgcgggcctttggatcctggtaagcttctttttatacccatggccaacacttgcttcagctgccaattaaagttcttctatttacataaattacttgttcttttttttggacaaagtttacataggactcattttaccactccacttcctggactggctattgaaatggttcgtcccaacatttgtccttctcaactgccttttcccaacgttttctaaagacatataattcttcttaagaaa

SEQ ID NO: 122524 - DNA, 245 bp, Glycine max
  Clone ID: PAT_MRT3847_81645C.1
gcgtcagtccagacgtcagaagacgactgagcggacacctgtgtacaagccgtacgcgtagccgtctgttcagccgggagactccagttgaagtgagatacatgtcgctgactggtaagagtgtttgcattattgtgcgatgaattgatttacagttactgctgatcccagcccatttcatagagtcagctccagctccttgattatgcaggtataatcatagtcaggatcagtcatgtatgata

SEQ ID NO: 122525 - DNA, 429 bp, Glycine max
  unsure (1)..(429): unsure at all n locations
  Clone ID: PAT_MRT3847_81646C.1
gaacctatagagcggccgcgggnnttttttttttttttttttttttttggacccctaaacaaataaacgattaacaataataaagggggattgtttcaatacagctatcccattcctctacatatccaacacgggcgctcactcttaccaaaaacaccaattacctgcattaaccccatacaaccataaagtgtctctcctcctttcttctaactaaaagggaaaatctacactccatacaatgttaaaacaccacattttatgacaaaaaaaaaaactctatttcttaacaatcactgttaactcttaacaaaaagtgttcatactggtagagcgactttctgcactttgataaataaactaatttgctgctactgaccgctgttacttaaatacagacatttatccttttggctaaatagaaaagta

SEQ ID NO: 122526 - DNA, 532 bp, Glycine max
  Clone ID: PAT_MRT3847_81647C.1
gggtgcaggtgggaggaaatattcgggttctttttcgttccctctaccaaacgaaagcagagagcgaaaaatggctttgaaactctcgtcactatctcttcactcctctctccgccaccagcaccctaattcgtcgcattcaaaccatcgcattccccttcgtttctttgcaccttcccttcctcccacttcgtgtctctccggcgcagcctcagtctccacatttcatcgcactctcttcgccgtaaccgttcgcgcatttcaaagccaagacgaaagcaaaagcagtgatgtttttgaagaagaagaaaaagacgaagaaatatcgaggcagggtgagaaaaaggaactcgcgaagcaaagcatatggagtcagataaaggaaattgtgatgtttacaggaccagcaacgggtctttggatttgtggaccgcttatgagtctcatcgatactgcagttattggtcagagaagctcaattgagcttgctgctttagggcctgctacagttgtttgcgactacatgagctac

SEQ ID NO: 122527 - DNA, 562 bp, Glycine max
  Clone ID: PAT_MRT3847_81648C.1
gcttgaggcacgtgattcagttccaaattcagttacaatggttaacgtgcttcaagcctgtgcaggtcttgctgcattggaacaagggaagttgattcatggctatatccttagaaggggacttgattctatactgccagttcttaatgcccttataacaatgtatggaagatgtggtgagattttgatgggacaaagagtttttgataacatgaagaatcgtgatgttgtttcatggaattctttgatttctatttatggtatgcatggttttggaaagaaagcaatccaaattttttaaaacatgattcaccaaggaggttcaccgagttatatatcattcattactgttctgggtgcttgcagccatgcaggccttgttgaggagggaaagattttgtttgaatccatgcttagtaagtacaggatccatccaggtatggagcattatgcttgtatggtggatcttcttggccgagctaacaggttagatgaagcaataaaactaatagaagatatgcattttgaacctggacctacggtttggggttcccttcttgga

SEQ ID NO: 122528 - DNA, 246 bp, Glycine max
  Clone ID: PAT_MRT3847_81649C.1
atcctctagagcggccgcgccttgctttttttttttcacagccaacagaatcttcaatacttccccttcatcacctataccatgaccacatcaatcttggagttctgggctttacccttcactgaaccagcatctctctacttctacccactcatggaaccttgcatcacaaatatcaccttctataaacgagctacctccaccataatttttctttacacttaaaatgctattatatcaatccaa

SEQ ID NO: 122529 - DNA, 2031 bp, Glycine max
  Clone ID: PAT_MRT3847_8164C.1
gcaagaacggctagagcggttgacgagaattggtggagatttaaatttagaatatgctgaaggtagctgcgaggaagaaaatttggaggaaaaatcagagtgcatgttggtgaatgatagattagaagatagacatgatgacaatccaatgatttctcaatcaagcctaagaaattcctcacctgaaaacattgagaatgatatgaattatccgaagaaacacatagttaatggggatctgcatacatttaaggagagagtcaatgatgacaatgcggtgcctagtgatcctgaaactgatagaaaaactgtcaaagaatctggtcctacaaatgctgaagatagtgattttgtatggggatgcttttgtaacaaacaaacagtctgaagataggcgtttaccaaatgctattctaccactcctgcgctattgccagtgtgaaagctctgaatcttcttgcagttttcagctttcttcttgtgatgacagaaatttaaggcgtaaagaagatgatatttacactgaaattatgatattgtctcaccgagagggtttaaatgatctataggatattcttgaatgggcgatgacgcattactgggagctattcgagattataagtgtgttttattgcttaactgaccttgcaattgcctcattacataagatatatcattggcatcccatacattccggtgaaaaatacagaccagcttcgacttttctccatagttccgtgtcaactattgattctaaatgacgtattaaatcttttctatttgtagaggcacataattttcttcttgatgacgtgcaggcagcttctttatctatatgggctgtatcatgcatgtgtggtaccttgagacttgaaaatgttttaacattctttgcaggagctcaactggagaagcagattgtttttgtctgttctaatttgggaatcctatctgcttctgttttatcagttattccactaatccggccctaccaatggcaaagcttgcttatgccagttttaccaaatggcatgctcgagtttctggatgcacctgtcccctacatagttggtatcaagaacaagaccaatgaagttcagtcaaagttaactaataatgttatcctgattgacgtcagcagaaaccaggtgaagtcatcaacagtacctcaactgccaaggcagaaagagttaatctcttctttacgtccttatcatgaaactcttgtgggagaaagttacttgggtaggagaaggccagtgtatgaatgcacggaagtgcagacagaagctgctaaggggttcctatcggagttaaggtcttatttggattctctttgctataacattcgttctcatacaataaccaatgtacaatccaatgatgataaggtatccttgcttttgaaggagagtttcattgactcgtttccttatcgtgatcagcctttcatgaagcttttcgtggatacacagctcttctctgttcatacagatattgttctctctttcttccaaaaggaataacgctatttgggaatattactgccttgcaaagcttgaacgcaagttcagtgctgtattcttaaattatgtatgagctaaaattttctccctacacgtgacgcctaatgttaccagcttaggcttgccgcaacacctgtatataattagttagatagtatatttaatcttaataagtgctgttaaggtttcattctatgtaaatgacattttttcatacaccaaaggtaaaagttatgctttatgctctaaagatactgtgaaagctaacacctgaaacatccgttaggtatcacttgatttcgatatgacctagtatgtttaaatggtctttaaatatgatgcagaacttgctagcagaaaagccaagtacgttttgtaaatcctcgtaaacatatggaaggaatcatggatattcattcattatgaagaccaactggacgcttgaatatttgtaataatgttcccccccttacaagcaaatttcctccttcctctaattgccagc

SEQ ID NO: 122530 - DNA, 149 bp, Glycine max
  Clone ID: PAT_MRT3847_81650C.1
aattcggctcgagtatttttgtttcaattatgccttatttctgaggacctttctcatcatagattaagctcgctctttattctatgttttgccccgtcctggaagtgattcatgggttttcccacatttatcgaatttagtctgctctt

SEQ ID NO: 122531 - DNA, 641 bp, Glycine max
  unsure (1)..(641): unsure at all n locations
  Clone ID: PAT_MRT3847_81651C.1
gaagttaagcaatattannngnnngcgtcttatttatatataaaatattagtattaaccaattctgtatggccatgcttgcctttggaggaaggggcatacaatattcaaaatttctcttagcattctactatgtgttactgtaatatttttaagccatagtacaaaggtatatatactggctaaaaatttgcctgcacaagcatagacttcctttaatgcattataagatcaatcccagtgttgaaatgagcacttgccatatctgcaaagcttcaaagcaagattactttactggtctctctctgcaaatgacccttaaaacccctttcacttgtaagagcatcaagagaataatactaacttaacatgcttgtctctgcatgcaagttccttttcctttcttttctttttctaatttcaagatcaatgagaaaatagcacttattttgttcccttacgtactggacatgaccacttatcctactgaggattttcctggacatatatagtcctagaccttcctgcgtagtccattgattccccccttcaaacatatcgtgaagaacattggaaggaataccttgaccnnaatgtgccatactgaactttnnatngataaactcattgnnannntgtnnc

SEQ ID NO: 122532 - DNA, 692 bp, Glycine max
  unsure (1)..(692): unsure at all n locations
  Clone ID: PAT_MRT3847_81652C.1
cacgcgtccgcggacgcgtgggngtttaatgttaatgaacctactggttactgtttggctggaaaatatgggagagcaaggaaatgttgtcatgaaacccacccaaaataaggggaagggaaatcatggatcatattataactaatactccaaaataatcaacacttattttttgagttcccctccaatttngagatgttggtggagaaactgtggtactgttatagccttttaaatatttcntaaattttgttgtcattgtagaactgcaatatttgtttataacaaaaagataaactataaagtggattataattaatcntttttttttaactnatgtgtttcctatccatttctaatttaaacatcaaaacaagagaaggaaaattgcattttaccccttcctttttccttaaatttatttccttccctccctgttacactatctacaccaatttctttttctgtccatcttagctattagcctaatagccttgtcttcaccatttatctttatctttattttatttcttttgattgggaatcgttattgcaattggcttatcaaccttcaaaatcagtagtttgatagccttcattacttgtaatggaatgctgtactggggttggggtccttttcctgcactgggaacatatgccgccacatanttatatgtttgcaacgtgctttt

SEQ ID NO: 122533 - DNA, 493 bp, Glycine max
  Clone ID: PAT_MRT3847_81653C.1
catggcactcatcgaactacagacatgtcgcagtgtcacgtcgtagcgtaacgcctcggaatgtcggcgtcgagcgtgctcttctgatactcactttatctagttcagagtcttgaacggtgcacttctcaggtcacattcatcgcgattgggtggactgctgtgtccctctacattagtcgtggactagctactgccaatcgcaactgccattgtaaaagactctgagagatcctaggggacacgtccaagctgcggtactgaatacacctttttctttgggactatacttccaatttcaaatggcggatccaccagcactgtaccatgctccaaccggggcacttgaatggactctgattcaactccaggattgattacatttccagaaagaagtaccgcctgattggaagtatgcctgaaaatcagcttgataggtccgcctttgggagatcattaattgcagttcttggctgagtgacaaatttatcat

SEQ ID NO: 122534 - DNA, 346 bp, Glycine max
  Clone ID: PAT_MRT3847_81654C.1
ggaacgaaaaagcaaaactatcattctcacgagggtaacaagttttgattacagagtctccagtctccaccacaatgatgtaattctaattcagaacaaagcaaaacaaaagccagcggctataaaggcaatttaatctaaaattctaacataataaaaaataacagaaaattacaagcgtgtggtgagccaaagcatttgaggtttaagataacaaagcttcttcatcgtgatagcttacatgcgaaagctcctttatccattcaaacgttcgacgacgcgacatggttctctttccttgctttagtctgtgtttctgcctcttccttttgatcacttttttttt

SEQ ID NO: 122535 - DNA, 192 bp, Glycine max
  unsure (1)..(192): unsure at all n locations
  Clone ID: PAT_MRT3847_81655C.1
gggaaatccatccttcttttgcgctttgtcaatggtcaatttctccaattttatttttcaacaataggggcaggggtcttttcacagacgctggcgggtaatgactcgacagtgaatttatatattttggacacattangtacaatataggtaccatatcttggcttccatgtattacatatgctctttttc

SEQ ID NO: 122536 - DNA, 229 bp, Glycine max
  Clone ID: PAT_MRT3847_81656C.1
aatcctcaaaaaccttaacctctccgataccaccaagaaggagaacgcagagtacatatggatcggcggatcacgaatggaccttatgagcaaagaaaggactctcccaggaccagctagcgacccttcagagctacccaagtggaactatgatggtatccagcacaagacaagctcctggtgaaaacagataaatgatattatacccacaagccatattcagggaacc

SEQ ID NO: 122537 - DNA, 286 bp, Glycine max
  Clone ID: PAT_MRT3847_81657C.1
aacttgaccgaagattagaagcctgccttaactttcaagggaagccatacatcagaatgggactggtcatcaagacttttattttaaagaacgtaaccataacaaagcttgcttaaactacccactgatgatgacactgatacattaggggtccaaaatattttggtaacctaattttctgggttcccttccaaggccgacctgcatgcccttatttgggatgccctggagcttctttcttcaaaacaaggttttttaacttggtaatggggggtggcttcttaag

SEQ ID NO: 122538 - DNA, 863 bp, Glycine max
  Clone ID: PAT_MRT3847_81658C.1
ccgaccccaggaccaacgtgttggcactgcaaagtgcaaacaagctcgatcacttgaataactcagtcgaagattagattcagattcacggcgaaagaacaaaaccctaaaaaaatggatttccacggcggaggaccactccgttcccgcagttcccagtccccttctccctctcactccgcctccgcctccgccacctcctccatccacaagcgcaagctcgtgtccgaggaccacgcgcctcccttccccccctcctccttctccgccgacacccgcgacggtgccctcacctccaacgacgacctcgagagcatctccgcccgcggcgccgactccgactccgactccgaatccgaggacgccgtcgtcgacgacgacgaggacgactacgacaacgacaacgacaacgactcctccatgcgcaccttcaccgcctccaggctcagcaaccctccctccgctccccgcaacaccaagctcaagaccgaaaactccaccgtcaaaattgagaattctgacggcgccaaagacgccggagccgtcggatctggcgccgccgccgccgcgggaccggtccccgggattgtggttaaggaggacccgactaagatttttactgataatttgcaaaccagtggggcttacactgccagggaggagagtctcaagaaagaggaggaagcaggaaagctcaaatttgtatgcctttcaaacgatggtgttgatgaacatatggttttggttgattggattgaagaatatatttgctaggcaacttcccaatatgcccaaggagtacattgtccgacttgttatggataggagccataagtctgtaatggttataaggcgcaatcacg

SEQ ID NO: 122539 - DNA, 105 bp, Glycine max
  Clone ID: PAT_MRT3847_81659C.1
caccttctctctctgcgatactgtatcctgttgtagctagctcctcgaaaatgctgggacgcctcggcgggagtcgcatcaaagagatcggtcagagtctccgtt

SEQ ID NO: 122540 - DNA, 743 bp, Glycine max
  Clone ID: PAT_MRT3847_8165C.1
tcgctttctagctgttcataatatcaccattactgatggtattgacaaaactagtgcaactttgcaatttagaaagttagcagattgtgattttctcaagagaaactgtacgcagatgtctaatgttttgtgggtggctcctgctgacaaggctagtctatggtcacaacttcattatggttcgtgtgataatctggaaatgcaagaagcttttcttgtcaatctcgtaaatgtgccacgagaattgtatttgcacagtccaaaggaagctcgacaattgagaaggaaagctctctatcgtattgaaaggctgcacacagcttgttggcctaccatagcacagattgaagagttccattcgatgcataggatgatgaacgctcctgattcaaatgataatattgatctactgttgagcattgatttgttgggtttacaaggagcaggtaaagctttttcaaacaagattgtttttgatgataagcttgtgttggctaacacacaaaaattctttgatggaaatttttcaggggattcttggttaccaatttttgggaattggctttattcttgtaggcaaatacctttaaaaactggcgttgtgaaaggtacattgtggagtggacgctggggggttacccaccactggttggattaagtttggagttaccaattgctccttaaatatcaacaaaaggatttccacagcacttgggaaaggtaagaaaaatgttttttttact

SEQ ID NO: 122541 - DNA, 329 bp, Glycine max
  Clone ID: PAT_MRT3847_81660C.1
gccttttctaatgcccattgatgattttttttcaattcatggacaatgtatacatgttccactggacggggtggggaatgaatcattaaagtttgtgattaagagtatttgtttggtctaatgcagggtggtcctctgaaaacaacattatctggatttgagatgttcaatatgattttggatcaaggacaagctggagataacgtaggtcttcttcttcgtggtctgaatcgtgaagatattcaaaaatattgatggtgctagcgttcgtaatgattttaactaccctctttaattttttattgcttagacttgtttttacttacaat

SEQ ID NO: 122542 - DNA, 1179 bp, Glycine max
  unsure (1)..(1179): unsure at all n locations
  Clone ID: PAT_MRT3847_81661C.1
agtnnntagcnnntttatttgcgtgtaatgattcactaacgcctaatttggggtattgtaaaaaactaaaaaatacgagcttggtcatttgggcgtattaagttttcataaaattgaaaacttagtagccagttgctaaagatacatatacaaaggcagcatatctgcattatggataaatatgatcatataattggagactctttagaaagaaaactagtagtgttgctctctatcatcaatccacttcgttgcgacccatttctcccccttaatcactggacaacttccatgaagagaagtcttatcaattttcccgtttggtaacaatgaataaaataaaagtccatcgccctgtcgtggcttcaccttcaaaccaatgcatttttggtaatcataacccctatcaatattcagaccaccctcataagggaacattgtttctcctcccgcttctacatttgataggtataacaagaaggaagcaatcctttggctctcaacagnnncgtattcatctgggttgaacgcatcataatgagaatcatatttctggccaacctcatacttcaatatattgaatatttccccatgggtccttggaatcattgtaactttagcaatcttcctctcaaccaagtctaagatgccagatttgtcttctgatgcgctgatgaatgtgcctgaacttgttctggtgtcttttgtgctctcagcagtttctcctttccgcaaagccagttttgatggttcaagtttgggctttgccatttcaattatttgttggcatacttccacacttgtgaagtttggaaagaaaaccgcccgtggtctccaacttaaaatctgagatgggattgaatcaacaaagggttccccggattcaccatgttcaagaggttcgtattctttcttcaccgattcttggagtattctagagcgtggtcccacatcatccaaatcctgaaagaggagcggagatacaaagaagccaacaaagaagaaaagggcgcaaaggatgaacaatgtaggtacacccaacttcagtttggagctcttcactttgcctttcatcatttctcgttggagaaagaaacaatgcaatttcttattttcccttttgaatttgttttctctctttgctctttctcctacagcgattatgcaacaacagattgg

SEQ ID NO: 122543 - DNA, 410 bp, Glycine max
  Clone ID: PAT_MRT3847_81662C.1
gttggaaacggccttaataacgctatacttgactaaaaccataacggcgtaaaccatatctatttgactagatcaaaactattgcctcaacacagttaacgttaatcaaaaccacaagcgatgaatccctaacaagccactgttctaagacaaacccggcgaaggtctagaccatcgatatcccacccacaatttactcgatcttattgttaggccccaactggttactatgaccgcacttgttgttacagcagatcacagccctagggtgcagactagcatatcattcgcggcaaatcatcttgccctggttgcttttgccagccacacccctgggggaaggctcgatgatgccaccacgaagcctgtagacaccgtgaagggccgattactactagatggtgaaatcg

SEQ ID NO: 122544 - DNA, 1897 bp, Glycine max
  Clone ID: PAT_MRT3847_81663C.1
gcggttccggtccggattccgggtcgacccacgcgtccgatgttttttcctaaaaatacctcagtgttaattcgtcgggttccaggaaggccacgtttaccaattgttactgaaatagaacaaaaggtggaaaataaggtggtggaatctgaacctgaaaatggaagcctaccagctgaagatacatctgccatgaaatatcctgaagattcagattgggatgaatttggcaatgatttgtattcaattcctgatcaagtgcctgttcaatcaagcaacttaattccagaggctcctcctcctagcaaagctgatgaagacagtaagattaaagcctttcttgatactccagccttggactggcaacgtcaaggttcagactttggcactggtagaggctttggaaggggtacagggggacggatgggtggtggacgtggttttgggatggagcggaaaacacccccacaaggctatgtatgtcacagatgcaaggtgcctggacattttattcagcactgtcctacaaatggtgacccgaattttgacatgagaaaagtcaagcaacccaccggtattccaagatccatgctgatggtaaatccacaaggttcctatgctttaccaaatggttcagtagctgtcttgaagccaaatgaggccgcttttgagaaagaaatagaagggatgccatcaacacgttccgttggggacctaccacctgagctccgctgacccttgtgttatgatgttatgaaagatgctgtactgacaagcaagtgttgctttaaaagcttttgtgacagatgtattagggactatattatctccaagtctatctgtgtatgtggtgcaacaaatattcttgcagatgatctcttaccgaataagacattacgagataccattaatcgtatattggagtcgggcaatagcagtgctgaaaatgctgggagcactttccaagctcaagatatggagtctgctcgctgtccgcagcctaagattccatccccaacctcatctgctgcatccaagggagaactaaaggtttcacctgttaatgaaaaaacaacaaatatacaggaaacaactgatgatagaaaggctgtttctgctccacagcagacatccgagcaagtaaggaaccccagagctgctgatatatctgaagctactcacgagtctatgagtgtgaaggagccagcctcacaatggagtgctcagcaggttgaggaagaagtgcagcaaaagttggttcctactgaggctggaaagaaaaagaaaaagaagaaagtccgtttgctgccaaatgatttgcagtggaaaaccccacatgacttcggggcagagaactatatgatgccaatggttccacctgctggctataattcgtactggaatggcatgcaacccatggatggatttatggcaccgtatggtaatccaatgcaaatgatgggttacggcctgggccccttggacatgccatttggtggtatgccacaagacccatttggcatgcaaggttacatgatgcctggtttcccacctcataggatcttgctgacttcagtatgggaatgaatgctccagccccagtaatgagtagagaggagtttgaagcccgtaaagctgatatgaggaggaagcgtgaaaatgatagacgtcctgaaagggacttctctaaagatcgagactttggtagggaagtgagcagtgttggggatgtttcttcaatgaaatcaaaaactaggtcaattccaccgtcctcgggtagcgattaccatcacccccgtttccgttcggagcggcactcgcctgatagatctccgcgcgaggtggagcctccacctccacgccctaccaagagaaagtccgaccacaactccgatcg

SEQ ID NO: 122545 - DNA, 1313 bp, Glycine max
  Clone ID: PAT_MRT3847_81664C.1
ccacgcgtccgcggacgcgtgggtttgggtccaattgctgctcgctatgatagtatttttatttattttaatgagtcaaatatatttaacagtagttttcttttgttttaaaaaaaaatggtcctaacattgattttggtgcactggtttcccacctcatagggatcttgctgacttcagtatgggaatgaatgctccacccccagtaatgagtagagaggagtttgaagcccggaaagctgatatgaggaggaagcgtgaaaatgatagacgtcctgaaagggacttctctaaagatcgagactttggtagggaagtgagcagtgttggggatgtttcttcaatgaaatcaaaaactaggtcaattccaccgtcctcgggtagcgattaccatcacccccgtttccgttcggagcggcactcgcctgatagatctccgcgcgaggtggagcctccacctccacgccctaccaagagaaagtccgaccacaactccgatcgcgaacgcgaagacagagatcgcgactacgagcacgagcgtcaccaccacaaccgccatcaacgatcagaatcctcatccagaaggtcatcggaaccggtcgccaaagcttcatccaccgcatcagccgctgccgcagccgccgccgcggatcgcaagcagaaggccagcgtgttctcccgcataagcttccccgctgaagaggaacttcctaagaagagaaaagtcaccgcttcttccacaacagaacctgccgctgccgctgccgctgccgccgccgctcccactgcctcttcggcacacctgaagacaatgtcgaacgggtactacgaagggaggaagagcagcagcgccgtcgcggactacgaatctagcgacgacgagcggcacttcaaacggaggccgtcgaggtacgagccgtcgcccccgccgcagccggcggagtgggaggaggaagggaggcattcgagaggaacgagggagcggaagcataggtgacttgcaattttgatagagttgtgccggcagccattttgccaacgacgaagggaacggacactgtaactgctaagcggtgctgctgtgcttactttgctcagagagacgatgctatgatggtctttattacattgctctctcttcccaaccgaccttcttggaatgtaactttgctgctgtcactcaatcccctcaattttcaataatttcgccatgtaaaattataacttttattcaaatctaatgaattcctttttgtttctatgatttcttaaggttatgggtcgttgtcaagtgattgagacggataagaatt

SEQ ID NO: 122546 - DNA, 510 bp, Glycine max
  unsure (1)..(510): unsure at all n locations
  Clone ID: PAT_MRT3847_81665C.1
ccttaacaagaggcggtatcattgttgaagatcaatttgttgtgtcctctttgtcatgttgaagtagaaacttgctcacattttattcatgtgtccaaaagtgaatttgatttggaagcattggtataggtgggtacaacttgtgacggtgttgccaagaaatgtggaggatcatatgtggcaacatggggcttcaatcaaagatgaagtggagcaagaaaggcagtatgttctatggttatgccattatatggtctgtatggaagaaaaggaatgaatgtattttcaggaataagacatttgaggtagaatctgtgatgatgatgtagaattcatggcttggtctcggaggaaaagcaaagttaaatcctttaactattctntttgttatgtggtcaatgaatcacaatgcttgtttgagggatgtttcggtgtagcttggatggcaattgagcacgggagctagtggagatcatatactggaaattgcatgcggatttgcttgtatga

SEQ ID NO: 122547 - DNA, 2002 bp, Glycine max
  Clone ID: PAT_MRT3847_81666C.1
cactttttcctgtcccccacaatcgggggtctgtgagcttcctctaaaacatccaatcccaacccatctttctctttttctcactctctcccccccaaaccctagctttcaccatgcggttccaatcgctctaaccctaactccctctctccatcaccgatcttcgatccgcaccgccgttcctttgaatcgcttcagattctccgctgcttccaccaggaggaggagtttttcgcgattcgcgctcgaagcttccgttgccgccgatcgaagagattcgctccgaatcccaacgccctgccgtcaagtttttcgccgaagtaacaaatcctgttgttgttcttcttcgattcgattggattgctctgttttgccctaactgttgctgtggcttcttcggatttctgatttgagagggctttgctgcgcttgattcggattcgtcgcattttcatcatcgtcaatcgtctgataacgatcttgttgctttgatttacaaagtctctggaaggaatctctattttctctggattctgactgcgctcaaattttttgcgacgaattgaaggtggttcgatatgatcgttcttaactaggttgatccggaagttgagaaggaaggaaaatcagcaagcgtcgtggcgggctacgaaaaaagcgatgacgtgcagtattccaagtgaaggccttcgaggtacgagccaacgccacgggcgcagccggcataagaggtaggaggaagtgaggtatttgagatgatcgaggtagcggattcataggtgacttgcaattttgaaaatgttttgccggcagccattatgcaaataacccagggcggtgtattataaatttaagagtgcaagagattatgattcaattcccatggacggtcctttcatctctgttggtacattgaaagaaaaaatatttgaatccaagcatttagggaggggtactgatttcgaccttgtggtcaccaacgcccagaccaatgaagaatatcttgatgaagaaatgttgattcctaaaaatacctcagtgttaattcgtcgggttccaggacggccacgtttaccaattgttactgaaatagaacaaaaggtggaaaataaggtggtggaatctgaacctgaaaatggaagcctaccagctgaagatacatctgccatgaaatatcctgaagattcagactgggatgaatttggcaatgatttgtattcaattcctgatcaagtgcctgttcaatcaagcaacttaattccagaggctcctcctcctagcaaagctgatgaagacagtaagattaaagcctttcttgatactccagccttggactggcaacgtcaaggttcagattttggcactggtagaggctttggaaggggtacagggggacggatgggtggtggacgtggttttggtgattctctgtctattctaatatctacatgttttcagttaattgctgtttttaatactaatatgttgatcacaactgatgctgaggtctggcagggatggagcgaaaaacacctccacaaggctatgtatgccacagatgcaaggtgcctggacattttattcagcactgtcctacaaatggtgacccgaattatgacatgagaaaagtcaagcaacctactggtattccaagatccatgctgatggtaaatccacaaggttcctatgctttacctaatggttcagtagctgtcttgaagccaaatgaggctgcttttgagaaagaaatagaagggatgccatcaacacgttctgttggggaactaccacccgagctccgctgtcccttatgtaatgatgttatgaaagatgctgtactgacaagcaagtgttgctttaaaagcttttgtgacagatgtatgtttttcattcatctgttgtatttagggttttcagaatttgaatattatgcatttatgctaatgtttctctggtttgtagttcttcctcatcatgcaagtacagaacagtttagatgttt

SEQ ID NO: 122548 - DNA, 298 bp, Glycine max
  unsure (1)..(298): unsure at all n locations
  Clone ID: PAT_MRT3847_81667C.1
gtggtgccttatcgctgtggttttcatcgtcttccttctcttatatttcttnttttntttngtcttngcngnacgccgaaacaatggccggaaaaggagagggtccngctatcggaatngatnctcgggaaccaccaactcttgtgncgnngngtggcaaaattgancgngttgaaancatggccaaangancnagggnacangaccgaaggcggtnttangtgggnttcnatgataccgggggtccnatcgggatggggntaaagaaccaagtngggcaatgaaanccattnacacc

SEQ ID NO: 122549 - DNA, 577 bp, Glycine max
  Clone ID: PAT_MRT3847_81668C.1
gggggttggttttataaaattttggttgggcccccaaaaaacaccccttatatttacgcccgccccctaaacccttcccaaatttcccaaaagaaaatcttaataaacccagtcaaaataaaggcaaaaaccctcacccgcgaaaaatgggaaccccaaaaaaattccaaacaaaaaacaaccgcggaaccaaaaattaaaaaccctggggccccaaaaaagcaacctaacccacattaaaagcgttccccaaaccgccccttttcaaacaggaaaacctgtccaccaaggtgtataaaaaaaacccccaccccccggggaaaggctatttggctttagccccccgggggggttttttttttaacaagggaaacggaaaaaattttatttccctcaacacttggcccaaaaaaaaaaaaaaaacccacccaccctggtttgccccagaaaaaaaaaatcccctttgggggggatcaacgggaaaaaaaaacaaaagctgcataaaaaacgccaaatcaaaaacaaaaatatcccaaccaacccacaaccctatctttgaaaaggcccccattggccc

SEQ ID NO: 122550 - DNA, 262 bp, Glycine max
  Clone ID: PAT_MRT3847_81669C.1
cttactattaggaaagagtggtgcccccgcagggtccggggcggaatttccggggggacccacacgcgcggcccagcggtccgccaagaggtcggaagggtgggaaaaaccaccttatggggggcccgttggttacctttggatatttcgttacatacaaaaggcataaaaatgcgaatacgttatcgctatctagccgatatgaaggtcgccgctgcatacttgctcggagtggggggagggaatccatctcgttctggcg

SEQ ID NO: 122551 - DNA, 828 bp, Glycine max
  Clone ID: PAT_MRT3847_8166C.1
ttatgcgtacgcagctttctagctggtcataatctcaccattactgaagggatcgacaaaactagtgcaactttgcaatttacaaagttagcagatagcgattttctaaagagaaactttaagcagatgtctaatgctgtgtgggtggctcctgaggacacggcgagtttatggtcacaacttcattatgtatcgtgcaataatccggaaatgcatgaagcttatcgcgacaatctcgtaaatgagtcacgagaatagtatttgcacagtccagaggaagctcgccaattgagaaggaaagctctctctcgtattgaatggctgcaaaaagctgatgagcctaccatagcacagattgaagagttccattccatgcagaggatgatgaatgctcctgattcaaatgataatattgatctacatgcagagcattgatttgttgggtttacaaggagcaggtaaagcttttccaaacaagattgtttttaatgataagcttgtgttggctaacacacaagaattctttgatggaaattttccagtggattcttggttaccaatttttgtgaatagtctttatcctgcaagtcaattaccttcagaagctgtcgcatgcaatgttacatgtggtagcggacgtggtggtttacccaccactgcttggattagttctgcagttaacaatcgctcctcagacatcaacaaaaagattcgcacagcactttggaaaggtaagaaaattgttgttcttactagagttgatcccttttcagaagcttactggctgtcttttggcgttagaatgaattttgagtctacgccctaccc

SEQ ID NO: 122552 - DNA, 349 bp, Glycine max
  Clone ID: PAT_MRT3847_81670C.1
agcccaacatggaactttattcgtcactagattgaccaaatggacggcgaatagcattttgcagctagtcagaactgctaatgttgggagccttcttacttcttacgaatgccccggtgacgataccctttttgtctgccactccttactatgagtcatagaaccccgtgtggataaccctggcctgaaactcggtgtctacaagtgggttggcagaatctacaatctcatggacgaatgcgacaactacattgccatcccacaacgccagaccgacctcccattcctactcaacgtcgaagacggatcttacatcacccatcgcgagaccgtcgccaccggccgcgta

SEQ ID NO: 122553 - DNA, 321 bp, Glycine max
  unsure (1)..(321): unsure at all n locations
  Clone ID: PAT_MRT3847_81671C.1
cttgaacctgcagtcgtgtctccttccttctacaaacaaacttcaccttgcgccgaatggccacagatggtagaaaccgatatggatgccgaaactgtttcaaatgttgatccaccaaacgagactccaaacactgttcccatctattatcatttctcacactcacactctcctcttaatgagaggattatttcatacatgaccacaacatcatgtgctgcacacccgtggcacgaccttgagatagggcctgatgctccaacgatcttcaattgntcgaatgaaattgttaaaggcagcaaagtgaaatattaaccgtac

SEQ ID NO: 122554 - DNA, 316 bp, Glycine max
  unsure (1)..(316): unsure at all n locations
  Clone ID: PAT_MRT3847_81672C.1
tcgttgacgcgangggccgaggcagacgaggggnggnttcaaggaaacacccccagcaccccccccggggnaagcncaacgaaggancaancaaccgcaagaggagagaacgggccccccgcgagacggcaggccaacgcgcaagaacaagaagacnagaaacccagcagcaggaacagacaagggcaaagcggacgacaccacacaccaaganacgggcagcacggagggcngaccaaggacanaaagggaagaaacacaacaaccnacncaacaagaaagcacggaaagacacccgcgacgaagccaacaaaaa

SEQ ID NO: 122555 - DNA, 790 bp, Glycine max
  Clone ID: PAT_MRT3847_81673C.1
gatggaggtgaatacggcataaaagatatatgatcaactacaccatatgggctgtctcatcttcgagagaaaggaattggcttccaagtatgagcaagttaaggcttcgattgattcatccgagtttatgtgtaagcatgattcaaccatgactttgtctgcactaattgaagcaaggaaacgggaagaaagcttgaagaaggcagtaggagtcacagaggcatatgaagcgcagaaaaaatcaactgaggctgaggctgaggccaagctgcttgctgcggcatcctttcaggcaaaggcttgtggatataacggtgtagcaggcaggaagcttcgggatgttgaagcacgtgaagatgaactcaagtggcaaatcatatctttcaaatcagagcactaagtaaacgggaatctgagctgaacaagaaagagcgagaattgcttgattttcaagtgaaacttgctagtcgagaatctgatgaaactcacaaagttacagctgttcaggaagctgaacttatagcaagaaagactaactttgaagctgagctacaaattggttgagaatgaaattgagatgagaagacgggcttgggaattgaaggaagtagatcttacacaacgagaggagcaactcctggaaaggaagcatgagttggaaattctgtcaaggacactgggtgagaaggagaaggatctgctggatatgtcaagtgctcttaaagaaaaagatcaaagcctgaaagcttctgaaaaggaattagagttaaaataaaagagtttttgccaa

SEQ ID NO: 122556 - DNA, 484 bp, Glycine max
  Clone ID: PAT_MRT3847_81674C.1
gtggtttttttttttttttttttttttttttttgggggaatttttttttttttttttgagaaatttttaggtttttttgggggggtaattttaaacaatttggaaattttgtatttttacaaaaaaaaaaaaaaatatttcatggggaggaaaagaacacagggggttttgggaaaaaaaaaaaaaaattaaattggttccgcctggctcttggctaggtaaggagaggaaatatcgaaagaggggggggggtcaaaggggcgccagaaattgggtttcaaacaccgacaaaaagcttgcccgtttcccggccctgggtgtttgtaggtttatacaagaacccggggaaaaacacaaagtttgtttttttgcatacccggtcaccaacaattccggagggggggggacccgccccccaaagaaggaaagctaccccgcccccttggaaggctggttaaaaaaaaaaacacaaagggggggagag

SEQ ID NO: 122557 - DNA, 307 bp, Glycine max
  Clone ID: PAT_MRT3847_81675C.1
attcatttcttatgggaagaagtatctggcttcccatgagttaaaacactcagcagaaatttctttacaggttgattcctgttttaccctatggcacttctatcctgaacaagtgaatgatacccgccccttattgaatgcacttgggaatgcaaaaacaaatccctacggggcaccttgggcttcaaaatcacgtgtgcttcagggttgggaccaaacgcagaccctctttccccaaatatttgtaccacgggagacaccaaattggctgcataaatatcttacctccaagcctgacctaaagggg

SEQ ID NO: 122558 - DNA, 413 bp, Glycine max
  Clone ID: PAT_MRT3847_81677C.1
cccaattgaacttgcctttttctgatgcacttggaaccttaaccttaggtctggtggccttctatgtctctgtgcttattgctattgctgttgcgactaatgaacaaggggttgcttcttccctaatgatttcaaaggaagagaattgtcaatattcaattattcattggcttctctgaaatggacagagatttcatgggtctcaacttgaaagaaccactagctgtggcgacggaggagatgaacaatgatggctgcacaaactatggcttcaaaaaacgtcggattgcacagcgcccattctcgaacaaagtatctgcccttccacatttgatgtctatcaaggcttctcacgatggtaagactaataatacaatggatgataccctatcatcggctgggtatatgtatat

SEQ ID NO: 122559 - DNA, 586 bp, Glycine max
  unsure (1)..(586): unsure at all n locations
  Clone ID: PAT_MRT3847_81678C.1
ggaattcggnnaaatctcgagccgttttaactaggtgactggaaaggcccttatgttgtacgaaataatcaattatgttcagtctctacagaatcaagttgaggtacccccaatatactcttttttatttacctagttacttcacctcctcattagttatatgtataatgtatatgctaacaagctagctatgcctctaattttctgcagttcttgtcaatgaagcttgcttcagtgaatcccatgttttatgacttggcaacggatctagacaccctcttggttagaccagagaaactaaatagcatggcatcaccatcaccaccactaccatctgtgtcacattgcaacagccctaacaaccaagccactacttttgctgatacaaccaccatgacccccaccaacatcttccacattgctagtgactatcttttggataattcagtctcattttttcttcaagggcagaggtcacatgtgttctctgaggaggtataaacagaaacagccaaataaattaatgtattcttaagaataaaggaacaagaatggtttcttgttttcttactactactacattata

SEQ ID NO: 122560 - DNA, 162 bp, Glycine max
  Clone ID: PAT_MRT3847_81679C.1
ctctcgcgttcggccaggcgtgcatgtgggcggcacttgctacctgaaacatcatctgtcggtatcttagtttacaagagcgagaatgtcgtgggtgcaagaggggctcgatgctttactggggaggaggggactctttgggaatgacatcacacagttgaa

SEQ ID NO: 122561 - DNA, 151 bp, Glycine max
  Clone ID: PAT_MRT3847_8167C.1
ctctctctcaccaaagccttcctagaacgaaagaaataagatgagctatttttccatcaccaaagatgaagaagcatacaatggccgatcaactttaccgatgaacagacctccgagttcaaggaagcctttatctcgttccacaaggacg

SEQ ID NO: 122562 - DNA, 1004 bp, Glycine max
  Clone ID: PAT_MRT3847_81680C.1
gttggcccattatcgaagttcgggtgttctgttccagcaagcagaagcagaagcaccgtcccgtccgaactgcggtagcgtgcggttgttgggggaagaagagagaaagcgatggcgaatcagggtgctaagaaacgcaaggaagagaacgctcgtcacatggctaggctccgccaaatcatcatcgcctgcaacgttatctatgtgttgctaagaatgttggtgttccattcgagcttcacctggaagcactggattgggttgattgtgacttctttggcatatgttattccctatcaacagctcgcgaagatggcgacccctgcttacgctgaagatggtgaacttttagatggtggatttgatatgtctacaggtggagtttgtggatatttacatgatgttatctacataacatgctttgtgcaagtcatgtccatcgtctctggaaagttctggtacacatatcttgtgataccggcttttggagcataccagtcctttggtttcattaaaggatttttgccagggggttcagaggaatcatttgaagatgaaaagacccgcaagaagagagaaaagatggagaagaaggcatcgagacccaagtttgccaagacaagaactagatagtttagtgtagggcacccagttacccaatgtaactcaatatccaagattgatggaggttgccctgaaactttcaacttattgcgaacacatgctgcacaaagtctgagttgtatttcatgtattacaatttactttttatgccctccaagaacatgtgtgcttacacacagtttagataagtatttggaaaagctaacctctatgggatattgggattaagagttgtcaattacgggagctttcctcatctgtatcaaatgactcaacgttagtgaatgacgtggaattgcttaaatggagtttaacctccttgttggaaatcttacgtgggtgtaaaaaatgggcatatgtatgacggacaggtagctagc

SEQ ID NO: 122563 - DNA, 342 bp, Glycine max
  Clone ID: PAT_MRT3847_81681C.1
cattggggattttcttgatcatttaattcttgaccaactactcacaaaattaaaaaaattaaagaaaccaatgggagaaaatataccggatgggaccccactatattggaggggctaccatttagtccaataaatgcttaacgtcgatacccacgcacccaattccactttgataaaatggccccctgtccctaacaataagctcgtctagtttaatgacccagttgagaaaaatgggccccctaccaaaaatacagtctgtggaaaccaaaacattcggggaggccccaaatgggataataggaacgacttttttatgccccagggtccaaaacaacattc

SEQ ID NO: 122564 - DNA, 436 bp, Glycine max
  Clone ID: PAT_MRT3847_81682C.1
cactggctaccccaccctgaagaccaactatgacattcccgacatcgttcacaacggggcaaacaagccatgcatttttttctgcacaccagtccctcacaatcactttgagacacatacctaccagccggaccttaacgatgcacaaaagtcaaaccaagaataataccctcataagaatagctgaatcccctgctaaggaaaccctgtgaatctcaacttcgtgtacccatgccacacctagaccccagaatactacaaggtgacctacttgcccatatatcagacgactatatgtgagagccctgcagattcacctcagcctcacgcacctctggaggataagactacatacccgaacggccccatccgaaacatcggagtcaacaacggactgctattgcagggcatccatttcatcgcctacaagtccccc

SEQ ID NO: 122565 - DNA, 236 bp, Glycine max
  Clone ID: PAT_MRT3847_81683C.1
tttaagaccaacgccgctcctgctaagactaaggttacgacgccaaagacaccggtcgaagacggtctctttggcacttctggatgatttggctttactaagcagaacgagctctttgtgggccctgtcgctatgcttggatctgcatcatcactgtaggtcgaaggaataactgaagaaggaattctagcacaattgactctggaaactggtattcccctttatgatgctgagcc

SEQ ID NO: 122566 - DNA, 231 bp, Glycine max
  Clone ID: PAT_MRT3847_81684C.1
ttatttttcttcgtagtgatctatcaccggagcggttgacagatggcaaggtgggagcaactctttccacctttttaatcattcctttaatactattagtgctctgcaaatcaacacttgttctaatatgtgttccactattggtattcattgaaacacatgtattgcattggcctttgctatgaatagttcttttatttggctcgctcaatcctgatatttactccattt

SEQ ID NO: 122567 - DNA, 133 bp, Glycine max
  Clone ID: PAT_MRT3847_81685C.1
ggttaagtgacttctctgtctggactgaaccattcctttacaactgggagatttgtgtcacacactgaaaaccttaaggctagaaaaggggccaaaccaaaagaaaacttggtttctgcctgcaaacaacaac

SEQ ID NO: 122568 - DNA, 544 bp, Glycine max
  Clone ID: PAT_MRT3847_81686C.1
cattatgagatttccataaaggaggatcaaacgcgtgatcgggagtttgtcgagaagatgaacttcaataaaaagaaaatggctggagaggtaaaatgccataagtatagtcgacgacgcccttcagatggatggacttttacagtagagaaattgggacatcagggaaagcgtggaggtggtggtggctggaagtttgctagcatgccagatggatcaagccgaccactgaatgatatggagaaaatgtatgtgaagcgagagacaccacgccggcgacgcaggattcttccttgattacttgatttttttttttggaagttttgattagctgttaaaattagattttttacccattgtattcaatggtttgggatgtgtagtgtcaattgttgtcttttttcttttggatgagttattgtattagaagatttacttagaagagttgtgcatgtgttttgttgattgagaaaattagaactatatgtgatctcttggatttgactttaggcattaaatatatccatcatctatttttttacat

SEQ ID NO: 122569 - DNA, 1348 bp, Glycine max
  Clone ID: PAT_MRT3847_81687C.1
gaaaatatcgcgcccttaatatcaacttctactagaaccccttcaccgtcgccgcatgtccactccccactcacaatgcaagcccttcaccgtctcgcatcctccacgcaccgcgtcgccacgtcgtcgctccgtcacgacagcctcctctcccgaaccacttccagaatcctctcattctccaccgattcgcccgccgggggaggctccttcgacgcagcatgggagagctcctcctcgtggtcgacgggccttgccggcgaccacttcaacggccagtccccctcggaggtcctctcaaacctccaggacacggaggacaggctcttccagctggaggcggagaaccgcagagggaaagcctactgtgacagctggaggagtcgcttggaggagacgacggtgctgctgaagcaggttcaggagcccggcgcgcgaggctcgtatctgaaggattccgagaaggcagagatttatcgactgcacaagaagaaccccgaggtctacacagtggaaaaactcgctagggattacaggatcatgcggcagagggttcacgcgatcctctggctcaaggagatcgaggaggatgaggagaagaagctcggccgcccgctcgacgattccgtcgagcaattgctcgattcttgccccgagttttttaattcgcatgatagggagtttcatgtggcgtctctgccgtacaagccggacttcaaggtcatgccggaggggtgggatggcattaccaaggatgtggatgaggtgcattatgagatctccaagaaggaggatgagatgctctaccgggagtttgtcgagaagatgaacttcaataaaaagaaaatggctggagaggtaaaatgccacaagtatagtcgacgacgcccttccgatggatggacttttacagtagagaaattgggatccagtggaaaacgtgggggtggtggtggctggaaatttgcaagcatgccagatggatcaagccgaccactgaatgagatggagaaaatgtatgtgaagcgagagactccacgccggcgacgcaggatccttccttgattacttgatttgttttttttttgggaagttttgattagctgttaaaattagaaattttagccaatgtattcaatggttgggatgtgtagtgtcaattgttgtctcttttctttttcttttgggtgaattgtcgtatattttaataagctgactggtgtgatgcttttaattcattctccttttggcttgtgcacggtgatatggagaatgaacatcctctttgttgtcgagaaaaaggtaacccctaatatttaagagcatgaaacctggaagatttgcttac

SEQ ID NO: 122570 - DNA, 255 bp, Glycine max
  Clone ID: PAT_MRT3847_81688C.1
agcatacacacttacacaccaacattgagacattcttatattgcagtggccacgtccttgggtcctgaatgggatttattacttacataccctttcattcaaaaagttgcagcattggatacaacgtatgtactacaaccatacgagaatggttgagtccttgatgatgatttttatggtaaaccaactgcacactattatgattctgaattatcactaatctcaagtggtattaaaattgcaaattacatatat

SEQ ID NO: 122571 - DNA, 292 bp, Glycine max
  Clone ID: PAT_MRT3847_81689C.1
ttcatttaaagctgatacgcctaaccaaagattagctcacacgctagtgttgccgtggggcgcatagtatagtatggagtatggaccctcccttcatttaaccatttaccaacttgaatgaaaatctaatcccaatctcaagtctctccaaaaccaagttttagttagagacttaagactctcctctatctaactttggcggtggcattcaccacacactcactgactcagcatggcaaacgacgccgctctgaaaagctctctgctgtggctggcaacaattatattggtg

SEQ ID NO: 122572 - DNA, 295 bp, Glycine max
  unsure (1)..(295): unsure at all n locations
  Clone ID: PAT_MRT3847_8168C.1
ccgggacangacnacgnannantgttnncggtactntnctgacatncgctattagngtttccagagttgcacnttcncgtttcttgccaatttcantncgtncngntttggnattccctctgctctatgcgcgncaaatcccaaccgaatcgtggcgacgcggtataatnggaatctcactgggttctaattgaagcagtgcacnccattagcnggctnggctccaattcnccaagatgagcaantctcactctgnaaatcagatgnagcttntgtggtgggatttaattccnaa

SEQ ID NO: 122573 - DNA, 482 bp, Glycine max
  Clone ID: PAT_MRT3847_81690C.1
gcttatactgtcctatccaaataatattctccaaatcaaggagttctgtattgccattgttcatggcaggattaaactgatgatggatttatttctttgttctctgttggctgtgctgttgtaagtttgtccagttgtccattagtagggctgaggcatctcgtgtctttggttcataaatagatgagtgcgcatgacatgtggagacaatgcttctctgtttgcatcttgaaaggatttctcaatctcccctcccccctccccattaaagtgtctgtactcagttaagataagttgataagtcacagcaaccatgatacttcctgctacgcgcaagtgccaggaacttataatttaaaacatgtccaagtttgtaattgagttcaacttggcccaaataaagaatgcaaatttcagaatttgtaaactttgcctgcccactcattttaaattgatggatcattgagttgggtgttatgtga

SEQ ID NO: 122574 - DNA, 330 bp, Glycine max
  Clone ID: PAT_MRT3847_81691C.1
caaaaatgcctgcaacaacagagaacaaccaaggctcattcctcggccgaataagcatccgcagaaatcaagtaatgtccatggacggaagccacgaccaaaaagtggaagacctggagctttttcagaagcacgtgggagaccgcttctcggagcttttattctcgaccaacaccttcttcggcgacgcgcttctcttcatcgcgtggcttcgcaagatcctcgacgagttcctctgctgcgaggccgaattcaaagccgttgtcctaatgggccgcgaccctttccagatcgcgaagccaccggtggacaaggtccttccggagcttc

SEQ ID NO: 122575 - DNA, 148 bp, Glycine max
  Clone ID: PAT_MRT3847_81692C.1
gcgactccgcaggagacgcagagcataagcgcatgacctcgtacaagatgttcgatagggtcgacagtgctcaagacttgtgctactcgtgccctaaaaaggcctcaagctcatgaccaataatggttggaactcgatggttggtccc

SEQ ID NO: 122576 - DNA, 276 bp, Glycine max
  Clone ID: PAT_MRT3847_81693C.1
aggggaagggaaaaaaagaatactttattaatataacaccccccataaaggggttttgggccggaggcaaaattcaacggttaaaattttttatcccaaaaaattttgaaaaccaaaaccttggataaaacttccaagcccttaagtttttttatccaaaaggggtttaaaccccatttggttggtggggggcaatccttttcccaacttattaaagggtggggaggttaaaacccccacccctgggcagggaaatccctgggtttgggcccctgc

SEQ ID NO: 122577 - DNA, 422 bp, Glycine max
  Clone ID: PAT_MRT3847_81694C.1
cccacgcgtccgcccacgcgtccggttggggaggatgacaccaattcgcaggtttggtggcaacgatctttttggtttggcctccgtcaatttggaccatttaaccgaaccattaaaaaggtccttttacaggaccaatttggcaggagggccggactatttccacgttgccgaaggccctggaaatggaataaggggttccatattgggtaaggtggaggggcagggggaattttggcttggccaggtaactgcggggaccgtggttccaaagtttcgaaggcggcagttagccaaaaaactattgaatttgttggaggcacatcagggccaatattgttaaggcttttttggtggacctcttgggggggagcgtaaatgcaccagccttcaagttgtttgaaaggcttggttttgggatt

SEQ ID NO: 122578 - DNA, 741 bp, Glycine max
  Clone ID: PAT_MRT3847_81695C.1
gaaaaatacagttggtgcaaaaaatcttcgccaacttgctgctctgtactgtggtgctaatgctggatttgagataattcatggcttggtggacagagtaatggaaaagatggggttccctttgtttcacctggtgataaatcgggttattatattgagcggtcagatgagccttagtttcttgctggtagacaatctagaatcatttacaaaggaaagcatattggcacttttggcattgttcatcctgaggtattaaacaactttgacattcctgatccctgatcctttgttgaactcaacatcgaaagtttcctatcatggtgcagtgtatccatcaaaaactttcttagtgtaacccatttgtccaattcgcccttttgaatatatttattcatcaaactggggaatcaagatgttcaactgcttgagtgactatataggaatcaaaacacttcggggaacttagaaatacactatctcgggaccggaatgttactaatatgccctaaattagagtgtttaattatatacctgtatcattttcctaagtttctctccgttgttaaatgtttagaacatcataagctacgaattggttaatagggataatctcgaccataaattatagttatttttttaaaacagttgattttggccttaaaacccagacatcaaggatatttattcgtttgaaaattttgtcaatacaaaagtgagtcaccaaccgtgtctacttct

SEQ ID NO: 122579 - DNA, 805 bp, Glycine max
  Clone ID: PAT_MRT3847_81696C.1
cggtccggattccggcccacgcgtccggttgcggttgcgcttgtactcactcactccgagaccaaaacggcgccatgcctaccgtcagtgtggggcgggatcgcctgtttgctgctctaggaaagacttacacgcaagaggaattcgaagacttgtgcttcagtttcgggatcgagcttgacgacgtcacgacggagaaggcaattgtgagaaaagagaagcatttggaggaagaagaagctgacgaggacgaagaagttatctacaaaatcgaagttcctgccaacagatatgacctcctgtgccttgaagggcttgctcaagccctccgagttttctgtgagttccaggagattcccacttacaaactgtccaacatcagtaaggatgcaatgctgaaaatgcacgtgaagccggagacttctctgattcgtccatatgttgtatgtgctgtattaagaggtataacttttgataaagcaagatacagcagctttatcgatctccaagacaagcttcaccaaaacatatgtcgccgaagaactcttgttgccattggaactcatgatctggataaattggagggccctttcacctatgaggctttgccaccttcaagtataacttttacaccattaaagcaggaaagaaacttcagggctgatgagctaatggagttctacaaatcagatttgaaactcaagaaattcttgcatataattgaggattctcctgttttccctgttatatatgacagtaagagaactggggtatccttacccccaattattaatggtgcacattc

SEQ ID NO: 122580 - DNA, 774 bp, Glycine max
  unsure (1)..(774): unsure at all n locations
  Clone ID: PAT_MRT3847_81697C.1
cctggcattttgaaaactgttgctcacancaaggatcatccaaagcccataaagatttttgaagtgggtgatatagcagttttggacgacaaaagagatgttggtgcaaaaaatcttcgccaacttgctgctctgtactgtggtgctaatgctggatttgagataattcatggcttggtcgacagagtaatggaaaagaatggggttccctttgtttcacctggcgataaatcgggttattatattgagcagtcagatgagcctgagtttcttgccggtagacaagctagaatcatttacaaaggaaaacatattggcacttttggcattgttcatccagaggtattaaacaactttgacattcctgatccctgctcctttgttgaacttaacatcgaaagtttcctataaagattatctgtatcaattggtagggaatcaagatgctcaactgcttgagtgactatatgggaatcaaaacacttcgtggaatttagaactacactatagctggggagcggaatgttactgatgtgccctaaatttgggtgtttagtttgattatatacccgtaaaattttcctaagtttctccgttgttaaatgtttagaacatcagaagctacgaattggttagtagggataatctcgaccataaattatagttattttttaaaatagttgattttggccttaaaaccaagatagcaaggatatttattcgtttgaaaattttgtcaatacaaaagtgagtcacaagccacatgtctacttc

SEQ ID NO: 122581 - DNA, 4097 bp, Glycine max
  Clone ID: PAT_MRT3847_81698C.1
aagaaaatttgaagaaactgaaagaggtgaataggaatcttcgtaaggagattaggtatacagatctttcttcacttcgatcgatctccttgagaatgggagattgtatgaacgatctaggcatagaagatctcaagctccttgaggaagaaatggacaaggctgccaaggttgttcgtgagtgtaagggatatcaagtgtgctaatatactggttgatgtaagtgggcaagtcaagcttgcagattttgggttggcaaaggcaacgaaatttaatgatgttaaatcaagcaaaggctctccatactggatggcccttgaggtttttaacttaaagaaccaaggtggttatgggctagcagttgatatatggagcttagggtgtacagttttggagatgttgacaaggcagcctccttattctgagttggaaggagtgctgcctcctatagcacaaaagcacgtgattcaactcatactttctcacgaaagaaacttcagggctgatgagctaatggagttctacaaaatttgaaactctaagaaattcttgcatataattgaggattcccctgttttccctgttatatgacagtaagaggtaatagccttctcagaatattgtgaaaacaaatttgtcattgaaccagttgaagttattttttctgatggtaactcaaacatataccctgatttatctgtctacaatatggaagtttctctatcttacattaaaaaaaaaaatgaatcacagcttcttatcaatcataatgcattctttttatttaaccctcattggctgaaaaggaaattttttattaaatgaaaattatatttcaggaatatggtaaaataaattaaccctttgaaaaaaatcagtaaaattttgcaggtataataaataaaaaagaaaaattttattatctggaggtccacagctgattggttattagatagtgcggtccctgatgagtcttgtgactagatatgtgaaatggagaataagaagacggtctgcatttccaccaggagagagctaaggtcatatacttagagctgagctgttcgttctttttgtcaagcaatagttattagagcaacggtttcgagtatttatagtcacaggcactctcccttgacatgtgtaaatagagctagccaagaaagggaagtgtgcacctaacaaaggaagcagcctttattgtattaattgcttgcactttctcttcaattagagcaacaatgaacattcacgttcgatcaattggagcattttcgtagtttataattatgctgattcaggaaagaaaaagtatatactttacgttggattatttcctattactaagcttggtggtagttagtttggcttgatggccctagaaatagaatcagctcgaacagctacacatacgccatttgcatttatttgatacttctaccacttctacatatgtttagctgttgcctatttacataatcaaattgtattataaaaagttaaaaacggttcagctataaatcaaaaagaactgttggagggcctttttgttgttccaaggggcgggctggatgccccaaatgaatattggtggaataaagacaagttctgtagaaattgagcgtgtctgtgataggcccgccgaaggcattttggagacagctgcaatcagtgttgctcctgcaaatggaggcccgcaacaactggttatatttgcagttttaaagaaaggatccaattccaatgcagaaactgccccctggctcccggttgcacttgtactcactcaatccgagaccaaaacggcgccatgcctaccgtcagtgtggggcgggatcgcctgtttgcggctctaggaaagacttacacgcaagaggaattcgaagacttgtgcttcagtttcgggatcgagcttgacgacgttacgacggagaaggcaattgtgagaaaagagaagcatttggatgaagaagaagctgatgaggacgaagaagttatctacaaaatcgaagttcctgccaacagatatgacctcctgtgccttgaagggcttgctcaagccctccgagttttctgtgagttccaggagattcccacttacagactgtccaagatcagtaaggatgcaatgctgaaaatgcacgtgaagccagagacttctctgattcgtccatatgttgtatgtgctgtattaagaggtataacttttgataaagcaagatacaacagctttatcgatctccaagacaagcttcaccaaaacatatgtcgccgaagaacccttgttgccattggaacccatgatctggatacattggaggggcctttcacctatgaggctttgtcttctggaatggcaaattttaacctcctcaagttccataatttttatactattacagctgagattgcattcctaaattcttaagagttaacccaagcaagggttatacttatgccaggcttttggaccatttatttgtaaaacaagaattattaactcccctaagtcctgtttcacataggatatatagtagaattgtgtgagagctgtcatgcagctctaacattgctacggcaactggctggattgagcaattatttttaattttttattcagacaaatcgtgagatgaagaactcagtaatagaatggagtaagataccggtagagttctgtggttttgaagatatttattgtgttggacaatcagatgtacctgtgattctttcagatacacatgctataatcttttacaaaataaagcttcttggtgctttttgctttgtccatctatatgtaatagacaacattaacattcctgatccctgctcctttgttgaacttaaaatcgaaagtttcctataaagattatctgtatcatttggtagggaatcaagatgctcaactgcttgagtgactatatgggagtcaaaacacttcgccgtattaaggactaaactgatgttgcgaaggcttatggatctgatgctctctaggttgagtcagtagttgataataaggcccctaagattttccctgcttcctccgttctactttctttggatcatctcagtgaacgtatcggtaagtaggttgctttaattggtttcacagaggtcttgacatttatactctgctctaaaaaggaaaactttgccatgcttaaccgcaaagatgataaatctaaagcagctattattggaaaccctaggtcttcagactttgaggctgtgcggactagtcttatgcctggcattttgaaaactgttgctcacaacaaggatcatccaaagcccataaagatttttgaggtcggtgatatagcagttttgcatgaacaaagagatgttggtgcaaaaaatcttcgccaacttgctgctctgtactgtggtgctaatgctggatttgagataattcatggcttggtcgacagagtaatggaaaagaatggggttccctttgtttcacctggtgataaatcaggttattatattgagcggtcagatgagcctgagtttcttgctggtagacaagctagaatcatttacaaaggaaagcatattggcacttttggcattgttcatcctgaggtattaaacaactttgacattcccgatccctgctcctttgttgaacttaacatcgaaagtttcctataaagatctgtatcagttggtaaccccatttgtcccattcgcccttttgaatatatttattcatcaaactggggaatcaagatgttcaactgcttgagtgactatataggaatcaaaacacttcgtggaacttagaactacactagctcgggaccggaatgttactaatatgccctaaattagagtgtttagttaattatatacctgtatcattttcctaagtttctctccgttgttaaatgtttagaacatcataagctacgaattggttagtagggataatctcgaccataaattatagttatttttttaaaacagttgattttggccttaaaaccaagacagcaaggatatttattcgtttgaaaattttgtcaatacaaaagtgagtcaccagccgtgtctacttctgcggtaggattaaaatgccttttgtt

SEQ ID NO: 122582 - DNA, 361 bp, Glycine max
  Clone ID: PAT_MRT3847_81699C.1
gggaaggggaatcaaaaaatcaaatgctggttttttgaaatacacctcaatgtaaaacatgggagccaccatttgttatcaaaacagaattatcataaaaactgtcaccgacccctatagcaaacagtttaatttcaaaagtgaactattgtaaaaaaaaaatagaacaaaggtatattatatttcttaaactctaaatcctctgctgttcctccttcctctaaccctttaaaacttttttcccttagctcgtacataaggctagttatggctgtgtggcacaccaggagcaggaccaaagtgttttacagtttcccgaacattcttggagcctttaaaaatgaccgaattctgtcccttc

SEQ ID NO: 122583 - DNA, 907 bp, Glycine max
  Clone ID: PAT_MRT3847_8169C.1
gatttattgattcttgaaaggacacacctgctgttggcttgttgttcaagattggcaatttgtaagaaagatgtttgcagagctgtatgtggaatcccttctggatttccgttcacagttatttgcaatatcatttttaatgagatgctcattaaagatagctatgaaaaattactgcgccaggctaaagctccaagtttgtttttacaatccttcaaaaatttggattctttgcgtgtgcatggtgatgacaactcaattagtgtccatgaatatgtcaagcctttactttagcggttctaaattgaaaagctttctagctggtcataatattaccattactgatggtattgacaaaactagtgcaactttacaatttagaaagttagcagattgtgattttctcaagagaaactttaagcagatgtctaatgttttgtgggtggctcctgaggacaaggcgagtttatggtcacagcttcattatgtttcgtgtaataatctggaaatgcaagaagcttatcttgtcaatctcgtaaatgtgttacgagaattgtatctgcacagtccagaggaagctcgccaattgagaaggaaagctctctctcgtattgaatggctgcaaaaagctgatgtgcctaccatagcacagattgaagaattccattcaatgcagaggatgatgaatgctcctgattcacatgataatattgatctactgttgagcattgatttgctgggtttacaaggagcaggtaaagcttttccacacaagattagttttgatgattagcttgtgtaggctaacacacaagaattctatgatggatattgtgcagtggatatttggctaccacatctatgtgaacttgccgtgatatctgtcagtgaagtacctgcagaagct

SEQ ID NO: 122584 - DNA, 324 bp, Glycine max
  Clone ID: PAT_MRT3847_816C.1
cccacgcgtgcgaccacgcgtacggatggggattggacttgcgtattatgggagtcaccttgagctcgtcataacggttgttatttttcactttttcgccagagcccaatcggccactctcatggccaccgatcaaatcaccgcgtcggcgccctcggagagaggcgccggatggcaaactccgaaaaccgccgacaagaaacacctttcatagcccttactcacgtccgccagaggccacccatcagcgttggatttcgaagcttgaagatcctgcctatcgcctcaatgtcggcggagccactcgtattttcccctctttct

SEQ ID NO: 122585 - DNA, 227 bp, Glycine max
  Clone ID: PAT_MRT3847_81700C.1
gcacgctctagctgaatcggtggacgcttcctttcgacttctcttcttgagcccaaattctaggtgttatattgcccctcaaaccaactgatcctgctttatctaattgtggcttaagacccttaattaccacgaactgatagtcagtcttgtagagaacatctgaaactaaagaaaaatgctagatacttagggaggtcacaaaaggaatggaatttcaggaatat

SEQ ID NO: 122586 - DNA, 372 bp, Glycine max
  unsure (1)..(372): unsure at all n locations
  Clone ID: PAT_MRT3847_81701C.1
nattgtcntntganncngngnanntngatgaatganagggcgnggannagagaganncnagangagcgtggaanncnctagntngcgncgatnnnnnactntgtcgtgagtgtnngnangagngtggnaagntgagtgaggcnatnccnnaatnncgnncatntgannaantgngataggtagagnngaccagnngntagtntntgtggcangcnngggnnannggtgaangnacnngngnggnggagtgncngganntttggnttgannngatggtgcgnagnaaagtngagtgnggagagatttnngngtngggnganaannagtagnncnttnntgngttngtatggttnnngtganntcgtggtnang

SEQ ID NO: 122587 - DNA, 328 bp, Glycine max
  Clone ID: PAT_MRT3847_81702C.1
cagacgcgttgaaactatttgtataggacctttctagtccgtgctacattcatctatgaccacagacccttagccgatggaccaacacattgcgcgggaaaagctcatgctcatcaacagggcttggttaagaaggagggaaaggagggactttcctagatcagcaacgttctagctaattcggagagcatttctaggacgagcgtacgctgctcgactactagatgagatggagtgtaccttgtaccttgttgttagccttggagctggccagcagatcatcttagtgactttgactgctgtacccataaccgtcaagctctaaagc

SEQ ID NO: 122588 - DNA, 354 bp, Glycine max
  unsure (1)..(354): unsure at all n locations
  Clone ID: PAT_MRT3847_81703C.1
aattcggctcgagcgtatgcgcgcaggcagcggctgctgccggagctctcactgataactaattagtgngacgtatagtcggtgtctatattgcagcgaataataatacatctgatcaactagagaagctgtagctcgggaagctgctgataaagcgtgtaccgggtagactttacttccagtacaaccaggcttgaactctgaagattgtgttggcttctttcttttactagacttgccatggccacctgtatgatcggacatattataaccggggattagaatcttcactgaccagtaatcttaccatctagaattttagagcaccgaagtttagcttggaccccaaaatca

SEQ ID NO: 122589 - DNA, 351 bp, Glycine max
  unsure (1)..(351): unsure at all n locations
  Clone ID: PAT_MRT3847_81704C.1
tggccgcttgtgaaaagctttttttttttttttttgggaacaaacccttcattagcaaaaaaaattgcacccatattttttcaccatcagatcctaacacttgcagttctcgctgaagccttaatcatgtactcaagcggtcgagggcaaacgatccctcccctnggggggggaaaagggccacccaaaccaataaagaaaaaaaaaccgcaacgacggggttacatggggtcaaatacaaatgcgccatcctgtggacttgtctgcccaacacaaagaaataagggccgcaattccacaatgtttggtcgcaatttttttatcgcgcggaggcttgttttcagcctaaac

SEQ ID NO: 122590 - DNA, 283 bp, Glycine max
  Clone ID: PAT_MRT3847_81705C.1
ttccggtcgaccacggcgtcggcaagtcttaaaaagcgatctaagatatacctacacgaggtcttcgggaagaagatacattgcacttgcaatgccaagcgacaggtgatgtacttatgagtaatactctacgtcatctactctaatttttaacacgagtctttataattgcttttagtttacccctttgaaattcaatctcattcaactttgcaaaacatttttcctagcggtggaaaattggatttttttttttttttttggatatataaaaatattgggg

SEQ ID NO: 122591 - DNA, 466 bp, Glycine max
  Clone ID: PAT_MRT3847_81706C.1
gggtatacaaagaaagtagttttacagaatcaggttggatatttactctctatgtagtgttaagactagatgaacctttagtcttgctttagtcctcagtgtaacttcctttctagaaaatctgagggaaaaggggaggaggagtgtttgaaagagaagataagcacacttggatatgatatgaaccatgaaggatggtgttttcatgtgaaattcttctgttttggtgatgttttcaggcaaggatattgttgcagtagacagtcctgttgggcgtttgggcctcagtgtttgctatgatttgagatttccagagatgtaccaattgctgcgtttccaacatgaagcacaggtactactggtgcctgcagcattcacaacagtaacaggtgaagcacactgggagattcttcttcgtgcccgtgcaattgagactcaatgctatgtaagaattcatttttgcatc

SEQ ID NO: 122592 - DNA, 402 bp, Glycine max
  Clone ID: PAT_MRT3847_81707C.1
ggcaatattctgagtccagccgttacttttctctgaccctgacggaatggttcaaagaggtcttgcactgacccatcaggatgagatactgacacctgctgctcacaccatcgactcatccttcagaaatgatcatgtcgactcctatgctctgcctgattccaatctctatgccaatgcctacaagaacataatcatgacccgaggcactactaagctactgctcgacatggcacccatatcgaaatttgctgaaatgctatacctcaacgctagatctgctaattacaccatgggaaggaagatctttaccggtgctcactcatatcgacattgacactatcatgacgaagccgctatacttgatagctaccgctgcatgcatagtgcactaagcaatgc

SEQ ID NO: 122593 - DNA, 275 bp, Glycine max
  Clone ID: PAT_MRT3847_81708C.1
tggtccttaaaactcatcagtcattatcatggccaagctagttttttcccatcgttttctggtatgcagcggctgctgcctcgctttcagttccggagaacagactttggaaaacgagtgccagatccttacactccatgccctcattccggataaccgtataaggtcttgaggagggctcattgaggcatggtacccttccaacaagccattccagtgtgccggtgttgcctctctcgctgtagcctcaatcgcaacgctcttcgtagaccttc

SEQ ID NO: 122594 - DNA, 250 bp, Glycine max
  Clone ID: PAT_MRT3847_81709C.1
tcgagcagttcccataatataaaggtgtacctcaggaactgcacctcgacattggtgtgttcgagttaactagtgtttgggaggatgtgagtgctttctaatgaggggttggaagcactatatttttctccaaaagaaccacatacacgctacaaatacaattatcccttgtaaaagtaggagttccagctttagcctgcctatacttgtcactcctccaacacaccttatactcgcctttgggatttta

SEQ ID NO: 122595 - DNA, 539 bp, Glycine max
  Clone ID: PAT_MRT3847_8170C.1
caattaccttcagaagctgtcgttgtaaatgttacatgtggtagtggacgtggtggtttacccaccacttgcttgaattaattctgcagttaacaatcgctcctcagatatcaacaaaaacattcgcacagcacttgggaaaggcaagaaaatagttttccttactagaggtgatcctttaccagtaactttactggctgctctttgtggcgctcacaatgaaattctgaattctaacgccactaatcctatgctgacacgacttcttgagaactgtaagagtctcaaatatatggaagatgagtgtccttttacatttagtgaactattatgcagtattttattcacttaaataaagcgcattactatatgcaatgagtgtgtttaaactatcaaaaaacctatgctgacgcgacttcttgagaactgtaagagtctcaaatatctggttgatgagtgtcctcttgcatttgtgaactagtatgtagtattttattcacttaaataaagcgcattactatgtgcaatgagtgtgttcc

SEQ ID NO: 122596 - DNA, 340 bp, Glycine max
  Clone ID: PAT_MRT3847_81710C.1
aaccccgaaatccgcctcgagggaataaacaacccagacctgttccgaatccacctgcggtccttctaatcccctgatgacatgctctatcctcggggcggctgtttgctggttattgacactcccatggctctgatccctaatcaaagaacctccttgttatgctcactcattcctgtgatcactgtctcaagaagtggactccatcacttgaggctgctgctgccacggaaacatctgcctcatgacacctctcttctgttcagataacgacaacgaatcacacaccaatcaaataacttatccaacatactccaagatcaacatagatgcccccctg

SEQ ID NO: 122597 - DNA, 548 bp, Glycine max
  Clone ID: PAT_MRT3847_81711C.1
ggctcgagagcaaatcaaactgtggaagacaacctacgccaacaacaacatcatcatcggcaaccatgtttgccaagaggttgttgcacaaggctgtgcagcaccattccaaccacaagttgcagcatggtggtttgcaagggagtgagttggatcccagaattgtgattcactatggcattccatccactgcttcagttctcgcttttgaccccattcagcgacttttggctattgggactttgttaaaacacgaaaatgggattcaagatttcagaaaaatttaatctggggttattctaattagccgtgggatggaagacttaaggtgattgggggtgataatatagaaggactattggtttctcctaagcaattgccttacaaatacttggagttccttcaaaaccaagggcatttagttggtgtcttaaatgacaatgatatccacgtttggaatcttgagagccggagccttgtttgttctttacaatgggagttcgatattactgctttatcggtatcagcggttaaaatttcattattgt

SEQ ID NO: 122598 - DNA, 668 bp, Glycine max
  Clone ID: PAT_MRT3847_81712C.1
ttttttttttttttttttttttttttttttttttttttttcttgttgttttggttttaacaaaagtataatatattaagatgacatacatagttaacaaaatgcagcaaatactgccccatgttttgaaggcaaagaaagttcagtgaggcatttgtctatacactagtatcaaagttgcatgaagtcatggtttattcatcgcttataaaaaaaaattacattttattcgtgtaatgctgaaatcctagctaactaaaaatttggctcactgtcacaaaacagaaattgctcctgcagaatgagaactctcccacacttcaataccctcaacatcttccctactaacaaacaacctatccccaccaccttcaatcttctttataacccctctctctgaatcctccctcttatccacaaaattcctcctaaaaaacccttcagcatttccctcactattttccttttgttccgcccttgaccaaacctccaatgctccttctctagccacaaacacttgccccctataacaatgcaccacactattcctcacttcaccacaactcaccaaactagggttcttctctttcatataaacccaaggatcgtccttcaaaaaccgcatatccgccatagccaaatccccggacttagaacacagcttgaaca

SEQ ID NO: 122599 - DNA, 174 bp, Glycine max
  Clone ID: PAT_MRT3847_81713C.1
tcgacccacgcgtccgcgcacacggtgggacttttcgcacaagagataaggcggagggtaactgacaaaaccataccttagtccgcagaggctaaagacgcgcactcggtaacactcgacaaacatggactggatttgccatgatggccggaccccagggaaacacggaaaaac

SEQ ID NO: 122600 - DNA, 250 bp, Glycine max
  Clone ID: PAT_MRT3847_81714C.1
ggctcgagtaataattgaaatatggtatgattttttatttttagaattttattaaggaaataatacaaataataaattgcgccttacattatttcttaacaaaatttcttagggcttcgttctggttcaattgtgggaaattatagctgtctttgattaaacttaggacttcgttctggttcaattgtgagaaattatagccgtctgttttaagaatatcataatatattctctgttgtacttttcgttt

SEQ ID NO: 122601 - DNA, 714 bp, Glycine max
  unsure (1)..(714): unsure at all n locations
  Clone ID: PAT_MRT3847_81715C.1
tggtgttaccctagtttacaaaaaaccagctggtagattgctagaccaatagttgaaatgcattgtaaaatttttctccattgttctgaaccatttccatgccaaaaacagtgcatcttccagcaagttactgccattgaatggagcattcgtgaaaataatcttatttctatgctgccaaatagaccaatttagagctacccaccaacacttccacctattgtatttcttcccacctttcatcccattgttgtgctgcagaaaatggagccttggatttataggataggcccctgaggtgcctatccatgatagggattcccaccaaaatgttgtgttttgctgcagtcaaagaaaagatgagatgcagtttcctccttaatactgcagaaaggacacaggctgtcatttatatcaatttgcctttttcgcatattagacttagtcggtaatctatctctaattaacctcccagcaaaaattgatgctttagctgggatctttagcttccataagtccttgaatatatcatccatgtttccctcctctgagttcccttgcagcagaatgtaggcattcctagaagaatagtatccattggattcaggtttccatacccagctgtctgctgcatgttgttggagtgcagtgtgagatatatcttccaaaaaacctacagtcgaggctcctcattgcaaataggggccttctnca

SEQ ID NO: 122602 - DNA, 579 bp, Glycine max
  Clone ID: PAT_MRT3847_81716C.1
tcagtcagaagctatgtctaggaatactagacaatccacactgccaaggaggttgactttacgaatcttggatcagccaagaccaactataaacatcgatgtcgcaactggctgaggattgggcccatacagagaaattccacaactatctaggggtcgtagttagagaaaaaattccaattctacataatagttggaaagatgtaccggactcgctaaaggacctagtatgggataacattttggcaaaatttgatatccctgaagcggcgaatgcaaagataaaggtgatgtccaccgtggccactagatggaggcaatttaaatcaaccatgaccactaaatttgtctatgctgactctgagaggcaagataaacatgatcattcggtaaaacatggcctagatgcagaaacttgggaggaatttgccgcaagctgcaaaacccttaactggcaggttagatgttcatgtgtttgatttttagtgtgtatttctcattataaaggcaatttgatttgtttgattcgaataatatatgctccatgataaggaatcaagaaaaagatgtaggtaatcc

SEQ ID NO: 122603 - DNA, 155 bp, Glycine max
  Clone ID: PAT_MRT3847_81717C.1
aggccaaataatatacattaggtgttcattatgcttgggtaataaatatatagttcttgaattacaacccaatctttaagtcgagagaaaataaaatcaacactggctttcgtttatcacctaaaactgcacatggttctttcaatcatatttaa

SEQ ID NO: 122604 - DNA, 494 bp, Glycine max
  Clone ID: PAT_MRT3847_81718C.1
gctacattgtacgtactaagtagaaatgattatctcccagcagaacctgattcaggactttgagaaagaaaacaaagctaatcaagtatgcactggatcaagagatgggaaagccaaagtgatcacatcttccgaggataaagtgaaaagggaaacattatatgtgggttctagaactgcacctgagtcgcaaaggggagatatgtctgatgggcacccattccatgcatctggcaatgatgttcccaagtttgtgagaaatccagttgatgttagttgcaaggttggatttaattgcagttcagaaagtttcatacctgatggacaactcagtgagtcaggtcctgtgacaacaaattctagcaaaactgccactagcattctggaagaagccacaaagctaaaagattctgcagatcattataagaatgctgggttcgagttcgaaagtaatgagacttattttaaatctgccttgaagtttctgcatggag

SEQ ID NO: 122605 - DNA, 952 bp, Glycine max
  Clone ID: PAT_MRT3847_81719C.1
gtgaaggtaaaggggaaggaaagtgagtggaagccaggggcaatccgatagaaaagggttttatttctttttcccttcaattattttcttttcctgtctttgttgttcagttccgttgttgtgttgtgtgctgcaacacaatcggtggtctgagaaatcttgtttgtgttgggtttgttatggctcggagagcagaggaagagtacgattacctgttcaaggttgtactgatcggtgattccggtgttggaaaatccaatcttctgtcccgattcactcgcaacgagttttgcctcgaatccaagtccaccattggagtcgaattcgccactcgcactcttcaggtggagggaagaactgtgaaagctcaaatatgggataccgccggacaggaacgatacagagcaattaccagtgcatactacaggggtgcccttggagctcttctagtctacgatgtaactaaaccaaccacattcgaaaacgtcagccgatggctgaaggagctaagggatcatgccgatgctaacattgtcatcatgttgatagggaacaagaccgatctcaagcatctcagagctgttgccaccgaggatgcccagggttattccgagaaggaaggcctttctttcatcgagacttctgctctcgaagcaactaatgttgagaaggctttccagactattcttgcagagatataccgcattatcagtaagaaatcactctcttccaatgagcctgcatctgccaatattaaagaaggcatgactatcactgttgggggaccccaatccaacacaagcaagccttcttgctgtacatcatcttgaaaccccgccttatacttcctacttgctcagtatcattcttttttcttaacttatctggatttcttcttatgattggttgtgcctgctcattgcaaaccttatattattcatattgttgtctt

SEQ ID NO: 122606 - DNA, 405 bp, Glycine max
  Clone ID: PAT_MRT3847_8171C.1
ccccgctttcgtgacagaacgcacacgaagaggctgatatactcccacccaaatgcgacaggggggtcctaaggacaggtcctctacacgtcctttgccatctcattattcgaggccatgttccttatatggcattacacatatcgccccataacaaaaggtgaaaatggaaactggacatggattggtgtgcttgcttcaaagctgacgtttgccttttactgggtccttactcaagcccttacatagaaccctgagttcagacaacccttcaaaaacagactctcttaaagatatgagaaaaaattcccaagagttgacatatttgtgttcacagcaaatccagatattgagccacccatgatggtgattaacacagagctatctggtatagcttatgattat

SEQ ID NO: 122607 - DNA, 1032 bp, Glycine max
  Clone ID: PAT_MRT3847_81720C.1
accagcgttccggtagaggagggtcgggggaagccaggggcaatccgatagaaaagggttttatttctttttcccttcaattattttcgttgtgttgtgtgctgcaacacatccagaaacacaatcggtgtcgtgttgggttgggtttttttgttattaaaagaaaagaaaaggggggatggctcggagagcagaggaagagtacgattatctgttcaaggttgtactgatcggtgattctggtgttggaaaatccaatctcctgtcccgattcactcgcaacgagttttgcctcgaatccaagtccaccattggagtcgaattcgctactcgcactcttcaggtggagggaagaactgtgaaagctcaaatatgggatactgccggacaggaacgatacagagcaattacgagtgcctactaccggggtgcccttggagctcttcttgtctacgatgtcactaaaccaaccacattcgaaaatgttagccgatggctcaaggagctaagggatcacgccgatgctaacattgtcatcatgttgatcgggaacaagactgatctcaagcatctcagagctgttgccaccgaggatgctcagggttatgccgagaaggaaggcctttctttcatcgagacttccgctcttgaagcaactaatgttgagaatgctttccagactattcttgcagagatataccgcattatcagtaagaaatcactctcttccaatgaccctgctgccaatattattaaagaaggcaagactatcacagttgggggggcacccgaacccaacacaaacaagccttcttgctgtacatcatcttgaaaccattgctacttgctcagtatcattgttttgcctgttttcttttctttaccattcttttttattaacttatctggatttcttatgcttgtgcgtgctgattaatgagtattatcccagtttttaattgataaaaaaaaaaaaaaaaggaaagaccgcactcgaagtcaactgcaggcgcgcccggcccggtaatccgg

SEQ ID NO: 122608 - DNA, 410 bp, Glycine max
  unsure (1)..(410): unsure at all n locations
  Clone ID: PAT_MRT3847_81721C.1
ggangcgggggcggggcggaaccccnncgaggccngccggggggagggcaacacccnaaggagaaangcgagnccccacacancaancacaagncanacagaaaagnnagaccaggggggaaaagaagaaaaagaaccaaagcnacccnggagccgaaccaggggggggganccangagngaccaacnanccangacaacaacaagccgcaaccaagagncgcnggcaccggacgcagngcnncnncnccanccaaagcgccaaaccagccncncaggaaaagaagccacggacccagaaccggnngagaacccaggaacgcaggnnaggccccanccggaggggngggggcccaagaagaacaaaaaaagccgcaggccggagaaccaggacgaggagggagagcaaga

SEQ ID NO: 122609 - DNA, 473 bp, Glycine max
  Clone ID: PAT_MRT3847_81722C.1
aattcggctcgagttgaagaagacccatgttttctccccctccctctctctcttcacccttgcactcttcatcatgagcatgatatcaatatgatccgttttcctttattgctgtggagttgtcattttgttctgatcatttctttttgccgccaaaagtagtataaaccattactatgactggaaagctagttgaattcatgtggcctgcattagtggctaataagatactcaacaagcgactcggaagcagcaattttatagcagattatccaagtaataatacagatatacccttattgggtcacgatcagtcatctctgagctccaaatccattcttaatgatcacaaggatacagacaaatacaagatttttgtcagcacatggaacgtgggtgggattgccccagatgaaggactgaatatggaggatttattggagacatccaacaattcctgtgacatctatgta

SEQ ID NO: 122610 - DNA, 361 bp, Glycine max
  Clone ID: PAT_MRT3847_81723C.1
gtcaagttctgtaagtggtggtcagggccttatttttggaaacaagaatatgaataagttgttggagaaagaaaatgatcaaagtggcagttttcttaaaaagccccaccatgagaagtatgctccattgaagttaattatcatgtctgctagtcttgatgcacgtgctttctctgagtactttggtggtgccaaagctgttcacatccaagggagacagtttcctgtagatatattttatacccgtgatggagagacagagtatgtagatgcttccttgataacaatattccagattcagttagaggagggccctggtgatatactagtatttctgacgggtcaagaagagattgaatct

SEQ ID NO: 122611 - DNA, 344 bp, Glycine max
  Clone ID: PAT_MRT3847_81724C.1
ttagggttctcaggaacatgcaactctttggagatcaaagtcaaactcaagctcctgtgatgatcttgtatagattacgggatgaatttgagtttttgtttctataattttttctagaagcgtaaataacttgagctgaacagaactttgaatagctcaactcaaagtaaacttatctggtaataacttacttcataaaaagaaaagcaaaatcaatatacgattggtgttagatcatttgaaagtttttaataatcgcacatgattcttgttaagagaattttatatttttttggattccgtccaatttaaaatatggtctattcaaaaatatcacaatggtc

SEQ ID NO: 122612 - DNA, 1204 bp, Glycine max
  Clone ID: PAT_MRT3847_81725C.1
atgttcttgcttgttaaaattaaaacttaaaatccactgtagagtatttcgaaaaccctagagagagagagagagagagagagagagagagagagagaagggtttgagagagatggggaggaggatactgaatgatgccttgaggagtatggtgaatgcagagaggagagggaaatctatggtggaactcaagccaatctccactgttatgtcttcctttctccaaatcatgaaacaccacgggtatatcaaggactttcaagtctatgatccgcatagagtggggaggatatcggttgaactacaaggtaggattaatgattgcaaggcccttatgcacagaaaggaccttaaggcaagggacattgaagcctacagattgcagactcttccaacacatcagtggggttatgttgtcattacaactcctgatggcattttggatcatgaagaggccattaggaagaatgtaggtggccaggttcttggttactttcactaaaatgatcattactgtgctgttttggccaggtattaggttctgctatgtttccacataaacattccataaatgttttatgcgattacagaattttttctcttcctgtatgaatgttataacatggctgctcatgcatgatgagtatgatggattggatttgatgctttgtggaaatttgtcctgtttttgataaatggtgtactagacatgaatggttattatatccttagtttgtaatctatttcaaattcaaattccatgtagtcatcggataattcaatacaaccattctatgcactggtttctttttttccaaaaaattgcagttttggtcgagaagaatgtttcttatagagtatgtcatcgttgaaatttattctccatccctgccacatagtagtcatttataataatatacacctaccaaatttagggtgtatatttttgctagatttttctgctcttgtaactaaacttcaccggttgaaatagacgttacaactatatttgccatccaatttagggtgaaataagaaatatctttgctagtgtaaaaaatattatgctcctgatgtctaaggattactgactgttaaatgttatatttaatgaaagaagagaaagcagtgagcatcagtacctccgcacggttcatccatctttatttcttgtcacaacaacaaaggctagaaggttattagt

SEQ ID NO: 122613 - DNA, 380 bp, Glycine max
  Clone ID: PAT_MRT3847_81726C.1
tcctacaaacaaaccccttctctctctaccacctttactttctctctctagggtttcgtcgcgaactctcactctcgctttcgctctgcttgtcacgattgtagggttccaatcctcgcgcgaattgcatcacagtctgtgatcgaccgagttttgattcttccccttcctcggggtgttgaggtttataccgtggcgggcgaatgttgctgcttgatgcttgatgatagttgctatggacttgaatgcctcgccggttccggaggaagatgaagatatttttgaggagaagatacatgttgaagagtttcatgaacctgaagaacgcatagaaactggagctgatatagcacgccgggagcgtgaagaaagaaagagaa

SEQ ID NO: 122614 - DNA, 590 bp, Glycine max
  unsure (1)..(590): unsure at all n locations
  Clone ID: PAT_MRT3847_81727C.1
ccacgcgtccggcggcctcttcctgctaagtgctaaacgctaaacgctttttctttctctctctctccatgtctccgttcatctcattcgtcaattaatagcacaaagcaacaaacaaacaaacctcactctctctctctctaaccccaacaaacaaaccccttctctctctaccacctctactttctctctctagggtttcgtcgcgaactctcactctcgctttcgctctgcttgtcacgattgtagggttccaatcctcgcgcgaattgcatcacagtctgtgatcgaccgagttttgattcttccccttcctcgggctaaaggattgttgtaatcactgacacaaaccaaatgttgctgtagggtgttgaggtttataccgtggcgggcgaatgttgttgcttgatgcttgatgatagttgctatggacttgaatgcctcgccggttccggaggaagatgaagatatttttgaggagaagatacatgttgaagagtttcatgaacctgaagaacgcntagaaactggagctgntctagcacgccgggagcgtgaagaaagaaaggagaggtttggagagagaacga

SEQ ID NO: 122615 - DNA, 3590 bp, Glycine max
  unsure (1)..(3590): unsure at all n locations
  Clone ID: PAT_MRT3847_81728C.1
ttcatgcttaagtgctaaacgctctttctatctctctccatgtctccgctcatctcattcggggattgataacacaaagcggcaagcaaacaaacctcactttctgtctctctccacctaacaccaacaaacaaaccccttctctctccaccacctctactttctctctctagggtttcgtcgcgaattctcactctcgctcctctgctaaccacgattgtagggttccaatcctcgcgcgaattgcatcacagtctgtgatcaaccgagttttgagtcttctccttcctcgtcgattgcttcctcgggctaaaggattgttgtaatcactgacacacaaaccaaatgttgctgtagggtgttgaggtttataccgtggtgggtgaatgttgttgcttgatgcttgatgatagtttctatggacttgaatgcctcgccagttccagaggaagatgaagatatctttgaggagaagatacatgttgaagagtttcatgaacctgaagaacgcatagaaactggagctgatatagcacgccgggagcgtgaagaaagaaagagacggttgaagagagaacgaccggatgatagacctgtacatgtgtcacaatcacctggatatgatcagctatttcataccaagaatcaaagatcatatgataaaagcaggcttactcctgggtggttggattgcccttcatctggccaggaaattcgatgcatgataccacttaaggaaacactttgtgaatcgtcctatgacatatcacggcgtattaccagatactcattataactagtgatacatcaataccagagtttgaagggagaaaactaggtcagggcgattgatttgacaaatacaactcgacactatgctgtgtcagatttaaaaaaagagtgcatcaagcattttaagatgcaatggaagtggcgggcttctgtaccttacaattgatgtatgaaccagcatgtctatgaagttacacattttgtgtcccctcaaacgtactccaaagattatatacatgttgtatttacttaggctcagaattctgtaggttatacgatagttggttatatcatgcattcattcatgtagtgttgtgactagggccgtactgcatattttctgaagctcgcactccaggaatctacaaacctgattacattgatgcattgtacacattttatcatgagaaaaaacctgaaatggtagtttgtcctcctactccggagtggaagagatcttctgaatttgatctcaatggtgaagcagttccagatgatgatgatgatggagtaccagaccctgatttgcaggagaaccatgagacagacacacgaatgacaaatgatgatgttttaggagatgagatacctactgatcagcaagatgcattgcgtcagttctgttatcaaacgcttaaattgggtgttggggccaggggacacacacaatttccaggttcacacccagtttctctcaacagggataatttgcaattgttacgacaacgctattattatgcaacatggaaagcagatggtacaagatatatgatgctaataacaatggatggatgttacttgattgatagaagttttaattttcgaagggtccaaatgagatttccttgcagaagtacaaatgatggtttgggcgagaagacccaccacttcacattacttgatggtgagatggttattgatacattgccagattcacagaagcaggagagaagataccttatatatgatatgatggcaatcaaccaagtatcaataatagagcgtcccttctatgaacggtggaagatgcttgagaaagaagtgattgaacctaggaatcacgagcgacataatatatatcagagcagaaatccttactatagatatgacctagggaaccattcagggtgaggaggaaagacttttggttgctctctactgtcacaaagcttttaaaggaattcattaaaagactctcacatgaggcagatggtctcatatttcagggttgggatgatccttatataccacgtacccatgaaggactcttgaagtggaaatatgcttatctgaattcagttgattttcttttcgaggttgatggtgatcgtgagctactttttctcaatgagcggggaaagaagaaacttttggaagggaatagggttgaattcacagatggttcagatccctcactttattctggaaagataattgaatgttcttgggattttgacaaactggaatggaagtatatgcgaatcagaacagataaatcaactccgaatgagtttaatacttacaggaaggtgctgcgaagcataagagacaacatcaccgaggaagatttgttgaatgaaataagtgagataattcgccttcccatgtatgctgacaggatcagaattgatagtaaagcgaatcagcatgctaatgtcgcaaggcgaaggtgatttggtggtggtttagatcagatcagggacttttatgccttcaatctttacattggtggtagtgggtgacatcaagtgaaaacaagatttagtgtataccccgatacttgtctctgggatttgaatgaaattgtattggttttggctatgtattttggccatcatccaaaagttgcttatttatgtaattagttaatccttgcggtaagtattgctgtgctgctgagctgtatggtgcagttagtatggctcaaattccggcctgaatccgttgtctatggttgtccagatcaagagagttaggtttagaatctcaaatctcaatgtatattatcaattttcttttagtgattctaagttattcaaagggtagccggttcttagagtcaagttccaattgggtagaatttcccctgtatgtgaatattaatttgagtagtagtaacaagccttccattctctctaatgttctgtggatgtggaagatatcatgcgtttaggctgtcatcagtgcccgaatcagattgttacttagcatgtttgacggtagcccagtcactgctactcattctactagtagctctggaaatctaccatggaaggatgaggaaggtggcaactgtgtgaactgtttggcagtggtgaaaatgtgtaaggttcagataaatggatgtggaaagaaacagtgttaatttgctagcctcattttcatgatgaatgactatattaaaaatatttgcaacacaaaaccccatgtaacagtgaaatttcactttttttccaacgattctttatacacctgaactttgcttcctccgttgtgtatattctnnctttacgacccatcaactactttttcgtctctgagcttaagcttggaatcaaaggcattgccttaggcgctgtttggactaattttaacctcggtggttcgttgattctctacatatgggtctccggcgtatacaaaaaaacatggccaggtgtttcgtagaagggcatcttgagcggttggaaatcgcttttgaatttggcaattccaagttgcatttccgtatgccttcagtggtggtggtacgaaatcatgaatttactttgccggttattgattaatccccaagcaac

SEQ ID NO: 122616 - DNA, 537 bp, Glycine max
  unsure (1)..(537): unsure at all n locations
  Clone ID: PAT_MRT3847_81729C.1
gaacgaaccaaaaatggggaaccccttggtttggtaggcacaaattatggttgcatgaacatggcaggtttcgcggcaaacatcggcttcaacatctcgtcccactttccctgtcgcgttttttcaattcaccggagtatttggaagtttcagattgtctgcttgaagagaagagagtatagttcttctgttcctattaggtacatttccagcacatcctgcagggtgaaaatacttgaaactgcactgccagtgaaaagccttggatattgtagctgtcctgatgttaatgtgctcaagataaatggtggaaaagatgtgcaggcaacaattgcacattgtgaaatttctcaagacccgaatgaaatttgccctgacttattatttgatgacagtgaacaagattcttttgatcaaatggaagaggttggagagttgacaatccatgagggaggagactcttgtgaccaggaattgatacaaattgacaaatttaccagtgatgtcnaggaagctgctattaaattacttgcatct

SEQ ID NO: 122617 - DNA, 714 bp, Glycine max
  unsure (1)..(714): unsure at all n locations
  Clone ID: PAT_MRT3847_8172C.1
gggagatttgctctgggatgggaagagatgcactgactccggaacccatgtgagatgcttacacaagctaatagttgaacttgagaaaagtgtttctacattggctggcattgaatgtgccaaggatgagaaacgttctcgtcgcaaaatgcttgactaacctaagacgcgctgcttcactattctccctatggaggataatcttgtggaccgtcaaaagtttttaaattttgtgaggttcattatgaagaaaagggacaaacttagttgtcaagttggaatcaacccatactccatggaatggactggtttggccaatagattactgagtaagggcaacgatattctgtgttgcgattatgctagttttgatggtttgattaccaaacaagttatgagcaagatggcagaaatgataaatagtctttgtggtggtgatgaaaaattgatgccgtgaaggacacacctgctgttggcttgctgttcaaggatggcaatttgtaaaaaagatgtttggagagttgaatgagaaatcccttctggatttccgctcacagatattggcaatagcatttttaaagagaggctcattagatatagttatgaaaaattactgcgccaggctaaagctccaagtttgtttctacaatccttgagaaattngggttctttgagtgtgtatggtgaaggaaactaaataagcgttcatgaata

SEQ ID NO: 122618 - DNA, 708 bp, Glycine max
  unsure (1)..(708): unsure at all n locations
  Clone ID: PAT_MRT3847_81730C.1
gcttatgtccctgctgttagtgctttgaatgatagtataacagccttggagatgcagacacttgcacaggttgaagatttgacggatcacaaatatgctgaaggtggtccacaaacagctgaagatcagaatgctatggcaacagatgcacttccagacttccaagacttgcagaaaaggatcagtgcaattgaaatggctgttaaacagatgaatgaaagtttcaaaactaaggatgaaatgagagagattcaagtattaaaatctggaatcagccggcaccaaggaaatattcaggcaagcaagtatgttactgagatggatgaagcaaaggagcagcatcgaggtggaccttctggtgaacagaaggcaaaaaaatcagtgtcagatgtccctgtagcagaaattgaagttctgccaaaagacatcatgcttgatcaaacgtctgaatgttcatacaggttaagtaggagaggaactctcgagaatgatgatcagatgcttgaattgtgggaaacagctaataaggatggggtaattggcctgacccgttggcaaggcgccagaaaaaggncatcgnacctactggattcccatcaaaagagagcaacccanggacccaaaaaccaatatncttcatagagtccttgattgagaaggatttgagtgtggacaaantagagatctcgagaagatgacacatcacat

SEQ ID NO: 122619 - DNA, 154 bp, Glycine max
  Clone ID: PAT_MRT3847_81731C.1
ctcatattgatttcgtgccgactcttcgtttaacccgggaaagcacaaaggaccctgtacaccaaccagatttccccacagggaactgggaaccacatcacatttccctagggcatgcacgccaaaggcgtagaaatccaaaccgcggacaatt

SEQ ID NO: 122620 - DNA, 126 bp, Glycine max
  unsure (1)..(126): unsure at all n locations
  Clone ID: PAT_MRT3847_81732C.1
ctaagctatacacacaacaccaatgattttntgtgtagacttnctctttggacttcaaagttganagtcttagaccaaaacggcaaaaccctctctgcnacnnccacncaacataanannncgncc

SEQ ID NO: 122621 - DNA, 470 bp, Glycine max
  unsure (1)..(470): unsure at all n locations
  Clone ID: PAT_MRT3847_81733C.1
aacatgtttagcatcgtcaaggagatcctggcgagcccgggcaaatggcggaccaggtttcgaagcttgcggaagaggcccagaatttccgacaggaatgtctggagctgaaatccaaaactgagaagctggcgggcctcctccgccaggccgccaggaatagcaacgacctctacgagcgtcccacgcgccgcatcatcgacgacaccgaacaagtcctcgacaaggccctcgttctcgtcaccaaatgtcgcgccaacagcctcatcaagaagctcttcaccatcatccccgccacagccttccgcaagacctccatgcagctcgagaattccgtcggtgacgtccaatggctcctccgcgtctctgcctccgccgacgagcgcgacgacgagtacctcggcctacctcccatcgccgncaacgagcccatcctctgcctcatctgggaacaggtcgccattcttctc

SEQ ID NO: 122622 - DNA, 229 bp, Glycine max
  Clone ID: PAT_MRT3847_81734C.1
gtttgaaccgtttcgacgcaagaagggggcttaggcgaaaaagacttgggcagtggtggaaatgagagcacaagcaatatcgtatggtgtcaacaggggacaatgagacaacgattgttagttgcgcgagaggtggactgaagaagatggttattatagcggtaccaacgtcattgtgaaaaatgtcttacacatgacatgaggtgaggtgtagctgccaagctgaata

SEQ ID NO: 122623 - DNA, 560 bp, Glycine max
  unsure (1)..(560): unsure at all n locations
  Clone ID: PAT_MRT3847_81735C.1
ccacgcgtccgcggacgcgtgggttccgcaacagagagtagaaaagatggcgcggttgatacagtggtgtggtgcgcggtggcggtgctactgtgcgccgcggcgggtgatagggcagtgccggcgcgcgctgaagtttgctaggttcatgagcaggttcgggaagagttaccgaagcgaggaagagatgagggagaggtacgagatattctcgcaaaacctcaggttcatccgctcccacaacaagaaccgcttgccctacactctctctgttaatcattttgctgattggacttgggaggagttcaaaagacacagactaggcgctgcccaaaattgctctgccactcttaacggcaaccacaagctcactgatgctgttcttcctcccacgaaagactggaggaaagaaggaatagtgagtgatgttaaagatcaaggcagctgcggatcatgctggacattcagcacaactggggctttagaagcagcctatgcacaagcatttgggaagagtatctcntctttctgagcagcagctagtggattgtgctggccgt

SEQ ID NO: 122624 - DNA, 1459 bp, Glycine max
  Clone ID: PAT_MRT3847_81736C.1
cgatttcgttgatgattaattttcgctggaaaacccggatgatcacttttagtggtatcttctctcccaattacgtttttgtttcatccaaatgactcgaacctcaaaacttgcttaaggggattaagtccaataccactcggaccaacgacttgttggtttatgtattcatagtttaacatcagcgacaaaataacttgtactttatctttaaaaaaatggtcactaaattttgttactaatacaatgatttattgtagtgagacatagcagaatcaaatctttcttggtctcactctgacaccttgatgacattacatgagattttctaattcttttttattctatgttttgtgtacagggtgctgaagatgaactaaaacatgcagttgcatttgttcggccagttagtgtggcctttcaggtggtgaatgggttccatttctacgagaatggagttttcactagtgacacttgtggtagcacttcccaggatgtgaaccatgccgttcttgctgttggatatggagttgaaaatggtgtcccatattggctcataaaaaattcatggggagaaagctggggtgaaaatggctacttcaagatggaattggggaagaacatgtgtggtatgtatacatatacaacctcccacttacccgagaaattattaggtgatcctgttccaatcaatgattatgcaacacatttaaatttctcctacagaaccctgcccccaacaaataccaaacctaaaaataacttcaatcaatttccctttacaggtttgatgattggcatatatagtaaagggcttcagattttaaaacaaatgaacaattgaaaattctaaatctttagtatcttggctcaacttcggcttgctagagttgttgatagcagagttgaaattatgagtttataaagctaagatgaaccaattgcattttgcagtattgattttggtaattttttattttcaggtgttgcaacttgtgcgtcttatccagttgtggcataaattgcataagaatatggtccctggtgactaccaccttgtcatgcttcagagtttaaagataagtgtcattgtataatgaaaattgctcctagttgggttggtatgatgtattaaataagttagaagttgctgtaaatcacgtaagaatatcatggcctgaattgtgtgtatcacagacataaataacgatcatatattgatagttcatagttacatattgtattgtattaaaaaaaaaaaaaaaaaaaaaaaaaaaaaaaaaaaaaaaaaaaaaaaaaaaaaaaaaaaaaaaaaaaaaaaaaaaaaaaaaaaaaaaaaaaaaataaaaaaataaaaaaaaaaaaataaaaaaaaaaaaaaaaaaaaaaaaataattggggggggcccctttaaagaaaccaagtttaactcttttgaatggttacacgtttttttttt

SEQ ID NO: 122625 - DNA, 237 bp, Glycine max
  Clone ID: PAT_MRT3847_81737C.1
ttttatatattttcttttttattttaaacaagaacactctttttttgggtttggttataaaaaacacattggttgggcatacctaccaaccgaggggaccttgtttttgtttgtccccttaaaaattaccaaagaaccttccattttctaatttgggggtagaggggaggaacccccccagttagagacccggtaaggttttggtttttgacctttttttaggggcccccgttaaaa

SEQ ID NO: 122626 - DNA, 1221 bp, Glycine max
  Clone ID: PAT_MRT3847_81738C.1
gaacagacgaacgacatccaatataactaataactataataactacccttcagaaatttcaagcaccaaacttccatccataaagccgaaaaccctaacagcaaaaagaaaaaagaagaagatagataacagtagtagaataagttatgctcagatactagctatgtaaagattgatcgataccatagaaactttggagactatcaaataatttttcctcatcagagacaaagagaaagagggaaatgctcaaagtatccatcgccaaaaatgactcttttcccactttccttgcacctgcttggcctcacaaactttgtcacaccaatctcatcctcagcatttccaatgtactcttccaaatcctcttctaccacagcatcttcttggttcaaggcttcatcatcagctactccatcatcatcttcataataagctgaggccacactctcgaaaagtcgaagcctaagccttccatcgccgcgctcaacttgaaaatagggttgaggagaagaggaagttacagcttccaagataagcctaccgtcttcacgatgagacctaactctgacccctcccattgaagtcaaaggaggtggaaaagtactacctcgattcaatcttttagactcagaatttttgttgattactggagtgttgttgttgctccttaaactagggcactttcaagtgaaaaaaataaagacatgtcatcagtgttatcactggaattgctaccagtttcgcagcctaaactttcggtgcatagttccaagctctttgcactgagcattgaagaggagctcttaacagaagggtggacgtagacattctcaatttgtggctccttgcaatgagaaatgttggagagagattgaaagaaactccagttttttccatgtgcatcgtttgtgttgctgggtggtggagtcactggagagtgtgtggaagtgttgttggatttggaccctggtggagccaacttgagtttaagcacacgtggttccatgagccagggttcgacacttgattgcaacccttgacagacacttgagtaagacattttattttttattttttttgtgttatccacaatggaagtgtccaaaggaacaggggagaaacagaggagttctgttttagactagtggtgtgagtgaaaaaaattgggtttggttgggggaaaacagaggggcttggataaagtgatcaatttggttt

SEQ ID NO: 122627 - DNA, 575 bp, Glycine max
  Clone ID: PAT_MRT3847_81739C.1
actccttcacagtagtgaaggctctatgaaatcaatgtttttgtttgtttgtttcagctgcattttttccgttgtgccttgttcacataggatggcttattcttctcgtcctatttccttctttccttctaattaaatttactctttaataaaaaaaggtaaactttgaaaactgatttagatgttcctttaaaatgtatctgtttatgcatgtgtgtctgtatttgtatatggtttagatgaccttttgaattatactccatagttttttagtactactattaatgtgatttatttcaataagtatggccaagttgttttgcttgttcataggtgcagatattactgttgttggttaggtgttttagcagcttcatctcaatcattccaagtttgcatacacttgtgttctttagagtttccaagttttactggattacacaatacacatgagatatgtttattcttgttcaagaatcttttgttgactgatcttcacttactacctcagattgatgatcgtttaacatgccaattaacctttggttggctttaatgaatgaattatcttctgt

SEQ ID NO: 122628 - DNA, 749 bp, Glycine max
  Clone ID: PAT_MRT3847_8173C.1
gatgagagattgataggcacagaacatgagggatatgatccttttcttggtggaattcaaaaatatgccactcccatgatgcccctagatgaagaaattctttctaaggttgcacaagatatggttgaggaatggtttgattgtgttgatgaggaggattcctttgaggaagtttccttaagtgcagcactcaatggtgttgagggtttggactatatggaaagaattcctcttgccacatctgagggttttcctcacgtactttcacgcaaaaatggtgaaaaaggcaaaaggagatttgtttctggggatggtgaagagatgacattgattccaggaaccagtgttgaagaggcttacaacaagctaatagttgaacttgagaaaagtgttcctacattggttggcattgagtgtcccaaggatgagaaacttcctcgtcgcaaaatttttgataaacctaagacgcgctgcttcactattctccctatggagtttaatcttgttgttcgtcagaagtttttaaagtttgtgaggttcattatgaagaaaagggacaagcttagttgtcaagtcggaatcaacccatactccatggaatggactggcttggccaatagattactgagtaagggcaactatattctgtgctgcgactatgctagtcttgatggcctgattaccaaacaagttttgagcaagatggcagcaatgataaatagtctttgtggtggcgatgaaaattgatg

SEQ ID NO: 122629 - DNA, 1933 bp, Glycine max
  unsure (1)..(1933): unsure at all n locations
  Clone ID: PAT_MRT3847_81740C.1
atcaaaaaccaaaatcgtaaactaataatcttagggaggggtagtgtggtcccgagacaactaatatataatcaataaaatgcaatcataaaaagcataacataaccccattgaagattccgcaacagagagtggaaaagatggcgcggttgatcacagtggtgtggtgcgcggtggcggtgctactgtgcgccgcggcgggcgcgtcgtgggtggaggaggcggcgaacccgatacgaatggtggcgggggtggaggcggaggtggttcgggtgatcgggcagtgccggcgcgcgctgaagtttgctaggttcatgagcaggttcgggaagagttaccgaagcgaggaagagatgagggagaggtacgagatattctcgcaaaacctcaggttcatccgctcccacaacaagaaccgcttgccctacactctctctgttaatcattttgctgattggacttgggaggagttcaaaagacacagactaggcgctgcccaaaattgctctgccactcttaacggcaaccacaagctcactgatgctgttcttcctcccacgaaagactggaggaaagaaggaatagtgagtgatgttaaagatcaaggcagctgcggatcatgctggacattcagcacaactggggctttagaagcagcctatgcacaagcatttgggaagagtatctctctttctgagcagcagctagtggattgtgctggccctttcaacaactttggctgtaatggtgggttgccatcacaagcctttgagtacatttaaatacaatggtggactagagacagaggaagcatatccctacacaggaaaagatggtgtctgcaaattctcagctgaaaatgttgctgttcaagtccttgactctgtgaatatcaccttgggtgctgagaatgaattaaaacatgcagttgcatttgttcggccggttagtgtggcctttcaggtggtgaatgggttccatttctacgagaatggagtttacactagtgacatttgcggtagcacttcccaggatgtgaaccatgccgtccttgctgtggggtatggagttgagaatggcgtcccatattggctcataaaaaattcatggggagaaagttggggtgagaatggctacttcaaaatggaattggggaagaacatgtgtggtgttgcaacttgtgcgtcttatccagttgtggcataaattgcataagaatatggtccctggtgactaccaccttgtcatgcttcagagtttaaagataagtgtcattgtatgatgaaaattgctcctagttgggttggtatgatgtattaaataagttagaagttgctgtaaatcacgtaagaatatcatggcctgaattgtgtgtatcacagacataaataacgatcatatattgatagttcatagttacatattgtattgtattgtattgatgcgccccgctttaattatcagttataagaattaagatagcanaaaaaaaaaaaaaaaaaactgaggggggccggtacncaattcgcctataggagcgattacgccgcttactggcgtcgttacacgtgtgactgaaaacctggtacccactaatcgcttgagacatctctttcgcaggtgcgtaatacgaagccgacgatcgcttccacagtggcagctgatatggatgacccctgtccgcataatctccgggggttgtgttgcagacgtcttcagcctaccccgtcttcttttcctcttttccgtggcgtttcctagcttaaagggctcttttgtcgatagttgccaccaaacactatgggggagggcctctaaagtttcctcgtggacttttaggcttcacagcaactcntcctctctttnncttanngnnngcgnccctgtcgagaatngaaaccnaacancacccncgnntcggggccccctgttt

SEQ ID NO: 122630 - DNA, 381 bp, Glycine max
  Clone ID: PAT_MRT3847_81741C.1
aaaaggctacaaatgcaatctgtatactttatgaaatagacttaaagcaactccccgattatgtgattttatatacgagacttcactggttttggtttaaagataattatctaaaccaattttgcatatcccaagaggtcaaaaaacatacaagaagcaaaaatatacaaaattatgttttacattctaatacttttctgggaagcctctctatatctgacagaagtagctggctaactgccatcaatccagcttagtccgggcatttttctcgggcctcctgtcatattatccctcaacttgttcacattatcccacctcccatcaccggtatttatattagaaagcttaaccctatagacattattggcgggactactt

SEQ ID NO: 122631 - DNA, 377 bp, Glycine max
  Clone ID: PAT_MRT3847_81742C.1
tagcgggcggcctgtcctttttttttttttttttttttttttttttttggcttccgggaatgtgatttacaaaaaaagccaatggttttttttataacaaattttttgcttccagggggaaatcgctcctgcccggaaaacccatgtttttacattcttatttcaaaaggatagagctattctttgatattaacccgctaatggaacaaatgcccatattttttttccaccgtgagaaaccttaacttatttctccccagggacaaaattttttttttggtgcattggtgggcccaatgtacaaaggtgactgtaattctatgtttttcccaacccgccccgaatttgggggccccgttgggaaaccctgaaccttt

SEQ ID NO: 122632 - DNA, 135 bp, Glycine max
  Clone ID: PAT_MRT3847_81743C.1
tttccataaaatgaactatttaactataaggatagggcaatgggcatttgatcaatagtcaatggtgcacaatttattattctctctataggttcatgtcgcaccattattaattttctcttataagttcaatgt

SEQ ID NO: 122633 - DNA, 153 bp, Glycine max
  Clone ID: PAT_MRT3847_81744C.1
ggtttgttggctgacacaacctttaccatttaaggtaaggggcaacccaacataaagttagagcaaaaatatacaacctggcataaaaaatgacaaggacacatttgcactacataaggcaaaaaggtgtacctataagcttaatgtactttt

SEQ ID NO: 122634 - DNA, 795 bp, Glycine max
  unsure (1)..(795): unsure at all n locations
  Clone ID: PAT_MRT3847_81745C.1
ctccggaaaagcgagcggggtcaaccacttcctctttaaaacgaccccgttccccgcacttctttgctgaaaaagcgagcggcgttgagtgcactgctttgttgttggcggaggagctgaagaacgaacgcagcgagcggcgagtaacgatgtgcggtgacgccacgaactgggacgaagacgcatacagagaaaccattctcaaggagagggaaatccaaacccgaaccgttttccgaaccgcttgggccccaccctacacctctaacctcgacactctcatccttgcctctagcgacggttccgtcgcatcctactccatctcttcctccatcgccgcctctaagataaaaaatccattcggtttcgtcaatgccgatacagatgagttgttggctgaaccaaattgcttcgttcaagcgcacgatggacctgcttacgatgtcagattttatggtgatggcgaagatgctctgttgctgagctgtggtgatgatggtcggattcgaggatggagatggaacgaattttcaagctcaaattattctgtttcttcccaaggaaatgatatcaagcctgtacttgatgtggtgaatccccaacacaaaggtccttggggtgcgctttcacctatccctgagaataatgctattgctgtcaatactcaggggggatctgtttttgctgcatctggcgattcttgtgcatattggtgggatgtggaaactggntaagtgaaaatggtattcaaggggcacatggactatntgcattgtatagttgctcgcactcatt

SEQ ID NO: 122635 - DNA, 502 bp, Glycine max
  Clone ID: PAT_MRT3847_81746C.1
ctcgagccgcgccgtcaccgacgactgcaggtacaaggtggtccacgctggcggttggcactccggcgccaatgctcgccggaatgtgacgcgaaccagcgcggaaatcggctcgaggaccctgccgccgcgggcttcagcccgcgatgatgagatcaatgacacgattccgactttgggatcggagactaattttaggaatgggaagtatttgtattactcgagaggtggggattactgcaagggaatgaatcattatttgtggagtttcttgtgtggattgggggaagctatgtttttgaacaggacttttgttatggatttgagtgtttgtttggcttcaacttataaccctagtaacaaggatgaggaggggaaggattttaggtactacttcgatttcgagcatttgaaggagacggcttcgattgtggaggagggtgagtttttgagggatgggaagaatggggataaaacgcatttgaagaagaagaagattcct

SEQ ID NO: 122636 - DNA, 119 bp, Glycine max
  Clone ID: PAT_MRT3847_81747C.1
ggctatgttggactcatgggctctgatcacaaaatcatggacttgtgctaatggctgttcgatttaaaacgatcagtaagaagtataaatcataataggtacatgcaggctcacacaat

SEQ ID NO: 122637 - DNA, 422 bp, Glycine max
  unsure (1)..(422): unsure at all n locations
  Clone ID: PAT_MRT3847_81748C.1
cttcatctgaatataatcctattggtgattatgcaaatttgagtgatgtggatgactgaagtgactttgatgaaatagtgggtgtcattggaattgtgcattcaaattcaggcaaggatgaaatttatgaagaaaggggattgaattcaaactccgtcgttgcagctactgaagatgttcaagctgaaaacacaagtgctgcccaaaatgaaatagtagaagttgttcatcctaacactcagccaatccaaagtaacatatctctgacctaagaatctggaatcagctntcaggtattgtgatacgaatagcaatcaaggactgcagaaaacaaggcccaaaagacaaaccactacccctacctacttgaaggactatgtgcagcttgggtagcagaggccccatgcagcatgcaccgttcg

SEQ ID NO: 122638 - DNA, 1331 bp, Glycine max
  Clone ID: PAT_MRT3847_81749C.1
ctcggtagcagcactgagctcgagccgattcggctcgagttcataacataaagagtatagagcagcaaacgtaaaagtggatccaagaaggctacatggcaagcttccactatcttcacaagcatcagaggagaaagaggacacagtagaagagtttgatgcttataataattatgcatcttggtcttcagaaactgacatgtctgaaatggtttctgctcttgctcaagttatgggaactaccaatcggaacccatacatgccacaatcaacctcctttcctttctcaacttccgtggtcaaagatcaacctcaaccgtacccatctcaacctcctccagatcaagaggtggcaaagaagccacactacagaggagtgaggcagagaccatgggggaaatgggcagcagaaatccgtgacccaaaaaaagcagccagagtgtggctaggaacctttgaaacagcagaggatgcagcacttgcatatgacaaagcagcactcaagttcaaaggcacaaaagctaagctcaatttccctgaaagagttcatcaagatgttccctttatgcaacaacaccaacaacgttcatcaaacagaaacgtttttcccatccatgcaacttccaccactagtagtgctactgggtctgtttcttctgttgatgctgttgctcctccttcgttgtccactcatgatcaacatggccaccaagttttcccaaatctgtatcaatatgcacagattctttcaagtgatgatgcacagttaccttatttcacatcccatcttttcaatcaacaacaacaacagcaacagcaacaacctttcaattctcaattctctagcactttttcttcaacctcatcctacttttacaaccagcaacaacaatatgatcaacaaggacatgatcactcaaaccactagcatgatactattaatctctgtgatttccaaccgtaacattaaagtttttcaagtcttaattaatttgtaatcacagtgttgtaactgcaatattgacaacatgcatgggcattaattagtcgtccccaattttccttttctcaaaagagtaagattttttaggtatgtaacggtggcggcaatttaggggcaaagcaattttaaagcttgaatagctagttagtatatgcatctgtcaattttgttgtagaatattgagtcagggatcaatgtatgtttctttaagcgtgcacaaaacatggatcctacatttaatttccaatttaattatggatatggataaactttttgttggaaaaaaaaaaaaaaaaaaaaaaggggcggccgatttagaggatccaag

SEQ ID NO: 122639 - DNA, 227 bp, Glycine max
  Clone ID: PAT_MRT3847_8174C.1
ctccaccacaccattctgatcaacggaaggtctctccgcgttcgcttctctcaatcccgctctccgatcctactaccccggctacgtagggctctcagtccgtcctcggcttcccaagagagttgagatacgggctggtgggagtatgtatggagatcactttggtgtactcatcatatggagtatcgcatggaggaggtgttggctgtacgattgatggatgtcct

SEQ ID NO: 122640 - DNA, 617 bp, Glycine max
  Clone ID: PAT_MRT3847_81750C.1
ccccccaccccttttggtaaattgggggacaacaaaaaaggtaataaattttgttcaaaacgaaaacaaacaaagcaaaaaaaattaccccctttaaactttaaccctggttcccgtttttttaaattcccttgggaatttttttttttccccaccctttttttaaacaaaatcggaatttggttttttaaggacttggaaaaaggctttccttaagggaaggattggaaaaacggaagggctgcttggggcttaaaaaggggaacttaaggcccggctcctttaagggggggaaaggttaccctttggaacaccttggcccaccctccaaccggattttggacaaaccagggatcccagggtttttaaggggacaacttaagcggggcaggggcatattttgggggggggacgggccccatggggtccacgtccccatggaacacccaaacttttattcggggagctataaattttttaaaaaggggaaaaacaaatccttcagtttctttccagttccgataaaaaacctgggtgaaggcagcccacctataaggaataccgggttttgtgggcagggagggttttttaacaataaggcctggggaagaaaattt

SEQ ID NO: 122641 - DNA, 151 bp, Glycine max
  Clone ID: PAT_MRT3847_81751C.1
ttttcggttacatttgtaaactagtgacatagtttctctcatgacatgacatgtatgttaattccagatatttctagtttgacactcttaacattgtatctataaccatttttccctgataaatatacatgcaatgtaatttattgacaat

SEQ ID NO: 122642 - DNA, 454 bp, Glycine max
  unsure (1)..(454): unsure at all n locations
  Clone ID: PAT_MRT3847_81752C.1
ggcttggaacctttgggctgatttatgtgcttgtggatgtgcgggggaagaacactcgagagcgagacatagaaaagaaaaaggaaatttcagtcggacaggctaaatactactacgctggatgaagagtattaccctgagcttaaggtagatgttggcgttcttaaaattcatttctagtaagttggcattacctgtaagaatggtcatactgctactaaaggatgttttcgtaaggccgcggaagccctgatccttaaaatcggaaagtatggctatgttaagcgttatcccgccggaaccgacacccctatcgttaagaaatccgaggacaccgcgtttctcctctataatcgcgacgccttctacgcgaactgcatcgaccattagtctaccgacaccgtcgaggacggacccccgagctcgtccatcgaanacgggaatattaaagacg

SEQ ID NO: 122643 - DNA, 500 bp, Glycine max
  Clone ID: PAT_MRT3847_81753C.1
aatacattgtttttaccctattacctaaaaacgcggagggcaaaaaaaccaaaaatccacatgcccagacttcattctgagagcgaactcccgaagcatcccccagaacaaaaacaaacaggatattggggggggaagcacccgggaaaaacacccctaaaaaaaaaatccccggcgacggcaccaaaagaagaaccaagagccaaaaccacaacccaaccacccaaccaaacggggccaatggttacgaaaaggccaaaaccccccggaccagggataaaaaacaagggaggggcttgtacagaaccttcaaagaggggctaatgcggagcggatgatgaagaaaaccttccctggaagaaggccttgggacgtctttagcttggaaattgaaaaaaaaaaagctcgagaaaaaccccgatagaccaagaaaacttacactactcgttaaagaaagcgggggacaaaaaccagggttgatgtacagcgaccaaatactt

SEQ ID NO: 122644 - DNA, 552 bp, Glycine max
  Clone ID: PAT_MRT3847_81754C.1
gttttattttgtctcattagaccttgttttttctaagtttagactaattgaactgaatccattattgtagatagagaagtttcattactcaatagagaactaactatgaatttgtgaggctcaaaacccactgtaaagctttggcgcagatcctatgcacattgattttaaaatgcatgtagcacatatgtttaccctatagcataaggatatggatgtgtatgtgtggtaggtatatgcctgtatggatatgtataatgtctgggaatgggaaaaggcagattttttcaaaaagttgaaattgtacttaaaatgaatattgctttacctttggatttgatcgtaaccctctatttgatctcattgttatttttatttttataatttttggctctgtttggaagtcctaggcacaagcgtttggttttgctcatggtacactatatgacaactgtcaatcccctgctgcctgcacttgaggaagtgaaaatatagtccttttccctaatatttatttcgtgactgttgggaaacgcaaaaccattttgatct

SEQ ID NO: 122645 - DNA, 151 bp, Glycine max
  Clone ID: PAT_MRT3847_81755C.1
aattcccgtctcgaccgcactcatactctcactacctatcttacttataaatattttctccaactcacaactaacctcctacgcatcgttttttatctaatacccaccatttaaatccctctacaatttaccataactcataccatttata

SEQ ID NO: 122646 - DNA, 497 bp, Glycine max
  Clone ID: PAT_MRT3847_81756C.1
cccattaaaaccccaaactttccccttggggggaaaaaaaaaaagataacttaacccgggtatccccaaccaacaaaaaaaatttaacaaggcagttcccggggccaaaaagaaacatttttaacagagggggggcaggaaaacaaaaaccacagaaaaaaaaatactggaggccctctccaaaaaaaaaaaaaaaaggggaaataaagcgcaccccattttttccaataggggaaaggggacaactttgttaacaaagccaaaaaagcatggccggcaacaattaggcataaaagaaaatttcgaaaacggaggagaattgggggcagggctgcaaacggagctaaagggggaggaccaaaactttggcggaccaaaacggcaagaacccaaaagggtatgaggggcccgccttgcaactaccttgaggggatcaacacaggaacccctacttggttttttttcttccaaattaaaagaggagggattttccaaat

SEQ ID NO: 122647 - DNA, 293 bp, Glycine max
  unsure (1)..(293): unsure at all n locations
  Clone ID: PAT_MRT3847_81757C.1
cttagncttcttcatttcaangctaagagcaacctcttgcaataatcttgtaantctatatactacanttttgagcaccgtcttatttagttatangattacaagattattgcaagggnttgctcattagctatgttcatgttgaagactttgcgacgacacctatgcagtgggtcatgggtacgacttgcattctcacgggatggcataaagggtggggacaaaatgattgctttgtactcgcaaattatgtaataattagtaactttatatttatttatcataaattaaaa

SEQ ID NO: 122648 - DNA, 412 bp, Glycine max
  Clone ID: PAT_MRT3847_81758C.1
ggcctcttcagtgatggcatctgtggccctcagacctgcccctttcactgttgagaagtcctcagtgagaggccttccctctctctcaaggaactcttcttcattcagagttgtggccactggcaataagatcaagactgacaaaccttatggaattaatggtggcatggctctgagggatggaactgatgcatctggcaggaaaggaaagggaaacggtgtttaccacattgttaacaaataccgagctaatgtagatgggtacagtcctatctacaacaccaaggactggtcttcaaccggtgatatctacactggcagttcaactggctagtctatctgtgctgtgactctactaggtctcttagctggaggtgcacttattgtctacaacacaaatgctctagttcaa

SEQ ID NO: 122649 - DNA, 383 bp, Glycine max
  Clone ID: PAT_MRT3847_81759C.1
ctgaaatggcctcttcagtgatggcatctgtggccctcaaacctggccctttcactggtgagaactcctcaatgagaggccttccctctctctcaaggaactcttcttcattcacagttgtggccagtggcaagaacatcaagactgacaaaccttatggaattaatggtggcatggctttgacggatggaactgatgcatctggcaggaaaggaaagggaaagggtgtttaccagtttgtagacaaatactgtgctaatgtcaatggttacagtcctatctactacaccaaagactggtctacaaccggtgatttctacgcttgcggtaccacttgcttttcctatctgggcttagactctacttcggcctttaacttgttg

SEQ ID NO: 122650 - DNA, 938 bp, Glycine max
  Clone ID: PAT_MRT3847_8175C.1
tttgtctttcacgcagaaatggtgaaaaaggcaagagggagatttgtttctggggatggtgaacagatgacattgattccgggaaccagtgttgaagaggctaacaacacgctaattgttgaacttgagaaaagagttcctacattggttggcattgaatgttccatggatgagaaactgactcgacgcaaaatttttgacaaacctaagacgcgctgcttgactattctccctatggagtttaatcttgaggaccggcagaagtttttaaattttgtgaggttcattatgaagaaaagggacaagcttatgcttcaggttggaatcaacccatactccatggaatggactgggttggccaatagattactgagtaagggcagcgatattctgtgttgcgagtatgctagtttcgatggcttgattaccaagcaggttatgagcaagatggcaaaaatgataaacagtctttgtgggggtgatgaaaaattgatgcgtgaaaggacgcacctgctgttggcttgttgttcaaggatggcaatttgtaagaaagatgtttggagagttgaatgtggaatcccttctggatttccgctcacagttatttgcaatagcatttttaatgagatgctcattagatatagctatgaaaaaatactgcgccaggcttaagcttcaagtatgtttttaccattctttaaaaaatttggttctttggggggggatggggaagaaaacctaattaggggtcaaggaaatggccagcccttcctttaggggtcttaaatggaaaagctttttacttggccttatattccccattccggaggggtttgccaaaactatggcacctttgcaatttaaaaagttagcaaattgggattttttcaaaaaaaactttaaccaaatgtctaatgttttggggggggctcctgagg

SEQ ID NO: 122651 - DNA, 1575 bp, Glycine max
  Clone ID: PAT_MRT3847_81760C.1
atcgaaccgctgcgagaagacgacagaaggggatagattaagcgcaaagagaagcattatcactaggagcagcaacaactagtctcagctgaaatggcctcttcagtgatggcatctgtggccctcaaacctgcccctttcactgttgagaagtcctcagtgagaggccttccctctctctcaaggaactcttcttcattcagagttgtggccagtggtggcaagaagatcaagactgacaaaccttatggaattaatggtggcatggctttgagggatggaactgatgcatctggcaggaaaggaaagggaaagggtgtttaccagtttgtagacaaatacggtgctaatgtcgatggttacagtcctatctacgacaccaaggactggtctccaaccggtgatgtctacgctggcggtacgactggcttggctatctgggctgtgactctacttggtcttttagctggtggtgcacttcttgtctacaacacaagtgctttggttcaatagactttgcaaatcgatgtttaagttataacatagtccatgtaactatctaaaaatgaagaactattcgtgaagtactttgtggatatgttccttctgttctataaatgagtggatgtgaaaaaacttttttgttagtaatcatgcttcttcatcaaaaaaaaaaaaaaaaagggcggccgccctttttttttttttttttagtgatgacaacgacatcaatcgaataataagggtctgaaggtaacaatgtaaataaatgtaatgtgtacccaaaacagggtcaaaagaaaaagaaacaaaaaaggaaaataaatgatacaatacaagaatataataacagcaacaaagcctgtttaaaaaaccaaaacaagggtagcccaacccaaacctaagcctcctaaaacctttttcaagcacatgatggtctttgctccactctcatcgttggcagcagtggcaggtccaggggaaaaagcgtcctcgttaggaccagaagccccggggggtggcgcaggaggtcccagcaacgacggtgaaggagccggagcaccgtgctttttacccttttttttgggcttgctcggagccggagcgggagccacaggggtggtcggcgccgccaccggaacgggagcgggtggagaactcaccggcacgggagcggggggagagctcacgggaaccggcgccggaggaggagaggctgcaggtggcttggtcgctggagcaggcgcggcgggggtggtggtaggagatgccgccggcgacgaagcaggggttgcggttgcgggcttaggagacgaagctggtggagatgatttgggagaagcaactggggctggtgaattcggtgtggaaggtgcttgggcgggagtggcggcggcgggggttgccggagtgttcgagggcgctgcggcgggagactggcctccgacgccggcgactacaatgcagatgaatgcaagagagagaacaccgttgcgatccattggtgaatgaatcgcactgtggagagtgtgattcgtgtgaatgagagagagagagagagagagtgctcgagcc

SEQ ID NO: 122652 - DNA, 258 bp, Glycine max
  Clone ID: PAT_MRT3847_81761C.1
acaccgtattagagaatttaagatatactatgatgagagcgcggttcccattactgttgcttggagttgttttcctggcatcagtttctgtcacatttggcattgcgtattcggaaaagcagaaccccagtcacaatatgtgcctccgaagttgcaatatcgagatagactcctacaggaaccaagcatgccacgctcgttgcaacctccttaaggtggaggaagtagaactatacgaagaaggtcaaattccacgac

SEQ ID NO: 122653 - DNA, 1701 bp, Glycine max
  Clone ID: PAT_MRT3847_81762C.1
cacatccacacatttatagaacagaaggaacacgtatccacaaagtacttcatgaataattcttcatttttagatagttacatggactaagtttgagcttaaaacatcgatttgcaaagtttattgcgccaaagcacttgtgttgtagacaagaagtgcaccaccagcaagaagaccaagtagagtcacagcccagatagccaagccagtcgtaccgccagcgtagacatcaccggttggagaccagtccttggtgtcgtagataggactgtaaccatcgacattagcaccggattagacgccaaactggtgaacgcccaaagccattccttacgtgccagatgcgacggctccacccctcaaagccggggcggcgctgaaacccaaaggctggtccgacgggcacagctagccagcactggccacaacactgaaggaagaggaggacctcgcgcgggcggggagggcagagacagaggaccccaccaccgggaggtaagaaaaccaaagctgaaagcacattcacaatataaaataaagcttcaatgatcagcacatagccatcatttgtaaatatccaggatccagcattaaaaatgtatgagctgtgaccaaatagaaaattcctttccaatcatcagattagtatccaaagaaaaaaaaacatgataaaaaaggaaattctgataaaatcctttcgcatcatcaagattggcatccaaagaaaaaaaaaacatgaaaaaaaaggaaattctgatttaatatacaagcactggccactcagtcatgtaccagcattgggcagggctgccataaaggaattgtaagaagactcaagatcaaagtgaagctgcctcgcctgttgttccgtcaactcatcagctgcacccatcttagataaccttgcaatccattccttcattttggttttcccctcaaaatcaggcggcaggattgtcaacttattaagcgaagcataaaggtccgagagcaatgggtgcacctgatccacagccaccatgttaagtttcaaggaatccattgaagtaataaaattctgaacacactcggccacagtagcggcagaggtggaagcagaggcagccgcagttgcacgatgctccacggtggcaggcacaccagaaaccacgagacggttaatcgctgcagggcactccatcttgtaagtatctgcaaatcgctcaatgctaggcacagtgtctttaagggtggaagctaaggttttgaaatgagctatgagcttctggcactccaactcatattcctggggtgaaattatatctctaacataggccttctcaagcctctcagtggctttgataatggcataaagctccccaaagttgtcatacatttctctttcgcgcttgtcattccatagcttaatctccatggtagtcatggctataaggtttaggatcagatcacacagtggggatggaggaggattggagaagagaacgggacacgcgcaaagagaaaggtttcttctttaaagaaccagaagacgttagcgagtggggcgcggttgatggtcttggtttgtattccatgataggaatgaagaaaaaaccccatgtgaaaaatcagccccaaatcataagcaacccgaaattccagaaaaaattgcataaaccaatagcaatagtgaagagaaaatagagaaaaaaatctcgagcc

SEQ ID NO: 122654 - DNA, 245 bp, Glycine max
  unsure (1)..(245): unsure at all n locations
  Clone ID: PAT_MRT3847_81763C.1
tcggataataagccacggccacgcacaccggagcaggcagacccagacaagggaggaggcaacgcccccaagacaaagaaggcncgcgagaagaaacccgagaagcccaaagccgccggaaaggggagccagccggacccaaacaagaaagcgaagcccacccagcgaaaggcgagcacgcaaacaccgacaagcaccacaacagaagcgaaggggaaggagcaggcngaagccaaacaccccaa

SEQ ID NO: 122655 - DNA, 574 bp, Glycine max
  Clone ID: PAT_MRT3847_81764C.1
ctcccgagggcttcgtcggaggattgtcacgcctgaacgagcccttttccatttcagccttgagcggctcctgttcttgtcaagttggtgtgaattaggagctgcttaattcaaagaatggggggagatgcacagaagagaaacgtcatcattggcgtctctactttcttgttggtggccatggtggtagcagtcacagtcaatgtcaacttcaataacaagggatcaagcagtgattcaaaggaagaaagcaaatcccatgtagcttcctcgatgaaggccgtgaaaaccctttgtgcacccaccgattacaagaaggaatgcgaggacaatcttattgaacatgccagtaacatcaccgacccacgggaactcatcaaaatcgcattccacgtgaccatctccaaaatcggcgaaggacttgagaagacacaactcatgcatgaggtcgagaatgaccctataaccaaggaggcactcgacacgtgcaagcaactcatgaacctctccatcggggagttcacgaggtcactcgacaagttcgcccagtttgaccctgacaaacttgacaaca

SEQ ID NO: 122656 - DNA, 176 bp, Glycine max
  Clone ID: PAT_MRT3847_81765C.1
gaccagacgcaatccgttacgtaatagatatgggcttgaactacccaagtacttggacgattaaatcagacacccgaatatgaacatttggcctggctatactgactcttctcttaattgaatattggcatatagttgttaatagaaatgatgtatgaatatgattgtgaatctcc

SEQ ID NO: 122657 - DNA, 475 bp, Glycine max
  Clone ID: PAT_MRT3847_81766C.1
ccggggatcctctagagtcgacctgcagttcctatgagaaatcaaatccctccaaccaccatatctacacaatagaattgtggcccacaactgattctgattatttgccaactcccacccccttttagcaagcaaaggcctggttgaatttaatacaatttttggttcctttaacccacccttttttttttttggtgggggggggatttttttccccccccccctccccggagggggtttttattggggttttttttgggggcggcccccccaaaaaaaaaactttttttgggagaagaatatatttttccccccacccgctaggtgtttttttttggggggaggagaaaaaaagagggggggggggggggggcaaaaaaaaaagggggggggggtccccccccccccccgcaggagattttttttttttttttttttgtgggggggcgcgcccctctctttttgtggggggggg

SEQ ID NO: 122658 - DNA, 239 bp, Glycine max
  Clone ID: PAT_MRT3847_81767C.1
cattacagcaattgagcttgattaattaatcgaacagtacatactttgaatacctcaactttgtgatcaccaatcaccatattgtttatttaaaagaggagggcctaaccatagaaactaatgaaagatgtggagtagactgtcttaaagtcactactattctgtagtttatgatatgatgagttaaatagcttttagaagtagagaggataaaacttcatgtaagtattgtaagtatg

SEQ ID NO: 122659 - DNA, 2367 bp, Glycine max
  Clone ID: PAT_MRT3847_81768C.1
ggagtgcgtaagtgcttgcgttcgtgtgtgtgctgtctgttgtgtttctttttttctttttttaatttctctgtgaggatgaacaaattaacttgccttccataacgtataaaaggtagaagaaaaaccggtgtagactagagaggaaaaattctagggtttgagtttcacagtgagagaagctcgtggtgtcgtggattccatttccagctagaaattagaatggggaaaaaccagaagacaggggtaggaagagcgttggtgaagcagcacaatcaacagagcaaggaaaatgggcgtttacagaagaagaatgttctcgaatcgttcacagagatcagcgacatcgatgccataatcgaacaagctgaacaccctcaacaacccctcttctccatccctcagcgccccatcaatctggatctgagctctagcattggcaaaaatgaaatgacacttgaagaaatgaggaaacagccgaggagggaaaagcctttgcatgcgttaattatttccaacaaactgaccgtttgtgggtgtgcatacatggctgtcgcggagctctcatgaccaagaaagacaagctttcttaatttggcgtcgcatacagacaagacttgaggaaaatgagaatcttgtcctaaccccgtttgagaaaaatcttgatatttggagacaactctggcgggttgttgagcgcagtgatttgctcgttatggttgttgattcccgagatccactattctatcgctgtcctgatcttgaggcatatgcacgagaggtggatccgcataaacgcacattgctcttggttaataaggcagatcttttacccgcttctgtcagattagagaaatgggtagagtattttcatgctcataatattctatatatcttctggtcagctaaagctgcttcagcagctgttgaaggtaaaatgtttaggtcaccattggaagctgatgattcagggaagaacaataatccagacacgaagatatatgacagggatgagcttcttgcacggatgcagtcagaggcagaaaagatagtagagatgaggagaaattctagctctgacacagggccatctaacattcaatcttctggtgaaaatgttggtggtagttcctcatcaaataatgtaattgtgggatttgtcgggtatcctaatgttggcaaaagttcaactattaatgctctggttggtaaaaaaaggacaggtgtcacctctactccagggaagacaaagcatttccaaacattaattatttctgacaaactgaccgtttgtgactgtcctggattagtttttccatctttctcaagctcaaggtataagatgattgcttgtggagtgttgcctatagataggatgactgaacacagggaggctgtccaagttgtagctgataaagttccaagacatgtcattgaggagatttataagatctaaacctaacatatgtacccccaatcacgcccccctctggcatctgaacttttgagagcatattgtgcttctcgcaggtatgttaccgctagtggactgcctgatgaaactagagctgctcgccagatactgaaagattacattgatgggaagctgcctcaccatgaaatgcccccaggaatgtcaaatgtggaaccagacccagttaacttgcatggctctgtttcatatggtactgaagatgttgacagcaaagttgcacctgattttgagcaagtgttggatgacctcaattcatttgacttggctaatggacttgtttcaaatgaagttacaatcaagaagtctgatgcatctcataatcaccataagaaacctcaggggaaaaaagatcgttctcagagaacagagaataatgatgctgacgggatgccagttgtaaagttccttagaaaccattaaacacaagtcatgtgaaggtctaatatgttcatacccctcggatatctgtacagcagacaacacctgatctgtgagcccagtatgtacattgttagtcaaagactgaataagttaaagttatatatatactttgtaatgcattgtagaactaagtagacaatcacgatgagtataacacaaaagtattttgtatttacagtgatgaggtatttttattattaatctatgtaatataagctaattttgtatgcatatctgcaatacttttgcataggatacagcattattaatctatctactctctttatgggacagagactatgtttcttgagtcctcaattaaataattcgatcacttttttaataaaaaaatgattcaatcacttaaaaacctccctcctaactaagtaggcatggaggatatgaagaaacctaatgctttatgggaaaaa

SEQ ID NO: 122660 - DNA, 726 bp, Glycine max
  Clone ID: PAT_MRT3847_81769C.1
ggagagcatacatgtctgtcgaggagcttgatgacaatgaaagacaagctttcttaatttggcgtcgcagactggcaagacttgaggaaaatgagaatcttgtcctaaccccgtttgagaaaaatcttgatatttggagacaactctggcgggttgttgagcgcagtgatttgctcgttatggttgttgattcccgagatccactattctatcgctgtcctgatcttgaggcatatgcacgagaggtggatgaccataaacgcacattgctcttggttaataaggcagatcttttacccgcttctgtcaggtttaaactttttgtatatggtttattgttatattccgttaaatcaacactcttggttttccatccagctaatattcttatcatttgtcttctcccctgcccttttttcttgcagagagaaatgggtagagtatttttgtgctcataatattctatatatcttctggtcagctaaagctgcttcagcagctgttgaaggtaaaatgcttaggtcaccattggaagctgatgattcagggaagaacaataatccagacacgaagatatatgacagggatgagcttcttgcacggatgcagtcagaggcagaaaagatagtagagatgaggagaaattctagctctgacacagggccgtctaacattcaatcttctggtgaaaatgttggtggtagttcctcatcaaataatgtaatt

SEQ ID NO: 122661 - DNA, 832 bp, Glycine max
  Clone ID: PAT_MRT3847_8176C.1
gaacaaagttatgcctgaatagacactcctgctgtttgctattaggccaaggatggcaatatgtaagaaagatgtttggagagttgaatgtcgaatcccttttggatttccgctcacagttgtttgcaataacctttttcatgagatgctcattatatatagctattaaaaattactgcgccaggctaaagctccaagtatgtttttacaatccttcaaaaattttgtttctttgtgtgtgtatggtgatgataacttaattagtgttcatgaatatgtcaagccttactttagtggttctaaattgaaaagctttctagctggtcataatatcaccattactgatggtattgacaaaactagtgcaactttgcaatttagaaagttagcagattgtgattttctcaagagaaactttaagcagatgtctaatgttttgtgggtggctcctgaggacaaggcgagtttatggtcacaacttcattatgtatcgtgtaataatctggaaatgcaagaagcttatcttgtcaatctcgtaaatgtgttacgagaattgtatttgcacagtccagatgaagctcgccaattgagaaggaaagctctctctcgtattgcatggctgcaataagctgatgtgcctaccatagcacagattgaagatgtccattcgatgcagatgatgatgaatgctcctgattcagatgataatatcgatctactgctgagcattgacttgttggtttacaacgagcatgtacagctttgcgaacaagatcgttatgatgatcaacttgtgttggttacacacaacattctttgactgaaatttcca

SEQ ID NO: 122662 - DNA, 208 bp, Glycine max
  unsure (1)..(208): unsure at all n locations
  Clone ID: PAT_MRT3847_81770C.1
gatgnggttgnccnatgtgcaaactgggtngggngtttcttcaggaaganggtgtctgtttcacactgtnagcanaattgtctatcatagaaattgaaaatantgtctcactctgngtaaagtgttgtgggtgtattgtgnatacggttnanacactgcgttcttcaaaaaangtgnnttgtgtntttgnataattacttctnncttc

SEQ ID NO: 122663 - DNA, 302 bp, Glycine max
  Clone ID: PAT_MRT3847_81771C.1
gaatagacagtacgggggggggaggcaaatcaggaggcaatgaagctacttcctaccctggtggataatgtgggattatggagcagcgtgaagaacacattagcagattactgcacacatggcttactcaaactagaaacgtgaatacggtttaccaaagctagggactggagtattgccaattcccataaaatgtaaaatgatagtcttaactgggaaggtgtgataatggagattgactatgtccttaagggggaggtccttgattctgcaattattaactacccttgtttgctacatgc

SEQ ID NO: 122664 - DNA, 842 bp, Glycine max
  Clone ID: PAT_MRT3847_81772C.1
atttcaactgtcgcggaggtcggtgatggggttgaaggagaagcgactaccccagcgtcgtgctacgcgactttcgattgccactgcggaggacgatgccgtcattgaaggaggagcagtcaccgccgcgccgccgttgaagttccatcgcggaggatgatgatggggttgaaagaggaggaatcaccgtcgtgctgctatttaatttcgccgcatcgcgccactcgaatccagatttgactctcaccccttcttcgaaaccgaaccaccccactcaattgaaggctgtctcaatatctatggcatcaaatcaacgcccaacacacccttctctgaatctcaatgttgttgcaaacaaggaaccccctcctaaacacccaattgaagtcattgccagaatccgtgagagcataaattattttcaaaatgggtttcttttaattcttcattttcaaatcttgaatagtgttgttattggctagttgttgtatctttgattgtcccacgttttcgaaaggattaggaaggggatgaggacatttttggaacaaaatgtcattaaaaacccatgtgccagtgacatgagagcttctgtcaacagagtcatcaaatgaaacaacatttgatggtgaggggtagttgctgttatgatagccaataaagtagggagatttttgttgggcgaaaaaaggacaagggattagtataattaacttgtgtagtggcaattcatgcatttataatctcactcaggatcatgtatcaatcaatataattgttctcacacaattcagcaaaaaaaaaaaaaaaaaaaaaaaaaaaaaagcggccgctctagagga

SEQ ID NO: 122665 - DNA, 483 bp, Glycine max
  Clone ID: PAT_MRT3847_81773C.1
gtcaagctaatgacgttaaagaagcgcttattgggaagcaacccatgatttcttaccctatctctcttttagttaattgatttgcgtgtttttttatgataattgtgttatttcttttctttattttattttgattttgtgcagttaaattcactagtttaattttattcattgaataaaaattgcatgatatagacatatgaaattagtaataggctatgacttgttcttgatgaattgatgaatgagatatactgtatactgatgagatgattatgaaaattctgatttttgtgtgagcaggcgttattgtgagtgatgaagtatgaatcgaaagcacaagagtgaagatgttagcgtgtctgaacgaaaatcatggtatggtaagccaagtacttcataaatgtccagcgagttgtgagaacatttgattgtgagagaactattgttcttaattttctgattttgcatgattcttagact

SEQ ID NO: 122666 - DNA, 287 bp, Glycine max
  Clone ID: PAT_MRT3847_81774C.1
aaaggaatgggggctttataatagcaagcaagaaggcctagatgacaacgtgcgacgccggatgtattggatggaatagaaatataacatgaaacatggcaccaagcaaaacagcttgggtcaaagacaaaaaaggacaaggctagcacggcaacttgccaaacagagacgcacggcatgctatgctgtaaagcttgacggaccccgaatttcacatacaggtcaaagtcagggagaagacgatggttatctggtacgggacgccaacataggataagatgaggggg

SEQ ID NO: 122667 - DNA, 206 bp, Glycine max
  Clone ID: PAT_MRT3847_81775C.1
actcatttcctggtcataggatgagtaagagagcagcttctattaaggttaaggctatgaatgtggcagaggttactagtaatgcacttgccttgtttcatagatatgcatctaggtgtcggcaagcagaagctagaaccacaaagccctagctagttagaagctaatataagctatagcttattactacccgttgttattcatgt

SEQ ID NO: 122668 - DNA, 236 bp, Glycine max
  Clone ID: PAT_MRT3847_81776C.1
cccacaaaattttaacaattaacacatgcataaccatgaacatgagaaggagcaaatccccttgaatacgtgttcaagttacatacaaatacgaatatgatgaccagacataatacaattggtaacaaatcactccaaaagtatgaagaatctagaaagacgaaatcaatcacgaacctgtttatgaattcacaccagaaaatgtcgaaaaagcttcaactgtagaagaaaaactt

SEQ ID NO: 122669 - DNA, 243 bp, Glycine max
  Clone ID: PAT_MRT3847_81777C.1
attactcttctattctctttcactttcatatttctattttccatcaacttatcagtcatgtaggatggggtagccatttagtattggctgggttgatatgaacgaacacatatcctttgtagtgtaagccatgtctgttgacactattctcgctgctgctaaatctctcattttcttcttcattcttactggatctttgctgactgacatcaataattcattggccccaaaattgaccccaat

SEQ ID NO: 122670 - DNA, 438 bp, Glycine max
  Clone ID: PAT_MRT3847_81778C.1
ggctcgagggtttacgtatgcttgcttgttgggtggcagatccaaacggagatgctactcaagaatcatcttgcacgggatccagattacttatgggcttatgaagatggcatgaccatgcacagttttggtagaccagaatgcgatgctggctttgctgctcaagctgtgcttgccactaacataattgaagaaattggtcctacgattgcacaaggacacgataccatctagaagtctcaggatactgattatccacatggagattataatagtatgcatctgcatatttctaaagggaccttgactttctctgatcaagaacatggatggcacgtttcagattgcactgcctaacgttgaaagtgctgccttcttctatgactgctgccacctgagaatgcgggatataagatggaacctgatagattatacgat

SEQ ID NO: 122671 - DNA, 522 bp, Glycine max
  Clone ID: PAT_MRT3847_81779C.1
catgttttatgagatgttgtgggacacagtttgtaaatacaagaatgatgctgggttcggctcagtcaagagtgttaatgcaacgaagattagttacactctaagcactgacccaacagcaattcctcgcacacttgcaatactggatcatttgttgagtgaggagatgaccaagaagagtcattttgacacaattggctctgctgtcactgggtattccttttctcttgcaggcatagctgatggatttaggaagaggtatttaaaggactacacacagcataatatagccgttttacaacaggctaaagcacagttgatggaatttgattgcaacaaagttgacatcaacaacctgcacaatgttgagggcataggcattttaaatgcagtccaactacagagcaagcatgaggtgagtaaatttttgcagctcaaaggaaagtgggatgggaagaaattcatgaatgatgctgtcgtggctatctttactttagtgggccgtgggtggatgttatggga

SEQ ID NO: 122672 - DNA, 1040 bp, Glycine max
  Clone ID: PAT_MRT3847_8177C.1
ggggacccacgcgcgcgttttgcgtgcgcaccattactgatggtattgacgaaactagtgcgactttgccactgagaaagtcagcagattgtgattttctcaagagaaactctaagcagatgcctaatgttttgtggctggctcctgtggacacggcgagtctatggtcacaacttcattatgtttcgtgtcataatctggaaatgcaagaagcttatcttggcaatctcggaaatgtgttacgagaattgtatttgcacagtccagaggaagctcgccacttgagacggaaagctctctctcgccttgaatggctgcaacaagctgatgtgcctaccatagcacagattgaagagttccattcgatgcagaggatgatgaatgctcctgattcaactgataatatcgatctactgttgagcattgatttgctgggtttacaaggagcaggtgaagctcttccaaacaagattgtttttgatgataagcttgtgttggctaacacacaagagttctttgacggacattatccagtggattcttggttaccaatttttgcgaattgactttatcctgtgagtcagattaccttcagaagctgtcgttgctaatgatacatgtggtagaggacgggatggtttacccaccactgtttggattagctctgcagttaccaatcgctcctcagatatcaacaaatggattcgcacagcacttgggaaaggtaagaaaattgttattcttactagagtcgatccttctccattggctgtactggctgtgctttttggcgataagaatgaaattgtgagttctaacgcgactaatcctatgctgacgcgacttcttgagaactgtaagaggctcaaatatctggttgatgagtgtccttttgcatttgtgaactaagatggaatattttattcactaaaataaagcgcattactatgtgcaatgcgtgtgtttgattttacggtgctggttcacatcttcagaagattttcctgataaggaagatctagaaaaacccatatagattg

SEQ ID NO: 122673 - DNA, 169 bp, Glycine max
  Clone ID: PAT_MRT3847_81780C.1
tgactcgctatctccttttacacctaagtactgcaagtccagacattatgaacttgtgacggaaggaacttcgtatctgatgatagttggatactaatctgacaagacttcttttgtttctatatctggctgggatgaagacatcactagggacacgttctctaacctt

SEQ ID NO: 122674 - DNA, 637 bp, Glycine max
  unsure (1)..(637): unsure at all n locations
  Clone ID: PAT_MRT3847_81781C.1
tccactatcaacaacactctcaaccaagaacaaagaattacatcataactttcccagcaancctcaccttagattttatcccaagtgccaatgaagccgttgcaactaccattaaaataatcaaggttaggtccttgcaagcatcccacataaacatttgtaaaagacatgaaaaacaaaaaggtgactannntatcccccaatgacaaacaagaaacttatatatggtacaatcattaagctcttaatgtctaaaattaccagaaaatttcttcctttcttccaaggatgattgttggaaccaaatgcattccttcattttagtaagtcgacataatcaccatgaatacccttcacaggattggttttcaacaaatttgatagtcctacaacctaataacgattcnnnagaaacacttgaaaattatgacactaaacaatatcattaccaagttaagagaatatattattggcaaacatagccttccatattattgcnnngcagtagtgtcatgttcccttgaaattgaagcaagttgctcttgtccaattggaaattcacaagcaatggggacctggggatcggaggaggtttaataggttctaacaatttaatgcattaccaattaatatttat

SEQ ID NO: 122675 - DNA, 371 bp, Glycine max
  Clone ID: PAT_MRT3847_81782C.1
acctcacccgatttatataaactaggaagcctggatcaaacaatttgtcagtttaccacaggcttacatgacacgaaaagatataataccaaactttccaaacgtataccatttatttacacaaaatattgctctttcacggtagcacaacacatttcctgtcagttgccaataaagaaacaaacgattacctaacgcaaaaacaacctcctaaaccttaacaagaataaatgacatacgaattaccttgctaagaatactaccaagactatagtaaaacggtcaccccctacttatgcacccatattgaggtgtttgaacatcctaagatgtacataaatgttaattccacgctcagatactaaatccac

SEQ ID NO: 122676 - DNA, 473 bp, Glycine max
  Clone ID: PAT_MRT3847_81783C.1
aataaaagagaaagagagagaaaaattgtcttcttgaaacaaaagttcaaaattttcctttctttcattttctctttaattcaactttcaaatttttatcttttctcttattttctttccaccttaacaaatggatcctttattacttccctcaattttcttttaccataccaaaacatacgattaggttctttcaatactattctaaatagacgtaagaaactgcatattgtaaaagaagaaaaaagggaaattgagaattgagaattgagaagctaacacgtggaagagatgagggagagagcttcggatcggcgccaacaagactggacccagaaatcggagacggagaaggatttgagagcgtcagaaacagagggaagccactctctgatgaagtttatgtcggtgaggtagaaatcgtcggcctcgtcctccacgtcttctaaggagacgccgctgagggcgcggtc

SEQ ID NO: 122677 - DNA, 348 bp, Glycine max
  Clone ID: PAT_MRT3847_81784C.1
aaaaaaataagggcctacatgaactggttcccaatatatttatgggaatggggaaattaaccaggggcacatgtttgcaaaaaatattcccaaaaacccccttaatttattgaaaaaagcccattggttgggacaagcaaatgccctaaaccccattccatactttggggaacaccaaaccccttaaatacaagggccaacttttcttttaactgggggcattttaaaagcccttgaaaatttcgccaattgaaatccggaagggaagaacttccccgggggggtataacctttggtccagaccccaaggactattggagggcccttacaaacccctccaaaattttt

SEQ ID NO: 122678 - DNA, 989 bp, Glycine max
  unsure (1)..(989): unsure at all n locations
  Clone ID: PAT_MRT3847_81785C.1
gtgagtggcaggatgggcgctacggctgcgagaagacgacagaaggggacacacataaacaatagaattgacccttgtgtgttgtctctctgagattgtggtgagtagcataatggaggcaccgaagctgaaggtagtgacactgaaagccatcgaagcaactccgtcaaccttcaaagagttcggtcaggtcgtggaggcttcgcgagacggccaggaattcggtccccacgatgctcaactcgacctttcccaaggaactccaaggttctacattatcaagcttgaaaaatgcccgcttaagttttctagtattacacatcatgcaatcgtgactcagtgcctcgggtctatcggtggtcatgtttggtatcttggagtggccaagtcatctgttgttgattcaaatgagatcaaggatgacacaggcaagaagattgtgcagtcacgttctggtcattcatatgtgcctccagccattgaggatgtccaagttttcaagatttcaggttccaaatttcttaagcttaaccggggaacatggcacgccggccctctatttaaggctgctgcaatggacttttacaatctagaactgagcaacacaaatgagactgatcataccacacactactttaagaaggacgatggagtgatgtttgtaattgacgattaacttcataattttatctagtttccagcatttcaactgattctgcatgttatattataccattaacactttgtttggtttgagtgacttagcagggagtgatttaagttggaaggatttaggagagatataaatcatttcccttgttgtttgtgtgaaattacgaaggataaattacaaaaatccgttatttgggacggaaattgaagagtgcgatatgcattattttgttttcaaaaaaaaaaaaatagtagaaaaatctatttaacctgaaaactaaaaataaacaaggnngtcactagttgacgtataaagg

SEQ ID NO: 122679 - DNA, 490 bp, Glycine max
  unsure (1)..(490): unsure at all n locations
  Clone ID: PAT_MRT3847_81786C.1
accagctgcgcggaccgcgggtcccttgggccaatccgtggacttgagcccgtttacccacccctacactgaactccgcaagatagtggctccaaaggggtaaatgttcaacattgatgtgtcaaagctaggagatttaaaggacaaaaataggaataatttggggattaaaattttcataaaaatcatgtgatttaaaaaataaacgggattaacatcatttacaatgaacatgatacaagtgtaacaaggccataaaagttaaaaaaaaaatatgtatatataattagtacacatctcaaaaaagatttccatgatttgttactaagaaaatcaaatgtcccaataaagacgaaaacatagtagttttaaacaaacaagaaaaatactttttaagttaattactgaatctaatagatatgaaattaaaattaagaagtactttntttttaaaaggccaaaagaattattttattaaagtaaccatagc

SEQ ID NO: 122680 - DNA, 492 bp, Glycine max
  Clone ID: PAT_MRT3847_81787C.1
cgtaaactggacttatacttagaaacaaagaaggtgataacgggcagagttgtgcattgactatgcccacaggaaagaaagccggagagtccattaaggaaacagctactctgattggtgatgatgccaaggctggcagggggaagattaaggccatttgtaaagagaggtcagagagaatgacagcttgtgatatcggtgcaaaaggagctgccgacccagaagacagtggcagagatgaaccatgtgatgctgcacaagcacgctgtgcgtcagcctaacacgatggcacaacagtctgtcactacggctgcgctcatggctcatgggcatcacactaccgataccgcaactggagcccccaggtattgcaccaccgacgaatatgggcataccatgtggacccacctctcgtcatcaaagtctggccatagaatagtacaacccaagggacatgtcaccgaaagagtggtggtctcacatgccattgga

SEQ ID NO: 122681 - DNA, 273 bp, Glycine max
  Clone ID: PAT_MRT3847_81788C.1
tcgtccacgcgtccgaccacgcgtacattctggtgttaaaagaccacagaatgtggcagctgaggagcaatttattttccgatcagaaaattttaatcatgttgatgcaagcgtacctggattatcaccttctttgttaaatctaaagtaaccaccttacttaccccctttttatctgccacgacggcgatgtttgggcttaaaacgcccactttcctcagggaacgcttttagattcggcgatcccttagagtggttaatattttcttgtgc

SEQ ID NO: 122682 - DNA, 420 bp, Glycine max
  Clone ID: PAT_MRT3847_81789C.1
gggagtgatttatcttcttttttgtttcatcctaattcaatcattcaaacacactttttttttaagccgcccgcactcccacataaaaaatggcaaaaaaagccaaacattaaaaagctgggggggggggtttattttgcccaaaaaaggaaagggggaaaagggcccttttttgacccggcgggggacctcaacaatatttaaaaaaggcctaagctttataccacaagcagggcctccaaggctctacaatagagtatgatggggggacagacggtgtgtacaaaaccttcctgtgttgaaaaaaaaaactccccttttaatgtttgggggttgctttagggcaaaccaaaattttccacccaattttgaggcccccaaacccaaaaaaaataccctccaaataccccctacccccct

SEQ ID NO: 122683 - DNA, 650 bp, Glycine max
  Clone ID: PAT_MRT3847_8178C.1
tgctggccccttgactcttgccaaggatcttttgttagatggttcttagggaccttttttcattctaaatgcagatatcatttgtgactatccactgaaagagactttcatatagaacgtggttgagaggcttttatgttggtgactcaagctgttgaaccttctaaatacgacgtagctgttatgaaccatatcactggactggttcagagttttcaagagaaaccgtaacaattgttggtaacaaagtggagtctacttgatgaacccctcggtattggatagaattgagttgacacccacttctttgaagacagaggtgtttccaaatattgtttctgatagaaagctgtatgcaatggtctttccacaggaaggattttagatggaaattggacaaagggactatatttctggaatgagactctacctgaactggctgaggaataattctcttagtgaactggccaatgaccctcatacatactgtgggaaatgtggttgtgcatgagactgccaaattggtgatgcatgtcaaattggtccatcctggatgtatcattgagaaaggagttgggctcaaatcttacactgttatgtgaagcactcgtgttaaaaagcattttgttatatctgacaatgtgatttgt

SEQ ID NO: 122684 - DNA, 380 bp, Glycine max
  Clone ID: PAT_MRT3847_81790C.1
cgggggcaacgggagtatttggggcgctcctacctattcctcaattacaatgaggaaatcagacctacgtagttctttcataactaaacgttgggtaagttggtttgatctttttccgcaagatcgatttaaatcgaacaaaagtcatttaaggggttggaccattaaacgatcttttgatattttttgaaaggagagaaactttaaggggttggaccattaactatctcttggggtgaaagaagagaaacgttaaggcattggaccattaacgatctcttggttttttggaaggagagagacattaaggcgttggaccattaatgatctcttggggtgaccgacaaaagcggggcttttgcttctacttatcctcaatt

SEQ ID NO: 122685 - DNA, 1294 bp, Glycine max
  Clone ID: PAT_MRT3847_81791C.1
gaaaaagaaaaatacttataaaaagaatcaaacagctacaacttgaactgttcataacccacaccaaaagttccaaaccccaacccgaaaaatcacacacaccccctttggaattgggatccatcgccatatctctgattaggttagataagattccctatgggcacttccattctcgacgccctgaacgtccgcgtggaaggttccggcgataagtaccttttcctggcccacggcttcggcacagaccaatccgcgtggcagcgcgtgctcccttacttcacccgcaactacagcgtcattctctacgacctcgtctgcgccggcagcgtcaaccccgaccacttcgactaccgccgctacaccaccctcgacgcctacgtcgacgacctcctcaacatcctcgacgccctccgcgtcccccgctgcgtctacgtcggccactccatctccgccatgatcggcatgctggcctccatccgccgccccgacctcttctccaaactcatcctcataggcgcctcccctagattcctgaatgacaaggactaccacgggggatttgagcagggagagatcgagcaggtgttttcggcaatggaggcgaactacgaggcctgggtgaacggattcgcgccgctgtcggtgggagcggatgttcccgcggcggtgcgggagttttcccggacgctgttcaacatgaggccggacatctcgctgttcgtgtcgcggacggtgttccacagcgacctgagggggattctgggtctggttaacgtcccctgttgtattatgcagacggcacgtgacatgtccgtgcctgccagcgtggcgacctacatgaaggaccacatcggcggaaagagcagcatccagtggctggacacggagggccacctcccgcacttgagtgctccttcatacctggctcgccagcttgagattgcgctttcccagtagcgcgtggggaggcgcgtgctagtcctggcgcgtgggtctgcttgttaatttaagtaatttaactctactagtactagtactaccagtataggagaagaataggcagggtcctagaaaaacaagtgtacgaaaggctctgaaagtggacacctggtaaataacgtgtgggtgttgcttcttagactttgggatttttatttaaggatcagaatctgcacgtggatttcacgtgatgcctggccatttttagtattcttgtgcttctctcctctgtttcttagtgtgatgggtgttattattaatattattacagaaggtcttggttttgttgttg

SEQ ID NO: 122686 - DNA, 2737 bp, Glycine max
  Clone ID: PAT_MRT3847_81792C.1
atatacaaattttatgtttttgtcgatattttgtttgaacgaccctttggtaattggatcttcaagaaagagagacccttgggatttcgtcaccatgagtctcttcggtcttggaaacagaaaccaaaaaacatttcgtccaaaaatagagcgctccatctggaagtaagggtgctcaacttcaaaaacacatcgatgccacgtcctcagtccgaatccaaccgactcaaatctcaccgggggggtgagaaagaaaaatattaaataaaaccgccacaaatttctccatagttatgggcacttccattctcgacgccctgaacgttcgcgtggaaggttccggcggacaagtaccttgtcctggcccacggcttcggcacggaccaatccgcgtggcagcgcgtgctcccttacttcacccggcaactacaagcgtcattctctacgacctcgtctgcgccggcagcgtcaaccccggaccacttcgactaccgccgttataccaccctcgacgccttcgtcggtgacactcctcaacatcctcgacgccctccgcgttccccgctgcgccaagatcggccactccatctacaccatgggccgcctgctcacaagcgtacatcgcgtttatttctgttacaaaatccttcacgcctgcgctcaccccttcagccagcgccatgaagactaacagggatgccaaggcgatggagaattacgtagacggagagcggcaggggcgtttcgccgagagaacctggtctgttcggtggactgtttaggggcacgtggacatgagcggacgctggctggatggaggtacgcggtgaacattaacaatggcacatgaaactgcgcacgatcgagtggcctatggggtacatcatctagctcagaggggtgggccgaaccctgatgatccgctgctgctatagtaggcagacggcgcgcgctatcgcctgtgtcgaccaccgtggcttcctccctgaggaactccatcgcctcaacgaacctcatccgatagacccggacacgtaggggcaattccctccaccttagtgctccttcttgcctagctcgctagctaaagattgcgctctcgcagtagcgcgtgtaagtctaggcgcgtggctctggtggttaattaagtaattaactctactagtactattactaccagattaggctagaagctactgctacagaacaacaacaacaacaacaacaagtgtacgaaaggctccgaaactggacacctggcgaataacgtgtgggtgttggttctttgactgggatttttatttaaggataagaatctgcacgtggatttcacgtgatgcgtggccatttttagtattattaatcaactattattgctcttgtgcttctctccttttaaaggaaagaaaaaaaaaagagaagaaattagagagacttgtttgttagtgtgattgtttgtttttattaatattattattattattatcataggttttgttgttgcttgcttgtgtttctcctttctggtttggtttgttgcttacttgcactgatgaggccagacaactgaaaagaaaatgaaatgattttcaatttgggtagtgggaacttgagggaggctgttaaactgcctcccggtgaagatattaatgaatggctagctgtaaacaccgtggacttctttaatcaagtgaatatcctgtttggtactcttacagaattctgcacgccaagtaactgcccttcaatgactgcaggaccaaagtatgagtatcgatgggctgatggtgttactataaagaaaccaatagaggtgtctgctccaaaatatgttgagtatttgatggactggattgaatctcagctagatgatgaaacgattttccctcaaagattgggggctccctttccaaccaatttccgagatgttgtcaagacaattttcaagcgattattccgtgtatatgctcacatttaccactcacattttcagaaaatagtgagtttgaaggaagaagctcaccttaatacttgcttcaagcattttgttttatttacttgggaattccgtttgatcgacaaagcagagttggcacctcttgaggaccttgttgaatctattgttcagttatagtgctgttggtgttttctttccctgatttttaggagagattaaacattggaaatgttggctatacatttttgtgaccccttgtaaaatacttgctaaatgaaaaatctttatcaaccccttatgtatttggctcttaattgttgtgatggttgctcaataacaataataatcgtgtgaatctagcgaaaacatccttgtgaggcaagggaaataatagatgtgcttggtaatttatgtaatttaactctactagtactagtactaccagtataggagaagaataggcagggtcctagaaaaacaagtgtacgaaaggctctgaaagtggacacctggtaaataacgtgtgggtgttgcttcttagactttgggatttttatttaaggatcagaatctgcacgtggatttcacgtgatgcctggccatttttagtattcttgtgcttctctcctctgtttcttagtgtgattgggtgttattattaatattattacagaaggtcttggttttgttgttggtttctggctgttacttacttacactgatgatgcgagacaactgaaaagaaaagaaaagaaatgaaaaatggttttcaattattta

SEQ ID NO: 122687 - DNA, 297 bp, Glycine max
  Clone ID: PAT_MRT3847_81793C.1
gggggggacaaatgccaactttgattgaaaaaagtaacatatttaagttctggccaatactcattcctctccggtatcaatgtacacaaataagatcattagtcaaaccatttaaacattttgcaaaattaaatcttaaattatacaataaaaaattttttaagttgaatttcaattttcagaccaaacctttgtgctcattggaagcatcatgatacaccttatgctttttctccggcacaggcggaagcttcaccggtttcccaaccctgacaacaagaccaccagcaccgttac

SEQ ID NO: 122688 - DNA, 439 bp, Glycine max
  Clone ID: PAT_MRT3847_81794C.1
cctcgtgccgaattcggcacgaggtgttggaggttacatggcctaccaaagtcatgaagctaaacaacaagataattctcctttgaaactcaagattcgagttatcagtgctagcagtttacaagctgctgatagaggaggaaccagtgacccttttgttcactttaaacaaggacacatgggtgtgaaaaccactgtcaagaacaaggaactcaatcccgtctggaatgaagatctccaatttggtatttacgaaaaagacgcccaaactggaacattatctattgaagtattagataaagacatgctttctgacgattgcattggtacatataaagtctcattgagcgaagttcctcacaaccaaccaagagaatatgacgtccatcttactggtggtcaatctggaaaacctcaaaacggtcgattaaagttttct

SEQ ID NO: 122689 - DNA, 459 bp, Glycine max
  Clone ID: PAT_MRT3847_81795C.1
gtcttctaaattctatatataaggtccagcctttgtagaggagccaatctcactcctcgtctgcgtgaccacgcacctagaaactcctatcaaagcccctatcccatcagggagactgacaagaacatatcaccaaacacgcacacttcacaaaccacctagcctcgactctcattccgattccagttcgactagcatttcggaaacaatcatattgactactatagagcaggacgtcactgacaaaacttctgcacatgataacgttgccaatgcttaagttgatcaatactaccatatgttcgcatgaaagccctgagctggtgcatacgtctcaccaagacctctacacactcgagcgtcctgagcacaatggcataatgggtattacataccacaatgctcgatatcaacaagaaaacactatcatcgctatatggggaactcactgcagagatc

SEQ ID NO: 122690 - DNA, 411 bp, Glycine max
  Clone ID: PAT_MRT3847_81796C.1
gagaagacgacagacgggaagctcatgttgatcacatgtgttggagtatccttgcaaggctaaaacaccctaatgcgccaccgacaatatcatctcggtaagagcgatagtgtcaggttgcccattgtgtgacaattcattgactacatggactcacataggctacattcacaatgttttccaaaatggtaccacatgtatacgagtctatgagtccaatgtgcatcacatttcgtgtgtgactttatgtatggaatgtttgatttggataagacatgcttatgttgtgagatgtaactatttataaatgtatcctatatttttatgaattccttaatattttaaatttattgggagatgtatctcacccccatctgtttgtcttgtttgtgtttgggttgaatgtcactc

SEQ ID NO: 122691 - DNA, 1919 bp, Glycine max
  Clone ID: PAT_MRT3847_81797C.1
gagagtgggtcagagagagaccgtgaggcagagtgtgggtgagcgtcagcgtgcgcaggtgtgcgggtgtcccggatttattccgcgtctataagctttcttgttttgctattgcttgctccgcaatcataatttcatcatcgaatcaaatcaattttgaaggttcattataatggcggaagagataaccaagaacgacgtcggagtaacctccaaaaccaccagaagcagctccaggttctggcctcgttggattcccacttccaccgatcacatcatcgctgccgagaagcgccttctttccgtcgtcaagactggttatgttcaagagcatgttaacattggctctggtcctcctggctccaaagtgaggtggttccgttcatccagcaacgagccgcggtttattaacaccgttacatttgacagtaaaccccattctccaacgcttgtcatgattcatggttatgctgcttcacaggggttcttttttcgcaattttgacgcgcttgcgtctcgatttagagtcattgctgttgatcaacttggatggggtggatcgagcagacctgatttcacatgcaaaagcactgaagaaactgaggcatggtttattgattcttttgaggaatggagaaaagccaaaaacttgagcaattttatactgctcggacattcttttggtggttatgttgctgccaaatatgcgctcaagcaccctgagcatgtacaacacttgattctggttggatctgctggattttcatctgaatcagatgcaaagtctgagtggataacaaggtttcgagcaacatggaagggggcagttttgaaccatctttgggaatcaaatttcacacctcagaaacttgtcaggggtttaggtccttggggtcccaacatagtccgcaagtatacaagtgctaggtttggtacacattcaactggggaaatactgactgaagaggaatcaacattgctgacagactatgtttaccacacattggcggccaaagctagtggagagctgtgcttaaaatatattttttcatttggagcatttgctaggatgccccttcttctcagtgcctcagagtggaaggtgcccaccactttcatgtatggtttccaagactggatgaattatcaaggtgcccaagaagctcgcaagcatatgaaggttccatgcgaaatcatcaggattcctcagggtgggcactttgcgttcattgacaacccaactgccttccattcagctgttttttatgcttgtcgaaggtttcttacacctgatccagacaatgaatctcttcctaaagggctaacctctgcataggttaggtcttaattttgtgctattcctgtctatatgtattttaatatttttttttactaattaaatttcataattgaatgaaatcatatgtatattgtttcagtaaagtggaatttactgaaaatatttgtaatagcaacttcaacaaaaatcgatttgtaggagaaatttcttccctggaaaaagttctattttaaatcttgttgctcataagataatatgacttcgaggtattaccacccacctaaagaagactctctcacaacagtgcccctcttaatggctccctaacagatagcccaccggatacttcttctgaaattgactattccaagtttaaccggtccaacaacaaccacaactctgtcaacatgataggaaggaaaagaagaaggaggaaaccagggcccacaatgctcagcttcacgcggcggttttcgttgccggtgttgccgccaatttggtcggcatcgccgccggcacggtcacctcttctgcctccaggaaggactctcagatggcgaagaccgacatggcgatggtgtccccggcgacaactggggccgcccacagtgtggaggct

SEQ ID NO: 122692 - DNA, 131 bp, Glycine max
  Clone ID: PAT_MRT3847_81798C.1
gcttcttgaggggtgcaaatatctcagtaatgggtgggattatttctgtatctgggggccaggtactcacactctctcaatcaaatgtaccaaattaagaatctgatactcttaacgaaatcgtctgcaca

SEQ ID NO: 122693 - DNA, 419 bp, Glycine max
  Clone ID: PAT_MRT3847_81799C.1
cccaggggggacatcgagttcttggttccacaaatggaaaataattttccaatgtctttcgaactccattggctcaaatctttttcaaaaatctcaagtccgattccccaaacttggggataattccgccgggtttcccaacaactggagggcttttcaacatatcgggggggatcactcgatgcaatgatcggttgaaggatatccatggcattgggttttcaaagctcatacattcctcccaaataatttcaataaaaataaatggaggggtagtaccatgccaataggaatgccaatcgaggaaaatttccccttttctccaaatttgctcaaacccccggcaataggaatcccggcaatttcaatcccgcttccaaacacattttttttatttgatccccgagggccccttttcc

SEQ ID NO: 122694 - DNA, 1272 bp, Glycine max
  Clone ID: PAT_MRT3847_8179C.1
acaatccttcagaaattttgtttctttgtgcgcgcatggcgatgataacttaattactgttcatgaatatgtcaagccttactttaatggttctaaattgaaaagctttctatctggtcataatattaccattactgatggtattgacaaaactagtgcaactttacaatttagaaagttagcatattgtgattttctcaatagaaactttaatcacatgactaatgttttgtggctggctcctgacgacaacgccagtttatggtcacagcttcattatgtttcctgtaataatctggaaatgcaagaagcttatcttgtcaatctcgtaaatgtgctacgagaattgtatctgcacactccagacgaagctcgccaattgataaggaaagctctctctcgtattgaatgactgcaacaagctgatgtgcctaccatagcacagattgaagaattccattcaatgtataggatgatgaatgctcctgattcatatgataatattgatttactgttgagcattgatttgttgggtttacaaggagcatgtaaagcttttacaaacaaaattgtttttgatgataagcttgtgttggctaacacacaagaattctttgatggaaattttccagtggattcttgggtaccaattattgtgaattgtctctatcctgtaagtcaattaccttcagaagctgtctgtgtcaatgttacatgttggagaggacgtggtgcgttacccaccactgcttggattagttctgcagctaacaatcgctcctcaaatatcaacaaaagaattcgcacagcacttgggaaaggtcagaaaattgtttttcttactagagttgatccttttccagtagctttactggctgttctttttggtgttaagaatgaaattctgagttctaacgccactaaccctatgctgacgcgacttcttgagaactgtaagagtctcaaatatctggttgatgagtgtccttttgcatttgtgaactagtatgtaatattttattcacttaaataaagcgcattactatgtgcaatgagtgtatttaagataagaaaaatcgataataatattacaaataaatattaaaaataatttgagctcaataacattaattatatatataatgataaataatcaaacaaaaaaacataagaaacatcttaactactaaaatattaattattattaagtcaacatatatctaatgagatataacaatcttgataaatataatatagccttcctctgctctc

SEQ ID NO: 122695 - DNA, 401 bp, Glycine max
  Clone ID: PAT_MRT3847_817C.1
ctgctccttactcccggggggaaaaccttaaagcggacattgcccgcaaccccgactcgccggccccaaaaacaaaaaagaccagggggggaacggcaaatatttcttaacggttcgccagggagggccccgaagatttcaggaccaccaggaccaaaaatgccaaggcggcccacccggggggggcttccagaagcagggcccacacccacaatgtccccaaagggaggaagaactggaaccttggccaacggggcggacaaaaggacacgggggcccacccgggaaggccggaccggtcccggcaggccaaccaagtttccccaaagggaggcgccccagagcctggcggaacgagggccaaagggggcgccggtgggccaatgggggggggggtacaa

SEQ ID NO: 122696 - DNA, 691 bp, Glycine max
  Clone ID: PAT_MRT3847_81800C.1
ggcaaaggagcagcaggaggcagagatggatttggggctgcatcacaactgtgattgctcttagtactgcagcaatagcatggtcttatctcccaacgagtaaaggatcatcctctgctgaccatgatcttgttcctgaatatgatgacacagccaagtagtttaccacaaccactaactgcaacgagtattatgataggagagcccaatataagttttacatacctctttgatcagttgcaattttctggcattctgagtatggtgcccaatttagatatacaatgaattagtgcgttcctagatcagtgaagtgttttgatccgtattgttgagaaaatatcccataactaactatgcattcgaggggtgctggcagtttcacttggaaattttcgaggattcgtttgaccatccgatccatcgggcacgatgctttagcattttcatacagcaagagagaattggattgacatcatctgatcagggaaatctggttgcactagtaggttacagatgcattacgttagcgattttgataaagtactgttttattatgttagtcaaaagatgtatttgcacccattcatatttttaaccgtaggtgagattttttttaattatttatcatttgttgaataccctttcattgttgttgttttgcataaccaggtcttagtgaactgtggat

SEQ ID NO: 122697 - DNA, 270 bp, Glycine max
  unsure (1)..(270): unsure at all n locations
  Clone ID: PAT_MRT3847_81801C.1
tttcggccactcttttagaagacgcgacagacataaangggggggttttggaaaaaattgtgggggcccagaacccatgacctatccaagctgctgagtggcaccacactagtgggcccatgacaaccagaggaatcagaaaccatgattgtctctgcatggcagaaactgaccggaagcttccaccaacgtccagagcagaagattgcatgcggaacccagcaaggctcactaccactgacagacatagccagcaaggcccaaaacacg

SEQ ID NO: 122698 - DNA, 479 bp, Glycine max
  Clone ID: PAT_MRT3847_81802C.1
ccgtaacctctaatttttccatccctatcactcaacccctactgagtacccaccatttacttgatctgaagttcgagtgcttctcatgtttattgtttttgcatcttaatcaatattaccagcttcaagcatggataccttagtaggatggagaaagaaatttaaaaattagaaagctgaaggtagggcctaattatttatgaaatgatcaaatttattcgcaagaactttgtgaaacttgtataacttggagacttaagagacttgttaaagatatccaaactccaaaggccatgttatgttttctgtgtctttttttttttcgtttttgagctctcatcttgaaagtgtgaactttggcatatgataaggtgtagccttgtgatctagggaatgaggcttttgagtcacaaaaatagcctcttcgattacaagataaggctataactatatatatatctcaccttcaactgagtgtg

SEQ ID NO: 122699 - DNA, 214 bp, Glycine max
  Clone ID: PAT_MRT3847_81803C.1
ttatcgcctcatcaaactcacaattacagatttcaatacgaagatagaacaagccactgttgtggagtgcaaaggccatgatgctgctcggttccacagcattgatcatgctcatggttgggacaaggatatcaccggtatgattgaaccaaaggatgggaagaaaagaatctcagtttcattcgagtgtgagacactgaaagctgggaaagca

SEQ ID NO: 122700 - DNA, 257 bp, Glycine max
  Clone ID: PAT_MRT3847_81804C.1
aacacctaaagggggccgcaaaaatacgagtgcagtgggatacaggcaccgatctactggtgtttggtactgatgagcaagaactactctccgctgaattttcaccatgatcattatgagcccgtgagtacattgggcatcagactttgcacgtgagtcacggctcaacactcggattgtctctgtggcttactccaaagatatgctctcttacatatttcacatgttcagattctctgagcatactctcatccgct

SEQ ID NO: 122701 - DNA, 259 bp, Glycine max
  Clone ID: PAT_MRT3847_81805C.1
gatggcttgcagttaatttctgtgtgaagtaagcattaatttaggaattgaaaaaagaagctgaaagtgattttctcatagtttcaacatataaagaaaataaatggagagaagtaaagttagatattaagatttaagctggaatctgggatacaaaaatctaaagatgtacaaccggggaaatacacgggtcattaaatcgaaagctgcaacagcagaaccatacaatgcactggcggatctacattgataggtgtgg

SEQ ID NO: 122702 - DNA, 312 bp, Glycine max
  Clone ID: PAT_MRT3847_81806C.1
acgcgagacgacaacacaacggggagagaaacagagaaattgataatacaggagtgttatcggcgaacgatgcattcggcaatcctgagttcgccgtagaacggacctacgcgaacgtgtccagagcactacagacggtaactgggaagatcgtggcgctgaagatgactcttctccacgatgactaacaacgtgtctctcacaccacgcaccgtgaggtttccattctgcgactgcgctctcgcaatacccatgtccttacgttaatcgatgtcacagaatgtcacgacgatgaacggaatacagtactct

SEQ ID NO: 122703 - DNA, 580 bp, Glycine max
  unsure (1)..(580): unsure at all n locations
  Clone ID: PAT_MRT3847_81807C.1
cccacgcgtccgctttttccgattctgntaggcaccttaaatctaaaaccagccattggccactcattgccgagaataactgaagttgacaaggagttttctccgaagcccgcagataaaaatagtgttagtaaaagattatccagtacaaatagtgataatgtttctaaataactgtatggctttgtccttntaanattaaaggnaaaccccaagtnaaggnaaaacccaaacgatgagaggctaaagtgatgaggggagcagtagtctgtggttattttgtccccacagttccttattctagtgtgttcaaacctttattacaatttgtaggtcccttatattttgacatcggtaagatagcactggagcttattgctgcttatgtttcaacatggcctgctcctgttcttggtaagctaatggatcttcctattgggaatgcaatgcttaaagtgaacctgccacctgcacacagcttacccaaggaaaatggagtatctcttgatgaatctgctgctcctgtggctccttttcttcctaataatcagtattatcccacaggggcctttttcacgat

SEQ ID NO: 122704 - DNA, 249 bp, Glycine max
  Clone ID: PAT_MRT3847_81808C.1
attgtgatgctgattgggctgggagagcatatgacagaaaaagcacttctggttgatgctggtgggtgcgtaacaatcgtatgcgaggggtcagcaagaaccatatcaatgtgtcccgatctacagcagaagcctatcatatggcagcatgtatcagccgttcacagctagcttgcatgaagcaaatgctgaaggattacaatgtctaacaagatgtcatgacattgtactgtgccaacttgaatacta

SEQ ID NO: 122705 - DNA, 298 bp, Glycine max
  Clone ID: PAT_MRT3847_81809C.1
aaaaataaaaactggctctgttaaataatgggcttacaaggaacacatacaccacaactgtagctgcgaaacctgccgtactgcgatataaatggaaatgctaacacatgctaccggcattatttgatataactcatcctgatgcatgctaaaatcaacgggtccacaactaatattgcacgatacgaacaattgctaaaaaattgacagaaaagaacacactaattgctccatttaatctacaggaactctaacaatatttttggggatgcactcatcatccaaatttcggccttac

SEQ ID NO: 122706 - DNA, 314 bp, Glycine max
  unsure (1)..(314): unsure at all n locations
  Clone ID: PAT_MRT3847_8180C.1
agacacaatgtttntcccaccatgtcttgttccatttctaaacacatccttcaatattgtaaggtcatttcacggagaggcggcaacaanancaatttaacatactattaatagactgcaatgataatacgtttacattatattaccagtcctcaaaactcatagatcaccaattcattcatataccgataacttttaatcactatctattaagataacctgaaatctataaactgatgcacattattagaattcaaacatattttatcaacatctccaaatttttctttcttaataataagtctcaaccaaaa

SEQ ID NO: 122707 - DNA, 313 bp, Glycine max
  Clone ID: PAT_MRT3847_81810C.1
gctacccccccttccaaagattaaagacggtttttttgcccttttctaaagggagtgaggcccctttttccccgtgggcgcataaccctaaccttactggggcctattgaacccttgtctaaaaacaagttcccccccgttccaaaaaatctgcttgtttctccccgggacccaaggggtttgtccttttttccccaagaaaaaaaacgaaaaaccccccactttggccctgaaaaaacccccccccccatcggccgcggtttggacaaccctgtccccccgcggccaccctccgaaaaaacccagccccccc

SEQ ID NO: 122708 - DNA, 320 bp, Glycine max
  Clone ID: PAT_MRT3847_81811C.1
gattgttttggtgtgaagtctctctcaactaagtataggatcacgaaagatttctctcctcaaggagatttgactgtctattttctccttgttaaacaggtgtaaaagtttttcttgcctgatatgtattttgttttttcttttctctcaaatcattttagatctaagaatttgttattgattcaagtctcattttcaattatgttatacaatgttgattttttgagtctgtgatttatgaatttgctgcccttggcgcctaaacctgtaagtctgcgttaatttctggcttgatgccttcaagaaagttgttttctctt

SEQ ID NO: 122709 - DNA, 119 bp, Glycine max
  Clone ID: PAT_MRT3847_81812C.1
aataaccaacaattgtcttttcaaaacacatactctcaatttctggggagggtacatactttgcttggataaattgcaaccatacaaatctttaccaagcattacatgttttaaaatcc

SEQ ID NO: 122710 - DNA, 592 bp, Glycine max
  Clone ID: PAT_MRT3847_81813C.1
agtgatccaaaaattatattaaatcattttaaaatttaaagttaataaaataccaacacttttaacataaaattgaaaaatattaaaataatatattttaaaaatataaagaatcataatgatacttttaaaaataatatatcaaagcgaaacaactacaaaatataatgaaaaaaaagtgatattatgcttaaatttatttattagttttataaacaaaattaaatttgattttaatttcaaattatacaagaaggaaatgcatgtattttaactcgtacaattttttttccaagttttgaaagactttttttttatctcagaagcacaataacaataaaatagctaggaatcacaataataaaaaaaataaactcattaaatataattaataaccaaaagttatcaaatttcataataattatatataatatgtttataatataatgttaataattaaataaatagataaatcagacttataataatacacaaagtattattagcttagataataataattaatggaaagccttagaagtattattagcttatatatatatatatatatatatatatatatatatatata

SEQ ID NO: 122711 - DNA, 362 bp, Glycine max
  Clone ID: PAT_MRT3847_81814C.1
catggcactgctaatttccttctagttgaagccttgtctgtaaagaaaaagcatgtgcaataacccttgcaacaattatggacaactatcaaagtgatttaagtgacataattcgtgctagtggtgcatcgtatggcacttgcagcacgggaactccatcatctgaagctgctaatcccttctctcgtggtcacttgcaattctcttctgatcccatgattttctcttgtgttttggaagggttcaatagcaacttcggtgatcctttctcaaacatgagagatccctttctacacgagcttgatttgcctccttctgcctactttaacatcacaacaagttcatctgcagaaatgagcagt

SEQ ID NO: 122712 - DNA, 1395 bp, Glycine max
  Clone ID: PAT_MRT3847_81815C.1
gattgaaggggattttggtgtggcttgtgctggcctcgagtcgagcgggtttggactttggaaaggcttattctccgctctcgtctgaaacctgaaaccctttgttcttcgtcggcggaagcatgtcatcgtcatcatcaagcaacgcctacgacgtgccatgggtagaaaagtaccgtcccagcaaggtcgccgacatcgtcggcaacgaggacgccgtctccaggctccaagtcatcgctcgcgacggcaacatgcccaatctcattttatccggtcctcccggaaccggcaaaaccactagcattctcgccctcgcgcacgagcttctcggaggaccaaattgcaaggaagctgttctcgaactaaacgcttcggatgatagaggaattgatgttgtgaggaacaagatcaagatgtttgctcagaagaaagtcacactgaccccggggaggcacaagatagtgatactggatgaagctgatagcatgaccacaggggcacaacaagcattgagaaggacgatggagatatattcaaacaccactcggtttgcccttgcttgcaatacctcagctaagattattgagcccattcagagtagatgtgccattgtgcgattttcacggttgtctgatcaagagatacttggtcgtctcatggttgtggttcaagctgagaaggttccctatgtccctgaaggacttgaagccatcattttcacagctgacggtgatatgagacaggcattgaataacttgcaagcaacatacagtgggttccaatttgttaaccaagcaaatgttttcaaggtttgtgaccagccacatccactgcatgtgaagaatatggtgcgtaatgtgattgaagggaattttgatgaagcttgttcaggcctcaagcaactgtatgacttgggatattcccccacagatatcatcacgacactttttcgtataataaaaaattatgatatggctgagtacctgaaattggaattcatgaaggaaactgggtttgctcatatgagaatttgtgatggagttggttcttatcttcagttgtgtggtctattagctaagctttctctagttcgtgagacagctaaagctgtatgagctggtcctaagtgcaactgagatgtcattatatttaacttttcaaatgtcctgctgatgtagccttatattttttatgtccagatgctaactgatacatcaatgtttcggcttctataaatatgttgtgttttagcttggatcagtaactctcacttttgaaaatgttttatctgtatattatttagttatgatctcaatgttcaaatctatgacgaatcaagcatcacttctcaggatattcgagttactgagctatatagaaaggtttgtctgc

SEQ ID NO: 122713 - DNA, 1662 bp, Glycine max
  Clone ID: PAT_MRT3847_81816C.1
aaatccttcaaacatcgttttatttttcttctctctaaactaaaaaaaatgaagggcaccatagttctacaccctgccatgggtaggggacacctagtccccatggtagaacttggcaagttcatatacactcaccaccaccaaaacctccccatcaaaatcctcctcccttcgccgcccaactccaccacccttcaatacatcgccgccgtctccgccaccacgccttcgatcaccttccaccacctctcaccctcacaacacttactccacgtcctccaaaccctcatctcccaatcttccaaacccaaagccttcatcctagacttcttcaaccactccgctgctgatgtcacacgaaccctaaaaatccccacctactattacttccccaactccgcgagttgcgtcgctctcttcctttacaccccaaccatccactacaacaccaagaaaggcttttccagttacagcgacacgcttcgccgcatccccggtttgccgccactgtcgccggaggacatgcccacctccctcctcgaccgccggagcttcgagtccttcgccaacatgtcgattcaaatgagaaaaacagatggaataatcgttaacacgttcgagaagcttgagaataaagctttcttcgcgttgaagaatgggatctgcatgtcattagaaacacataagtctcattcttcaacgccagaaacacgtaacccacgtgtcttttgcatgggcccacttgtttctaacggtggaggtgaacatgataatgatgatagtggttgcatgagttggctcgactcgcaaccgagtcgaaccgttgtgtttttaagctttggaagctacggaaggttctcgaagagtcagataagggagatagcgttagggttagagaggagtggacaaaggtttttgtgggttatgaggaacccatatgagagaagtgaattgattttggaggaattgttgccaaaagggtttttggaaagaactaaagagaggggaatggtgatgaagaattgggcgccacaagttaagattctgagtcatgactcggtgggtgggttcgtgactcactgcgggtggaactcggtgttggaagcggtctcttggggtgtgcctatggtgtcgtggcctttgtatgcggaacaaaggttgaatagggtggttatggttgaggagatgaaggtggctttggcgttgaaggagaacgaagatgggtttgttagggctagtgagttggaagagcgagttagggagcttatggactcggagagagggagagggaaagaggttagagagagagttttgagcgcgagatatgatgctgtagctgcactcagcgatggtggatcttcacgggttgagttgaatgacttggttgagttgtggatgcaatgatgcttaaaagagtattatttttttttcctgcttttattttaagtcaactgggtcaaccagttcacaagttgctacttctcattgtgtatcaattaaaaaaatagcattttaatattagggtatgtacaagtttgaacaagtaggagtcaaccatccatacgaaaatgctattgagtatatatacgaatatgaaatttaaagtgttgtataaaaacgttaattgggtgatggatgaactaataatggcttttctgtctc

SEQ ID NO: 122714 - DNA, 186 bp, Glycine max
  Clone ID: PAT_MRT3847_81817C.1
cggctcgagcggctcgagcctgtttaggttttgttttgtagtgttgttgctatctctatacctccatgaactttttctgacacaacccggcccgaggaccacaataagaataatgaagaagtatcaaagaagaacgaaaatatttgctctgaaaacgtattcagtcacagattatgaatataacta

SEQ ID NO: 122715 - DNA, 467 bp, Glycine max
  Clone ID: PAT_MRT3847_81818C.1
ccacgcgtccgcccacgcgtacgcgatgcgactctatgaaggtggagcttactatgtgaagctttgagggtgtggttagagagtctattgtgtcttactttgctggaagcctaactgaatcgggtcttttttctattataaatggagagggtggagctccatccatacctctctgctgaaaactgaggggcacacagcagaagcacctgctgctgcaagaagagattggggggaagctgttccaccaaccacaaacaaatacctgtacctacctatgggggtggtactgttcaaccatctggctttaattaaactagcgtgcaatgatgctattattttgtcccgtccctcaattttagttcaccggcctttctttgaaccaaaatatggggggaaaaccgtggcatacgcacttgtatttctattgtgttataaccggcttaaacattatgattaacatggaatat

SEQ ID NO: 122716 - DNA, 769 bp, Glycine max
  Clone ID: PAT_MRT3847_81819C.1
attaccatgtctctcttgaggttaagaaaattatgtctttcctcctttgtaaaacttagacatgtctctcccgaggtttaggaaaattatacacgtcttcattctgtttttaaaatctacacaaatcctttaaatgtcgtctaaacatttaaccgtaacaagtcatgtgtgttgacaattttgtttaaaaaagattaaaatattttttttgtcctcataaatatgaaaatgtttgaaatatatcactgcaaaaaatttaatctagttttcgtactcaaaatttaaatctattactttttggcttgaagctagattcacgtatatccgaacctacgcatatgttgttgtagaaagtgtcagaaaagttgaaaaacctaacattttctacaaaagtatacacctaggtttggatgtatccaaatctaacttcgggcatgtaatcgatgtagaaaagttaaaaacctaatactttatacaacaacttgcaagttggttcaaatgtacccaacctaactccgggccaaaaagtaacatttaaattttgcagggacgagaaatagacaactttttgtagttatggattcagaacattttcatatttatgaagatgaaaacttattttaacattttttaaaacaaaattgtcaatgtacattaattgctattgtcaaatgcttaaacaacatttaaaaatctgtataggtttgaaaaaacagaagggagacatgtaattttgcttaaacctcaagagagacgtgtaaatttttca

SEQ ID NO: 122717 - DNA, 199 bp, Glycine max
  Clone ID: PAT_MRT3847_8181C.1
aaaaaaaaatgtctgacccattcctttaaagtaaaagcttgtcctacaatgaatggttactacaaaatgttatcaacccacacgggcggggtgaattaccttacaagtgctaccctgccacgcgtgccccctaccactcaaggcgaataggcatgagccctccaattgtgctgctaccagagggagcgtcccccccccc

SEQ ID NO: 122718 - DNA, 198 bp, Glycine max
  unsure (1)..(198): unsure at all n locations
  Clone ID: PAT_MRT3847_81820C.1
gtcgcatgcacgcgtacgtaagctcggaattcggctcgagntantggtantggagttgggtgagactgggaatagcaggtaangttggggattatgctttcaaggcattcancgccactcttggagtngccantatttacctcantgcaacctnctctgtcaacgtttacagnggcttctnttgncacaatgctcaan

SEQ ID NO: 122719 - DNA, 443 bp, Glycine max
  Clone ID: PAT_MRT3847_81821C.1
agaacccccaaaattaaaatttttttatttttttccccaaaaaatttttggggccccattctttaaccaattcaacttttaccccaaaaaaataaataaaaaaaggggcttttttaaaaaaaaattggaattaagaaaaaccggggggacccctttaaatttcattttttgggacccggccttctttactggggggcaaatttacccaaaaggcctcggtaaaaaaaatttttcccaacgggaaagggggcctttggggccccttttttttttccggcctcaaaccgaatagatccttggttggattccgcggttttttacgaaccggcgcttttttaaaggcccccgccaaggtttcaaaaaacgccggggattaacttaaggggcgaaaataaccccgggaggggaagttaacgggggcacgtgaagggggtcacccccgg

SEQ ID NO: 122720 - DNA, 562 bp, Glycine max
  unsure (1)..(562): unsure at all n locations
  Clone ID: PAT_MRT3847_81822C.1
gaagcctgaacgaagaaccagttgctcgttatacccttttgttcctcttcgtcctaaactccctctctctcttcctctacttcaaccacaaaccctcttcttcttcacaactcaaaaaacctaacactcacacttatctcacaccactttcccaccaaacgcacttctcaaagccatggccgaatctcccctcctacctcccgtggtcgcagggccccaccacggcccctccccgctcctgcgaggcctacttcggcaacggattcacgcgccgccgcgagctcctccgcccccgcgccggcgcgggctggttccggtgccgccacagcgacacgctccggagctccgtgtgcgagggcgggaggctccgcatggtgccggagaggatcgccatggccaagggaggggagcctctcacggcggtgatggggcggagggagggcgaggagcttccncggtttcaaaacggtgcgtttgaggttgacggcggtgaagtcatcgntgaccgggagcttctggttgaccaaaagtttttggatgagtatgtgccgaggggagggat

SEQ ID NO: 122721 - DNA, 363 bp, Glycine max
  Clone ID: PAT_MRT3847_81823C.1
ggggggccctaagggggtccaccttattattacccccacacattggatgttgggttttggccaaaatttttaaaccgcgtctttttttaaagtattcataatgcgggtacacttaaactccgggttttggacactgaatagaaaaaagttaaactttcctacgcaaatttgaaaccttcttttccaaaggaaattcaaaaaatggtgcaaacttaaaaaaattttggaactttcttgctgaaacacaatttttggctataaaaattatttgcccacccccctggatgaaatcggctaggaggaaaaaatttttttccccaaatcctgttgggaaatttgggggcccccaaggaaaatgccccc

SEQ ID NO: 122722 - DNA, 310 bp, Glycine max
  Clone ID: PAT_MRT3847_81824C.1
aacgtgttcagtaagtatgctcgtacagttcctgacaagctcacacttggggaggtctgggacatgacagagggaaacagaaatgcgtttgacatatttggctggcttgcagctaaacttgaatggggggttctgtacattctggctagggatgaggaaggtttcctctctaaagaagctgttagaagatgctttgatgggagcttatttgattaatgtgctaaaatgcatgctactagtgatgccaagatgggttgaaattggattatgtagtactatatagtgtgtatgtatagttacgttatgtgtc

SEQ ID NO: 122723 - DNA, 192 bp, Glycine max
  Clone ID: PAT_MRT3847_81825C.1
cccaggcatacgatttcctatctatgcaacgtatagtttcatcaaatctcaaccccttatcagcgaggtacatatttacaaaaaactacccaattacattatgttcttgtaacctcctcaacccactctaagtcgtgaccttttaattatgaaagaattatacaacaaattcttcaataagaaattactatc

SEQ ID NO: 122724 - DNA, 433 bp, Glycine max
  Clone ID: PAT_MRT3847_81826C.1
aaactctctcacactaaccttcttcgacctcttgtggctacgcttcccacctgatgagcgtctcttcttctactgcttcccacaccccacctcttcatttcttcactgccttgtacccactctacaacactatatgtagctcactctgcatcacttcctgcctttctatggcaccctcacatggccctctcactctcccaaacccatcatcaactacacccctggcgacgccgtttcattcactgtcgccgaatccaaccaaaacttcaacaacctcacttgtcgtctgtgtgaagcatcgcaacgacaccgtttgataccccacttgaccgcttcccatgacaaagcgtctgtgttggcacttcaagtaacagtgttgccacacgctggtttttgcattggaataaccacacaccatgcagctttcgacgga

SEQ ID NO: 122725 - DNA, 2664 bp, Glycine max
  unsure (1)..(2664): unsure at all n locations
  Clone ID: PAT_MRT3847_81827C.1
catctaacaacctagctactttcagagaagctattgatgaaaagacaaaacttggccccaaaaggagaaaagctattgatgaaaaggcaaagaaacttttgaatgcaggattcatcagagaagtacaatacaccacatggttagctaacatgatgatggtaaagaactctaatgagaagttgaggatgagaaccaactacacagacttatacaaagcctgccctatagactcgtatccgcttccaagtaaagattttctagttgatgaagcttccaaattttccatcctcagcttttcatatgcatacttcgagtataacaacaatacctatgttctagtaggatgaggagaaaattgcattcatgactgatacaacttactattgctactcgattatgccatttggtcttaaaaatgttatggataagatatttgttcaccaactcgggagaaacttagaagtctatgttaatgacatggtggtcaaaaaaacaaacaccacctatcatgcagaagagttggtggagatctttgcagagataagaaagcccaacattaggctaaagcctaagaaatgtgtattcagagtattaggtagaaaattccttggattcattcttacccataaaaaaattaaggctaacccaaagaaatgtgtggctatcatcgagatgagatgtccaaacactctaaaagaagtacaaagacacatcggctaattagcagcactatccagatttctatcgagtgcaactgacacaaccatacctttttttaaactgttgaagaatcaagagggaacagagagaaatgggaaatgtgaagctaagttttaaaagctcaaaggagttcctcgcttcaccacctatcctgaccaggccttaaccagggaaggaattgatttgtacttagtagtatcagagcaagccataagttcaataatcatggtagaggaaggaaagaatcaaactcctatctattatgtcaatccaatcatcatggatggaaagacttagtatcatatggttgagaagttagtcttggttctagtcacttcttctagaaactaaggctatgttttcaaagtcatcagatagtggtccaaactgatcaccctatggtgttgaagaaaccaaaacatgtgtcgaatgatagcttggtcgattgacttcaaaattgtcattggatggttgaatggagactttcacactaagaagccccagatgacaaggtactttcactagctacccaatttaaagaggcattaactaagtttaaggtcagacatgtaatggaaaataatgagagagccaacttactatcaaagatcatcaacaccaagaagagtgggtaacacataatagttatccggaaaaccatttcaaagttgagtcttgacaagatggtgaagagtgtgactcctgttgaccgagagtggatggccaagatttaggatttcttggaaaaagggttactctcaattgacacaacaacaacgagaaagattaaaagaaatggaagctactgtgttattgaaggtggagacttatataaaaaagacttaacaacctctttgttgaagtgctaaactcgagatcaggtcgagtatgtgttgaacgagatgcatagaggaatatattgaatgcactcagaatcatgattaatggtagctcaagtactaagagttaaatactaccgaccgacaataagaagatattgcacaaaatatatgaagaagtgcgaagagtgccataaattttacaatatatctcacctactagttaaggagttacacaacataaaggcttcatggccctttgcaacttggggagtatacattgttggaccttttcctccagcaaaaggacaagtaaattttctcctagtaggcattgatcatttcacaaaatggatcgaggccaagctcgtggcagtagtttcaacaaccaatgttaaaaggttaatttggaagaacattgtgtgcaaattcgaaatccccaaaactttgatatttgacaatggaaaatagttcattgataaaggagttaaggaattccttgcaaatatggggattaagcaccgagagactttaatagaacatccactaagtaattgacaaattgaagcggccaaaaatgtcatacttggagaaatttaaaagtgagtcagaaaggctaaatgcaactaggacaaagagctttcaaccatcttatgggcttaccgctgcacttcatagtcgacagcaagtaagactcctttcgagtctcatatgaattgaacgtaatgatactagtagaagtcaaagaaccttcttttcaaagggaaaattttatggagaaaaaaatgatgaaatgcttagtgaaacactcaccttggttgttgagaccattaaagaagtctacatgaaagacgaatggtaccaaagaagagccaagaaaagatataatagtcaggtcaagccgagaaactttcaggcaagtgacttggtatggagaaagtgtgaggaggccctaaaagatgctaaaaagggaaaactttctagaaggacttgctacattagagttgttgaagtgcttcgaaacagagcctaccgantagagcacatatccgaaaaggtgattccaaggacttggaatgcttctgacctcaaattctattacggt

SEQ ID NO: 122726 - DNA, 462 bp, Glycine max
  Clone ID: PAT_MRT3847_81828C.1
accagcaattctcttcttcctttttttcattcattttattttctgttaatcttttcgtttcctgtttacgatttcatgctttgtcttctgtaccgcgttgatcagagacacggagggaggatccgcttccaagccctatttttctttgatttttttttaatgttgttgtaattttggggtttctttaagttctgatgtggaattagtgggtaacttaatgattctatttcggacttgaagttcttgcttaaggactaacggggaatttttttccctgttgaattctagggtttgcaattttttaaaacaaaatttgtttttggtttccttcatttcccctattttgtctagttctcttaatgctaatactatttgattgtgtaaatctgatggttatttatttatttattttaattatatgtacgtattgaatgaattatggacgattcttttccggtggaa

SEQ ID NO: 122727 - DNA, 173 bp, Glycine max
  Clone ID: PAT_MRT3847_81829C.1
aaaaaccattctttaactatattaaattgaattaaaacttggtgaatcatggtaataaatagattccacatgaaatttttacaaactcacaagtgcaaacaataaatgaaactcaactttattttgtcaaacccgtggttcaaaatgagtgacctaaaaaaaattaaatgaaa

SEQ ID NO: 122728 - DNA, 249 bp, Glycine max
  unsure (1)..(249): unsure at all n locations
  Clone ID: PAT_MRT3847_8182C.1
caaaccaaaccatcatcacgnattgagatctccagtgtcttggctgctggtcctgcgttggtccccatattgtgcttagttgcagtngtttactatttgantgtcatctactcagctcggaatcagatcnagtgtcntgtgaganngagggnatttgcagacgganttttcaggctgnctatngtacagacgnnctnnaccaacnacccnaggtnnttgnacananctggggnctngnaatnggnggnc

SEQ ID NO: 122729 - DNA, 159 bp, Glycine max
  Clone ID: PAT_MRT3847_81830C.1
gaagtagctgcccaaaaatcgtttcttaccttacatgcttgattacctatgcaaaacaaaggcagcaaaatggtgtttgcatatgccctagccatgacacatggcacagctaggaaaatagagtaacttaaacaaaacaattgacccatcatttgggga

SEQ ID NO: 122730 - DNA, 400 bp, Glycine max
  Clone ID: PAT_MRT3847_81831C.1
tttttaattttaatttcacaggactgggggggatttaaacaaactacaaatatatgttaataaaccactaccgaaattaggaccaaaaatcggtggactttggccccacataaaaataaagcaggctttgcataaggggccaaccgccctacccctttttttttatcccccccatggggggctcgtcctttcctattgaaaaccaaaattgtgattttaaaaaatgcacatttggggcgaaaacgtgcttttcaggaggtggaccaatttgaatccgggggcatccgtccattgcgggaccaaggggtatacctggatagttccttgcacgaatggcaacattgcaattgtcaaatagatttggaacaaacatcaaagggttatggccaactttttttta

SEQ ID NO: 122731 - DNA, 313 bp, Glycine max
  unsure (1)..(313): unsure at all n locations
  Clone ID: PAT_MRT3847_81832C.1
agcnngaaaacatcgttgtatctgcggctgagttactttcaaattcttagttgagtgaaatttcttatgcaattggctttttatgaagtgtggtggggaagcaccaatccttgcttctttatcgcaatatactctataagtttgctaccaccccatcaaagtaattgtgttagataatataaacacgactttttcttccctctcaatccattcactaaaatgaatgagtttatttttcagtgtattgttgataatttgtgaaaggaatcttactactctgttgtgaataaaaattgttgctgaattaaaccat

SEQ ID NO: 122732 - DNA, 253 bp, Glycine max
  Clone ID: PAT_MRT3847_81833C.1
ttctctattgctcccatccctttcgtttcatacacttttcaaagggcgcttcttcctcatagctggcaaaatggcaaatgcagcgtctggaatggctgtgcatgatgactgcaaactgaggttccaggagcttaaagcaaagcgagtctaccgcttcattacattcaaaattgagcaacaacaagttgtggtcgacaaaataggggaatctacggaaagctatgatgattttcaggccagtttgccagctgat

SEQ ID NO: 122733 - DNA, 456 bp, Glycine max
  Clone ID: PAT_MRT3847_81834C.1
ggctgcgagaagacgacagaaggggacttatttatatgttaatttcatttttgtcttgtttctattaacaataacattaacattatgtagcatattttaaccttgaaatgttgttaaattgtaccagactgcaaagaccaaggtaattaatagctgcttgaatcctgtttggaatgaggagctgaatttcactctgacagaacccttgggagttctgaatttggtgagctccatgatatttagtatgccgcttcattcttgttttcttcaatcttggttaattttgtctctcactcaagtatcctaagttccataaaggaaaccaattataaaaaatatgagcgctaaaaccatgtttctaaagtatggactagaatcaattttgaccaaaaattgtgggaacttaaaacatatttacctattcttaaatcttggaatactatcgtactatttatt

SEQ ID NO: 122734 - DNA, 1280 bp, Glycine max
  Clone ID: PAT_MRT3847_81835C.1
tcgatgctgatcaaggaggccattcatgtaattagctgtggatatgaagaaaagactttatggggaaaagagattggttggatttatggttccgtcactgaggatatcttatcggggttcaagatgcaatgtcgaggatggaagtcaatttactgcatgcccttgaggcctgcattcaaagggtctgcacctatcaacttgtctgatagattgcaccaagtccttcgatgggcccttggatcaattgaaattttcttaagtaggcactgccccctctggtatggattttctggaggccgtctcaaatggctacaaagaatggcttatataaacaccattgtctaccctttcacatcccttcctctcgttgcttactgttctctgcctgcaatttgcctcctcacaggaaaatttatcataccaacgctttccaacgttgcaagtgttctctttcttggacttttcctctcaattataataaccagtgtgctggagctgcgttggagtggtgttagtatcgaagatctgtggcgtaatgagcagttctgggttattggaggtgtttcagcccatctgtttgccgtgttccaaggacttcttaagatgttggctgtgttgacaccaacttcactgtcactgctaaggctgcagaggacagtgagtttggggaactttaccttgtaaagtggaccactctcttgattcctccaacaacccttatcgttgttaacatggttggtgttgttgctggattctctgatgcacttaatggagggtatgagtcttggggacccctctttgggaaagttttctttgctttctgggtgatttttcatctctatccattcctcaaaggtctcatgggtcgccaaaaccgcacaccgaccattgttattctctggtcagtgttgttggcctctgtcttctctcttatttgggtcaagataaatccatttgtcaacacagttgacagtgaaaccatcgccgagacctgcattgccatagattgttaagtcactacaagaatgcttgccaagagtatttttaaatatgtaaaagggtgcatgcataggatgatgatttgatccacagcttgtgcaagttatgtaaggattattatttattagttctttgttgaactatgtagccattttgaacgtgaaaaagagagacttttatgtccattgaaaatttgaaattcaattagttgtccaaaattactgtcctctgcaaccttaccagtgacagtgaacttggtgtcaacaccagcccacatctta

SEQ ID NO: 122735 - DNA, 308 bp, Glycine max
  Clone ID: PAT_MRT3847_81836C.1
ggaacgtgatcgatctcgttaccagttgccacactacagcgacattccccctacacccgtttgcgtggttgtctgcgaagagttggcgactaagaggagcgttggaacgtttaatgagggtgatttgaaagggaagagggtgttcgtgagggtcgatgtgatgttaccgttggatgactgccgcaacatcgttcaggactctgtagtgcgtgctgctgttgtcaccatcgagtacttaaccggtcatggagccagagtgatcctattcgagcccatgggacctcctatcggtgtaattgctagtgaca

SEQ ID NO: 122736 - DNA, 998 bp, Glycine max
  unsure (1)..(998): unsure at all n locations
  Clone ID: PAT_MRT3847_81837C.1
gagangcaagagacagagagaaagagagaacaaacaaggagcttctgtttctagcttctagcaaccttcttagttcaacaacacaaagtcagaaaaatctataagcctttgtacttagctcagacaactgatttggttagccatgaacaacagtgttcctgattggaattttgggagtgattcctgtgtcaccaccaccaatcaaaagaagcccatgataggggtggaccaagagcttgtagagcttcagtggcaaaatggccaggtagtgatgcacagccaaactcacagaaaaccggttgtgaactccagcaccccgagtccgcttcgggggactgtcccatcgaccctatgccctcgtgagcctcctggggacccaggtttctggtctcaccttgtggcggcactggcaccttgtgaagttgagtcctataagcaaatcaagccatttgaagaggggaagtttaccaaattggatgcctctagtgcccctcatgtgactgtaagttcacaatcacctaccatgaaatcctcctcttttcaggatttctcaggaattcctataccggccccaagattccatgtttctgattcacctcagaaaaacaataatcacttgggtggatcatgtaaggtccaaaacttctctcacttttcagcaccccttaatgtttcttcagcatcggctaacgtgcattttggagacaaaattactggtaacatgtcaagaaatgagattagggagtgctcattgatgacagttggatcaagttactgtggtagcaatcacatcccccaagatccagatgctagcagggcatcaagcaatggtgtttggactactactttatcagtcgagccagaagctgttagagacgatgtgccgaaaacaattcctcagaaggagaaagggaaatcagagatgcttgaaccagctgtgacttcatcatctggtggctcangtagtagtcttggaaaaacttgttcattatctacga

SEQ ID NO: 122737 - DNA, 190 bp, Glycine max
  Clone ID: PAT_MRT3847_81838C.1
cagaagcagaattcggtgacggagcgcggcgttggtccggagattgatgaagatcacacccgatctgctattgcgcttgatcatcatcatgatgaaaaggagagtgaagaaaacaacggaagccacatggtgtttgacgttgatcagggtttggatagaaaagatgacgaggcagagaagagttgtgatt

SEQ ID NO: 122738 - DNA, 362 bp, Glycine max
  Clone ID: PAT_MRT3847_81839C.1
tggactcgtgggcagatgtaaactttgtctgattctttctcagttctctgcttaatcacaagttcaagctggagaaatctgggattagtgctgcgactctcctatctgggataggacttcgcgggtagacttttctatttgtgtgctttatttcactcttttgttgttactgatccagcattgacgttcaaagtggtcttatttgaaaaacacttgcgcgttcaagcacacgtgtgcttcggtaatcatctctggggacaacagggtcactgagaatacaatttttacttgcagagaattggacattttgggtgtttattataccattgcaactcaatttagaatatggccaccgtattaca

SEQ ID NO: 122739 - DNA, 1784 bp, Glycine max
  Clone ID: PAT_MRT3847_8183C.1
gcacggcgacgcgaggggaacagaagagggagggagtttcatgaacaatctatttgtgttgttgttggaatactgagctgagagtggtggagtcaggatatcatatcatgtgcactctctcactgccatgcctctcttattctcttcacactcacacttaccagtctggacgcttctctcccccttgttcttttatcttcacacctcatagacgctctcacagtcacttcctgactccatgctcctccctcagacagagagaaagagagagcaaaaagcaactaggcaagatcaacactgccccgtctgagtctggcttgaagcgcttgtttagtcccaataacaacaagaccgaagtcgaaggtgacgccgacgccgacgccgacgctgacctcgacttccaggatggaaccgccttgaagggcaccctcttggccggtctcttgctcctcggtgttgttggcggttttgcctccgttggctatatctacaaggaccaagtcaattccttcttgaaccacctctccgtcttcattgaaggttatggtcctgctggatatgcattattcgttgccgtttatgctggattggagatccttgcaattcctgccattcctttaaccatgtcagctggacttctatttggatctgttgtcggcactatcatagtctctatcagcggaacagtggcagccagtgttgcttttctaattgcaagatattttgctcgtgagcgaattgtaaaactagtggaaggaaataagaagtttgttgctattgacaaagcaattggagaaaatgggttcagggttgtgaccctgcttcgtttgagccctctgctgccattttctttggggaattatttatatggattaacatctgttaagtttattccatatgtattgggaagttggttggggatgcttccaggaacatgggcttatgtcagtgctggtgcttttggaagagcaataattcaagatgaatctgaacttagtaatatatttggaggaaacagtcagttgctaacactggggctgggactgttggccactgcattagctgctgcatatgtcacacgacttgcaaaggatgctataaaggacattgaatagatccgctagacagtagacacaacccagcatttgggaatgaagacaaatccacatgaatagattgggaaacgaataaaccatcaattcggtcttttaagtattactctttctctaaagtctttgaagtaatgaaattatataagtagtccctaaggtattttgaatgttcatcaatttaatccctactttgatattttttactaacttccaggaactagtttgaaggattgttcgatgcttgaaagactatttagcatgatttttaatactcgagggattacttatataatttgtttactttaaggacgatttagaagagaaagtaatattttaaggaggaaattaatggtttgttcattggaaactgatgtcttcgtaaataaacatcaattatgatagatgaaagagaactaaggaaacagatagacccagcatgtcccttgtaaattacagtattcttattgaactcaggtaggatcattttgtttcttttgcaatgcccccttcttacataattattacattgcacgaacagtttacctgcgtcatttataaaattacgacgcattaatttcttaaaaaaaaaaaaaaaacaattcacataaaatttaaaatgtttcctttgtaattagtatcaagttcaatcaatggtttggtgcgataccatgt

SEQ ID NO: 122740 - DNA, 348 bp, Glycine max
  Clone ID: PAT_MRT3847_81840C.1
ttactgaaaataacctttccaaaaaccaagtcggcatttacataaagcaaagcaatataacaaatgttataaaatattctatagcaaaaaaggacttaatataactataacctgtcataagaaccaatctcatatcagaaaaagaacaaatgacgacctttcagagactctagcgacacacttttggatgaaatgaaacccaataattgtattagttaagctgtaaagttacacaaaagagaagtatttgctgatgttgaaaggccgttaataaaactctttactttttgtgtcaatcttgaaggaaccgtgcttgacccaccactgctttcctctatctttccgaat

SEQ ID NO: 122741 - DNA, 2517 bp, Glycine max
  unsure (1)..(2517): unsure at all n locations
  Clone ID: PAT_MRT3847_81841C.1
ctcgagcgtttttgcttttgccacccttcagccagaacactgtttaagttcatgtcatgttggccaacttcggattccaacttttgtttccttgtacttcactgtttacaaggttaattaatctcagttcctagaatctcattttttcatttttcaacaacttctagtccaagagaataagcatatattctgttagtggtgtgtgctttcactttttgcttttatgaggggtcttaaaggcatctttacagtgctgcttgcaactactagaattgaacaaagtggtagtgagtctcctttgttgtaaaagggtcatctctaatttggactactactactatgcctccttcaaacttccctcttcgttgggagagcacaggagaccgatggtggtatgcatctccaattgattatgctgctgcaaatggcctctatgatctggtcactgagcttctccaccttgacaccaacctcctcattaagctcacttcccttcgccgaattcgccgccttgaagccgtgtgggacgatgagtccaagtttgaggatgttgccaggtgccggtccaaggttgcaaggaatcttatgattgagtgtgagacaggaagagggcataagcataactctctcatccttgcaggctatggtggatggcttctctacactgctgcttcggctggggatgtagactttgttcttgagttgttggggagagaccctcttttggtgtttggtgagggagagtatggtgtcactgacatgttttatgctgcagccaggggcaagaactgtgaggtctttaagctcctgcttcattctgctctttcaagaaaggagtgccttggtggcagtgaagcagaattggaagagaagttggatgaaggttctaaggttttcaagagggatgtgatgaatagggccattcatgctgctgccaggggagggaattgggaaatactgaagcagattctagcaagtgtttctgtttctcaggttttgtcttatagagattcccaaggatgtactgtcttgcatgcagcagctgcaagaggccaagttgaggtggtgagaaatctaattgaatcctatgatatcatcaactcagctaatgctcaaggcaatacagcattacatgtggcctcttacagaggttacttacccgtggtagagattctgattggagcatctcactcgttagcaacgttaaccaatcactatggagatacttttcttcacatggcagtggttggtttcagaagccctggtttctgtagactggacaagcacactgagctcatgaagcaactgacaagtgaaaaaattgtgaaaatgaaggatatcatcaatgtcaggaacaatgatggaagaacagctcttcatgttgctgtggttcataatatccaatttgatgtagtggaattactgatgtctgttccatcaattgatttgaacatttgcgatgctgatgggatgacccctttggatcatcttagacaaaaatcacgatcagtgtcttctgaaatcttaatcaagcaattaatttcagctggagggatctctaattatcaggactatgtgacgagaaatgcccttgttaagcatcttaggactcatggtattggaggcagtcccggaacatcatttagaataccagattctgagatattgttgtacacaggcattgagaattcatgtgatgacaattatgatcaggcaagtgtagaatcaaattcatggtcaagtgaaataaacaattatgacacagccaattccccatgtaacagcaagtctagttctgtcaattatggtgcaaggcacttaaagtttctgctccaaagttctagaagaagagacacaaaagaagcagcctcagatttagaagatgatgtttctgtgaattccttcggttcaaggaacaacttggaagactttccaatcccattgaggcaaagatactcaaaaatgtgttctcttccaaacaacaaaagaacactatctataaggacttatcttcctagtccttcagccaaaaaacattttcatgcaggtctagtacaaggtgtgattaaggtaaagccacaaatgcctctacctgttcattcaacatctaatctttttcaagaactatctatctcttctcattcttcgaataataagcaaaaacgtgttgatataatgggaccctcttgctccaatcgaccaatggatggtgatggcacactacaattgagctataagcagggctctttcaataagaaactgatgaatcgatatttttcttttggagcacatggccaggctttggaggatgcaaatagctgcacgatgtcaaatggcagttccaagcattttagttctttagttgcataaatgttaaataggagctttgaaaaagtttgtgctgatcacgtttaaaaagttcatgtggaatatgcaacaataataattaatattaatgatactgataatatatgttcggcgctccnnnnnannnnnnnnaannnaagggcggccgcc

SEQ ID NO: 122742 - DNA, 163 bp, Glycine max
  Clone ID: PAT_MRT3847_81842C.1
atcgcatatcacaattccttcttcaatatctacccggtcccagaacacagggcccgagacaccctcctaatgagcttcgaccgctgcatatcaccaatcatcacccatgactaagaccaaccacaactgccacacaggcttctgccatcctccaaatcccata

SEQ ID NO: 122743 - DNA, 182 bp, Glycine max
  Clone ID: PAT_MRT3847_81843C.1
gaggactacaaaaagatatccacactctcctgagtggggtttctaataaggaccgttgataactctaaatactacacttagaccacatcaatccccttcttataacctttaaacttgtcatcctgatctttctatattgctttcataccataatttgtgttcactttcttgatcctctacat

SEQ ID NO: 122744 - DNA, 355 bp, Glycine max
  Clone ID: PAT_MRT3847_81844C.1
gatcatcaagttcgtgtgattaataaatatttgatatattccattaatttaaaaaaaaaaaaaaaaaaaaaaaaaaaaaaaaaaaaaaaacaaaaagaaacaaaaaagacaacaaaattaaaaaaaaaccctgggggggggcccgcaaccaattgcccccaataaacaaggtaattaccgacataaccgggccgtaatttaacaacctcggaacagaaaaaaccctggctaaaccaacttaaaccatcttgaataccacccccttttcccccctaatgaaaaaaggaaaaagccccgtaccaatcgcccttcccaaaagtggcgcaccttaaatgcgaaagggaaccgccccttt

SEQ ID NO: 122745 - DNA, 422 bp, Glycine max
  unsure (1)..(422): unsure at all n locations
  Clone ID: PAT_MRT3847_81845C.1
ccacgcgtccgcacgattcacgccgcacgccccgacgccccgacgcccgcagccccgcatgcgcactttcgcaggccgtaatgcacaggagtcccgctctcgactcccgactcgaactggacgactcacagcccgaggtcctatcgaccgcaaccgcaaaatccaagaccctggccggcggagccgaactgacccgcgcctcgggccctgcccgatttgtgtgctgtgcggcctgtgggcatgctaagccagccggcggcgtgaccggagtccatagcaagaaccacgcggctactagctacaacgggctggctaaggcgcaggttgagcgctagacgctacccagctgtggtctcacgcggatggccggagagagcagccaagcngaaagagcgctggacgctggacgaaccctaccacgc

SEQ ID NO: 122746 - DNA, 445 bp, Glycine max
  Clone ID: PAT_MRT3847_81846C.1
actcgtgactacagctgcggaattcagctcgacgcattgccttttctacccactgttcattactttacaggggacttggcgctttatgcggttacattgggggtgctaaaaaagggggatattcactttataccttagcttcctcagacgaaaaaagatgctattcataagttggagtttgggaagtggaacaagagcgccacttaccattcttattttttttggggacctgaccctcaccccgttggacatttgacttgaaatacagatattacgaagcgtgctcatggtgaccgtagagccatgtcagattgccagaatttcgtttaacattcacggcactcgtgtggtacacaacctcatcgatactatcaaaactaggcaacgcatcttattagtagtggcagctcttgaaccacgattattggccctcataaaagatctt

SEQ ID NO: 122747 - DNA, 235 bp, Glycine max
  Clone ID: PAT_MRT3847_81847C.1
ttatttttttttttttttttttgctcaaagccagggaagctatgcatcacgtagttttatacataagctaacatgcacttcaccaggcttcgtatccacctagcagataacagcttcacacttatattttcccaaggaaaacgaagcaggcataagtcaatcttgcgatgcaaagttttcaccgaaaacctcgtggaagtttccaggttcctctacattttttcggacgcgtggg

SEQ ID NO: 122748 - DNA, 874 bp, Glycine max
  Clone ID: PAT_MRT3847_81848C.1
cggccgctcgaggcggcgggcgggatttctccagaacaacgtgaaaaaccctttataaaccctttcaacagattaactaacaataacaatattccttttttaacgtagaaagaaacttggttcattgaagatgggaaactgtggtagcaatcccaagaccaatgaggcagtgtctgaacctgtgaccgagcaggttaaggttgagcagaatgagcagactagtgaagcaaatgttcttgagacccccgagaacaagtctctaggcaccttgctcaaccagaaagtagaggaggaaccaaagacagaggaagtaaaggctgaacccaagccagaagagcctcaagaagagaagtccaaagcagaagaagcaaagagtgaggcctaaagctaataataataacgtgcaagcgttctacctgagagggcttttatatttatcttaatatacatttgttgcttttctgttcaatggtacgacacaatttaaccagttctgttatccaaattgactatttggataaaaaaaaaaaaaaaaaaaaaaaaaaaaaaaaaaaaaaaaaaaaaaaaaaaaaaaaaaaaaaaaaaaaaaaacctttcccttactcaaaaagcaggcaaagcaacggttgtttcttcaaaaaaacaaaaaaaaccttttcttttcaattccgacaaggcgcccaccgcgaaaaaggggggatttcgcgcgcgacaacaagggggaaatctgcggaaacgaggagggtttcctcggttcctactaccaagccacggtcgggtcgcgcctcaacaagggcctctacgtggaaggttacgacacgttcctcgaagacgacgcttcacaacaaccctttaccgaaacctttttccccaa

SEQ ID NO: 122749 - DNA, 484 bp, Glycine max
  Clone ID: PAT_MRT3847_81849C.1
aaaaaatgcgtttttgacacatagtcgacataacctgggaaacaaacggacaccgaacatgtcccccatcaggaagcggaaactgaaacccaaaacagacccagagctaaataaccaaatgcacacagccaagagcggacaagaatcagatgcagaatcggatcaatctgatgatcataaaaaggcacataaaaatacaggcccaggacccggggcagagaaacagcggtagcgggaattccctaaaacaacttacatcctgattggctatctttttgcatgttcaccaccggctttatctgcttaaccaccgccgaccttttctttacgcggaaaggtccaatgacgttgacccggagggcgcctaaaggcactgactccgaaagggtggtaactgctagggggacaaggaggagcgtctgggaggcacaggggatgaacgcgggggcagcaactgccctgggcgttacaacaggggggaccc

SEQ ID NO: 122750 - DNA, 218 bp, Glycine max
  Clone ID: PAT_MRT3847_8184C.1
gaaattcctgtatctccctcacaatactaaacgaggagctggtaacagactagatttgtcctatccgatttctttgatggcaacataaatccaatcatgttctccaatccactttcttctttaggatcataatgctgggttcttcatgacttaggaaatccaaatgcctattggggagccaatccgcatgcagaaaaccccagagcttaaaaatcaat

SEQ ID NO: 122751 - DNA, 777 bp, Glycine max
  Clone ID: PAT_MRT3847_81850C.1
ccacgcgtccgctctcgttctgcatctgaaaactcagcgactcgaaaatggagaatcgcggttactacgcctgcaatacaaaggtaggctccgccatggacgtagaccattgccaagaagatcaacaaaaggaggaggaagaagagcaagaagaagatcctttcctcaaattcgtggattacgcaagatccgagctattatcgctggaaggcgatcgaaacggagacgacgacggttccgatggacttggatggagttggatcgtgtctcgtattctcaagacttgcgttgcttattcaagcggcgtcactcccgcgatcttgctctctgaactctctcaggcgtggagtgagcaacgcagggttggggctccgaagaagcctctcgaattaattagccacctcaagaagaattatcggaggacaaagcttccaaacactgtcaccattgattccatatacgagaagaacttcctgtccttgaacagtgttctagaagctgttattatcgatgcatttgtgctcccaggcacaaacatccacatgcttacattaggggattattggagttccaatatcatagatgtgtatctacaccgcagattctatgacttgacaggactgcagaatggaattctgaagcgagggagagagattttcctcactggttgctacctccgaactcccactggaggttctggacattcacgtcttttgccacagagtatcttgtgattctattggatgagaggaatcaggatgatgatgcaatgctact

SEQ ID NO: 122752 - DNA, 1292 bp, Glycine max
  Clone ID: PAT_MRT3847_81851C.1
ccacgcgtccgatttgcaaaaagaggtggctagattggagagtgagttgaaaactcctggtcctgctacctccaattgtgattatgcagcattattgagaaagaaagatcttcagatagaaaagatggagaaggagattagggagctaactaagcaacgtgaccttgctcaatcaagggttgaggatttgcttcgcatggtcggaaaggatcagatatctggaaaagtagtttctattttgtaatttcttttacatatttgagatcatgcctctaaattgggattgtttttgttcaggctagcattaataatcatcttaatctgcaggaaggggaagatatctgggaagatgattgttcagtatcagagtcatccagcatttgtggtcctcatcgtcctaatacacatattagagagttcaacaatcctcattataatgatggagacagtgatcctgatgcttttgcttgtacagaagaccctgatgattattgcaaagaagttcgatgtgttgagaatggggagttagctttaccaatatctggagacgaaagtggaataagccaagaaatatcttcacatttgaatgaagatactggagacagtcagatccaagaaaattcaacattgctggagcagagacttgcatgttgtacagtcaaccattgattctctttgtatgtccttcccctgaagaacacttttccacaggtcattgtcagaaaaaaaataagaatcctatgattaactagaagctggagttgtacggaacatcacatggctggttctcccaagtcaggcggaggagtacagaggactccagccaatggatatgaaaaaggattccctggaagaccagatggtttgcagagaaagtttcctccattaaattatgatggttcaacaagattgttaaggaatggttctcagtcttccatgggaagtctttctgtggatgatcttagagccagcagcatcagaacatctgctgatgaggatattactagcatccagacttttgttgctgggatgaaagaaatggtcaaacaagaatatgagaaacagcttgttgatggtcaggatcaggagacaggaagaaagaacgtgaaagatgtaggtgtggatccgatgttggaggcacctggaggaactccattagattggtctctgcaattcaagagacattaaaaagagataattgaactgtggcaatcttgctgtgtaccattgacccacaggacctacttctttcttttgttcaggggtgatccatcagactccatttacatgga

SEQ ID NO: 122753 - DNA, 640 bp, Glycine max
  Clone ID: PAT_MRT3847_81852C.1
ccacgccgtccgaaaaaaaaaaaaaaaaaaaaaaaaaaaaaaaaaaaaaaaaaaaaaaaaaaaaaaaaaaaaaaaaaaaaaaaaaaaaaaaaaaaaaaaaaaaaaaaaaaaaaaaaaaaaaaaaaaaaaaaaaaaaaaaaaaaaaaaaaaaaaaaaaaagggggggccgttttaagggacccaattttacgcccccggcctgggggggtaaaattttttttttggggcccccaaatttaattcccgggcccgggttttaaaacgggggggcggggaaaaccccgggggtcccccaattaaatcccttggaaaaaaacccccttttccccaggggggtaaaaagaaaaaaggcccccccgatccccctttccaaaaattggccccccctaaagggaaaagggacccccccttgtaccggcccttaaaccgcgggggggggggggtttcccccaagggggcccgttattttggccgggcccttagcccccgctcttttcgttttttccctttcttttttccccccgttgccgggtttcccccggaaggtttaaaatgggggcccccttttggggtcccaattaagggtttaagggacccttaccccaaaaaaatttttttggggggggggtccccgtggggg

SEQ ID NO: 122754 - DNA, 378 bp, Glycine max
  Clone ID: PAT_MRT3847_81853C.1
gcttgcttgtactggaccttatctctatcgtgatactgtactgttgcagaaggtttgtagggtgttgagaggttattacctttctgctcttgagcttgtaagtcatggcaatggtgtcttgaatcctcaattacaagttcctggaaatcctcacctacatcttaaggaggcaaggctaagggtggaggatgctttaggagcatgtctactaccatctctgcagttaattcctgccaatccagctgttggccaggaaatttgggaactgttgagtcttcttccttatgaagtgcgatatcgtttgtatggtgaatgggaaaaagatgatgagcgcattcctatgctcttatctgcaagacaaactgccaaagtggacac

SEQ ID NO: 122755 - DNA, 252 bp, Glycine max
  Clone ID: PAT_MRT3847_81854C.1
ggagggttaagatactgagaagcttggatgggatactagacgccgacttagacaaggcatgtgggtgaggctctccagagttgccatggggagaagtccagtgttagcatagttacgccctatggctcgctcatacactgtaggtagagataccacagtcagatctggagccgctgggcccagtgggtctctcggtcatcctgccacatagctcgccagagcttggggtcacctgtcgtctggagtcagaca

SEQ ID NO: 122756 - DNA, 391 bp, Glycine max
  Clone ID: PAT_MRT3847_81855C.1
tgcacgcttacgcacgcttgcgcttgctctcaagcttgtacctgctaaggttttgacgtatatttatggcatttacattcctacatacctcagacagggtcaacgagggacaccctagacatgctttgtgaccaattctctgatgctggactggactcttgcccttgacttatctgacaacaatggctttgccttggagttcatgcacgaggactaatcttggtctatggtcgaggacttctattcatccaacgctgctgttgactactttaggatatttcgagacagcctcttgaacattacctttgtctcacacgttatgcaactgaaggcctacccctgcaaggctctatttaacatggagcagcagagccctggtacagctcagggt

SEQ ID NO: 122757 - DNA, 546 bp, Glycine max
  Clone ID: PAT_MRT3847_81856C.1
atctagtcctattttatttaaaaataaaaaaatacctctccaaaaatcctgtttccaaatagaaaaatagaaaatatatctagtccaatgaaacaaaaacttgcctaacaaaatggaactcattattacgactaacaagatcccccggtaaatattacaaatcagacttctctagtcaaatctgcaaaaaaagaaaaagaaggcaccaagcagatatgtaaaaccatggtattgtttgatagaccttgacagtgaatcatttcttagttagacaggatcagcagtctctttgacagtttggtccttggacaatgtttcccagttaatttgcccgagtattttaaacctttcatccagtgtcacaaaaccagcatcaggagctactgcattgctagtcccagctttatagagcaatacaacacttgcccccatgtcaggtccatggatttttccggtcaacagaagtcggaggggcatgaaaagcgattttcccttgcgctttagcaattttccaaagcctttcacccacttttgccagccggcatg

SEQ ID NO: 122758 - DNA, 424 bp, Glycine max
  Clone ID: PAT_MRT3847_81857C.1
tccgaggggacgacagaagggacgctccttgactacgggattgtcacatcaaactgtcaatagtggagtattcactatcattttggtctacatgaacgaattatatcttgcacagtggattaaagttctgacgccgttattgatctcaactactcttgagtgattacaatctctatgagcttagttacactttttctcagtgatgatagtgaatgaatgatgatatataggatgtcttaaatgactgatcactgagcctatccagatgaacctactcataaggactactatcaacaacatcactgctagccagttatcactgagaaactgatgcaagagttttcaactagggtagcagaaatttacggttacctgcacttgaggctacatatgaaacttgttgacttatccaattaactgacac

SEQ ID NO: 122759 - DNA, 699 bp, Glycine max
  Clone ID: PAT_MRT3847_81858C.1
gcgttctcttcatcccgctccagccagatttcaccctttctcagtttctctctctagaaaaaccaaaacctggctcctttttttagctctttccttatttagccttcacacactccaaactgtgaaatccatttttagcaaagtaaaaaaaagtgagccagtgtgagagagagtggtcatcagtcatcaccgttgattgattaagatgcagcaatcaaacggctctgattcgacgactacgatggagcagagcgcgccgccgcctccgaggcaatcaccggcggtggcgaggccgcagcagtgggtgccgatgcagtaccctgcggcggcggcgatggtaatgccgcaccacatgttgccgcctcagcattatgcgccgccgccgtacgtgccttaccaccaccagtacgcggcgcagccccagcaccagcaccagaacggatccggcggtgagaacaaaaccatctggatcggcgatttgcatcattggatggacgaaaactatctccatcgctgtttcgcttccaccggcgagatttcctccatcaaggttattcgcaataagcaaacttgcccttcagagggttatggatttgtggagttctattcacatgctacagctgagaaagttttgcaaaatatgctggaatttgatgcccaatgctgaacaaccattccgtctgaacctgggcacatttt

SEQ ID NO: 122760 - DNA, 535 bp, Glycine max
  Clone ID: PAT_MRT3847_81859C.1
cgtgggataagagcatgttctggtgtgggcgtgctttgctcacaaaaaaggaggccccgtctcatcgatgatttctcttacatgctctatttaggatcatcccttcaaagaaagtctctggcttttcttcatatgtagctctaaaagttactccattaaagtaaaagcacaatactatatatatatatattgtatatatatataatcttcatacgcggttaagccttgcaatttttttttttcaatgaatggttttcgtttgaattgaaaaacccgcaaagaaagcatctattttgaatggaggaagggtaccccagaagcaagttcaagaccgtgtgtgtcttttgtggcagcaacaggggcattcgacaagtctttagtgacgctgcgattcaattgggcaatgaactggttaagaggaacatagacttggtgtatggtgggggcagggttgtgcttatgtgcttaatatctcagagagtggatgatggaggctgccatttcacatggactattccgaagattttcaagcctt

SEQ ID NO: 122761 - DNA, 619 bp, Glycine max
  Clone ID: PAT_MRT3847_8185C.1
acgaagctgttgtgaaccttgctgagggctttaatgaagctgatcttcgaaatgtgtgcacggaagctggaatggcagcaattcgtgcagaacgcgattatgtgatccatgaagattttatgaaggctgttagaaaactgaatgatgcaaagaaacttgaatccagtgctcactacagtgctgattttggcaaagactaaaggctattataaaattctgagccatggatatctagggtgttcatcttttgagccagaaatacttcatgcaattaggctaactcagacggtctcttttagctatgccttgtattgtctgacttatgcagttccattgggaagatgagcagttgaattatttgcctaaactaattgattattattttggttttctttgggattatgctctacaaattactgatctttgaattagagtttatgcgtctccccatttatggttgaagaccgctggttgagtgactttgcgttgcaagcttcaataaatctgattggtgtttaatctaagcgaaaataacatattttattcaacgagcgattgtcaaaagtttatcaactcctttggattgagggggggcgcccaattgggcgatcccctggtg

SEQ ID NO: 122762 - DNA, 857 bp, Glycine max
  Clone ID: PAT_MRT3847_81860C.1
cggtccggaattccccggtcgacccacgccgtccgaattcaagtgtaatgtttctttcttcaatccttttacgaatgaagtcatcattgagttcagcgtgccttgttcagctgtgataaaactgtaatttcagccataaaaatgctgatttttttttcggtcaaatatattcagttttttctaaagatcgtgctgtgctttgttgcttctttgaaagtcatgagagtactttgttaggacttaagcacaagaggagagcccaacccaaaagactagtatacttctggcatcatttaaaattactctcacgaaaccctactagttttacatttcacttcgtccatattttttttcgtaatcattaatgctttggatataccttatctttccctttgctgtccaaagatgaaaatggcttggattagtcatgaatctaggcaataagaggttggtgcaaacatgataccggccttgtagctgtgagataaatcatctattaaaaacctgcctcctttccacaatcttgctttttgaattccccacccccgcccctaacattttcttattcgtcattcctatttaatgcaactcattacataattctggggtctattaatgttcattttgacttctacaaaaagcttagttcactttaactaaactttgactgcacattaaaccaaagttgtaacttttgagcacttaagagtaggaggatgcacaactttttttatcaaagttgtttgtgcctttaatgtgtcacccgctcaaccactgtaagaataatcaggtaatttgcccttctaatttgtatatgcagttctatattgaccctgtaaatggttatacattctgct

SEQ ID NO: 122763 - DNA, 1452 bp, Glycine max
  Clone ID: PAT_MRT3847_81861C.1
ccacgcgtccggtgtagagttgacgttagagagattgggggtttcacttttcacggcgaaatgggaaaacgagagaagcagaagcagaggcacgagaagggacaccgtggaagagggtctttcaactatcttcaagaggaccatgattttgatgacactccaagaccctcaccctctgaagaagaatgtgctgatgacagcaatgaggaaaaagaagaagaagaagaagaagaaggtcatgaaaaccaatctcatgatatgccttccaagttcctcctttaccaacaatctgtgcagtcacccaaaggagatataagttatttgcaaaagttctttctcatgtacgtgggtggaaggatgcccctccatcttcaagaagatttctgtggcacggcgcttcttagtacagaatggctccgcagtgattcaagaagaacagtagtaggattagatttggatcttgaggcactcaattggtgcatggaaaacaacatacctaaagttggggctgatggattttcaagaatgtctctctttcatgggaatgttctacaacctcttcagtctaaacttgtaaaaatagatcctcagcagctggtaagtaacatttcactgtcacagaatgaagaaaatcttcagactgatgtgccagaatctgatgctccaacaggctctgttgctcaagatgacaagtatactaagagaaacataatactgcctggaagagatatcgtgtgtgcttttaactacagctgctgttgtctacataaacgagcagaactggttctgtatttcaagcatgctcgtgaggccttgtcaactaaaggtggaatttttgtgatggatttatatgggggtacgtcatcagagcacaagttgaggcttcagagaagatttcccaattttacgtatgtatgggagcaagctgaatttgatattattcaacggaagacaaggattagcctccattttcatatgaagaaggaacaaagaaaacttcgccatgcattttcatacagctggcggttgtggacattgcctgaaattagggattgcctagaagaggctggatttcggtctgttcacttttgggttcgagagatgccagacaccacagaaattatgagaacagaggggtttggtgcgggaaagaatgtaaaatatgaagaggctacaagttttcagcaacaagattcttggaatgcttacatagttggtgttgcgtaacttcatcttagaaagtgtatttctgttgcattaattttgtcataagactcataactggacaagcatcactgttaatcagctccattgcttggaacttgcctttcttttatatgaaaattgaattggatttggcttgagattatcaagtgtaacaaacaaaattttaaaggtacattctgctcaagtttggtgtgaaatttcatcaagagatctcttaccttcagg

SEQ ID NO: 122764 - DNA, 577 bp, Glycine max
  Clone ID: PAT_MRT3847_81862C.1
ggctcgagcacttttcccccaatacagcatgggtttcatcaagatcgtcaagaacaaagcttatttcaagcgttatcaagtgcaatttcgtcgtcgtcgcgaatgcaagactgactactatgcacgtaaacgtttgattattcaagacaaaaacaaatataagacacctaaatatcgtcttgttgtacgtgttacaaaccgtgatattattacacaaattgttgctgctgatatcaatcacgatgtcgttcttgcatctgcctatgctcatgaacttcctcgttatggtattaaattgggtttgaccaactatgctgctgcctatgccactggtttgctccttgcacgccgtgtcaatgacaaattcaaactcaaatatgaaggtaacactgaagtgaacggtgaagactacaacgtcgaagctgatgaagaaggtgctaaaccattcaaagccctcctcgatgttggtcttgctcgtaccacatctggtgcacgtgtatttggagcacttaagggagcaactgatggtggtttggatgttccccacaacgatcatcgttttcctggttctaaacgt

SEQ ID NO: 122765 - DNA, 363 bp, Glycine max
  unsure (1)..(363): unsure at all n locations
  Clone ID: PAT_MRT3847_81863C.1
ctgagtcatcgtctagctatctcgatcgaactgtccaaggtcctgtcactgaagaatgatctccgccagccgcacgtatgcaagagccagccccgataatgcctgattacccgcaaccgataccagtgagcgtggagtcttcaagacgtggtggcttgtagcccacacaggtgcatgcgagtgcgtggcgttaaattagctcaaacgcaatggagactatcgtctaaacggattcggtggcgaatataggcgagtatatcgtagaacccagcattgagccattgtacatggtaccacggccgggattaacaccgaagagcacgtaacaaatgtaaccccatgaaacgagtacntaaaccatgg

SEQ ID NO: 122766 - DNA, 440 bp, Glycine max
  Clone ID: PAT_MRT3847_81864C.1
gttgtttttcttttcttcttcattgctttttccgattgcttctccttcacttgcgttctattttttctggaaaatatccacctcgattttcccggaaaaaaaaaagaaagaagaaaatgctgaacgcaggataattgtcctatctcaatttggattttgtacatgtatcaaaagcaaataccattgtcagctgttggtggactatgttagttgcatgttgaatttgaagaattgcttttgtaccagaaaggtggttttcttgtatactatatatcttacatggtactggttgccataccagaaacgacagaaggagggaaagttatacaaaattgaaggttttgtggagtgagacccttcacattgtctggaatatagtaaagcatagaattgatcaaatcaagggaagactatttgttacaacaaattctaagtttctg

SEQ ID NO: 122767 - DNA, 232 bp, Glycine max
  Clone ID: PAT_MRT3847_81865C.1
ctcgagccgctcgagcggctcgagaacaataggaaaacaaaagaaagctagctgattatgaaaatcatgttctcatttatttatttatgaaatgtgtctgatcattttgaactacttttatcggtcctgcttaatgtctccaccaattggagttaccagaagtaagtttcccttttatgggtaatgattcttccattccatcacgtgaattggaaatagaagcaaaattttt

SEQ ID NO: 122768 - DNA, 452 bp, Glycine max
  Clone ID: PAT_MRT3847_81866C.1
cattatctcccaaaatctcatttccacgatcatcgttttactcgtttccacgatcggtatcagtgcttcaggttttaagatttttccaagttatgctattgctaccatgtccgagcaagtttcgttgaaactcatggaaaataaagagagcgacaatgttatatttgcagaggcaggacaagactttgtgggtgttgctaccatgcctgggcaagtttcgttgaaacttgtagtaaacaaagaaaccaataaggtggtatttgcagaggcaggtaaggactttgtggatgttctcttgagcttcttaacattccctttaggaaccatcgccaggcttgtgcaaaaggactcagatgtcggtccagttcaagttggttgtctaagctcactctatgaaagtgtggcaaatcttgaaaaagagtgtctctggacagaggcatgcaaggaaatgc

SEQ ID NO: 122769 - DNA, 370 bp, Glycine max
  Clone ID: PAT_MRT3847_81867C.1
gcacatttgaacatacgtaatgatgagaaagagagacagaaagagaaagagaaagataatcgttaatctgaatgggttacatccaccatggaagaaccggtctcaggtacatacacagattcagatccgataccggtgtagactcaaactctggcagatcgcattcgcgcgctgcattcgcctcccattccactatccacggcaacatgctttttttctcaaaaagcgagttctatctcaaccaaattatcgtacaggtggtacgcgacatgcgcagggagcaaaacgagcgtttgcgcctctgtctcgacaccgccaacatctacaaggagtcggtgcaggactacattggcgttgggtccctcatcgc

SEQ ID NO: 122770 - DNA, 187 bp, Glycine max
  Clone ID: PAT_MRT3847_81868C.1
tgttaataatgatcaacttcactaaccgctcttggtgcattgtgccagcctcttgttttgttgtttcccgcatgggcatgcaagggaaaagggcgttgtgaaaccacaaatttttatggacacaaaccttcccttaaaatggggcatggggaaaaccggtttttttttctctgagatgtgggcctca

SEQ ID NO: 122771 - DNA, 253 bp, Glycine max
  unsure (1)..(253): unsure at all n locations
  Clone ID: PAT_MRT3847_81869C.1
gctcgagggactgcnatctatatatttaccaactgttataagtctaagcncaaaagacacactgtcgtcttgcagattcttgaggacgaaccacaacctataatggcctacacaagatactatcattatctggatcatccatgcctactgacaaccaatgaacaagaagcagatcaagcactatgagcagtctcatatccaaatccataatgcaccactttatgttgtgtagtagcttgtctccttgcttttt

SEQ ID NO: 122772 - DNA, 284 bp, Glycine max
  Clone ID: PAT_MRT3847_8186C.1
cattcttcagcctgctgtttcccatcaacaagtcacattcttgaacatctcacactcttcatggcccccagcacagaacaaaacccttctctctccatacaaaagcttcactgcagagcttctttcccctgccaaactctacaactgtcttcactttctccattccgtaccacacaatgccttctaacagcgaccctgttgttaggaacgccacattacccgccacattcattgccagactgcaccacctcaacttggtgaagctgcggggattctgtgctgat

SEQ ID NO: 122773 - DNA, 493 bp, Glycine max
  unsure (1)..(493): unsure at all n locations
  Clone ID: PAT_MRT3847_81870C.1
ctggaacacaagaatcaaaagaatgcaacgagcaggcttaccaatctaccctgaagagttgtgccaacggatacttaattgcaatcaagaaagtcaaaatattagcatcctgtcaaatgaagcctcccagcatggtgatctgtcacaaacagactttgatataccagacgtggaattcaaaattttcaaatttcgtcatggtctatcacatggacagtcaatatttgatatgcctgaaagtagcttgtttgatcaaagttcagactcatcccatagttataacttgttcccaactatgcgtcctacaaaacgccctcgggagtcagaaatgctatatgatagttttgaaagttgtacaattaatgctgccccactatttgatcagtatgacaattatacttctgaaaaaatttctgaccatcnctgggtgtctctttcaatggatcccgttcttaacacccactgatagtttncatgggataaccttaccggc

SEQ ID NO: 122774 - DNA, 1744 bp, Glycine max
  Clone ID: PAT_MRT3847_81871C.1
gtagacaacacaatagacataaacttctattttaagaaactacatattcatatcaacaacaataataacagcaaaggcttatctcactaggtgaggtcggttacatgatctcacgtcaacccttcaacacaatacatatccatatcaagttatcaataatcatcaaaacccagagacataaaacccgagcaatccaatgctgttttacatttatatgttccaatgaatttattttacattatacaaataaagttgttggtagctaaaaccagtggtcacgactcagtaaagaagaattcatgagcttcacgatatcgtcccaagacaacattaaagagggggtggattggttctaagagattagagtaggggcctaatactagattaggcagtggtggagaatctgggtgctttgaccaactatactggcacaatgagagtccacttaaacagtaacatgtgtgataatgatctctacgtttacccggtttgtctctcagtccaccctcttgctcctgtgcacataagagaatatattgctgtaaagcaatactgtgaaaaagtggttcttgtgctctccactcattaataaatttataggcaatatttttaaaatcagatgaactggattcactggtgccttcatgctcaccacggcatgttgcatgactagaggttccatccaaactttcttttgcttcagatacataagataccgcaaaaatctgtgatgtctcttccatctgtttgttgataatagaagataatctttgcaatagagcaacagcacctccctgccaaaaggaatagcatccatccaccagtttatttgttctcccctggaatccacattccttaccttgtcggaataccacccagtcaactaatcgaggcagatccaagtgattaacctcaccaatcagaatcattgtagctaatccacaaaaggtgtacccaccatgagcctcagaaccaggctcaccagcaatgccaccctcatatgtttgacagcttataatgtagtctccaacattctggatcagctcatcatccaaaatgttcaaaacacttgcaacagaaatggcagtgtagcaagctcgaacatcaatttcaccttcatcatgcatcctgaatccaccatttggttgcttcatccgccgcagaaacccatacagtttatctctattaattgatgccagggatttctcaccacccaaagtaataagtgaattaacagcagcataagttgtggcaatatgaggcatctggcctggtcccccagcatatccaccattcggatcctggcaacggttaagaaaatcgatagtgttatcttcgagttcgtcgtcgacggattctcccagcaaagcaatggaatggaagatccagtaacagagccagggtcgattagcgtccaagacagaaaacgcggaactgagatggcgtaggcctttggagagatactgcatgtgattatcgcgttgcagctctgacatgaggttttgggcgctgccaggaatggtggcaaagagttggtaaatctgaaacacctgcgactctaccatccactggtcccgttgactcaccgtcggacacggtggcgccgccgccggattcgtatctctctcgctctcttcactcatggtttcgccagaaactgcgagagtttaagagtcaagcttgttttgttagcccccttctgtcgtcttctcgcagccgtcggacgcgtgggcggacgcgtggg

SEQ ID NO: 122775 - DNA, 332 bp, Glycine max
  Clone ID: PAT_MRT3847_81872C.1
cccacgcgttcggaagaaaatgatgaatgacaaagcccttgtgagacatttggcagcctgtgtgtcatttacttctcaagaggtataactactatttgtcgcttttttttaaaaaaaaaatggattgaatctttagtgatgggaacccaaacttcgcgacctcacgactgttaggtagaacaaattatggctcctccgggtgtcttttgccggctgtggagctccggcaactactgtgattattatatactacaacaacaacaacgaccatgtctttcattagcaggtcgtgccggaagcctgctagccgacccgaccaaaagaaacgggct

SEQ ID NO: 122776 - DNA, 238 bp, Glycine max
  unsure (1)..(238): unsure at all n locations
  Clone ID: PAT_MRT3847_81873C.1
gatcctctagagacaggccgcttctcctttttttttttccccattttngtcngcaaaacanaacnncncaccggggagagaaccttaggcaaatttcactaaaaatccaaaccaccccattctattattcccnttttacccatataaaattgacttataactaggcctaataaaaccacaaagtcttttccttttaagtngttttcttaatcctaataaaatttatactttttaaaaa

SEQ ID NO: 122777 - DNA, 210 bp, Glycine max
  Clone ID: PAT_MRT3847_81874C.1
gcaaaaacaatatctggtctagtgtgggctagataaataagttttccctatcagtctttgatatcaagcctatttgagctctcccattcctatccaatgattttgcttgatgagctctccatatgttttacgacccaatttgcttgtctctctaagaagatcaatggcatattttctttgagagataaagatgccttttttggagcaggc

SEQ ID NO: 122778 - DNA, 173 bp, Glycine max
  Clone ID: PAT_MRT3847_81875C.1
gtttcttttaattcttgcctacttttacgtgggcaacgtgttaagggaacgaacaccactctctgtgctggccatataatgagaggctcatttgctatagctctcgaaaattatctggccgcacactcaagccatcagaaatgggacaccatgctccaaaaaaactgtttctg

SEQ ID NO: 122779 - DNA, 1053 bp, Glycine max
  Clone ID: PAT_MRT3847_81876C.1
ctcgagccgcgcgcttgagacacgtgaggaactcccgagaagtataaagagcaacttaacttttcactagcaacattatttggtcatcacatcaaattctatgatcatgccatttgaactgcaaacttttcttggaattgaatttcatttgggggaaatttgcaaagccctaaacaatttggtccaaaaaaaggctgattgagcatgttcaccttcactccatgggggaaatttagaggtaaaagttgcaacgtatggtagaaggtgccatatatttatatttgcatatgatgcattttactgtactatctggtcttgaaacctgttgtggatttctgactagtggaagcaataaagtttactgagtagggcaatctaacattagaagttttcttagagtacgggacaaatatcttatttcaattcttctataggtttatcattttaaaattttaaagttagatatccttccaagtggtaaggcatctattctttttggatttgcttttcggatctatgtctaggcactctatctggacaagataacacgatcaaccaccttttgtataatacttttctacatgtatggttagtgctgaaaattaaagaatattctttcttgaatcgtccaagttgtagactgtaattttggctatatcattggatgaatcaggtttgttttataagctacttggcatcttttcttttaaaaatctaaattcgtactaaatcatgttttgtttaggtgatgatttctctcagtaacaagaaaagtagcaatatactcatttcattcgttttatacgttgaacagaatttataaataggtgtttccatttttgtcaaatgtggatgcaggatgctgatttattgcccatcttgtttttcatatcagtattggtggcttgttctattgtgtcacattttgttattatagtatagaaaatcgtagtttatacctgagggttttacctctgtattctaatgttatatcttgttgactcattcattgatattgcaataaagattttcgtgtgggattctttctaccaa

SEQ ID NO: 122780 - DNA, 440 bp, Glycine max
  Clone ID: PAT_MRT3847_81877C.1
tacggttgcaaaaagacgacagaagggtacggctgcgagaagacgacagaagggtacggctgcgagaagacgacagaagggtacggttgcgagaagacgacagaagggtacggctgcgagaagacgacagaagggtacggctgcgagaagacgacagaagggggcagaagcagaggcacaccaatcccatttaatttatcgttcctcttctcctcttcactttccaaccacccattcattccttttcttcttgcactctgccctttgggaggagtttgtaacatggctgctctacctactgcggagcttagtgatgcaaatgcaacacatgtagcaagtggtgatgtgagggtgctgcatccagtgttcaaggtttatggccaggccacggcattctccggccccattgtcaccgtgaaggtgtttgaagacaacgtgtt

SEQ ID NO: 122781 - DNA, 749 bp, Glycine max
  Clone ID: PAT_MRT3847_81878C.1
gtgttttttttcatattaatacaaaaattaaatatgtttttatatatataattaaaatttcagttttacatctttagctcaatataataaaacttaaaaaccaattatgcaggagttgattacaaaacacaactctctctcaaaataacgccaacgtcatcacgtcggctcggcggctcctcaccagaatcttactccctacaccctgccactgcaaacctatcgtgagctaccccgcggattcctcgtcgcgtcacttgaagattcctttttgtccttactcgtcgattccacacaagcctctcgaaagaaaacgaaaggtcagattagggatttcgttctctaccgaaaccgcaagccaagttggaaattctgcttcggttgaagggttcctctcggtgtgggttttcaatggagaaaaatgatggtttgtggtggctaatggtggatgtgggtgatggagaaagtacttggaactttagaaatggctttggaagaaagaaagaagaagaaatggcgtttttcctaagctacacgaaagcaaaggctgaaatgcttaaataagaaatgctctcgggaatggaagcttctagcacactccagacattctctgaaagatcccaacggtcagagcatggaaaattgtcttgtaaagttgcagaccaaatttcgaaaagatccaacggtgaacgaaggctaggcagcgtttttaccgaggcagcttcatgtagcttcctctagagtcgacc

SEQ ID NO: 122782 - DNA, 432 bp, Glycine max
  Clone ID: PAT_MRT3847_81879C.1
aaatcatactctataaaaatgacctatccttttgcgcatcaatcacataacaccgggcaggtcctctttggtctgtagaggcgatccattcacaatcttataagcattactaccatatagattaagaacaaaaatcacaagcacaaaagacttatccacctcaactcttgtttatctcaacgccataactaattctactactactttaacaacaacctctactacaactacaaatactcatacagattataatatagtgaaccataagctcatagctaatttcaaaacctctgcttccaccctcatatacactctgactatcaacaaacgaattgatgatacttccaatatgcattgcaattctcctattttacaacttgttatctctgatcttcatcccaacactgaactttatacatctacacttaactc

SEQ ID NO: 122783 - DNA, 259 bp, Glycine max
  unsure (1)..(259): unsure at all n locations
  Clone ID: PAT_MRT3847_8187C.1
agaggtgatttcagtgagtgatcgggttcacttgatctcatcataatcgcagcgtgatggaagaagatgccgatcagaaacatcgccgtcggaaggcctgaagaggcgactcaccccgacacgttgaaggcggctttggctgattcatctcaccttatcttcggttcgccggctcggctccggcatcgctacaacagctcccgacnacgggcttgccccctgcggcctatcttcgcttcattgccatgcattcgccctt

SEQ ID NO: 122784 - DNA, 543 bp, Glycine max
  Clone ID: PAT_MRT3847_81880C.1
aaaaaagcaggttgaattcagatctgccacaagttgatggagtgcattgtccaaaggatcaaaacatgtcaatgcctatggaacatagagaggagggtggtgactcagaaagtgctgaaaaacctcaaggtagtcaaccttaggcacctcaagtaactcctgatagtgatatgttaatttgaattttctctagtacacaaggtttacaagatggattcagccgggtaacagatattgtacgtgaggggtttcaaagggctgacaaaaggtttgatgattttgataaacattttgaagatcttcaatatctctaccagcaagtctcatcccaatagaatgtagtttatgtcaattgctgacattaaactactcttttagatcatatttgtctacatttgtagaacaagcttatctttgttagtgcacttagaatttctattatggattgttattataatgtgttgaacctttgttatcttttgttgtatgtggaatgattgtgatcatcaatttaagtctgagagttgtctcttgaatctagtc

SEQ ID NO: 122785 - DNA, 372 bp, Glycine max
  Clone ID: PAT_MRT3847_81881C.1
agagcaagcatctttggacacacagataacatcatctaatattggctttaagctcctccaaaagatgggatggaaaggaaagggtcttgggaaggatgaacaaggaatcattgagccaataaaatctggaattagagatccaaggctggggattggtaagcaagaagaagatgatttctttactgcagaagaaaatatccagcgaaaaaaacttgatgttgagttggaggagacagaggaacatgtgaagaaacgggaggtgttagctgaacgtgagcaaaaaattcaaactgaagtgcaagaaatccgaaaggtgttctattgtgatctctgcaacaagcaatacaaattggcaatggaaattgaagcaca

SEQ ID NO: 122786 - DNA, 621 bp, Glycine max
  unsure (1)..(621): unsure at all n locations
  Clone ID: PAT_MRT3847_81882C.1
tttcaaacaaatgaaggaaatgcatggtagtagtagtcggacngataggcaaaagcgagaacagcagcgtcaagaaagagaaatggcaaagtttgctcaaattgctgatgctcaaaagcagcaacggcttcaactgcaacaagagtctggatcagcaacagttccatcggaatctaaaactgctactgcacttacggatcaggagcagcgaaatactttgaagtttgggttttcttctaaaggcagtggttccaagattacatttggtgccaagaagcaaaatgttgcaaagaagcaaaatgttccgatctcctctatatttagtaacgatagcgatgaagactaatgatggaacattactcgtgaagtgacatatcagcgtgatgatgaatctcctgtgtggtttggtgtggtttggtttgtattagctgttttatttgataattgttgccatcctcggttcaagaggaagaaaacatttgggattatatgatagtttggagtttggtagaccaaaaatgttacctgcttatctgtgaggtaatgttatgtttgtaaggattttatgtttacgagagtagcatggttatgttagttttcatagttcaattattgatgaat

SEQ ID NO: 122787 - DNA, 437 bp, Glycine max
  Clone ID: PAT_MRT3847_81883C.1
agatttgttcaacgctctcttcatttcttgatcaatcctcacactcttctttccactgcgaaacgaaacctatcattccatgatgcacagctttttgatgaattggtgattggtgtacggtgtacgtaaaatgcgttgaacaacaaacaaaagttttgtctttctgagtgttgagttgtgataggctgaggaatatgaacatggatatggctggtagtttgccgcagtcgagagtgttgcatggaggtgtggggacgagttacaaacgcagatcagtaggtcagttaggttgctttgattttagagggagagattttggttgtgcttcttttggagactcgagaagtgtttcgagattgcggaggagtgggatgaatgtttctgcttgttggaataattcgagagtagttactggtagggagtttaaggttttgaat

SEQ ID NO: 122788 - DNA, 635 bp, Glycine max
  Clone ID: PAT_MRT3847_81884C.1
cggacgcgtgggtttttacttcctttctttcagtatcaattttgtatgttcctaacattgggattctttacctgaaagtgatttgattttggtcattggtgttgtccttgattttcaatgttttatcttggtttttgaaattgacatgggcttgtgtttaggaatcattgagccaataaaatctggaattagagatccaaggctggggattggtaagcaagaagaagatgatttctttactgcagaagaaaatatccagcgaaaaaaacttgatgttgagttggaggagacagaggaacatgtgaagaaacgggagaaggcagcatatagcatatatgcatgtcttttgaccggattggtatgtcatatggaatcatcaactttggaaggtcttgagaatttcctgcagtttttattacctggtggcttcttctgcctgcttcgtgcacattatgaaaattcaggtgttagctgaacgtgagcaaaaaattcaaactgaagtgcaagaaatccgaaaggtgttctattgtgatctctgcaacaagcaatacaaattggcaatggaatttgaagcacacttgagctcttatgatcacaatcacagaaagcgtttcatacaaatgaaagaaatgcat

SEQ ID NO: 122789 - DNA, 1702 bp, Glycine max
  Clone ID: PAT_MRT3847_81885C.1
cctcgccccacgcgtccgccacatcacatctgaatatctcacgccgaagaccgtgcgttgaaatcttgcaaggacgagatccaagcatcgttgttttccttcccagaatttacgctcttcttactatcatcaagatacaaaatggaatatcgacggaccagtggtaggcaggaaaccggtggccgtgacagaagacaatctaaaagggaacaggcatatcaggactctcttattgaggatttgtcacaggattttcgtttgccaatcaaccacaggccaacagaaaatgttgatctggacaacgtagagcaagcatctttggacacacagataacatcatctaatattggctttaagctcctccaaaagatgggatggaaaggaaagggtcttgggaaggatgaacaaggaatcattgagccaataaaatctggaattagagatccaaggctggggattggtaagcaagaagaagatgatttctttactgcagaagaaaatatccagcgaaaaaaacttgatgttgagttgaaggagacagaggaacatgtgaagaaacgggagaatttagcatatagaatttatgtaagtatcaagagcagataaaaactttgaagtttgtgttttcctctaaaggcagttgttacaagataacagaaggtgccaaaaagcaaaattttgcaaataagcaaaatgttccgatctcctatggaattagcaacgttggagggtcttgagattttcctgcagtttttattacctggcggcttcttctgccggcttcgtgcacattatgaaaattcaggtcttagctgaacgtgagcaaaaaattcaaactgaagtgaaagaaatccgaaaggtgttctattgtgatctctgcaacaagcaatacaaattggcaatggaatttgaagcacacttgagctcttatgatcacaatcacagaaagcgtttcaaacaaatgaaggaaatgcatggtggtagtagtcgggatgataggcaaaagcgagaacagctgcgtcaagagagagaaatggcaaagtttgctcaaattgctgatgctcaaaaacagcaacaacttcaactgcaacaagagtctggatcagcaacagtaccctcggaatctaaaactgctactgcacttacagatcaggagcagcgaaatactttgaagtttgggttttcttctaaaggcagtgcttccaagattacgtttggagccaagaagcaaaatgttgcaaagaagcaaaatgttccgatctcttctatattcagtaatgatagcgatgaagaataatggaacattactcgtgaactgacataccggcatgatggcgtatttcctgtgtggtttggcttgtgttaactgttttatttaatatttgtcgccatcctcagttcaagaggaagaaaacatttgggattacatgatagtttggagtttggtagaccaaaaatgttacctgcttatctgtgagatcatgttatgtgtgcaaggattttatgtttacgtgagtaccgtggttatgttagttttcatagttcaattattgatacttgaatcacgatgcctaacccatggctaacaaaaatgtgtagtttcgactttggagtatattgcagatgaaagttaattgggctgaactcactactgataacaaaacaccgtaaaaccgttcgttagctgaagctgaatgccgtg

SEQ ID NO: 122790 - DNA, 465 bp, Glycine max
  Clone ID: PAT_MRT3847_81886C.1
cggctcgagacggctgcgagaagacacagaagggacatggctccctgcatggacatgtagaagatacattcattcccgggatttttttctttaatttgtttttatcttctttcctaagtattgttcaatgaatatgaatttgatcgacaacgtttacctatactataactataagccgcccctaaaattcttttcttggacaatgcaaagttaaagtcatcatttctaaccattagtatacataacatttttttataagaggttatattgactactacttcatgcccgtcaattaataaaatgaaattaactattctcattcatttatgaataacgaaacatggaaatgagattcacaagttgacgtgcaagctgacaatacaacttaatttgtttcctgtcaacaacttaacagtcaactgaaggaacgaattccatcgtcaagtgatagatatgcaaaacata

SEQ ID NO: 122791 - DNA, 389 bp, Glycine max
  Clone ID: PAT_MRT3847_81887C.1
ggttcttaatccatttacttttagatgcggttttgaatatagcttttgttagaaaggaatttattgtgctgtgttattaccacacacaatacctttatttataataagaattgatacatcataagggaaacctaataatgaagattaaataaggaaatccctaattttagctatacaattaaagcatatcaatcatatcctaattgtatatttcacactaccctcaagctagagcattgtcacataataatttggtatggtgaaacgtttccaattttatcttttggagaaagtgccttaatgatgggaacttaaattcaactgctggcatgacacaatacttaacttcggaactagatttaacaaccgatttttgcttcttgaacttt

SEQ ID NO: 122792 - DNA, 1529 bp, Glycine max
  Clone ID: PAT_MRT3847_81888C.1
tggaatttcaatctcgattttctttttaagaataatttattagtaatttggtacaagtagaactacaaattaggctgcacgtgagactaggtgtggaaaaggcaccataaattgacagattcctggatgctaagaaatctctatttttgatatgaaaaggaagggcactggagagttacagtgagatttggaactccaaccatcccatgttagggtttaccatcaacgcttggaattggttcctcgtgcacagaagccagtgaaagtcttgtctttgcattattttgctcaaacactttaggagagcttagcagattccgaccagattcttgaatctggcaagtaattatggctttggcagtaacaagagatgcatagaattgatcttgttcaggtggcttctgaaaccctggcgactcatctcttctttctaagaagggaatatcctgcagcttccttttgtgcatctcatccttaaccatctgaatcaagttgaagtcaagcttgggcggtcccacttgcgccacagcaatggatccaaagaagttccccaacagagccgcatcaggcacggccaggcccctcacaatccccgccgcaaacccgccgagaaaacagtccccggcgccggtgggatcaacctgatcagcctcgaacggcgccaccttaaacgcaccgttttcacaaaacacctcgcaaccatccttcccgtgcgtgacgaccacgcaacaccacttcctcacctcctccacgtcaataaaaacggcctcatccgcagaagccttgagaaacgccacacgcggcaagaggtggaagaacccgctctctcttagcgccacgtggctcacgcgaccgttgatgttgtcgaacctgcgaatcagagcctgaatgtccacgaacacgtggtcgcagatcgagagcattttttccactgtctccgggagaatctcaccgccgaccccgaccgcgagtccgaacccgaaccggggttgttggtccgggaggtcggtgggttggattgaatcgcaggatcggacgcggttcaggaggcggtccgggtggcccgaaccgaagtgagcgtggaagagcgtggtttgggaggttgggattattaacggggggtgattcgatgtgtcggcggtgtaggcgaagttggggcccaccttggagacggtgtggaagggaagggagagggcatcgaggataacggagatgaaggaggcggcgccgccgagggtctcggcgacggtctcgccgtcgcggtggaggacgtcatgacagtagttgccgacgacgaggccgcgccggggaatgatgggcttggagtctgtgaccatgagggtcgatcatgggagggaaaatacgaactttttttttttttttatgggttgggagaagagttgatgtaaatgcaagaagaagaagaagaagaagaagatgatgaagaagaaaagaggaatagtggtaactgtggggatgtgaggacgcgcgccagaatgagaatttggtgtcacgttatggtggctggc

SEQ ID NO: 122793 - DNA, 552 bp, Glycine max
  Clone ID: PAT_MRT3847_81889C.1
gtcttcttaaagtagccaagattaagccagttactaaccagattgaggtgcacccatacttaaaccaaagcaaactaatctcttactgcaaagagagggatgtccttgtcacagcctacagcccctttgcttcgcctgacaggccttgggccaagcccaccgatccttccctactagatgatcctatcatcatatcgattgctgacaagcacaagaaatctaatgcccatgttattttacgctacctgatccagcgtggcactgtgccaatccccaagtctgtaactccttctcgcattcagaccaacttccaagtgtttgactttgaacttactgctgaagaaattaagacaattgatggactagattgcaatggtcgcatttgtccattcaatgaggctacagaccataaggattggcctttcaacattgacttttaagtcgccattgatgtgatcccggagtttattttcagaccaaaacctgtgtatctaaaactttgccagtattattgttaatttttttgtcttgttttgttttgatttggttgag

SEQ ID NO: 122794 - DNA, 361 bp, Glycine max
  Clone ID: PAT_MRT3847_81890C.1
ctcgagctttatttgcctcggggagcacaaaaaaaaacggggtccgatcttttttttgagggaaccacataactaacaaactagaataggagttagagattattgggagtgctgtaatttttgtttttgccattaacatttcatgccctattgtttaaggtattttttcagattttcttttttttttattattttgactcttttgttgtttatgctttctttgcatgatttaacatttgtttcttttattttttctatttgtttttatcggttgtgggtgggtttcttattttaaattttcttcattaatatattattttttcatttagatttatttagaattatttatttttttattttt

SEQ ID NO: 122795 - DNA, 246 bp, Glycine max
  Clone ID: PAT_MRT3847_81891C.1
gagtggtcgcaactgtaagtctgaacgtcgcagactacgacgacggtgacgaggacgaggagtccgttgccgcggtggagcctcctatggtttcgcaccaggcgcctcgtgtctgtacatccaacagggcagtcattacccccatcgaatcgcagaactgaacgaggcgaggtttcttgttccttcacgaatgggagcatgaggcaggagagcgagtggaatctcaccgaccttgacggtcgcgct

SEQ ID NO: 122796 - DNA, 349 bp, Glycine max
  Clone ID: PAT_MRT3847_81892C.1
gaacaaaagggggcacattggtgttttgactgcttcagctgctgttaaaaaagcattggcataaacgggtgcagatccttgcaacgtttttaggagtttttttcccccaggaatgttattatttcccaaaacaactgggttttttttaacataaatactggaaattcctcgccccccacccaaagggggttatttaaaaccaggtggaccagacacccctgtaaccatccacaatttccctatagatgggctgctccccaagcggggggggacaaaggccttttcaaaaacaaaaaccaccttggcaacggaaagggtttgtgcaaaaacattggaactaaacaattct

SEQ ID NO: 122797 - DNA, 468 bp, Glycine max
  Clone ID: PAT_MRT3847_81893C.1
cacaaattggtactttttgctgcatccatcatcatcttcttttcaattatacaccattgaattgaaataccatcatgtacatgcttttgctttagttcactttttgtgtgatcatggttccccaatgtggtgagatgagacaggcaacattgtttttactgttttctgcattttagggatccaacgttaatgataatttgactgctaccttctattccctaaaacctgtttgggattgggattgggaattttggattcaatttgaaatggaaaaagcttttcttcagggttttgcacttaacaacaacaagccgtttaatatattaaaagactgaatggtacttgtggttgtaaccacaagattttaggttctttgattaatattttgcattgatagggcctctggaacttagcaacgtctgtaatgtgtgaattcatagttttgtttgttttggtttaatttttcat

SEQ ID NO: 122798 - DNA, 902 bp, Glycine max
  Clone ID: PAT_MRT3847_81894C.1
cgtacgtattctcgtattctgctcgagctctggttcagctagtcagaactttggccttctgcaggtattctagtagtcaacactgcaagcccatgtataagtcttagaatgagagatcatggttcaagacacatcccaagctttgtaagacctcttccggcattccttggtatccaaatccaaacaaacaacattcccattcctatttccaacgaagttcttattttctctgtgttggtgaaactgaagtcccatgttggcacgcagcagtctctgcacgtgccacatggtgttctccgtcgaccggattactcccaccttcgtgtctgtgttttctgccaaggccagagtgttggctttccgcttccaattgcggaggaacacagacctcgttaccgcccaactttccaactctttcgccttcaatttcggattggattcccagagtttgaattccattgaatcccatgctgcaccacagttgccttggactggtccagttccaggtgacattgctgaagtggaggcatattgtaggatctttaggaattccgaaaggcttcattctgcgttaatgcatgccttgtgtaaccctttaactggtgaatgtagtgtttcctatgaggttccgtacgatgagaaacctcttctagaggataaaatagtatctgtccttggatgcattgtggctcttgtgaacggtgggaggcagtatgttctttctggaaggtcttcaattgggactcccttttgttcagcagaggtcagcgtcatggaggatacgctccccccccttgcccttttcaggagcgagatgaaaaagtgttgtgagagcttgcatgttgctcttgagaattattttattcctggcaatggttcgagcttggatgtgtggaggaaac

SEQ ID NO: 122799 - DNA, 861 bp, Glycine max
  Clone ID: PAT_MRT3847_81895C.1
acggctgcagaagacgacagaaggggactgagaaaatcagataacctctgtcaacacctgtctgtggcgcgcgagagagaaatcggagatgtcatcaaaccctaacgatcctcgtcagccctcggcggcgagaccctacgtggcgccgcagatttcgccgcaggaccttccgatcgactacgccggcttcatcgccgtcatatttggcgtcgccggcgtcatgttcaggtacaaactgagctcttggctggcgctcatattctgcgcgcaatccgtcgcgaacatgcggaatgtcgagaacgatctcaaacaagttatgatggctatgatgttttctttaatgggattgataacaaactactttggacctcctagacccggcaaacaaagttgagatctcaagattttgaggcagaaaaaacctttttgtggggtcttttcgggaattaaccaacaagcgtgaaaggaagttttagagtgtcattgaaatgtttcactgttcttcgtgttaaagatgcttgcgaagactggatacctgcgtatttggataattttatagtttattgatatttatatattagagatggagatggtctgaaatatgaggagagctatatttcctctttatgctactgtaatatttttattgttaatttatttgaaattatagtcttttaataagagtatgtgtttcattttaaaaaaaaaaaaaaaaaaaaaaccctaaagcggccgtgtagagcgaaccattcatacgtaatccaaaagtctcagaaagaaacgtgtggaaattactgaagcaagaaaatatccagacatcgtcaattacttaaaacaacagaatacgtccggacgcgtggg

SEQ ID NO: 122800 - DNA, 385 bp, Glycine max
  Clone ID: PAT_MRT3847_81896C.1
ccggaatcgccgaggcgacccacgtttgtcgatttttggtgggaaaatgaattcctctgtccattgggagggagaccttgtttctatgggcaatgctgttaatacatataagcaaacggagagggaacggatatcccgatctaggagaaccactccccctggtgtgccctatggtggacacactatacaccaatgctggaaattggtcgattgggggagacctacatgtcattgaaacaatggagccaatgcagggcgcgatcatattgagatgtgtgcaacagaactccatgcatagttcacaaggcgcactgcagatgctgcggtaggcttccagctccggaatcctgttcacaatgggcacgctatgctaatgactgacacc

SEQ ID NO: 122801 - DNA, 241 bp, Glycine max
  Clone ID: PAT_MRT3847_81897C.1
acggctgcgagaagacgacagaagggttctgacatctaaatcaataagtacaacctctcatacttctatctgcatatcagtccgattcatgtttactcatcccattgagcagaacaatctaattcatacaacatcctcacagatatcttcagttgatagtatccaaggatttaaattacagttgcaatcacagtcatggttaccgaaatttcaggcgaatgtggctgatacagcacaaaac

SEQ ID NO: 122802 - DNA, 412 bp, Glycine max
  Clone ID: PAT_MRT3847_81898C.1
ggattatggttcttgtgccataatgaatcgaaaaccatttcgttgcggtcactccttcgaagaactcgggttcagatctgaaccggactcgtgtgaagagagccacagtggctgacggtctccgttcacttactgcacctttcatgcccttctaacgtgtgcgaccagattttgatagtaggcgcctcaacgacgttcgcagcgccacgcaagaggccaaatgccggagggtaatgccgtcggcgtgagatcgctgctggaccacgggcgtgatgccggctacgccgaattggcgcggtggttgcagtccactggcctgctacatctagactatcccctcgataccaccgtcatctatcgtcgccttctacctaacctgtctatgcacggttatggagcacaaactactgat

SEQ ID NO: 122803 - DNA, 189 bp, Glycine max
  unsure (1)..(189): unsure at all n locations
  Clone ID: PAT_MRT3847_81899C.1
gatcgagtctttanctcctttcactagcaaaaaagcattcaattaagatatttgcttggtgcagaatttacttgcacgtacataatatatggatagtacttctttattatttttggcatcacaaaatataagtganagaagtagtgtcattcattangcatggttataccnattnctatggagtacaaa

SEQ ID NO: 122804 - DNA, 1557 bp, Glycine max
  Clone ID: PAT_MRT3847_8189C.1
attcacgtcgcgcgtcattccgccgtcgtcgcaatcgcagggatccatcatcacaagttccgtgaaatcaaatggtcgttttctctgtgaaacctttcttcagaattctcgttgtctccctctcactcctcttccttctcgcactgcaattgccttcttcccttttctctcaagttcacatttatggggaaccctccttaggggaggtggatatatggagtgttcggagactcatggaatggagaccttgcaattggtggctacaaggccgtcaaacagctctaccattagaaacttatggatatatcagagtggattgctatggggggctcaatcagatgcgaagagatttctgtgatggtgtgggcattgctcgtctgttaaatgcaacccttgtcttgccgaagtttgaagtggcttcatattggaatgaaacaagtggttttgcagatgtatatgatgtagattactttatacagcatatgaatggctttgtcaaagttgtcaaagagttaccaccagagattgcatcaagagacccagttcgtgtggtctgcagaaaccgctctgggccatgcttgtttcatggaagcgttcctccccctttcttgaaaactcaaagacactcaacttctacctgcaatacctaaaccatttttgtatcttcatcttcgtgcaaaagctgctctgtgtcaagcttgtcacaaggcattgcgggtcctctcaccagatccttggaaatgaaagcctctcagcttctagatgcaatacctaaaccatttttgtctcttcatcttcgttttgagccagacatggttgcttacagccagtgtgagtacccggacctgtctcctgcttccatgaaagccatagaagcagcacaagtggacagaaaaccatggactggagagttagcccgtgtttggagactacgtgggaaatgtccacttacgcctaatgagacagctttaatacttcaatctctttccatcccactaaccacaaatatatacctggcagctggagatggtttgatggaaattgaaggtttgacagatacctataccaacatagttaccaaatcaagtattctcagtagagaagacttcacaagcatgcatggcaatacaaaagctgctttggattattatgtatctattaacagtgattcatatatagccacatattttgggaacatggataagatggttgcagcaatgagagctttcaatggtttatacaagactctatttttgagcagaagaggttttgcacaattaacctcacagggtcttagaggaaagaagttgatgcaagccctatggaagcttcacagagatgattttgccaatggaagaggctctgctctgtccgagtgtttttgcgaattcaagttgtgattttggatctcggattcatcatttttgtagttttgacattattaatttaatttggcttttcacttttcaggaaggcacttcttagcttctgtcagcttgtttattattttgtattgaatgtgatgctttttactctccctaatgaaatttttggccg

SEQ ID NO: 122805 - DNA, 347 bp, Glycine max
  Clone ID: PAT_MRT3847_818C.1
gtaactgtaaatatgggtggtgcttgttaatcatattcttattcaaacggatgtcattgtacactatgagtatcagatttctattatttcttgttggctcctgacgatactagaaggcctcaattgaactttggtttcaaattccttacaacgaaaatcatgtttttgctagagaggcgtgtactgaaggagtcctttggtgaacttattctttgtttggaagtgtgatattagtaagacaggatactgatttatttatatggtgtgtaagtgcggatttggcttctgaagcatatgtttgaaagtcaagttataaaggaaaattgggggaggatgataagtttttc

SEQ ID NO: 122806 - DNA, 1891 bp, Glycine max
  Clone ID: PAT_MRT3847_81900C.1
gcacgcacgtatactttgctctgctccttactccaaagtgcccctctctcgcgcttcgtctttcaccaccgtacaatttttccgcagcttcaacgcaacctgatcgagcaattccagcattcactccgctagcgtctttcactcataaaatttggtgaaatagtggttattccgctctttattctccccccttcgttttcaatttcgcttttgttttcgtgtaatctagggtttcgcattccaaggtttccatgctaggttttctcgaaaggagcctatagcttatccacatgcttatgatttagtttttcttttttatttattaattttggcctctgtgttgtattttaggaacgtttcgtgaaactcccaaaccagaagccgaagtttccaagtgaaaatggacggtacgtttgacgatgaagctgaaccggccgttacaatccgcgagtacctggaggaagttgaggaacgggaactggaagctgatttagttttggggggtgatgatggcaaggagtgtacctatagcaaaggttatatgaaaaggcaggcaattttctcttgcctcacctgcactccagatgggaatgctggagtttgcacagcttgttcattgtcttgccatgatggtcatcagattgtagagctatggacaaaaagaaacttcagatgtgattgtgggaactcaaaattcggtgaattctactgcaagattttcccaaataaagatgtagaaaatgttgagaattcatacaatcacaactttaaaggttcatattgctcatgtggtcgcccttatcctgatctagatgctgaagaacaagtagagatgatacagtgctgtctatgtgaggactggtttcatgaggagcatcttggtcttgagtcttctgcggagattcctaaagatgatgagggagagccaatgtatgaagaattcatatgtaaggcatgctctgaggtatgcttctttctaaagttatatcctgaagaaatatgggcggctggaaagcagccagacgctactgtccaaattagcaaggacaaaggtgtcttggaagacatcctttcaacttgtcggtctgaaaagccaacttgtgatacttcatgttgttctcctaaagttgatgatgtacaagctacagttgattccaaatctatatctgatgggaagagtttgtctcagggagaaaattgtaatggcagtatggcttcaaatcaatgcacaaaaagcaccgatttgcatgttaattgtctccttggtgttaacattattactgtttccccagttttacctggtaaaccaatgttcctttccaaaaattggagagatgctctatgcaaatgcaataattgtttggagttttacaagcagaagcagattgcttttctacttgacaaggaagactcaattgcggagtatgagcaaatggccaagcaaaagagagaagaaaaattgcagcaacaagagggtgctgagttaagtttttttaataaacttggacatgtagagaaagtggagatcttgaagggcattgaagagatgaaggatgggcttcgtgctttcctggagtctgcagactcgtcaaagccaattactgctgctgatgtccaccagttttttgatgacattaagaacaagcgtcgccgtgtacagtagtgagtttttgatgtcttggctgttcaaggacgttgttagtaaaaactttcagactgttaagagtttatttgtattgtctgatgttcgaaactaaaactctaaaagcctgcatgctttatgaatatttatattaaaatgctctacttgtatcaactttgacttactaaactcgttttggttcctttgagttaatttggatataacatatggctattagattcttagact

SEQ ID NO: 122807 - DNA, 516 bp, Glycine max
  Clone ID: PAT_MRT3847_81901C.1
caatatcctattataccttagtaaataatttatgatactatgatgagagcacggttcccattactgctgctgggacttgtttctctggcttcagtttctgtctcatttgtcattgcttactgtgaaaaagagaaccccaaacacatcaagtgtctccagagttgcaatatcgagacacactcgtacaggaaccaagcatgccacgctctatgcaacctccttacggtgtagacagaagactgtgaacaaggtgaaattacacgaccactgaccacgaccacaacacccggagagggaacctcagcaacccagtgagaaggacgaagacgattatgagcaaccacgtgcaatccaattctcacgcccacaacctcgtcatgaagaagatcacgagcagagataggaacaggactggcctcctacggaggaaaaacgcgcataaaaggcaagtgaatacgatgattaggatgaggatgaggaacaagatgaacgtcaattcccattctcacactcacc

SEQ ID NO: 122808 - DNA, 209 bp, Glycine max
  Clone ID: PAT_MRT3847_81902C.1
aggtgtcagaacagacgtccgtgatttcacttcattttgacttgatgctgcggctactttacaactgcatcatcgtatcatcgtcacctcatcgacagacactattcagggggggcggggcaaagccctgctggcaacaatacctttgtgcaatgtcttctctagcagatgccaactaagttctacaccttctccaattccattgttac

SEQ ID NO: 122809 - DNA, 153 bp, Glycine max
  Clone ID: PAT_MRT3847_81903C.1
ctactctaaaaccaaaatgccagcatacaatgctgagaccatggaggccatgcataacaaacaggtttggggcccaggggtacatttgatgctgagaacgacaaccagggtctttgatgattccgcgggaagaacataccaagcagctacaca

SEQ ID NO: 122810 - DNA, 341 bp, Glycine max
  unsure (1)..(341): unsure at all n locations
  Clone ID: PAT_MRT3847_81904C.1
tngcngcangcgtacgtaagctcggaatacggctcnngannanncagcttgcaaagctaccctgaatcaatcagatgcatnttgcnanagntgntactcnctggnantngtcatccaatatgatgacaacaaanannctagcctgtggtnnatatgtagttcngagaatccatntnctggngtttctnntggcntgtcatgcgacnttncagtgnncctntaaaacatgatggttcaggaattgagcaaggatggtgngcgttccnaagcttgnatggatgcatctnactgtgtctnttgttggnnancntatgattnantnggntnctgnanataanaac

SEQ ID NO: 122811 - DNA, 554 bp, Glycine max
  Clone ID: PAT_MRT3847_81905C.1
accttttaatgcattttgctgggtctctgctccaatttcaagtagaacaatgggagaattattcacccaaaagaataaataaaataaacttgtatctgtaactcaaattgcttattgatggaaaccaattacaaatcttagtataccagcaacatcagaacgtatttctaaattgcagaagcttccatttctataattttccatgtaatcaacaagagccctgcactgctgctctccatttgtctcaaaagcaaaaaatccagcaggtttcaacattaaagcagccccatcacaaagatggagaagagcatccatgccatcagtacctccatctaatgcaactctaggttcatgcctaccaacttcagcttgtagaccagagatgtctttacttggtatgtaaggtgggttacttacaagacccgctagctttccttccatatctttcaatggttcaaaccaagatccttcccttaattcaattttgtcctggaagcaatacctctgcacattgtaagctgcaacagcaacagccacagggccggacgcgtggg

SEQ ID NO: 122812 - DNA, 368 bp, Glycine max
  Clone ID: PAT_MRT3847_81906C.1
tttttactttttttttttttttttttttttcttttttttttttttctccttattcggcgcggcttctttatcttctttttgtcttgtcgttgttatttctgtggatttcttctgtttctgccggggggaaaaacactttttggccccccgaggcctacgagcctgcgaagcgtgtgtgagcctattgaaggaagccaccgccgcacaaagattccctcatgctgctatttgccggggggagctgaacaatattgccccacactctcttgtaaatcgtacagcggaggttcaacccccgggggcaacgatcaagtcccccccctaaatatagatggcccaccccagccggcacacccgctataccaaaa

SEQ ID NO: 122813 - DNA, 2102 bp, Glycine max
  Clone ID: PAT_MRT3847_81907C.1
aaacgacttaatagaaaaacgaaggaacaaactcaaagatgaaggtaaggtatgtggttaagaaaagagaatagagaaagaaagaagtgaaaatggcatcccatattccattaggattttattgttgttgttgttgttataaaaaagaaaagaaaagtggcgcacgggtgagtagtgagtagaagcataataataaccctgttagtagcgtgcgtgaaggggaggggagagagggataagagagagaaagcagggtgcgtgtttttagagagagagagaggaggaatcaggcgaattgtgtgtggtttggtttggggcatggaagggctgggcatgctgaagcagctcattggtcagcttcagcagctcttggacacttaccagtctcaatctcattcttcttctactctcattcttcaacctcctcacactctcatctttcaacaacaacaccccagatggacgacctcccttgacattgaagataactctgtagatgacttctgtggccttgtaatgacagctggaaagtctggcagtttcaggatgtcggagcctggaaagcctccacctactaagaagtctcgaagagatagaagcaggggcaaatcatctggaagatcttgtacaactgaagttatggaacaagaaatttggaaagattttcctgaagatttatttgaggctgtgattgcacgtcttcccatttccacatttttccgcttccgttctgtctgccggcagtggaattccatgctgaattctcaaagtttttctcagcattgtactcaagtcacacaagaaaatccatggttttacaccattacccatgaaaatgtgaattcgggagccatgtacgacccttctttgaaaaaatggcatcatccaactatatcaacaccgcccacaaaattgattgttttacctgtggcttcttctggcggcttagtttgctttcttgacattggtcatcgaaacttctttgtttgtaacccactgactcaatccttcaaggagttgccagctcgatcagtcaaggtctggtctcgtgttgctgtagggatgatggcaaatggaaactttgctggttcaggctacaagatcgtatgggtaggttgtgatggagaatatgaagtatacgactcagtcagaaattcttggagtcgtccaggaaacatgcctgcgggtatgaagctgccattgtcactcaactttaggtctcaagctgtctctattggcagcacactttatttcatgcgttcagacccagacgggattgtttcctatgatatggcaactggggtttggaaacaatatataatcccagcgccattgcatctgactgatcacactctggctgagtgtgatggccagatcatgcttgtgggtttgctcacgaagaatgcagccacttgtgtatgcatatgggagttgcagaaaatgactctcttgtggaaggaggttgacagaatgccaaacatatggtgcttggacttttatgggaagcacgttagaatgacttgcctggggaacaaaggcttgctcatgttgtccttgagatcaaaacaaatgaaccgattggttacttacaacatagcaaagaaagaatggctgaaggttcctgggtgtgtggtgccacgtgggagaaaacgacagtggatagcatgtggtactgcatttcatccatgcctgactgcggtggcatgatttcacatctatctctaacagcaatggcctagcaacggcctgccattccccccccccagtctcgtagttcttttgcaatttgcaggcctttggtgttgttgtaggtaatcctaatgttcattgctggtgtaacaaagtagatgaaaaataatatgggtttgtagtaattcacgttttttcatgctctcagacatgtaaacattactttggttttgttatgaatgcctcatcctgggaacaccttggtaaaaggtgatataaaactgccgttcttttctgtattcagagtgtgaatggttttttcttagatttgtttgtgctatggggaggagcaagagaggatccttgatgaggtcttatggatggaagtaaatatagttttcatatttattgtt

SEQ ID NO: 122814 - DNA, 156 bp, Glycine max
  unsure (1)..(156): unsure at all n locations
  Clone ID: PAT_MRT3847_81908C.1
ctnagactnagntgtcnagtcgtanactntcaacctcaanaantccaagcctcaaggnaacaagaacaaatgcaatgntttatccaacncanagattattgnctctnaaggagttgtctccccaaggtntggcctgacantgncagaagagaatnt

SEQ ID NO: 122815 - DNA, 536 bp, Glycine max
  Clone ID: PAT_MRT3847_81909C.1
gtgtactttacaattcctttattgcagtcaattaccattcagtgtttggaagctcttcagtttttgcatagccttggactaatacactgcgacttgaaaccagagaatattttggttaaaagctatagtaggtgtgaggtgaaggtcattgatcttggaagtagttgttttgaaacagatcacctttgctcttatgttcagtcaaggtcctatcgtgctcctgaggttattttgggacttccatatgacaagaagattgatatctggtctcttggctgcatcttggcagaactttgtactggcaatgtcctcttccaaaatgattcacctgcaacattacttgctcgggtgattgggatcattgatccaattgatcaaagtatgcttgcaaaaggacgcgacacatataagtacttcaccaaaaatcacatgctttatgaaaggaatcaggccttcacctccagcaagctggagacgctccaccaccacctctgccatttcgcacagttgaaggagttggagatcgaagagtgtgc

SEQ ID NO: 122816 - DNA, 209 bp, Glycine max
  Clone ID: PAT_MRT3847_8190C.1
aaagggccgctggaatttttcacaaaagccattaatttaggcttacaaaatattacagtgatttttttccccaaccaaaaaatatttccatctgattagccacctggtttttcatttgattctgggcaccgctgatgtgacggcataaaaagggtttactctaattcaccccatttgatctcaggttcctatggcgcccaataaaattg

SEQ ID NO: 122817 - DNA, 1408 bp, Glycine max
  Clone ID: PAT_MRT3847_81910C.1
tgagtttggaaaattggaagaagaatgtaggctggagaagtcttcaagtaaaaactctgaagatagcaatagcatcaattccaaacatgaacaatctgtgaagcctaattcacaggctttagcaactattgatcttgaggattccaaccggtttgacacactgtgggaacatcaagatttgatagaacaattgaagatggagctgaagaaggtcagagccactggcctacctaccatccttgaggattctgagtctccaaggataatggaagacttgaagccatggaaaattgatgaaaaattacagcatggtagcaccacaaatgagcttccaaaattctacaggagttatcgagaacgaatgcgaaaattcgatatcttgaattaccaaaagatgtatgctttaggtgttttacagtcaaaggacccactccaatcattttcaacccataagaacccttcaccagcattcacatccattcttccacgcggcttttgcctttctagacgtaaaaacactgaagctgacccaatgaggaagttcataagagacttgtacagtgatttggaaatggtttatgttgggcagttgtgcctttcttgggaatttcttcagtgggaatacgagaaggccttgaagctatgggaatctgaccaatacggattactaaggttcaatgaagtagcaggggaatttcaacaattccatgtccttctccaaaggtttatagagaatgaaccattcctccaaggtccacgggttgaaaactatgctaggaatcgttgtgcaatgcgcaatcttcttcaagttccagtaataagagaagacaatgccaaggatagaaggaaattcagaaaaagagaggctgataaagatgcaatcacaagtgacatgctagtggagattttggaagaatccatcagaacaatttggcgtttcataagagctgataaagatgcatccagcttggcacttaaaggtcaaagagaaaaccaagtagagctccaagacccttcagattcacagcttttggtggagattagaatggatcttcaaaagaaggaaaagagactgagagagcttttgaggagtggaaattgcatattgaagaagttccaaaagcattatcatgaagatggggcagatcaagtgctttatttcttctctcaagtggacatgagattggtttggagagtgttgaacatgtcaaggataacgacggatcaacttgcatggtgtcgtagcaaactaaacaagatcaattttgtaaaccgaaggatacatgtagaaccatcattcttacttttccctagttaatagttaattccaaaaagatttgtacatatgttccttcacatttagaaggccattattaaattagtaaagaatttttgcatataactttta

SEQ ID NO: 122818 - DNA, 414 bp, Glycine max
  Clone ID: PAT_MRT3847_81911C.1
gctaaagcgacacttttgttcattagattaaggttttgtcaggacgagtaaggtgttatcgacatgaaataaatgcttcttcactcccaaagccgtgttgcataagaatggggtgtatcttcatttttttaattaagccttgggaacttgttagttgttaccctccggttggtcttgtggtgccgtttcatatggttaagcaatcaactcttttttaatactactttgaaacgtaaacaagtacaccgtacacccatatgaaaaacgtggggattttagtgacaaagctatctatccggtcaacttattacaaaaaattatgacagtaacgaaggagaaagaaaattcaaataataatatgcctgaataaataaattaattcaattgattaaataatttttttatccttatatc

SEQ ID NO: 122819 - DNA, 545 bp, Glycine max
  Clone ID: PAT_MRT3847_81912C.1
aatgtcatatgctttctgaggaagctcaaaggggagttagaaacttacgcgccgactttgaaaggggtggaattcatctttgccctgagaaattagatcgagtgaacaagctaaatattgaaatttctcagctatgcagagagtacaatgaaaatattgtaatggacccaggaactgttgatatatatccttcatctcgcatccccaagaatctgcattatcttgtaaagcctatctattgttcaaaatctttaataaccaaggatttatcagggtccggggacaccctaaaagagaaaggatttcggattacgacaaacccacaaactcttacatctgtactacaattttcatcagatgatgaggttaggaaaatggtatatatacgaggaaattctgtgccacatgcaaatgttgatgtcctcaaaaggcttatatctgcacgacatgagctagctcagataatggggtctagatcttatgctgaattttctgttaagcctaacatggctgtatcaccaaaagtcgtaacgtcatttttactc

SEQ ID NO: 122820 - DNA, 215 bp, Glycine max
  Clone ID: PAT_MRT3847_81913C.1
ctaagaactcgaatagtgcattcttaactatggctcgctgctactgcgacaggctagaagcacacgatgacagctggtactatttctacgttggcaaatcctcaagctgggtacgaatcatggaagtcgatacggtgcttaccacatcagctatcactgcctaaccctatgaatctgcctaagatggtcaaaagcctgtgacgtctgtaaatgca

SEQ ID NO: 122821 - DNA, 208 bp, Glycine max
  Clone ID: PAT_MRT3847_81914C.1
ctcacatacaaagtaggatgtacaagtatcaactgactgggttacaatctgtcacgaattggattcgatgacctatccgtggtttaaaatcacataacacttgtgtgttaaatataattgatacagaaaactgactctcctacagaagcactctccgaagtgatcagagaatgcctctttctataaggggcggagctcgaccaaagaa

SEQ ID NO: 122822 - DNA, 355 bp, Glycine max
  Clone ID: PAT_MRT3847_81915C.1
agactagttctcaaacattcatcatttttctattctttatttgcgcataaatttcgacaacatttctctggctgctgcaatgacttgcaggaaattgatagggaataaatatagtactaagaaatctctcgggaaggtgaaggccgtgtacgctaatgaattttgggcgccagagacgagttcaagtcagggaatttggtctatcagagcttttattttctctgatttgttttattttctgttaggataaactttttgcacttaccggaaaaaaaaaataaggaggcaaaatgaaataagttaggccagtttgtttaaatttaaaataagtatttttaaaaatgtacttgtttaa

SEQ ID NO: 122823 - DNA, 259 bp, Glycine max
  unsure (1)..(259): unsure at all n locations
  Clone ID: PAT_MRT3847_81916C.1
catttctatctgtctcggntttactgcctgaaggatctatatgaaggatacatttcccaaganggaaatcttcacacaaaaganatttccaacttgtttgtaagaaatggcaacaggatcaaagtttttggaaatgcaattataagaggccattctcactttctcactgcctctaatcatcttcatgtattaaaaagtggggcaaactcatcaatagcatcatcacctgaaaaccttttctcatgttcaaatcctactt

SEQ ID NO: 122824 - DNA, 247 bp, Glycine max
  Clone ID: PAT_MRT3847_81917C.1
ctgcacgagactccatctccaaaattcttctcatccattccaacaatggatttcagctccaccgtcgacacttctcgtcctttcacctccgtcaaagaagccgtcgccatatttggcgaacgccttctctcggagaaatctatctccataaagagagatcatctggaggctgtcatcacatcccatcaccttcataagaccatgaaaatgatgagagataacacaataaaatggcagttgctgtata

SEQ ID NO: 122825 - DNA, 420 bp, Glycine max
  Clone ID: PAT_MRT3847_81918C.1
gccatcaattttccacccaaaacatagtttacggtgtgtactactaaaaaagttttgttctctttcatgcattcaagtacaaatggatggctacctaccttcaaaggaggaaacgttttacacagagaaataaacacagttttgcaacttcctaaaaagaaatcaaaaccatttcaatatcttttttttgattccactttgaccggatgggccattgcccattttggcaaagaaattgaccaataacaatgttactttatggaccctaaataaaagaattttgaccacacgctgtataagccttttttaaatgcctttttgagcccctttctctggagaaatttcacaagaattggtgggatgaaatttattttaaatgccattctatccagcaggctggtttaaagattccttttattt

SEQ ID NO: 122826 - DNA, 229 bp, Glycine max
  Clone ID: PAT_MRT3847_81919C.1
cagggaacgtcctatcttcgtttggttggagataccatcaatgtgggaatcggagcaaggtccacaattctgctcagagaacctcgctgctcgtgacgtacatcagttatatcgggtgttggaattttcactaattctttcactacaatacacgcatctatgtcttgggtgttcatatgaatgctgactctcttcttcctgatttgggattacttcactcaatcctttc

SEQ ID NO: 122827 - DNA, 574 bp, Glycine max
  Clone ID: PAT_MRT3847_8191C.1
gacaaatatatacctggcagctggagatggtttgatggaaatcgaagggttgatagatacctatgccaacatagttactaaatcaagtcttctcagtagagaagacttcacaagcatgcatggcaacacaaaagctgctttggattattatgtatctattaacagtgattcatatatagccacatattttgggaatatggataagatggtttcagcaatgagagctttcaatggtttgtacaagactctattttttagcagaagaggttttgcacaattaacctcacagggtcttaatggaaaggagttgaagcaagcactatggaagcttcacagagatgattttgcaaagggaagaggctctgctctgtctgagtgtttttgcgaattcaagttgtgattttggatctcggattcatcgtttttgtagttttgacattattaatttaattttgctttgtcactccttagcttctgtcagcttttttattattttgtattgaatgtgatgctttttactatcactaatgaaatttttggcagacatttggtgtaagaaagatttccccatttg

SEQ ID NO: 122828 - DNA, 449 bp, Glycine max
  Clone ID: PAT_MRT3847_81920C.1
gtcgttagtctcaattagatatctcagattatctctgattttagatttggtgccccaatttctaaaaataaacagggaaaccaaaatgtaaatttgccgttaattctatgaaggactaggtaaacaaccagagatagagaaggatccctgtctttcaagattgacactcaagggcttggccttgctagtatacaacttctttacattggcaccttggtcctgcattaacctagctaagcttctctttgcattcgccctaaagggagagttggaagccaaaaacccatccaccaggtgcaggtaggcctccaagtcatgacaacatgccatgtcagcatctggtttcaaaaacggcgacatcttcgtgtccactcggagctctgttccggtgtgggagtactcatcgagcatgtgcaatacaccagcacctaccttggaggttcttagct

SEQ ID NO: 122829 - DNA, 268 bp, Glycine max
  unsure (1)..(268): unsure at all n locations
  Clone ID: PAT_MRT3847_81921C.1
ccatattcacaagantctcaagngtcttctttccaacgagattctttggtggggaaaattccaagagggtttgaattttgaaggnagggaagatgggattatttccaatggcacccaggaaagaaacccatctcctttgttcccagggccnggttaacatncccggacccagatccatccggggcccatgaacagaacaatganggataacgttctccagccaattccngctatgacaaaaacttttgcttgangatgtcaagaagat

SEQ ID NO: 122830 - DNA, 352 bp, Glycine max
  Clone ID: PAT_MRT3847_81922C.1
gaacttttgatgatgcactgttctgcatgatttccaagccacgcaacaatgaccatactccgatcgttgggcatgctgatttgaatacattgattgctagtcttaatttgggggccgacatcccagccatgcaccacaacatggttgctaatgatcagtgcttgtcaggtactggatcctcacaagttggcgatgaacattaggttccacacaacaaacaacggcacatacacatgccagcattcacctggggcaatcacccgcaccgttttcaacttagcagcgcttgcctgtcaccctataccgcgactatgcactatgcagacgatgacttaactttcattgacgtctg

SEQ ID NO: 122831 - DNA, 473 bp, Glycine max
  Clone ID: PAT_MRT3847_81923C.1
aattcggctcgaggctgcgagaagacgacagaagggctcattggttgtggaatattgttttctttgctgaatctaataaaaatttattactaaccatgtttagttctgcagtcatttcttttttacccctttaacatttgtttattataataaaaaatgttatttatacaataatttataaaacagtttgcaaaatagcatttttcttgtgtttggctctcccttttatacatttattacattatttaatgacagacagaggagatgaaaataaaaaaaatatattatacaaattattatatgtgtatcatatcttttacataaaaaaataattaataagactacaagaaaaaaaggatattatctatggttaaaagtcatcggtatactcacaataatctcgataactcaagtgtttcaacaaattactgatagacacataagctgaatagaggcattagtagccattttcg

SEQ ID NO: 122832 - DNA, 334 bp, Glycine max
  Clone ID: PAT_MRT3847_81924C.1
gcttttctactgcccggaacaaggaaaccttctgtattgacaacaccagtgaggaacataggtgttggagctatgctagagattggttgacctcagctacaaatcccaccctcctgtcactaataaagacggattctcgtctattttactactaagaagaaggatcttatctctaagctgaccaactttggtcgtgcttggcttgttccaaaaggtgacaagtcccacttaccttcccctgctatgggaaccaaaggatgctcgcgtcctcccagactatgctatgattgggacacactgtcgtgagatgactgatgtatatagattcggggtg

SEQ ID NO: 122833 - DNA, 540 bp, Glycine max
  Clone ID: PAT_MRT3847_81925C.1
catcaacatagaaaaagcctaagaagggtagatttttaattaataaaggttcaataataattaattcaacccccctttttttaatttttttgaggccacttgatctaacagaaaaagcaattaaatagatggatataaattcctaaaattgattaaaggatttcactacaaaaaaaatgtttatttccgacggaaaatattctatcgaaaattttgaattttcccacaaaatttactgaaggaaaatttttcgttggaaattattgaaaaatgaatggattttacccacgaccaattattccgtcttctaagttgacattttcgatggattatatcgacataataaaaatccttggaaaattaaaatttcccaaaatatatgatgaaaagactattaacgaagtagggaacaaaataccaccaagaaattaaaacgattcggggatataaaaccttgtttgataagtttctttagaagtggctaagaaaaaaataaaaccaacttcttcataggctgaaattagtcttttattagttaat

SEQ ID NO: 122834 - DNA, 455 bp, Glycine max
  Clone ID: PAT_MRT3847_81926C.1
gataaaaagaagggaacgttcaggttggattcgactgcacatgattattccccttatttgaggtccttgaccatacacaagcctaaaaactctaaaagagaaggtcattacttagaccctcactttccggagacgaacttggcggcataagcccactcttggctagaagacaggttcactagggagatcggaaaggttctgaattggacccttttagggaaattggctctgaacactacgccaactttcgagaacagggtcaatagatcgtcctagagtacgggaacatggagcttagaaaatgcctgtggtaattatggagggccaactgggggaaaactgccacttgggtacataggttgattaacctcacagaggggcccaccaccaataaggcctcttttagcggacccaattaagagatctggagtggccaaaacgggaaggttgcttgg

SEQ ID NO: 122835 - DNA, 231 bp, Glycine max
  Clone ID: PAT_MRT3847_81927C.1
acggctgcgagaagacgacagaaggggaagcaaaaaatggaaacccaaagtgcttctctcctctgtctttttctctctcttgctatccttttggctagtggcactgctgcaagtgtaactccaagaagcgcaatgcccaagccacaatgcttacacatccaccagaagcctttttccttcaactttcccctttggaattggtcctcctgctacccggcagaaggagcagca

SEQ ID NO: 122836 - DNA, 325 bp, Glycine max
  Clone ID: PAT_MRT3847_81928C.1
taccttgtcaacccaagcgtaccctgctcatccacacacaagcctggacgccctgtctacccatttatcccaagtggagacataagaggactactctaattacaaaactgatatctcgacattccaagcttgccaaaatattattctaactagatttcttatcttatcaacactagaatctcatgacaatttatcacagatttctgatatcctagttaggtactccaccgaggatatacgatgatgcaagaaacctaatttccaagacagtattggcaaatccctcaaataggaccgcaaatccgacagtactaacatgtaaaag

SEQ ID NO: 122837 - DNA, 399 bp, Glycine max
  Clone ID: PAT_MRT3847_81929C.1
cccacgcgttcgttcttccacgcgttcgtgtcaccctacggatctgtctttctcactccctctcgcttccttgcatgccaagcgcagggttgctgagaagacatataatatggaaaggggctgctgaagtgcagctgggtgtgccgggggccccaccatgggtgagagggccttgaagtgacctgagatcgatgaggcagaggggcacattgttgctccacgaataaatgcgtggatcagtgaccacctcccgatatacaagcccagacttgatgacggggcgaagccgtgaagggggaagaatatgttacatagactgaagtgcgagaagtatgttggtagagctgacatttgatatggcgaggtaaacacaccgacaaagactgatgctctcggagc

SEQ ID NO: 122838 - DNA, 601 bp, Glycine max
  Clone ID: PAT_MRT3847_8192C.1
ggtgaaacttttcttcagcattgtcgtcgtctgcctctcactcctcttccttctcgcactgctattgccttcttcccttttctctcaaattcacatttatggagaagcctccttaggggaggtggatatatggagtgttcggagactcatggaatggagaccttgcaattggtggctacaaggccatcaaacagacaattgctttcgtttttttttttgtttattcttgaaatggtgcagctctaccattagaaacttatggatatatcagagtggattgctatggggggctcaatcagatgcgaagagatttctgtgatggtgtgggcattgctcgtctgttaaatgcaacccttgtcttgccgaagtttgaagtggcatcatattggaatgaaacaagtggttttgcagatgtatatgatgtagattactttatacagcatatgaatggctttgtcaaagttgtcaaagagttaccaccagagattgcttcaaaagaaccagttcgagtggactgtagcaaacggaaaggccaatttgattatgttgaaagcgttcttccatctttgttgaaacacaagttcatttcaatcacaccagc

SEQ ID NO: 122839 - DNA, 1303 bp, Glycine max
  unsure (1)..(1303): unsure at all n locations
  Clone ID: PAT_MRT3847_81930C.1
ccacgcgtccgaccattcgccgggaaaaccgtacgcccactcactgacttttgcaaaaccgttttctgatctcacattcattctatgaacctctttctctctctctctcctcttccctagtctctcttggaaatggaaaagaagcagggtttcttctccgccctcaaagacgaggtggtccgcggactctccccttctcgttctcgctccatcagccccgcccgaaccctctcccccatctcggctctcctccgccgtaagaagcgcagccccagccctgactcctccgtcgccagatccgccagcctccgtcccttgggagagacgctcacccctctcatggagggccccgaccctgacggaaccgaaaacggggatcctaagcgaatcggttcgggcctcggacactggatgaagggacagctgtcacgtgccccctccgtgtcctacaagaggtctgatctgagactcctcctcggcgtcatgggtgctcctctcgcccccgttcacgtctcctccaccgaccccttgcctcacctcagcatcaaagacactcccattgaaacttcatctgctcagtacatattgcagcagtatacagcagcgtctggggggctgaaattgcagaactctatagtccgtgcttatgccatgggaaaggttagaatggtggcttctgaatttgaaactgcaactagggtagtgaagaaccggagtaggtgtgcagagtctggtggatttgtgctctggcagatggatcccgacatgtggtatgtagagcttgcagttgggggaagcaaggttcatgctggctgtaatggcaagcttgtttggaggcacacaccttggcttggggctcacacggcaaagggacctgtgaggcctttgcggcgtgcacttcagggtattgaccctagaaccactgccagtatgtttgccgatgccaaatgcataggagagaagaacatcaatggtgaggattgcttcatcttgaagctttgtactgaccctgaaacattgaaggctcggagtgagggtcctgctgagatcataaggcatgtcttgtttggctactttagccagaagactggacttcttgtacacattgaggactcccatctgacccgcatccagtctaatgggggcgatgcagtttattgggaaaccacaatcaattcattccttagtgattataagcccgtgggaggtataatgattgcccattcagggcattccgtgntaactcttttcaggtttggggagatgggcatgagccatacttaaacaagaatggaagaggcct

SEQ ID NO: 122840 - DNA, 493 bp, Glycine max
  unsure (1)..(493): unsure at all n locations
  Clone ID: PAT_MRT3847_81931C.1
tacgtaagcctcgagaattcaggctgcgaggtagtggtcgtgaccggtaatcatcgctgctttgtctccctgtcgacgaccgcatttcgcgttgatctcccnntccctctgttgctcgtgtcagtctcttcgccgcgggataaggaannagccgttgttctcaaaattccacgtgcctccanttcgtattanccctcttggttctcttgaatcagttgttaacccctttcaacctacccttgctactgaggccatgggtgctggcagcttcacgctcaacatttcccgcgtgaacggctctgtcgccatcaacaccggcatcgttcatgcctcaattacgcagaccgtgtttgatcagaaccctgttgccattttcggggtttccaaggttctcttgcctagggaaatttttgggaaaaatccgactgtgtccaccaagcctcttgataatgctcctccaccggatgatgatgctttgtcaccggagaattca

SEQ ID NO: 122841 - DNA, 504 bp, Glycine max
  Clone ID: PAT_MRT3847_81932C.1
agtcactagtttttgactactaacgtttagattttagagtaggggttcagttggttctttgtggaagtttgtgtatgcctccatatagttctgtaaatagagcataaaatttcacgggttttattctcaatgcagaatccaactatggagttggagctcgtttttccacttcggaatagagcaattggaggttaaaattttagtttaccttccataaacgagggaaggtggtgaagctttggtatagtggaccacccattaaacttttgttactttagcaagttatgtaagtgtcgatggtggtaatattaaagagtctaccatcgaccacagccagtttggcactaacagcttctacatggcgtggaagttctgtgtttgaaaagatcgttaacgtggttgttttttatatagccgagataatggagtagagttacagggacaatactcaatgtaccgaacatctcttgtatgtttccggttgtgttatgattttattttgtc

SEQ ID NO: 122842 - DNA, 2291 bp, Glycine max
  Clone ID: PAT_MRT3847_81933C.1
ccacgcgtccgcggacgcgtgggcacaaacgcacacactgcctcaaaactaaactcctctcactcacacccactcactgcctccaactcttccaaaaccgttttctcattcattctatgaacctctttctctctctcccttcacttgcctagtctcgtaggggttagttaccactccgtttcttcacactctctctttcttgatccttccaaatggaaaagaagcagggtttcttctccgctctcaaagacgaggtggtccgcggactctccccctcgcgttctcgctccaccagccccgcccgaaccgtctcccccatcacgggcctcctccgccgcaagaagcgcagccccagcccagactcctccgtcgcgagatccgtcagcctccgcccccttggggagacgctcacgcctctcatggagggccccgacccggacggaaccgaaaatggggatccgaagcgaatcgggtcgggcttaggacactggatgaaggggcagctgtcacgtgccccctccgtgtcgtcgtacaagaggtctgatctgagactcctcctcggcgtcatgggtgctcctctcgcccccgttcacgtctcctccaccgaccccttgcctcatctcagcatcaaagacactcccattgagacttcatccgctcagtacatattgcagcagtatacagcagcgtctggggggctgaaattgcagaactctatacgaaatgcttatgccatgggaaaggttagaatggtggcttctgaatttgaaactgcaactagggtagtgaagaaccggagtaggtgtgcagagtctggtggatttgtgctctggcagatggatcccgacatgtggtatgtagagcttgcagttggggggaagcaaggttcatgctggctgtaatggcaagcttgtgtggaggcacacaccttggcttgggccagtttggcactaacagcttgtacttggcgtggaacttctatgtttgaaaagatcgttaacgtggttgtttttgatatacatcgagagaagaacatcaatggtgaggatgcttcatcttgaagctttgtactgaccctgaaacattgaaggctcggagtgagggtcctgctgagatcataaggcatgtcttgtttggctactttagccagaagactggacttcttgtacacattgaggactcccatctgacccgcatccagtctaatgggggcgatgcagtttattgggaaaccacaatcaattcattccttagtgattataagcccgtggaaggtataatgattgcccattcagggcattccgtggtaactcttttcaggtttggggagatggccatgagccatactaaaacaagaatggaagaggcctggacaatcgatgaggttgcattcaatgttcaaggcctttcagtcgattgcttcattcccccagctgatttgagaacagcttctgtcagtgaagcttgcgaacttcctcaggatgaaagagcaaagaactcactagcagtacatcgggccaaagttgttgcgctggagaaatcacataactgcagcattgatagcatgatctggaagatggaaatctaacagacggcagtaggatcaattcaaggcaattgttaatagcagtcactagtttttgactactaacgtttagatgttagattaggggttcagttggttctatgtgaaagtttgtttatgcctctatatagttctgtaaatagagcataaaaattcacgggtattatgcatacagacctgagtgaatgttttattctcaatgcaggatccaactatggagttggagctcgtttttccacttcggaatagagcaatttgaggttaaaattttagtttaccttccttgaatgagggaaggtggtgaagctttggtatagtggacccattaaacttttgttacttagcaagttatctaagtgtcgatggtggtaatattaaagagtctaccatcgaccacagccagtttggcactaacagcttctacatggtgtggaagttctgtgtttgaaaaggtaacgtggttgtttttgatagccgagataatggagtagagttacagggacaatactcaatgtaccgaacatctcttgtaagtttccggttgtgttatgatgttattttgccagtgctcctgatattgaaattgtcagataatgaatgctcgtgatggatgtatgttactctttacattatcttttgacggagttgctgtctgacttgtaaatagtaaccataatttacttgtcgacgtttatttgcatttgtc

SEQ ID NO: 122843 - DNA, 1499 bp, Glycine max
  Clone ID: PAT_MRT3847_81934C.1
gccccataagaaaattgaatatacagttttttttatgaacaaatactaattgactagaatattagattttgttaatataaatctctttatttaactcttatttatccgacccatcttatgttttcactattatatatatatatattgaggaaagctaaatattattcatttgtttctgacatgctaccgtaagattaaacaccaaaaagatccatattcctggtcttactatgaactatgaagggagcttgaagtgatgttcggataaaaggtttaggtagtagccaaccttaacaaatcaaaagaagttagcaattgataaaaaaactcacaggtgcatcaacttgctctacctacccaccttattttcggccttgtcaggaacaaagggtctaaataaatagccttacataacgactctaattaactcaccctttttgtaaaaacctctctcagagtttgctcacccctactcttcttccagtctctatctcaatctccatcaaatttaactatggctactgaagaggttttggttgatgaaatcacttaccctaccaagatcactactaccaagcccctatctttgcttggccatggaatcaccgacatggagattcacttcatccatgtgaaattctattcaatcggggtttatttggagccagaagtagtaggccacttggaccagttcaaaggaaaatctgcaaaggagctggaagataatgaagagttcttcaatgctctcatttctgccccggtggagaagtttattagacttgtggtgatcaaagagatcaagggtgcacagtatggggttcagattgagactgcggtgagggataggttggcagctgaggacaaatatgaggaggaagaagaagaagctttggaaaaagttattgaatttttccagtccaagtacttcaagaaactttcagtgatcacataccatttcccagcaaattctgccactgctgagattgtggtatctttggaggggaaagaagactccaagtatgtgatagagaatgccaatgtggtagaggccatcaagaaatggtaccttggtggctcaagtgcggtttcttcctcaaccattcaatctctggctagcactttctcgcaggagttgtccaagtgaacataactttgtatggtgtaataatcttggggtctgtgttttgtgttgctaagttgcagtaattggaatttttctccacacaatgttttgcggatttctgcttttgaacttttcggaataatgttaatcttgtgacttgccaaattcttaagtgctctttgtatggttaatcttcatgctgttgttacacatacataataaccaagtgaccacactacactttgtattattgtgtaatcttggggatctgtgttttgtgttgctaagttgtgtagtaaatggaattttctcccgtgtttgcggatttctgcttttgaacttttcggaataatgttaatcttattatgacttgccc

SEQ ID NO: 122844 - DNA, 882 bp, Glycine max
  Clone ID: PAT_MRT3847_81935C.1
cggccgctcaggcggcgggcgggaatcccctttttgtcaaacttctctcaacgtttgctcaccccaactcttcttccagtctccatctccatctccatcaaatttaactatggctactgaagaggttttggttgatgaaatcacttacccttccaagatcactactaccaagcccctatctttgcttggccatggaatcaccgacatggagatccactttatccatgtgaaattctattcaatcgggatttatttggagcctgaagtagttggccacttggagcagttcaaaggaatatctgcaaaggagctggaagagaacgatgagttcttcaatgctctcatttctgctccggtggagaagtttattagacttgtggtgatcaaagagatcaagggtgcacagtatggggttcagattgagactgctgtgagggataggttggcagctgaggacaaatatgaggaggaagaagaagaagctttggaaaaagttattgaatttttccagtccaagtacttcaagaaacattcagtgatcacataccatttcccaacaaattctgccactgctgagattgtggtgtctttggaggggaaagaagactccaagtatgtgatagagaatgccaatgtggtagaggcagttaagaaatggtaccttggtggctcaagtgcggtgtcttcctcaaccattcgatctctggctagcactttctcgcaggagttgtccaagtgaacatacataactttgtattattgtgtaatcttggggatctgtgttttgtgttgctaagttgtgtagtaaatggaattttctcccgtgtttgcggatttctgcttttgaacttttcggaataatgttaatcttattatgactta

SEQ ID NO: 122845 - DNA, 459 bp, Glycine max
  Clone ID: PAT_MRT3847_81936C.1
cccttcttccgttttttgtcccttttttttttttttttttttccttattttttttttttttttttgttcaaaacaaattgctgtggccaattaacattttttttcggctcaaacaaaaaacattttggggcctgggggggaaaaaaaactgtttaaagggaattgcttgggtcccctttttcctcaaaaaaagggctccaacaaagggactgggcatctttgggttttttttcttgaaaaaagggggcttttccaatttttcaaccccggggtgggggttcaaaaactataatgccttttttttttgaaactcaatgttcaccttggggaattgtgatcttttatccccaaacggcgttaaattccccacaacttttacatctttgttttcaaattccctggggtgcttttgagattcccgggattccaaagggcagagctttcgcctctaacagaata

SEQ ID NO: 122846 - DNA, 1433 bp, Glycine max
  Clone ID: PAT_MRT3847_81937C.1
ccttcattttaaaagaaaaaaaaatctgatttttgaagttagtgaagacacgcgtcctcgcacaccaatttctgcacattcattcaaacgaacccacaccactgcatactagtacataaataccaaaccccgcgcaatttgtgtaggattttaattttctttcccctcgtcgtaacagaagaaacctaattcctcaaattctcacgctggacatgcttcaatcactgcgcgttctcaatttgatcaatcaatgggcgcgatgaccatcaaccgcaagcgccctgaagaatgcatgaatgtaaaccacaccaattccgattcccagagaaaacgtgccaaattctcgaccaaacccgtgccgtccgccaccagcgccgtcgcgagactctcccggtacccggaggttcacgcgcctttggcgagggaggtccacgcgccgtgccggcagcgaaaattcgaacgcgctagggttagtgttagcgtcagtgccagcgacgccatggggaacgttctggccgcgaagtttaaggaggcgaagcgttcggcggcggcgaaatgcagaatcttagtggaggaggggaaggaggtgactgaagtggacgcggagacggagagcgaagggcgttacgagaattcgagtgtggaaggggcgggtggcgatggtgacaaggttgttagggttcagcagcagtcacagtcaacgctgtcgtttgattcggaggtgacgaatgcgaagttaaaggtggcgagtggagagaaggtgtggggctatgagacgcaacgcgatttggaaaatgttcatatgtataagaagttgcttggggatgttgggaggagaagtggcacgcttcagaggctgaattttgagattgatttgaatgagaagcgcagggaacattataatttgttgcggccgaagaaggaattggttgaggaacaggaagtgccgcaagagccttttgttgctcttacaagtgaggaggaagatgaggttgaatgtgccttttcttccaactggaggaggatcttggttacccacgagaattctaacattgtgatcacgggagagaagtttcagtgccttaggcccactggatggttaaatgatgaggttataaatttgtacctggaattgcttaaggagagggagcaaagagaaccacagaaatttctgaaatgtcattttttcaatacctttttctacaaaaagttaataagtgggcccgaaaggttatgatttcaaatctgtcagaagatggacaagccaacggaaattgggatacagtctacttgaatgtgataaaatatttgtacctatccatcaagagatacattggtgcttggcagttatcaataagaaagataagaaattccagtatcttgactcaatgaaaggagaggatagttttgtgctagaaaagctggctaaatat

SEQ ID NO: 122847 - DNA, 303 bp, Glycine max
  Clone ID: PAT_MRT3847_81938C.1
ggaaatcggtctggagatacagcacttggaggactccacacttcagcatgtttacccattaggattgatgtggggacatgcaagggcaagctgcagcttggagacttataaattgggctattgcacgcagcaccacctgggcatgactatgtcgaccttatgcacgaatttatgacagcatgcacgcaaacttacggggaaaaggtcctatgtcactttgatcatcttggcatccacactgcttttcatctgcttgagaaatatcaatctacacctctggtctgtacagatgattttcaggga

SEQ ID NO: 122848 - DNA, 241 bp, Glycine max
  Clone ID: PAT_MRT3847_81939C.1
gggtttcaacatatttttttagcaccttctaaaaccctttatttgggggttatatgaggagctggtgctggtggcctaatgactgttttgtctgcggccccaatcttttttaaggctaatggcccaaagttgactccgttggaggagatgcaggactacaagaaattgggacctaaacaattggaacctactacagcttggtcaaaaattgtggaacctgccacaacgagtggggatgttt

SEQ ID NO: 122849 - DNA, 723 bp, Glycine max
  Clone ID: PAT_MRT3847_8193C.1
acgagacttctactactactagtgctgttgcacgtcctcttcaccatcatcatgtaataaatatcccttaccaacaaaatccatggctggggatgaatattgttcatcaggagcatctggttccggctccagaatccctcacttcagcagctggctgcgggttgttacaccagcaccaggaggcagcaggttccaatttcatcatcaacaacaatcatcatcatcatcaacatcaccaccaccacacaacaaagcagctagacttcatggacttgtcacttggtagcagcaaggatgaagggaatttgccaggatcttcttcttctgtctatgctcatcatcatcatgcagcaagtgctagttcttctgccaatggtaacaacaacaacagcagcagcagcaacttgcagcaacagcagcagcaggcctgctgagaaggagcacatgtttgataaagtagtgacaccaagtgatgtggggaagctgaaccggttggtgataccaaagcagcatgctgagaagtatttccctcttgattcctcagccaatgagaagggtctgttgctgaattttgaggacaggaatggtaagttgtggaggttcaggtactcctattggaacagcagccagagctatgtgatgaccaaatgttggagccgttttgttgaggagaagaagctagatgctggtgacatggtgtccttccagcgtggtgttggggag

SEQ ID NO: 122850 - DNA, 893 bp, Glycine max
  Clone ID: PAT_MRT3847_81940C.1
aaatacacaaggttatttgaaattgaacatataaaccaaatgagtactaaaaagaacacatggaagtctgtgatcttgatcctaagttgttacaaggttaagtgttccttggaggaatcagagaaacaggttttgaaacaaggttctttccagaggttatgtctatcagatgtgagcaattcaagctccactcaggccattgaagacatttcaatttcatttgctggctcaaagctctatgcattcacacttgaggagctaagggaagcaacaaacagtttctcatggagtaacatgctaggtgaaggagggtttggacctgtctacaagggttttgttgatgacaaacttaggtctggtttgaaggctcagactgtagctgtgaaaaggttggacttggatggcttgcaaggtcacagggagtggctggcagagattatatttcttggacaactaaggcatccgcatcttgtcaagttaattgggtactgttatgaggatgaacataggcttttgatgtatgaatacatgccaagaggcagcttggagaatcaactattcagaaaatactctgccgccatgccatggtcaactaggatgaaaattgcattaggagctgccaagggtctgaccttcctacacgaagcagataagcctgtaatatatcgcgatttcaaagcttcaaacattttactagactcagatttcacagctaaactctctgattttgggctagctaaggatggccctgaaggggaagacacacacgtaacaacacgcataatgggaacacaaggttatgctgctcctgagtacatcatgacaggtcaccttacaaccaagagtgatgtgtatagctatggagtggtgctgttggaattgcttacaggaag

SEQ ID NO: 122851 - DNA, 463 bp, Glycine max
  Clone ID: PAT_MRT3847_81941C.1
cccatagcagccatgtaaggagtgtccatgcatttttaggcttctgctctggtgacttttgcttttgtctgatatggtgtataggaaattgagaattgtattactttttgcaaactcacatgtgggcccttcatttttttctctcactacttcactgattgtatttaaattttaaagaatctttaaattgcattgacataataggatgacaaaaacaattgttatgtttactttcactaagaccttttgtttgatgttttctaatttatggcctgtcctaataatgcctggcaatgttgttagattgaaggaactgaaaataaggagaaagtttataaaaaggaaaagcggaagaagcactggtctagtaaatcaaagcataaaaaacagtctgattcagaagatgacactactgagaggagaaaacgaaagactggtaatgaagtttctgacaagaagcatc

SEQ ID NO: 122852 - DNA, 421 bp, Glycine max
  unsure (1)..(421): unsure at all n locations
  Clone ID: PAT_MRT3847_81942C.1
gggggtggtatttgaaattaacaagtagcaaagatgtttggaatcattttatgaaacaagggtcacaacatagaggtgtgcttcctaatcatgggggagagggtcttnnatatcaacaccattaccactgttaagggtgtcatcagaaccagcattaacatcattagaggagtcttctacacacgtactgctttggcctcccacatctccatccacttcattcaatccaccaaggatcatcgacatacctaacgaaaaagttccaaggctactactgttagaacacatgtgggctaccaacctaccgagctggcgaagatgcatacgataatcattttgaatggaacaatgacttccgaattcccagctcattttacattaagaacttcatgcacgttcaattctatctcaagtctctaac

SEQ ID NO: 122853 - DNA, 803 bp, Glycine max
  Clone ID: PAT_MRT3847_81943C.1
tgctgcgcttttcccccgcttccgccgctacactcgtcggagtacactcgccggaaaacactcctcggcgtctcttctcaaacaaaatttaaaaaccaaaaaaaactaatcctcgtggtcacagtgggtttgagtgaactaaaaggaacaaaggcaatacatagagggcaacgcgattttcattcttcacaactgttatttccttttacgacgtcgttatgggaatcaaggttatgcaattgtcgcaacccgttcttcctcattccccttcttcgtctcataccctagcttccgcaatcttttccccttcttcgtcaaaaacgcgaaccctagtgtgtcgtttcgtgcaccgctcgagcctctttccgaccaccaccacgcgccttctccgcagaactaaatcgtttgaacagcacgcgcttttcacgcgcagaggaaacatacgtagggcgtgcagcgcaagtttggagccgttctctgatgaagagttcgcgaagaagattgaagatctcgcgcttaagtttcagctctcagatgacgccaccaccaatgcgaacgatttggaatcggaggattttcaggagatttcgtcgacggtgaatttcgcggaagagttcgagccgccggaggagattattccggcgaacatcgaacggaaagcgaacagcgtggagcttccgttttcgctgaggataatcaagaagaagctgcagtggaaggaaaggttcaggggagcaggggaatccgcgtattgctctgtcaagaaagcgttctcttcttatggtttttataatcagggagct

SEQ ID NO: 122854 - DNA, 199 bp, Glycine max
  Clone ID: PAT_MRT3847_81944C.1
tttggttgcattaaaaaacataaccttcctactcacggccggctatctacatgcgtgctgccatgtatctcatcctacatcccactcagaatcacccataagtacctcaaccaactatatatcaacgtcaatcactcattactcacacatttcagacatacttctcatccaactaccttgccttttgtttatctaaccc

SEQ ID NO: 122855 - DNA, 385 bp, Glycine max
  Clone ID: PAT_MRT3847_81945C.1
cttcctttcttacttgacactctgtaacttgaacttatatgacggacttgtctgatatatactgatataacataaattgtatgcatggtggtgtaaaatggctgtgaattggactcaacacagccaattacgcgtactagtggggaggattctctacaaaagttcagatggcccaagaccctttcctattcacatgtgagacactgaccgaagggcaccctgacaagctctgagaccccatctccgatgctgagctccatgcatgctaggagcaggaccctgacaacaaggtcgcctgccaaacctgcaccaagaccatcatgcagttggcattcgaagagatcaccacctatgccaacgtggactatgacaagattgtgcatga

SEQ ID NO: 122856 - DNA, 1758 bp, Glycine max
  Clone ID: PAT_MRT3847_81946C.1
tctcctgccggtcccgctcacaacctccgcgcacatgtgaacccgacactcatgcccgatacaccgactcggaacaccaactcccatcttcgccttcgggttagggttagggttagggaattagggcttcgaacttcgacgcaatgtcgtccattaacccctcacgagctaccgctccctccgccttcgccacgcgccggccgtgggaggagttcttcgcgctccactcgttcacgcgcccctacaccctcggcgagaccacgctccgtgtgaagcgcaacctcggccacttccgcgtgaactacgccatggtcgtgctcctcttcgtgttccttagcctcctctggttccctatctccctcgtcgtcttcctcgccgtcttcgccgcgtggttcttcctctactttttccgcgatggccccatcgtcgtgctccgccgcgagcttgacgaccgcctcgtcctcgcggcgctctccgccgtcaccgtcgccgggcttgtccttaccggcgtctggctcaacgttgtggtggcgctgctcttcgcggcggcggcggtggcgctgcatgcggcgcttcggaacaccgaggatttgtacgtggatgaattggaagtttctgatggaggtttggtttcggttgttggtggtagccctacgaaacgaacagggtacgctagaatatagtaatagttagttatgagatataactgattttcgttttcgttttcgtttaatcgttttttgtgttactcgcattgcatatatttgaagaaaatagaggttcgagttttaggttttggtttcgcggaaatatgaattgtgtccatatgatagatttacataccgtgttgttagcttggaattggaatagatttcttgcttgttgcttggccccttcttcttatgtttttagaatctcttgtaaattctaagatataggttgaagcattcaatttgtgtatttagagttccaattcaatgtattgtctggcttgatatgctttggtatttgtaataggtttagcaatggtgggtaagatttgttttattttatatcaagtgtaaatgaagagataaccattttggttattcaaaaatggtttctagttttaatgaccatatgtatttcagtttgctatcctactaccctctttttttttcttagtagattaatatcatgatcaaattaagaacgttatataatataatgttgtgctttttggagtggcttgggttgctgttgtctgaatatctgattttgttgaattagacttgcttgtgttatgctactaagtgttgcagatccttttgtagcctcgagccagtcaattactgagacttgtaactgtacaacatttgagagaattgaatagagaaccatggaatgccaattcatcattctcttatgtttagctgcaattagctgacacctaagttagttaatgttagctacctctttttagttagtcagttggccatttgggttgattgggatctgttctctcaaaacatgtgtataagaacagattgtaaaccacatgcaatcagactctgactattgaaactcttccctcttttatttttgagtactcttcatgttcttttctctgaatttgactatggttttctgggtttttttggcactataggaggcgtttggatctgtagatggttagggtctttgaatttgtaaaagaaaaactttttttttttatttcttgctttactaacaactataaaattgtcaccttgttttcta

SEQ ID NO: 122857 - DNA, 307 bp, Glycine max
  Clone ID: PAT_MRT3847_81947C.1
aggcgtgcgacagactgcaggaggacgacacatggatgttgatgtggtttatggtgcagtaatacctgttatttcacaaaaaaaagaagcggccgttctagaggatcgcggctttcttacacgatccaaccttacgttcgcttgcatgtaacgtcatatatattctatagagtgacctaaattcaacaaactggccactggtaaacaactggcggactggaaaaacattggcttgacccaaattaatcttttggcagctgatgcaattgtgaacaggtggcgtaatatcgaacaggccaacactggt

SEQ ID NO: 122858 - DNA, 512 bp, Glycine max
  Clone ID: PAT_MRT3847_81948C.1
ctcctgcatgctcttctgtcacatttttgcacaaaacattgaaagaaaagccgttgaaaaggtatttcatgattttcagtttgtttttgcagtgtatatagggtgaaaattagtcttctgcaaatctactccacttgcacatggacgacagagtaagagttgattccctatatcaacttttgtttcaacattttgtttcagacaacaattcaatacaacatcatatggttcttagctgtgttgcatgacatctcggtggccatggttttggtagggtgaaaggagcaaatcatgtactcagtttgtagggttctctgtatgcaatgcttctatgaatgaaaaattggtgtgacttgagaagacagagtagtgtgttcattttcattagttcatcccattttcaatcaaattggccctttttacatgacaggctagcgtgtggctagatagatgtcatcagccatttgatgtgccatctttgtctttggtgttacatgacattatctaattga

SEQ ID NO: 122859 - DNA, 532 bp, Glycine max
  Clone ID: PAT_MRT3847_81949C.1
aattcggcaccagattttaaagaaaatcattttaaaaaatctgttataaaaattttaatttttaaatttcataactcaattaagctaactcaatccaatcgatcgaattagattaggttgagtttggcaataaaattattagaacccgacttaatgtaatttgatattttttaattagactgagtctgacagcaaaattattataacctgatttaattcaatctgagattttttaatttggttgaatttgatagtaaaatcactatacttcgattgttttcgtgtgactttcaacattcatgatgagatcatctttgtttcatggtggcttcgaacatttcatccttaaagattcgtaaatttgtatagtactctacacgcgttctcttgaggcaaaagcgtttgttatttttcatattacatctcttagcaggtccgatggttaattcgaaaacttcgatgcatttgaattctgattcctttttttaactataatatgtgaatcagagaaaggacacaattcacgaatcgg

SEQ ID NO: 122860 - DNA, 118 bp, Glycine max
  Clone ID: PAT_MRT3847_8194C.1
gaactgtggtatcgcagatgctgctcaaagtgcacagggtctggacgcgtccacaagtgatctaccattgttcacagtgacgaaacctaataagacgtcggccagtgcttccttgcca

SEQ ID NO: 122861 - DNA, 176 bp, Glycine max
  Clone ID: PAT_MRT3847_81950C.1
acccactaataacataaattagctttatattaaatcatccttacaaattattatacatgatatatggttgtcggcttttatgataaatattaaaagatatatcagcgatcatttctagctttgacgggataaaaggtgcaatttacaagtggatagccattacctaccctcaacaa

SEQ ID NO: 122862 - DNA, 466 bp, Glycine max
  Clone ID: PAT_MRT3847_81951C.1
tgactatttagtttatacgatcgaaggggaaaaagatgaaaaaaaatactatgtcaatttataatttgctttccatattctcatcatgtgaaattctgaacaatgttataacgatcaatgttgtaattaagtttctgtccggaaaagcaaatgatcattgatcaaaagttttgagttgatcataaatgccgaaaaggtgattccacagtgtgagaacttcaaaattcttctagaagtatgttaagacattgtatatacactagcatgagataacagcctaaccacatttgcataggtggtggttgattggttcttttcttttgtttatgtttggtgttgtttatcctcagagaaagtgtgcctagtcttattgatacttctttcagtgacttaaccggttatattgaaacttacctccagatagaggttcatgggttgctttggcttctgcaaaggagatgatagt

SEQ ID NO: 122863 - DNA, 1031 bp, Glycine max
  Clone ID: PAT_MRT3847_81952C.1
caatcatggatcaatctcaaaaggcttcaacccgggcaattttcgctgcatcaagatacgcccgtctctgcaagtcggtaaagtaagatgggatcccgataacacaatccgaaatgagcatctccaaatcgttctcggtcatggtcttcaagtgagcaaagaggatggacaataattgaacaggtgtaaatacatgaatctcccccatgtacttcaaatgaatcaaaatgcctccatcttgaccctcagaagtttcaacagggagcattttcagctctttttccacatcaggatccgcaaacttccttcctatcagtctctttatttgagatattgtggacttgatgtgcatcatagcagaagcagcaccagcagaccccaaaatccgctgcttctcgctgaagcagaccacagccggggtttcgcgtttggattcataattcaacaaaacatcaatgccacgttgcctaactacagcaatgacacagttctcattaccaatgtcaaaccccaccacactcatatctcaactcacttgcaccaaacttcaaccaactagtccaatccaattcacccactctactcaaccaacacccccaaaatccaaaacttcacccgatcgcccacgcgtccgcccacgcgtccggaagaaaggaatataccttacggatggtggaatcaagaagcatttgggattgcatagtgcgggtggtgacgaagatggaagacaaagagagtgagagagagaaaaatcttcgctttatgtcaatggcacgaagcaggggtttttacagaagtgagcaacgacgccagatatgagaaaagtgagtttatttggggtcatatttgtaaaaagtggttttgtaattataccctctaattcaagagtgaagaaacaagggtgggatggaaatataaatagtacaatttggtcctagtggtggcttaccctttggcctctttttctaattcagaattttttttaaatatataaaagtggggtgatatgtttacttaaaaaaagggcggcc

SEQ ID NO: 122864 - DNA, 711 bp, Glycine max
  Clone ID: PAT_MRT3847_81953C.1
ttctttagccggcacaaacacgagtccattcccagcaccgaaatccgccgtggggttgtacctcagcagcagctccgccggcacgccggcttcggccgcaacccgctgcaagctgtcaccgacccgaagcgggtacgtcatgaacagcccataatccttggacacgtgtcggtttccgcaggaacagttaacggtgacgttgatgttcacgttgtcgggtatctgattcggcgggtaactgttgaccctgccaacccaatcctccgtcgtgaggttcgagaaatcaacctcgacaactatcttgtacgtgtttccgtgttggatcgcgtacgagaaagtgtgccccaaaaacgcaccgttcaagcagtcacacgaaaagggcacgttgatccgtgtttggctaagaatcacgtttgggttcttaacacttgggttgtattttagaatctccgatgttggccttccgaagaggttgctaatgtaagtgaggtttgtgccgttccctaagtaataggaagctaaagcaaggttgcagccagtaacgcaactacctttgactcttgtaatagaaatcaataactgaattaagagaaggaagaaaacatggggtggttttgattttgtagttgggtgtgtggtcattttgttgtgtataagaggatagaggaaaataaaaaaaaaataaataaaacaaaagaaaaaggcggcccc

SEQ ID NO: 122865 - DNA, 458 bp, Glycine max
  unsure (1)..(458): unsure at all n locations
  Clone ID: PAT_MRT3847_81954C.1
tnnnnnnnnnnnnnnnnnnnnnnngggnnnnnnnnnnnnnnnnnnntttttaaaacattaaaatttctagtttttttcaggaaaaaccccttttagctcctggcctttttggaccaaatggttccagggacaataaaacattgttttggagccacagtgggacccaacattttttgggccttcacccccaaacccctccttgccctcagtccttttttagggaagagggtggggcccccccttgtacccaacagggcaattagcagggttgccccgtttggggatggttttggcacccttaggatcggctccaaacttttttggtgggtgggagagcttaaccgcccccaaacatctggggttcttgccaagtttctcgatctgagcccagcaatttttaaaacctttaacattttcatttttggcgggaaaaacccagggaaaaagctttattgctt

SEQ ID NO: 122866 - DNA, 230 bp, Glycine max
  Clone ID: PAT_MRT3847_81955C.1
acccacgcacgcgatcgaatactcttgctataatgaagagagcgagggtggctctgataaggagagatgacagcgcatcctgagatgcggtctatctgagcgcgcatagcctcatcggcgtcggacgagagactggccctgggaatgacaaagatccatgaggcgaaggctagcagagaagggcaagaatcagggcggatctagcggtaggatcacaaccggatgctgag

SEQ ID NO: 122867 - DNA, 425 bp, Glycine max
  Clone ID: PAT_MRT3847_81956C.1
tacggctgcgagaagacgacagaaggggattgaaggtcaacttcaaatccctaatctctcaattacaactgcaactacttttccctccaatttcgcttcaccacacatgcatggattctttgattttcatcttctctcgcgttttctgattctgatcttagggttccttatcccccaactttattgcttcctcacgcgtctttatcttttttcttttcgttgatccaaccttttccactaaagcttcgattttttgctttttattttttttttatcttttttgtagtttgtttgtattgtttcgttagggaattaggaatcttcgattttcaagcgccgcttatatcctttgtttgctggtaattattatgggtctggtgtgtgtatgtggctgaagtttcgtgagaattttacttctttttctg

SEQ ID NO: 122868 - DNA, 266 bp, Glycine max
  Clone ID: PAT_MRT3847_81957C.1
ggtctatgcacacgtgacgctgtttttgtgtttgttcaagcacacacatgtttttggttggtattgcatggcggcgtgcccaaaattctatgcatcagagggcacacgaggattctaccgtggactaattccacttcggggacaaaacctttcatttttcatgggtatgcgctcaacatttgggcattgcctcgattttctgtaccggtatgtagtcaacagaaatatggatgactgccgaaaacatcaacaacttggtgtaacat

SEQ ID NO: 122869 - DNA, 2285 bp, Glycine max
  Clone ID: PAT_MRT3847_81958C.1
gaaaaaagtggaggattgttgaaagagagagtctcgcgatttgaggaggccacacacacccctctcccatctccgaaacaaaagcttcaaatttcggtcacaatttaaacaaaaggggatttatttaaaaactttttttttattaaataaaagaacagaacttggggtgtggcctagcatagagagaaagaacaatgaagaagaatccggtccggaattcctcgacccacgcgtccgatttcacgagcagagaaagaagaggctcgagtatttttttgctgaatctgaatagatcagaaggtgatgtcgtgttcgtcgtcatctgggtctgaggaagacgatgagggattcgactcttaccggaaaggaggctaccacgccgtcagagtcgccgatcagttcgccgccggcaggtacatagcgcagagaaagttgggttggggtcagttttccacagtgtggctcgcttatgatactactacatcttcatatgttgctctcaagatccagaaaagttcggcccagtttgctcaggctgcccttcatgagatcaatcttctttcatccattgctgaccgtgatccgtcaaattccaaatttgttgttcaattgattgaccactttaagcacactggtccaaatgggcagcatctttgcatggttcttgagtttcttggcgatagcttgcttcgcttgatcagatacaaccgctataaaggtcttccattgaataaagttagagagatttgcaaatgtgttttgactggtttggattacttacatactgatcgtggtatgatccacactgacctaaaacctgaaaacattcttctatgttcaaccattgatcctgccaaagaccctttaaggtctggactttccccaattcttgagcggcctgagggaaacacaaatggtggagttacaagtcttattgagaaaaggttgagaaggagagcaaggacagcagttgctaagatatctggaagaagagcatcaatgggaggaataggagatgctgcaaagactggtagaaatattgatgggattgatgtgagatgcaagatagtagattttggacatgcttgctgggctgatacggctgcgagaagacgacagaaggggaaacaaacttgtgtctgaaattgagcagtgcagagactcctgaacgtcaacggctatggcagcttcttcctttacaacatcttccattctcttcccattcacaactagttctaaatcccctccttctcaactattcccctcttttccttgcaaacatcataccctccgtctcagacccgtctcagtctcagccgcttcaaccccaaccccctccatccaagccgacaaatccccggtctccgccactccctccaagcttctcccctttcggattggtcacggctttgacctccaccgattggaacccggttatcccctaatcatcggtggaatcaacattccccacgatagaggttgcgaggctcattccgatggtgacgttctgcttcactgcgttgttgatgcgattctaggggcgctaggtcttcctgatattggccagattttccccgattctgatcctaagtggaagggttgtgcctcttccgtcttcatccatgaatctgtgagacttatgcatgaggctggttatgagattgggaatttagatgctacattgatacttcagaggccaaaactaagcccacacaaggatgctatcaaggccaacttatctgcactgcttggggtggactcttctgtagtaaatatcaaagcaaaaactcatgaaaaggtagacagccttggagaaaatagaagtatagcggctcacacagtggttcttctaatgaagaaatgagaagacaatctggaaatattgaggaacatgagagaactttaattggaaaaaaaaaacccataaaagttaataaactatgtttttttagcttctagtgtactgtttattgtttatcatatcttatagttcaccctgacagcaaattattcattggtgtgcctcttgccctgcattttgctaagatcttagtggctgtcttttacgttttatcatttggtattaagagggaccctgtataggtttgaacggcagatgcggccagtcggcgacaaatatatttagttatgtctgtgtataaactatgaagtgagcttgtttttaaaacaagcaagggtccatgaaaaatttgtaagtgcttacgtcatttcaaaacaaatttatggtcaaatgtggtggttaacaactttcatttttgatgttt

SEQ ID NO: 122870 - DNA, 315 bp, Glycine max
  Clone ID: PAT_MRT3847_81959C.1
cccccaaagaggcgtgtgggaaggggcaaccttgggatccatccctaacaagggttataagacccacctattcaagcccattacaaaaagggaaaaccaaaacccctaggggacccccccatggaaattttgaacaagaaaacatccacccccctttttggctttgacccattcatagggaaccaaccccctaggcccccattcaccattaaaaagacattggttccaaagaaaatcccacaaacccataaaaccaattgaaaggggggaaaacaccaacattccctaaacaaaaaaaaaaaaaaaccttttatt

SEQ ID NO: 122871 - DNA, 485 bp, Glycine max
  Clone ID: PAT_MRT3847_8195C.1
aaagacctgaatcaacaattatttttaaacacagtgtcctgaggacaatagttacacacacaaaaaaaaagcactacgcctcgcaccctatggagttttaccattttttttttaaaactctgctttgatctaactgaagctagtgggctaaattaatcattgacgaccatggaattcgaattagggctgtccaacttattattaaccaggttattgagaggagaacgttctttgcctgatagagtcacatcatgatcaacaaagatggagacctctgctctgaaatctacccttagaactcccatagcggtccaatttataaccattcgcgtgatcactctttaaactggcctagctgaagaatttggatcaaaacccaatgcaccaagaagctgaacagcttttcctgtgtatgaacatcaattttcttctgctggagcctgattttgactcgctccatgatggagctacactatttagctgat

SEQ ID NO: 122872 - DNA, 148 bp, Glycine max
  Clone ID: PAT_MRT3847_81960C.1
tggggcacaactgagtttcatgttccacatggttatgttcagtgtgctgaacatggttgtccttgttttcctcgttgcgaccagtttggtcgcatggtagctgccattcgtattgtcttttgcctctccgaatcgacactggctacgg

SEQ ID NO: 122873 - DNA, 330 bp, Glycine max
  unsure (1)..(330): unsure at all n locations
  Clone ID: PAT_MRT3847_81961C.1
cttgccataaaaaatggaaaatatcatagaatactcttatgtcccaaatgcacaaatcggagacttttctcccactcaagaaaataaataaaatggggaaatttggggggacagcctcatcatttttagggacatcaactttgcccgaaaataaaanatatatatatatatatatatatgtatccatgtatctgtttcctatttataaaaaaaaaaaaaatttctctggggggggcgttttaatgagatttctaaatatctccccccggcgccaagtttttattttttaaacatctcttctaaaaaaaaaactgtctgttttgactgggc

SEQ ID NO: 122874 - DNA, 139 bp, Glycine max
  Clone ID: PAT_MRT3847_81962C.1
cctagaggcagctgctccaggaacagaggtgccatgcagccccgggtactccttgttgttgcctccggcgtctggcctctgccgactcaaggcgagtgcctccttctcagtcatgcaggctacatgaccgcacagcgca

SEQ ID NO: 122875 - DNA, 449 bp, Glycine max
  unsure (1)..(449): unsure at all n locations
  Clone ID: PAT_MRT3847_81963C.1
ccacccagaacccngccngccaaacncnccncncgccgacgccccacccgccgccaccccaagccacncagangcggggggcgggccancaccgccaccancnccgncggcgacaagcncccggaggccaccnncnccnaccnggacccgnccggcgaggggcagacgacgacggngncggaaccgacgaaggggaagaaggcggngcngnncgcggnccccggcgcccccacccccacgngcncgcagaagcacgggccgggccccgnggagaaancgggggagccgagggcgaaggggancgacacaancgcgngccgggggggcaacggcgcccggcgggngaaggcgngggaggagggcccggagggcgacgggggagggcggcggggggggggcgggggcggggcccgggccggggggcngggggggggggcgggggcgggggg

SEQ ID NO: 122876 - DNA, 389 bp, Glycine max
  Clone ID: PAT_MRT3847_81964C.1
gagtaacaagagacccagtctcttttctctctctattgtttctctctgtaaaagactcaatgcagcaagtgcgtcgtcgtggtgattgaggagcgctgagcgaaatgcggggtggtgtttccctgttgttggcgttagcctccgtggcggcggcggcgacggtgtcgtgcggtggtttggcggggacttttcttcctctggaacgggccattcctctgaaccagcaagtggagctggaggcgctgagagctcgcgacagagcacgccacggtcgaatcttgcaaggtgtcgtcggtggcgtcgtcgacttctccgtccaaggaacctccgatccttacttcgttgggtacgatttgtattttaccaaagtgaagttgggatctcctgcg

SEQ ID NO: 122877 - DNA, 187 bp, Glycine max
  Clone ID: PAT_MRT3847_81965C.1
tacaagtatgtaggatgaagagctcatgaagaaggttgaggccaaaaacgctctggaaaactatgcatacatcatgaggaacaccgtgtaggatgacacgatcggtgataaactagtctcgactgtcatgactaagattgaggatgcacttgagcatgcgatcataatgatatacagcatccagctt

SEQ ID NO: 122878 - DNA, 724 bp, Glycine max
  Clone ID: PAT_MRT3847_81966C.1
ccgtgacatgaggttaaagtctattcaaaggcaaaatataaccaaattccaggtttttacatccgtgacatgaggttaaagtctattcaaaggcaaaatataaccaaattccaggtttttggttaaacctgtgaatacagttgatactttgcttttttttttttttagaacaatatcaactctatattataaacaagtaacaaaaaatcggacaattaatcacaaaagttaattgacctgaatgacagcaccaaaaattaaatacctaaaagctagttgagaatctattccaaggaaacctatacctaacattcaactttgacaagtgcatttggaacattcatgggtaatgatttatactggaaccagtccttggtacaaataagggcctcaagagtcaaggagtctaatgaagtccggtagctatccatttttctaatttctgtatcaaaaacagcatctgcagagagggtggatattggcatacacaaaatatcagatgctagtctagacaatgttgggtacttcaatccgtttattctccaccagctcagaatatcaaattcttgtactctgggttctagaggctcttcaagatattcatccaattccgtcttaaattgctggttacatgtaaaatcggatatataaaattcaaaatcagaaagtccatcatcagcaccaaaaagagatccatcaaattcttgagatgtctcagtcttta

SEQ ID NO: 122879 - DNA, 297 bp, Glycine max
  Clone ID: PAT_MRT3847_81967C.1
ttttcacctcacatggatccgagggaagggggatgactctcttttactccaaattcagggtttgccttagtcattatccatttattcatgtgggatatcctttgccttgaattgtattgaaaattcggagggatcgaggctaaaaatgtgtatatggcactctgggcacccctcgtggttattatcttcgaccgacggaaaacttttacttagctatttcgcaccttttcccatgtcagcgcgggttccgttaataatgtgacgcgtctagcgcacctggggaagtgggaatggtct

SEQ ID NO: 122880 - DNA, 325 bp, Glycine max
  Clone ID: PAT_MRT3847_81968C.1
ggctcgagccttttaagtaccattcactcctaacacagcaaagataagtctgatgcggatctgctcagcggacccagacctgacgttggatcgctgccggtcgtactgctccatcatagctgagactgcgtatcatgccatcgcccctcataattaggcatatagggaaacgtttcatttttgggagatggatgaaacccttagtcatggttgaaattattaacagagattttttggcatggactccatgtgccgtcacgtatacggaggtacaagcgtattccaccgtgcatggggtaacaggaatggtagttttaacaatccc

SEQ ID NO: 122881 - DNA, 419 bp, Glycine max
  Clone ID: PAT_MRT3847_81969C.1
gggagaataataacatagagaggtagtttaatgatcactggagcattataatgaaagagaggaggtagccaatgttccccatggtcccatgctacacaccctatttaccgtactggcactttaaaccaaacatttcaccggcctaaacgaatctcgagaacttatagaacaagtcctccaccccatcatatgcaaactattacacctcttgtctgctctacaccaaaactagagaagaaggctctctatctcagagatggcgcatatgtccttactgcctgtgtttgcagaagcactaataagctggcccacattccccatattcaactgaaacaagaggaagaaacggtcattatctttatgcttgggctaaacaaaggtgctggctgctgctgttctccatgccgccacagtggggg

SEQ ID NO: 122882 - DNA, 650 bp, Glycine max
  Clone ID: PAT_MRT3847_8196C.1
tctcactcctcttccttctcgcactgctattgccttcttcccttttctctcaaattcacatttatggagaagcctccttaggggaggtggatatatggagtgttcggagactcgtggaatggagaccttgcaattggtggctacaaggccatcaaacagctctaccgtgacaaactaatggatatatcagagtggattgctatggggggctcaatcagatgcgaagagatttctgtgatggtgtgggcattgctcgtctgttaaatgcaacccttgtcttgccgaagtttgaagtggcatcatattggaatgaaacaagtggttttgcagatgtatatgatgtagactactttataaagcatatgaatggctttgtcaaagttgtaaaagagttaccaccagatattgcttcaaaagaaccagttcgaatagactgtagcaaacggaaagggcaatttgattattttgaaagtgttcttccttctctgttgaaacacaagtacatttctatcacaccagcaatgtctcaaagaagggacagataccctttgtatgcaaaagctgctctgtgtcaagcttgttacaaggcattgcgtctcaccagatccttggaaatgaaagcctctcagcttgtagatgcaatacctaaa

SEQ ID NO: 122883 - DNA, 449 bp, Glycine max
  Clone ID: PAT_MRT3847_81970C.1
caatatcctggtggtagaggatatggatatgctgatggtgagtcaatatataaaaaatatcctggtggtggaggatatcgaaaaagaccatgaaatcattaaccacgccaaggggccgggaaatggttaccaacaaaactgctcgatctgttgctgaaatattggagatgttagcatcgttctttaattctgttgttttttatgcgagtgataaaatttacttttataacatgtatgtgtgtcagtacgtagtcatactaaactatgaagcaggaacatcctattttgtgtcctgtgtccaacacgacaacaccgacacccgtgtttacgtcgtgtccgatatctgtattagtgttctgtgttagtgtcgatgctttataaatactaagaattaactactagataggatattaatatatatgtcatgcacgtaatttcgacgaatcatg

SEQ ID NO: 122884 - DNA, 332 bp, Glycine max
  Clone ID: PAT_MRT3847_81971C.1
ggctcgagcgaacacgttcgaatccattctcactggagagaacctcccaaagcggagatgggctgagataaacgcccttttcccttctcccgacacgctgtctgaatgcgattattgggaaaggtacagaaacccatatcctggctactgaatacgccctgagggtgcacctgactgatacagatcgatgagccggcttgcctggaagtgactcacaaatgtaactctccggcgcaccttagcaaatagggatctgtgagaccctacatctaagcctgattacgaaaccagagaacatcaggctgagaatcatgggaagaggcagagggaaa

SEQ ID NO: 122885 - DNA, 296 bp, Glycine max
  Clone ID: PAT_MRT3847_81972C.1
tgattgctttttgtctaataaataaaggagataaaaaaaaaaaggccaagcggaactggaagacacgattctacaaagtacctctgcagctgcctttcaaagtatacaacctaagctaacccatcgtaacgagatgttcacatagattatccagagtgatcctttatatcagaggaccatctattaaagctagtgttgtaaccaaactccctatcttttatccaagaccatgctgaattacataggcctgtaacatgacttcctgaggactaaaacttatcaacatcgaaagatga

SEQ ID NO: 122886 - DNA, 233 bp, Glycine max
  Clone ID: PAT_MRT3847_81973C.1
cgggggcacccgccgcagaaaaccggggggacgccaccacgcgcgcgcatacgcgcgaagacgacacaaagggagggcgggggacgaaaaaaggggaagcccgcgccaacacaacagacaggaaaagcgggaacaccaacaccaaggagggagacagagacaccacggcccgggacagcacacggaaggaaaaacagccgcaggacaaccaagaacccaaggcgggcgggcac

SEQ ID NO: 122887 - DNA, 620 bp, Glycine max
  Clone ID: PAT_MRT3847_81974C.1
gtaacctcggaattcggctcgaggaattttgagtaatttttatcatttttgagaattaatatgtatataattatatagtatacattatattaactataagctacataaaaaaattcagaatagcggcggttatcctctatcctgctatattggtttttcggtcggctgctatgtgccgctactcaagattcaaaacattctggtaattctagaacatgtaaagtttttttttccaggttttagaatgccattgtattattattattattgttgagcatgtttggtgtatagattactttttgagaaataatcataaaaaattctcttgtgaagttataaacaaatgattgtttctcccgaataaattgaaccactgtgcactaagatcatattgttaaacaatcattcttttggatagaatatagatattgcagatacagtcatgccctcagattttaggtaattttatatgaaaatgcataaaaaattaaagttctggagtgtgggttgggaaatgagaggaatgatacattgttcttaataattgcagccttgttagctacctgccctctttaagctgaaatataaactctaagagggaaaataagtttttattagtt

SEQ ID NO: 122888 - DNA, 697 bp, Glycine max
  unsure (1)..(697): unsure at all n locations
  Clone ID: PAT_MRT3847_81975C.1
ccggggatcctctagagtcgacctgcagccgctcactgccacggtcttttacttgcaatcattacacaaaaagagacaaaaacaaaatactcacgaaattatacaataaataagagatcaggaagaccactgcactcatactattgttgagtgttgagcataaacttatgcagagccacaccagtccaatttttaatatccaagactgtttctattttcctcaataatatctttgatataattttagaggaaaattagttttttgttaaaaaatatatgtttacacgtctttttttttgtttgtaaaatgatatttttgttttcttactttcaagaaatattctgtccaaaaatgaacaagatttttcaccttcttatccaaattctcgtcaaaataaaaatactcacgggtgtccatagatgacaaaagtaaagggggacgtacgtactatatttttttttgagaaagagtgaaattagaaactaaaccacgtggatgaaacatctatatgctaacaacagaatagcantgaaataaggaacaatgtcaaaaattgtaaaactaacttcagactgtgttttgctaaaatatcagcaactttgatttgctttcctgaagagtagtagtagacagtttattattaactgaatttagttatttactttatataagcagaatttacgcaagtaattttat

SEQ ID NO: 122889 - DNA, 349 bp, Glycine max
  unsure (1)..(349): unsure at all n locations
  Clone ID: PAT_MRT3847_81976C.1
ccctctttgttttcccccanacacaccaaacaccagggggggggaaataaaacaccaagggcgacacaccccaacgaaaaaacaggccagaccaaagaacaggggggcaaaaccaccagaaaaggcgacaaacgggagccccgctcggcagagactaagctctctttggcacgaccaccattatcaccagcacggccaaacctatgaaggatccccccaggctaaccgcaccatccaggaaactcgctttagggctcccaccagcatcgaaagacatttcctctctcatagcatcaggcgtggggaatatgacctgaaggaaaccccttctgacgcctcccccagccga

SEQ ID NO: 122890 - DNA, 469 bp, Glycine max
  Clone ID: PAT_MRT3847_81977C.1
caatgctttcaccaatggaaaactctactccatctccatgcatcaccatgaatttcacatttgctgtgtgaatgagaccctaaggctttatgagtcagataatatttcttaagaactcagtgtaggtaaattgattttcttgctctttttactagcatatgagaatcaccatgcaattttcctttctttttgaaaaattaattaattggttttttgaagtcaaaagggaatttctaagacggcaaggttccaaccttaatgattatatatcaatcattttcttgcgtcatgggtttctgtgtgtcatcacttagaaaacaagaaagacagcgccccattatggccacgttggccttgtgctgtttttatatgtacgcgctttcttcaccatgcgttttggcgtttgaacgtttctaactacagctagcctaggattcatctctatagatgcatgcacaactccacgata

SEQ ID NO: 122891 - DNA, 613 bp, Glycine max
  Clone ID: PAT_MRT3847_81978C.1
acgctgagccttcgcgttgcgcatttgtccccctcctccagtggcgcagtctagtgtgacttgcatattatattatcaaatggaataatatttaggatatgcaggttggcgaattaagccggccagaggatcactgtcttgaaagcatttctgttgaagggaggccaatgaattttccggcggcttttctttcaaccgttgtacgccgtattactatatttagttcattgtcaatcctcttcaaagttaattaattttcctatcactctatcaggtcacctggggagtcagcagacttagcaattttcgtcgtcaaccaaccgacagaagtccacgactaggtaaaacgcgcaatcccactggccaccaaccatcttatctgcagacggcaggaataaaaaaataaaaatgtttttttcccttaaaatattttaaaatgttaatttcaattgatatatatgattagttaattaccattgcaaacagtatctatctcaaggggttttcttttccctttgtcttttgggggcgagtctcaatcaacatgtaatcataattttaagtctgtgtttcacgatattcatgtttaatgtactactagtatttttttttt

SEQ ID NO: 122892 - DNA, 643 bp, Glycine max
  Clone ID: PAT_MRT3847_81979C.1
gctgtggcaacaccaaaagtcaatgttgatcatcaacgtgtttttaagacaacggcatctaatgttcagaatcttaatgccaagattccagagaaacatattgtgaacaatggttcatctgtgccaactgctatgcccagagtttccatagaaaatgccacaaaacaagtaaggcctgcaggaacctcaaatgtgggtcatggattagggaataacgcgggtgcttcaggatgcattgttccttcactacgccgaacttcgtcacccagacaatagacatggattttgaaggtgtcaccaatttacccgagcatgacacaatcctatcaaatgcattggtggacaacataacatgctcagtgagataaatgtcctcattaaagattttgggaagagggaaaaagtagggtatggagaaagttgaagactatgatggtagctgttgcctgcagagagggaacgtggtcaatatgcaagggattcaactcaactatctcctgacatgatttcccatttgaaaaataatattcagctcaaaataactacaacaacaaagtcttatcttattggagtgagatcaattaaaataatcacacgacactattatgttcaaaataacaacaacaaaaaaaaaaactaacct

SEQ ID NO: 122893 - DNA, 208 bp, Glycine max
  Clone ID: PAT_MRT3847_8197C.1
acaaactataaccaatgctggaaattggttgattgggggtgacctacatgtctttgatccaattcattacaatgttgtacttgatcattttcgtatatctctaacacatctacttgcctacatgacactgcgcaatggggctgctgttcttgccttcctgttactgaatccttgtcccttttcccatgcttctgctttgactggctcc

SEQ ID NO: 122894 - DNA, 136 bp, Glycine max
  Clone ID: PAT_MRT3847_81980C.1
ccccaccacgcctgaatcgacaccacatgtcacgcctatggatacccctcgacacgtgaatagctgccggtagtagaaccagaatcagccatgaagaacgcacaagggatccggactcggcattgagcctgacgca

SEQ ID NO: 122895 - DNA, 273 bp, Glycine max
  Clone ID: PAT_MRT3847_81981C.1
caatcaggcagttgacagctacgatggaggcgctgacggcttcctcaacgatcgatgtctctgccgcttgctctggcgcccgtgcttgttgctcactggatgcatgcttcactggcctttcagccatgaactgcttgaatactaacaaggcacgacgggtcatcgccgctgttgctcgtaactgtgcaagcttgcagagcgtaccagctctgccagcaaatgtcaaggctgatagagtgactacttcctagcctgcagcacgtagcatacgaa

SEQ ID NO: 122896 - DNA, 353 bp, Glycine max
  unsure (1)..(353): unsure at all n locations
  Clone ID: PAT_MRT3847_81982C.1
catattgttcaatataagcatgcagtgggttgaacttgtgatagatttgctaaacctatatttcttactatatccattttagtatttagtatagtcacaccttcaataaagtagttttgtttgactgcattgacatcacattgttaagaggtatgctcaactttatgtttcttatcgtatccattttgctttttatatgcctttaacgctgttgctctttccaggattggttttctttactattcgatggtggaatcctgctacctttgaagccatgcatccagagggaactgctangagacctacgtggccttacgtcgaagataaatcctatctctggacatggctgtttt

SEQ ID NO: 122897 - DNA, 435 bp, Glycine max
  unsure (1)..(435): unsure at all n locations
  Clone ID: PAT_MRT3847_81983C.1
cccccccgcggagntctcgncctcctctaacgttcaaaacgtcgtggcgggctccgacgactggttcgctgacgacctcctcaacttttcactgctcgaggacaacaccaacgacaagcacagcggcgaagagcccgaccgacaactcaacgaccacgactccaccacccctcagaacaaccaggagacttgcactgataccccctccgtcaacgacaacaagttcaacaccgaactcaccgctccggcggagggggaaggggcggacttggaatggttggcccggttcgacgaagattctaattgctcggactagtctctgcccctccccgccaccgtgactgagaaagtggaagtgggaccaccggaaccgggaacaaccgctggcgctttcacaaccccggttccggccaaggccaggagcacgcgaacgcg

SEQ ID NO: 122898 - DNA, 659 bp, Glycine max
  unsure (1)..(659): unsure at all n locations
  Clone ID: PAT_MRT3847_81984C.1
gacaaataaaattactttacttgtttactgtaaaatgactttacttacaccaaatacttacacagaatttagtatacataagtcatatcctctctcttgcaccaaaatagaagataatgcagtgagtgacggcctagttggtttggctcatagtaaacctcttctccttggtgtaacgctttgttgacatttttggtaacataaaattaagaggtgaggagagaaataatgcacactctcattcttatatacgtgtatttttcttcttttgacaagaaggagaaaaacatccatataaaagttcacgaatatatttgttacaaaaaggattttccaacaaatatatgngtgaactttcatactaaatttattcaacaataactataaaaaagtatttcatatgctaatggcttaatgttataatagaaattaaactgtcaatataaaatattgtgaacatatactaacaataagatacaccataataataaacaacaataacccttattttatatgcctaccaaaaaaataaccttactttatataatatnaattttttattaaacttcggcaactattcttcttattttaaattccatatatttgtccctacattctatatanagcacccacacacaaactcacaaagtagtcttgga

SEQ ID NO: 122899 - DNA, 340 bp, Glycine max
  Clone ID: PAT_MRT3847_81985C.1
tatgggtcacacagctgagacacttaataaagatcagttagaagaacttcaaaattgtggtaaaggtgtgggtgttgctacttttccttgtccagcttacatctgcactcattcaactgagcttcttcaaaagtgatcagtcattaacttatgatgattatgagtattcataaccattctgtaatctctgcatgtgcacacgctcaatacctactcaatacatctgtgaatatattatgctgaattcattccactcatattgtaatatctctatgttcacactctcacagccaatacagtgtcgttgtcttgacaccaacgacttatgctacaaaccttg

SEQ ID NO: 122900 - DNA, 384 bp, Glycine max
  unsure (1)..(384): unsure at all n locations
  Clone ID: PAT_MRT3847_81986C.1
tnctctttttttttttttttttttttttttttgttttttttttttattttttcttttttttttccttttttgggaagacagggttttaactttttaatgcccggggctttggggatccccatccatgaaacaaggaagttttcggatttttttttttttaagaaaacaacccaaggggggggttaaaccctgccaaattttgaaagctaatttatcaagcaaagggtttgttgtcccccctggaggcccaaaacaaaacaaaattgggcataaaagggaatacaggttggaaccgcaagcccttcccaacaagggcccaacagacttcggggtgggctttgggcccccctatgtcccccccaatttcaagaaaaaccccaaaag

SEQ ID NO: 122901 - DNA, 2133 bp, Glycine max
  Clone ID: PAT_MRT3847_81987C.1
ttcacgcgtgcgggaaaacacgctattccgtttccaccttcccgttaactttcagaaaccgagtgtgcgaactgcgatggcgagattgaagataggagggacatgggcaggggtgctggaagaggtggacctccaggcgtggaccctggctacgctccgcgacctcgtcgccgcccgatcgaactccccctcctccgactccatcaacctcatctgcgccggcaagattctcaaagacgacgccgttccgccccaaactcttgcccaactcggcgtcaaaagcaatgccaagatcctcgccacgcgcacctccactcctcagcaaggacactccttcctcgcccaggaagaacgctcctccagactcgcgcgtataagggcggctgcgaatgcgatggcggacaggcatgcggatggggcattgccagttgaagacttcaatattgaagttgaggatcagagtggacagaaagtgagattaggctctgagactgatcagagggcagtgatgatgggactgatgcttcacgcgaaggggaagcgacttatcagacaggggaattacaaagatgcactggaagtgcttagcatgggagaggagtcattctctctttgtgatccaaaagtcattgagctcattgacaatgttccaatactacaaatagacatggtatggtgctattttatgatacgagacatcagatggctctcagatgcaggaaagcgtcttgaaatggctcgggaaggtattgaacgtgctcatggaaaggattcttttcgcctcagactcttacaagtaggtcgatatccagaactcgcattgcatttgagactagagctacttgaaggggtagtggcatatcatattggccaattggagaaatccaaaaaaacattagcctcagcaaggacaaagtttatccagctgcaagtgccagatgaagccttatcacttgttatgagcatgggttttgttgaacgtgatgcaaagcgagcattgagaatgaacaatcaagatgttgggggtgccattgatttccttgctgaggagaagacaaagaaactgcgaaagagggaggaggatattcggaggagaaatgaaattaaggaacaaaagcgatatgggatgacacccttaaagaaagctgtggatctagagagattgaaggaattggtctctattgggtttgacaaggagcttgctgctgaagcccttagaagaaatgaaaatgacactcagaaagcattggatgatttgacaaatccagaaactaattctgctttacaggtcaatatcgagtccaggaaaaggaagagacagaaagcagcacgagattctgaaattgaaaaagttgtgcaaatgggttttgaaagatcaagagtggttgctgcttttgaggccggaggtagtttagatgaagtattgcaaagactgacagcacaacctgggactgaccccacgcaacctcgagaaaattcagcttctgcttcccatggtggtgcaagttcatctgctcctttgccagacaatgttgatgctgatttagcgatgtataaggttgaagatcacagtaaaacagaacaacgagatgtagagatggaagatgagctctctgcagatatagcgaaagcagatgccttggctgattatgacatcgaagttactgtagaaggggaagccataactgagtaccttgccctggttgagtctgcaagctgtcgtggggaaactgttccttcccagtaagaaaaaaatgatttaaaatattatggaccatttagaataatattgaccagtttatgtaaacagcaggatatgatataaataatgaacgtatttctgctcttccttgcgggagcttttgtaaatagcatgatgagtacaacatatgaatatgtgctcattccctggagtttttacgatggtaaattcattcagcattatttaaatacttgatttgcttttgaaattcccaaatataacaagggaaaatttacacaaaagttatgcctcgcaagtgttaaagaaagtaactattgtataacattattgaggcatgcaggatgctaaaatttctaactttctctaaaggcccgaatcttcagctcaaagatcaagaaataagacacaac

SEQ ID NO: 122902 - DNA, 599 bp, Glycine max
  Clone ID: PAT_MRT3847_81988C.1
caagaaaattcagcttctgcttcccatggtggggcaagttcatctgctcctttgccagacaatgttgattctgatatagcgatgaccgaggttgaagatcccagtataacagaacaacgcgatgtagagatggaagatgagctctctgcagatatagcgaaagcagatgccttggctgattatgacatcgaagttaacgtcgaaggggaagccataaccgagtacctttccctggttgagtcggcaggcagttgtgggaaaactgctccctcccagtaagaaaaaaatgattgaataatatcgaccagtttatgtaaatagcaggatgtgatataaataatgaacgtatttctgctcttccttgcgggagcttatgtaaatagcatgatgagtacaacatatgaatatgtgctcattccctggagtttttacgatggtaaattcattcagcattatttaaatacttgatttgcttttgaaattcccaaatataacaagggaaaatttacacaaaagaaaaaaaaagcaagtgttaaagaaagtaactattgtataacattattgaggcatgcaggatgctataatttcttactttctct

SEQ ID NO: 122903 - DNA, 220 bp, Glycine max
  Clone ID: PAT_MRT3847_81989C.1
ctaggccgcccccgtcctttttttttattttttacagcaaagaacctcttaaactcacttatataggcaagaaaggcgcgggcttggttaccatgacatgcaaaactatcttaccatatttcagacagcatcagtgcacactaatcctaccaaccagtgttggagcacacttaataccagggactttagataacacacattcgacagtctggataactta

SEQ ID NO: 122904 - DNA, 278 bp, Glycine max
  unsure (1)..(278): unsure at all n locations
  Clone ID: PAT_MRT3847_8198C.1
aagtggatcagacgattganatgcagatgggtctgatgataatttgtcagaagacagaggggaaagtttagactcagaagatgatgatgatggactaaaggactcaggaaaaggttcaataggccattctggtattcctgctgaagagatgttgtctgatgaatattatgagcagaatggggaagagcaaagtgtctccttgcattgcagggttgttcgtcaacccactggnncaaattcacggcntcaacagatgnctccaattgcnaaangcngaa

SEQ ID NO: 122905 - DNA, 769 bp, Glycine max
  unsure (1)..(769): unsure at all n locations
  Clone ID: PAT_MRT3847_81990C.1
ggcaacctcggtgctggagcagatgctgatcaccaatgtggtgttcgtggtttgtatggcgctgaccttgccctggacccacacgccagcgccgaccccggcctggttggggatgctggccgcaggtctggtcggcggcataggtcagttcctgttgtttgcgagtttccgccgggccacggcgaccttgctggcgccgttcgaatacaccgggttgatctgggcgtttttgctctcgagcctgatctggggcacgtcaatggatgtgtcgctgatcatcggcgccgtgttgatcgcggtcagcggcaccctggccatgctcagcgcccgccactcggaatcacaagatgtggtcggcgccgaatgctccgtaacgcaacccctgtacccagcaacgacagatgtgcagcccgttggcggggctgaaagtaccggggttcagacacccctcgagccagagcccgtcgagcatcgccgataggccaatggcggccaggtggctgtcgtggatcagcaggttttcgctgcgggccaggtcgtccagcagctgttggatcagcgccaggtaggcgcggtagctgttttcgtgggactggtttacgtggggcgagtggcggatcaggctccagaacaccacccacacgccgnagcaggtcggggtccatcacccgtggcgaaaacgacgcgctaagaaacgcgtncaggcgcgcagcggcgccttcggccagctcgacttgcgcccataacgcgctggtcagctcattggcga

SEQ ID NO: 122906 - DNA, 333 bp, Glycine max
  Clone ID: PAT_MRT3847_81991C.1
gcacgcgctcgtaatctcggtatagctctcgcggttgacccaatgcgtaactaactaggaaccgcgctcattcgcctcatggggcgtgacaatgttcataataagtcccgatcaagctgagatatcctaattgaacgctcaaggatatcagctgtcttaccacggctactgcagacctgtgtacacacgctcacactagccaaggacatccacaacacgcgtctgctgatccgtcagagatacatatgcatctgattactgatcgcaaacgtgctatacttcataaagcgtcttgactcgcagattcacattgacttatgcctgacctctcca

SEQ ID NO: 122907 - DNA, 372 bp, Glycine max
  Clone ID: PAT_MRT3847_81992C.1
agaaatttaaattcggaactaaaaaataatgcgttgttctgcattgtgtgcaatggatagttgtatcagttctacatcttgcaggagtggggcgaatagctgaagctgggacatgcatccaagcaatttagtgtcgttgactttaatgattcatgtcgcgggctataccgtctcattgctgtatgctcgagcactaattcgctaaaaagtagccgaatgtcaccatcttcaaagtgcaagtttgtgacattaagacagttcccatagagtgcggaattgagtggcttcttgtctgattgtccttgaaacatggcaagcaggtaaacattgttataagtaccgtgtgagatgaacatctattgacagttaccc

SEQ ID NO: 122908 - DNA, 182 bp, Glycine max
  Clone ID: PAT_MRT3847_81993C.1
tcgtttattcgttcgaacacacataacatgatcataacagatccaccacataacagtgcttttcaatggcagttctagcatgtggcgttcttaaataaaattggtatattgttttaagaattctgctgtcatagttatcagtcaagatatttttggggtttaccctttaacttttacaaagc

SEQ ID NO: 122909 - DNA, 132 bp, Glycine max
  Clone ID: PAT_MRT3847_81994C.1
gtcgtcgccgagctacggctcagatcttcgtcggcagcttctcctgcaacgagcatccagagatgggagtccgtcaaccagatcggttcctgagcgagctgacgagcatgtacgactggagcacagagaagg

SEQ ID NO: 122910 - DNA, 400 bp, Glycine max
  Clone ID: PAT_MRT3847_81995C.1
cactaggtttggaactcatttgcgagcattcttatcattgggaattacgaaaacatgttggagctaagagaaataccctttgtattgtagttgtttcttttcccgcagaaactcaaaactgttttagaaaaataacgatctcagactcgttaaccgttgtattattgtgaaattttaatatgtggtttgcgattcatttccgcacatctttaccattgggattttcaaaataacatctgttggggggagaaatccccatcgcgtgtagacagtggaatggaggcttcaatccattctccttctctctaacgtttgggaaccctattagagtagtcagaggaatctcaggaaatcgctagagatgctgctattgctgtcacaatacacacgtgagttcgct

SEQ ID NO: 122911 - DNA, 537 bp, Glycine max
  Clone ID: PAT_MRT3847_81996C.1
atggaaaaatgtgtgcaattgttgttacaggttttgatatgccgaaatgaggctgaaaaatgcttaatagaaacatctatcaattcattgcggataagtctcaaggtgaagcaggctgatgaacttgaaaacatattgaccaaaaaatttctaagatttctctcaatgagagccgaggctttccaagtactgaggagaaagcctgttcagggatatgacattagcttccttataacaaattaccactgtactagaccttatacgacaactttcaaatggggtaaggacattgataaagagataagcgagctcaaaatgtcggtgaacacaagggggaggcttgtagctacagagtttctgaagcagtctagtttcacttatgaagtgcttggtcctttgagccaatggttttatataaagaaaaatgacaaacctgtatgtcacgcggagaagatgaagctacagaagttagcagttagcacatttcctttcccatgtcccacggtttttcggtttagtaaaaacttgtcaaaataa

SEQ ID NO: 122912 - DNA, 1045 bp, Glycine max
  Clone ID: PAT_MRT3847_81997C.1
gtcataatccgtcaaaggcacaccgcaccgaagcgaatctagcgtagttggtgaaattcctgatccccactggacggagtttttgttgcttttttctctcattcattgccttaatcctctcttacactctacgactactcttccattcgagtcaaaggcaccgcactgaagcgaatctggtaaagcagaaaagcgtagttggtgaaattcctgggatcccccactggacggagtttttgttgctttttctttcattcatctcttacactctacgactactcttccattcccaaacgaaactcagcgtttcttctgatcatggcaagcacgttgcggttatacttgacctgcattcggaacacgctcgaggccgcaatgtgcctccagaactttccctgccaagaagtcgaaaggcataacaagcccgaggttgaactcaaaaccagccctgaactcctgctcaatccggttttgatatgccgaaatgaggccgaaaaatgcttaatagaaacatctatcaattcattgcggataagtctcaaggtgaagcaggctgatgaacttgaaaacatactgaccaaaaaatttctaagatttctgtccatgagagccgaggctttccaagtcctgaggagaaagcctgttcagggatatgacattagcttccttataacaaattaccactgtgaggagatgcagaagcacaaactcattgactttattgtgcaatttatggaggacattgataaagagataagcgagctcaaaatgtcggtgaacacaagggggaggcttgtagctacagagtttctgaagcagtttatctgatggtttagaatagttagaactgccaaatccgtgtaaattgtactattgcaggtctagtttcacttatgaagtgcttggtcctttgagccaatggtttgtgttttaattatatttaaagaagtgcagaataaattttgtagagtttagtacagtatataaagaaaaatgacaaacctgtatgtcacgcggagaaaatgaagctacagaagctagcagt

SEQ ID NO: 122913 - DNA, 202 bp, Glycine max
  Clone ID: PAT_MRT3847_81998C.1
cacaacaaacagtattttttttatgggcttcgccaaacacaaatggaaacactctcaaaaaagatttctctcgaacaactcgcttttcaaaaacgggggaaaaagcctaaaaaccacgcgttgttaagggtcagggaggagcagggtgctcggtccaaattcgtccaaggcaccctctgccttgacaatgatcagaacacag

SEQ ID NO: 122914 - DNA, 364 bp, Glycine max
  Clone ID: PAT_MRT3847_81999C.1
gggccaccaatggtttaacatgtgttctaaccatgtaaacatataaattcaggaaaaaaataaggtgggccgggaaaccttaatccacataagaaaatccacaaaaggccaattcgttgctcacaaggttaaaatatcttcaagagtataacaaaaacagtcaaaggcataaaatctatatctaccacattatggaataactgggtcgattttatctttattgagcataacaataccattaattatctatcatgcatttaaatatgatgtgcatgtcttaaaattttgaaaatagccgtatattatcgcttagtgaaaattctaattgatcctttgttcaccgctgtacgatcgcgctagtcat

SEQ ID NO: 122915 - DNA, 366 bp, Glycine max
  Clone ID: PAT_MRT3847_8199C.1
aaaactcaacactgctcgcttagtggggtaagcggcgacgacgacgatgaaggtggtggcactcgttagcgggggtaaagacagttgctatgccatgatgaaggctattcactatggccatgagattgttgcattggccaatttgatgccgcttgatgattccgtggacgagctcgatagctacatgtaccaaactgttgggcatcaaattattgtcagatatgctgaatgcatgggattgccattgttcaggaggcgaatacaaggatcctcaaggcatcaggagcttggttacaaagaaactcaaggtgatgaagttgaagacctgtgcattttgttacgtgaagttaaaaggcagataccctc

SEQ ID NO: 122916 - DNA, 187 bp, Glycine max
  unsure (1)..(187): unsure at all n locations
  Clone ID: PAT_MRT3847_819C.1
ancnccgcggaaattncattccncgggnncccggtaaacncttnacaggtcgtaacacagactttcncgctgataagtngagtgcgttattgaggagacttgtggcgtacattcatggtacattaggctgtttgccctgtgntgaaaatngtncattcccggcttcatcanattccccgcatcaaaa

SEQ ID NO: 122917 - DNA, 465 bp, Glycine max
  Clone ID: PAT_MRT3847_81C.1
aacgttttgtgcgcctcctaactgttgtattagccatggctatggtgctggctgcaccagcccacgctcagatcagcacgccatgcagcacatcaatgataaacggctttttcaacccttgtatgaatttcctcacaaatagcagtggcaatggcaatggcacttcacctactgctgagtgctgcaattccatcaagtccctcacaagtggcggcatggactgtttgtgtctcattatgactggcaatgttccctttagaataccaatcaaccgaaccctggccatctctcttcctcgtgcttgcaatttgcctcgtcttccacttcaatgcaaaagttcaccacttccagctccaggacctgcggcttttgggccatctctttctccatctgctccatctcttagtcctgaagcttcctctgtacttccttcaccttctttggcaccactgtctgacataaccc

SEQ ID NO: 122918 - DNA, 241 bp, Glycine max
  unsure (1)..(241): unsure at all n locations
  Clone ID: PAT_MRT3847_82000C.1
tcnncacgcgtacgtaagctcngaattcggctcgaggtnanngtttgnntctggtgaagnaggnngagntcntgnacgntanccgggntcaacgntanatcgntccgttcccacggaagtgactttccctcccnacttcatcttcggagttgccacttctgnatataccgnnagnaggtgctngtannganggtggtannngtcctnggcanatgggatgcctttncacacacggaaagng

SEQ ID NO: 122919 - DNA, 160 bp, Glycine max
  Clone ID: PAT_MRT3847_82001C.1
gattgctcaggttaatattgattctctttggtagcggagaaccagccgggaaagcgacgactgaaggaaggtcacacacaacagaagtgagcagagtgaatacaccaccttgcaatactaattacaggaaatattcgcagtcctaaaaattgaggccttc

SEQ ID NO: 122920 - DNA, 630 bp, Glycine max
  Clone ID: PAT_MRT3847_82002C.1
attattattcgtttttttctttgttttttgttttatttattttttttaactagggaaattaaatcaaatattttggttttaatatgacaatttatatttattattatgttattttaacaaatttaaaatctctaagtaataaaacattcataaactatcacatttgttaaaccttctatttcttactggaaaagccaaaatttcttatttgatattatttatacaagtttattcattttaacattataagtaataagcaaaattaattttttttaaagtacccccttataaaaatgataagaaatctttatcctttaaatactttgataaaaatacatttactcaaaattttatattgagatagagtttattttttttcgtttaattcaacagccatataaaaccccttaaacttactcctatatagggaacttataaactattaaaaccccgattttctgaagaaaacatattcaacctcataaatatttatttgagatcaagtccccccacaaaattaatttttacaacagccggttaccaccccttgactgcgctagaaaatgggaaacgcaaaaacggaaaaaccccactctctgaagtaaccaacgcaacccatgactctttctt

SEQ ID NO: 122921 - DNA, 447 bp, Glycine max
  Clone ID: PAT_MRT3847_82003C.1
caataccaggtgattttgtcattggagtcaagttgacaaccataaacaatatgtgtgcatatgggctcaatccaggtattttaggtactcgtcttttgggcaccattcctcagtccatttttacagcaaatctgttggaatcaaatggcatctgtgagaacaccattgaattctgattctagcaagcagagctttttgtcaattatttattgaccttctctgtggaggaatcttagtggacaaaactggagattggatcacacttatacaaaattcttcaattagttacttgttgagagtagctgcttggaagaaaggctgtttatggctaagattgtgattgctgggaatgcatcgttaaaaagagtgattgtgcctcattgttacaagttgtttttaacaaacagcaaccattcagagttttttggagcatgtaagtgtccaaaa

SEQ ID NO: 122922 - DNA, 519 bp, Glycine max
  Clone ID: PAT_MRT3847_82004C.1
ggaaaaaaaaaaaaaatttttaaacccataaaaatccaaaaaaccctcccccccaattaaaaaaaaagtctttcccgaaaaacaagcccccccccccaacaaaaaagggttccaacccccaaaaaaggggtaaaaaaaaaaattagggtagggaaaacccggccaaccataaaacccccctgggaatgggaaaattccccaaaaaccgggacaaggaccaggggggaaaaaaacaaaatataatttaaaaaaaaattaaaaggaagggtaatttttaattataggggaaaaaattaaaaaaggggaataatttttatccccccagcctccccccgggaaatggcctttcgggaattccctcccaaaaatttattaaaaaaaccataccaattgggcccccttctaaaaaaacatccccctcccgctaaattcccttgggcccataaaaaaacccggctaaaaaaacccccccaaagggccccaaggaaaaggcctttgtcaatcggccccgggggcccc

SEQ ID NO: 122923 - DNA, 147 bp, Glycine max
  Clone ID: PAT_MRT3847_82005C.1
ggctaaaatctgcctcggggcacacagcctgtttttcctttaaaaagtttttagtatatatatcacacttacaattggacaagattttattccaatttggcatttaaatgccgtttctaaaacccattccacctaagtagcaacacc

SEQ ID NO: 122924 - DNA, 869 bp, Glycine max
  Clone ID: PAT_MRT3847_82006C.1
atccgataacattatgcactgttcttattatgtcttttattcaaaagtacaattagtcacactagctgttcttcctgagtataagatttgcgatataacaaacacatgtctcgatctgaagctaaaaatatttgacacgaaagattcatgacatttgtcatggtattcttcaaagtcgacaaacacaaaacaaaagataatcgatcaaatcaataccccttccacaataatcaacttcaaaaattgaaaaggcaaaaggaaatgcattaaccctggtgtatttgactcaacatattcctagccaaggggctaaattacaaaatcaactagcatgccaaaatcaagcatctgcaatggtcacctcaacctcgacaccaggttcaattgtgatcgaggttatctgcttaaccacatcaggggaactgtagaggtcaatgactcttttgtgtacacgcagctcaaatctgtcccatgtgttggtgccttcaccacagggggattttctggtggtgatgttaagaactttagttggcatcctaacaggtcccttcaccctgagatgcttgtccttggcaccacgaaccaggtcagcacaaaccttctcgagattcttgacgttcttagaggaaagggtgattctaatcttatggatttgctcctgtgactcctccaagccgggcttagtgggtttcattgcagcataagccatgtctcgtctcctttgagtttgagaatcggaagcagaatgcagctctcaagttgggcctcgtgccgcggcacgaggcctcgtgccgaattcggcacgaggcctcgtgcgaattcggcacgaggttcggcacgaggtcggcaggaggcctcgtccgaattcc

SEQ ID NO: 122925 - DNA, 494 bp, Glycine max
  unsure (1)..(494): unsure at all n locations
  Clone ID: PAT_MRT3847_82007C.1
attttagacagccaaaatgtgtaaggataattgacatgtgctcttcattgcgttgttattctaacagaagaaataaagttggtaatcatggtcacatgggaaatgtatgaacctctctgaactgttttcaaagtctgataatacttccaaaaagggcaaattaaatatggtttactatgatatngcatgannatatncttgattttgatataaaaatctgttttcctggattcttcctagtagatacttcatcaggttctttgttctttctcctatataatgaaatcttatccaaaataaataatagactgtcctagatctagtacagatagctgcagttaatttataggttcgtgttgatgtattttggcacgggcagaggaaataattttcatgtaatttgctgtcaataattgaggcctttcattctggtttatgagtaaattgatctatgtcattataggttcagtaattgtctaccacctttttggcat

SEQ ID NO: 122926 - DNA, 263 bp, Glycine max
  Clone ID: PAT_MRT3847_82008C.1
attcgttaccttatgactagtgcaatctaagggtagatataacgatacacaacatgcgatctttgggcagaatcagacaagccacttgctgtgtgcataccgtacccagcagcaggcaacataaacgcaatgctactactagcatgacatcgtcagttcacaggcgttcacataacctgtgtaaacactgagtatcaccacaaacgccttctcacagcaagacgcgctgattcacggaatggcctctcttcgatgcgcttaga

SEQ ID NO: 122927 - DNA, 251 bp, Glycine max
  Clone ID: PAT_MRT3847_82009C.1
gtgattatgttcaatggattggctgaactttccatggtcgtttcacggcttcctgttttctacaagcaaagggactatctcttcttcccttcatgggtatatgcacttcctgcatggatcctaaaaatccccttgacttttgtggaagtgggtgtttgggtattccttacctactatgccattggttttgatccatatgttggaagattgtttaggcaataccttgttcttgtactagtaaatcaaatggc

SEQ ID NO: 122928 - DNA, 449 bp, Glycine max
  unsure (1)..(449): unsure at all n locations
  Clone ID: PAT_MRT3847_8200C.1
ggctcgagctcccctgaagaagaaaaaataaaataaaataaagaaagcaagcttcaaagtttcaaactttgcaccaccccacctccaatttcaaggaccagaactcatttttccccaatttaaatcctttttcgctacccattttgggttttggttcgtgtaacttctacttctggaactaaagttgagctttttaccttatttgggttctttgtgtttagcttttttttttttttccttctttttcatggcgattgggcttcttctgtggctgttactggccaagggtcttgccatggagggtgccgtgggggtcacattttcttctaggctcattcaccgtttctctgaagaggctaaggctcatttggcttaaggggcagcgacggntctgtgcttcttcaagcgtggcctgagaggaacagctctgagtatttcaggttgcttct

SEQ ID NO: 122929 - DNA, 1157 bp, Glycine max
  Clone ID: PAT_MRT3847_82010C.1
gaaatcatggaagagagtggtaaaccaaacctcgctgacttcttccctgtactcaaattcatggacccgcagggtatcaagactcgcaccactgtttataccggcaagatcattgacacctttcgcgctttgattcatcagaggttaaagctcagagaaaacaaccatggccatgacaccaacaatgacatgctaaataccttgctcaactgccaagagatggaccaaaccaaaattgaacatttagctctgactttgtttgttgcgggaacggatacgattacatctacggtagaatgggcaatggcagaattgctccaaaatgaaaaggcaatgtcaaaggcaaagcaagagctggaggaaaccattggcagaggaaaagcggtggaggaatcagatattggtaggcttccttatttgcaagcagtgatcaaagaaacctttcgattgcaccctgcagtcccatttttgattcccaggaaagccaatgcagatgtggaaatcagtggtggctacacaatcccaaaagatgcacaagtgtttgtcaatgtgtgggctattggaagaaactcaagcatatggaaaaataatgcaaacgtgttttcaccggagaggttcttgatggattcggaggatattgatgtcaaaggtcacagctttgagcttaccccgttcggtgctgggcgtcggatttgtcttggcttgccgttggccatgaggatgttgtatttggtgttgggttcgctaataaactgttttaactggaaacttgttgaagatgatgatgttatgaacatggaagatagctttgggataactttagcaaaggctcaacccgttatactcattcccgagaaagtgcatggtgtcatcgtgtcatgaatgatgcacatgcacactgatgaataaaataatagtaactgtagtatgcgtatatataggacgtagacacgtagtatataataatagcaactgtagcatgtgcacatgcacatgcacactgttaaatgcagtgctagtttactacagcagccgtatcgtgtcgaaacctccccaacccaagtactgtaataatttggcagattcatgctttgctttaaaagcttggcagattcatgctagtttgaagtaattaattaagctaaggtttgttcccc

SEQ ID NO: 122930 - DNA, 276 bp, Glycine max
  Clone ID: PAT_MRT3847_82011C.1
accgcttcactttaaagctggcttacgtcaataatcgacaattcaaactcgcatggaacagggaccggtcgcaagtggttggcccttgttttaaacctcaattcacccggcatctcggataggatgactgaaacttctcaaacacttgtgccggatcacttgtggtgaagcgtgtgaacgtgcaacccgccttttatttattggtggccctaccttacatttggaattattgcaaagatgtttatatctgaccgtatgcactgaagatccggtgag

SEQ ID NO: 122931 - DNA, 583 bp, Glycine max
  Clone ID: PAT_MRT3847_82012C.1
ccacgcgtccggacaaaagatgtctcttgcccttactgcacttcccgttttgtgccaagccaagagggacagctatgtactgtgtgtgatcttgcagtggtcggggcagatgcttctggattgctgtgttcaccttcccagatacgttgattctgctgctagaccagaaacattttttcccccaatttgtttcagaagatccctgaaacagaggcagtggaaccaatagctaatgaagaaaccaatcttgtgggtaccagatttggaggaatggcataagacggagagggttatacaaagacagttgcagaaaattggaacaactttcaaccttgaacgtgtatatctaatatttcttgaagcaatttttacatgttagaagtaatgattgtcgagacattatatagtttcctttagaggcctttatcaataacggaagcatttagatgtttcctgctagaacctagaaatagtttggaagaatggatgcttccgagtgagtttctctgtttatctatttcccttttcctttcctgttttatatacttgaaaaatattttcaacgtgatatacctatttcata

SEQ ID NO: 122932 - DNA, 1259 bp, Glycine max
  Clone ID: PAT_MRT3847_82013C.1
gtggctctcttggcgtgcacccgttgtcttcatgctattcccttgattgtggttgagtcaaggagagaagtagatgaggtgcgggaattaatcatcatagtcaaagaatatgttttgggtttgcagatggagttgaagagaagagaaatgaaggacaatctaactcggcagcaggagcttgcagcttatttcactcactgcaaccttcaaaccccacatttgaggctagctttgttgaatgcaatgactgtgtgcttcaaggcaaagaaccttgcctcagctgctaactttgccaggaggctgcttgagaccaatcctactgttgaaacccaagccaagacagcaagaaaagtgcttgcagctgcagagacaaatatgactgatgccaaaccattgaactatgatttcagaaacccatttgttacttgtggtgcaacctatgtgcccatctatcgaggacaaaaggatgtctcttgcccttactgcacttcccgttttgtgccaagccaagagggacagctatgtactgtgtgtgatcttgcagtggtcggggcagatgcttctggattgctgtgttcaccttcccagatacgttgattctgctgctagaccagaaacattttttcccccaatttgtttcagggtgcatctggcttgtgtctaagttttgttatgacgataaaaatggacattgagcatcaattattgcagaagatccctgaaacagaggcagtggaaccaatagctaatgaagaaaccaatcttgtgggtaccagatttggaggaatggcataagacggagagggttatacaaagacagttgcagaaaattggaacaactttcaaccttgaacgtgtatatctaatatttcttgaagcaatttttacatgttagaagtaatgattgtcgagacattatatagtttcctttagaggcctttatcaataacggaagcatttagatgtttcctgctagaacctagaaatagtttggaagaatggatgcttccgagtgagtttctctgtttatctatttcccttttcctttcctgttttatatacttgaaaaatattttcaacgtgatatacctatttcataattagggatgttagtattttatacacttaaattgagagggtgtgcttgtgttgtatcagatgatggtaaaatatatgttgtgtttagttggggtccaaattgttggttattaaagagagttgtgtttatctaatagttaagcaactctttgaatacaaaa

SEQ ID NO: 122933 - DNA, 877 bp, Glycine max
  unsure (1)..(877): unsure at all n locations
  Clone ID: PAT_MRT3847_82014C.1
gtgatttcttcttcttatcattctcccttcaccactagatcaatcttatatcttttttaattcggcggtatgataatgggggcatcagcatcatcggtttggtataatgtgagagtgccgcatccaacgaaagaggtgcccatattagactatgatctggctcttctgttccagcctatgctcatgcttggaatcactgttggtgttgctctcagtgttgtcttcccttactggcttatcactgttctcatcatcattctcttcatagggacttcttcaaggtcattctttaaaggaattgagatgtggagggaagagactattttcaagagagaaaagaccaagcaacgggcgacgttggttgattctcatggtgaagataagacagttagaatcgacacaaaatatgaaccgctgattcctaaagaagagaagtcaactatacaaattttatgtctcaaccttaggtggaagaggattctggtactgattgtggtgtgggttgctttccttctagttcaagtcatcaagaatgatgtagaggcatgcagtccatggtattgggtgctttttggcttgcagtttccaattgcacttttggtgtttgggtatgaagcagtgaagttgtacaaggagcacaaaaggagaatgagcacaaggaacctagaatgcatctgtgaggcttctatagaatggactgctatgaaccttgcattttgttcattgtgtggcattgtagggggaattgttggaggcctacttggttctgggagtggatttgttttgggacctcttcttctagagattggtgtcattcctcanngtgctagtgctacagcaacatttgtgatgatgttttcatcatctctgtcagtgg

SEQ ID NO: 122934 - DNA, 344 bp, Glycine max
  Clone ID: PAT_MRT3847_82015C.1
gaaagacataggtttgcaaccaacgagactacttagcgccgatagtagccaagatgagggtgttgctcgcgtgctccgctgcgctgctgctgctggcagtcgctcacgtcaccatgggtctggaggacgacggtaccaagtcggtggagcagttgtgggaggagtggaaggttgaaaatgggaggaagtacttttctccagaggaggagaagaagcgcttcggaatcttcaaggacaacaagaagcgcatcgacgagcacaatgagaagttcaagaagggtgaagtcagcttctctcagggcctcaccctctgggccgacatcacctccgaggagttcaaagcc

SEQ ID NO: 122935 - DNA, 615 bp, Glycine max
  Clone ID: PAT_MRT3847_82016C.1
ggctcgagctcttctcatattcattccaatgtcaaatcctcaaacaagcaataaccgccgccagcccagccgcctgcagcggcgagccccctcctccctgcaaataaaccgcgccgtcgagtggaacgtcgccatccccctcctctcgccgttggcatcatctccgacgccgatcgagctaaaaccgccgcaagagccgccgcagagggagccggagaaggtcaccttgtcgttcaagaagtggcagcatcctgcggctcccttctgttacgagcccgctccaatggtgccgccctttgttcctgtgtagatgaacgaacgagagagttttaggatgctatctaatggttcatatttagagagaatgaagaagaagatataacgctgtatttttaattaattaattaatattgttcctttcttctttttgttggggagaggctttgccttattttgcacacggaaggatttatcaaaacctgtgattgtgaatatacaccccctctgtgtttctttctctttttttagcttttcccccgtttttttttatgcctttttattatggggcttaaattaaactacttcattggaacgtcaaaaaaaaaaaacataacc

SEQ ID NO: 122936 - DNA, 248 bp, Glycine max
  Clone ID: PAT_MRT3847_82017C.1
caggtccacaaagacgacagatgggggctgtcgagtattgtgaccaacaacctctgacacatgcggcatagggacaccatctcaaaccggcgaagcttcttcgagttctgaccgacgaccctgtctagtcccgtattgcgagtggcctccgaccggggaccttaagcgcaggtaactgctgactcctaatacaaggatctagatgctgaatatattgcgatggataatgtacccattggctactaaaa

SEQ ID NO: 122937 - DNA, 368 bp, Glycine max
  Clone ID: PAT_MRT3847_82018C.1
tacggctgcgagaagacgacagaagggtccagatatgaacaataatatcaataatatcaatatcatattaatagataaattaaaatcattacataaaaaagagtttgatttgcagatcttccaatgactttagcctctcattatcatgaaagacttacaaatataaaagtgggatgaagggaacgaaaatggaagagaaatggatcggccatagctttggaaaatgaattttccttccacactgccttctttgctatcctatttgttctttgttcctctgctttttggctttcttcttggctaaagaaatcaaatgttttcctttctttttatatgtttcaccaactgataggtcaatcaaaattttt

SEQ ID NO: 122938 - DNA, 347 bp, Glycine max
  Clone ID: PAT_MRT3847_82019C.1
ggttgggtgttttttttttttggggggggaaaaattttttttttttttggggacccactttttacattttactttaactgaaggaattttttttatttccattttctttatcttcatcatttaatcaaaccccccctaaagggcgtttgggggccattcatgaataaatggggggggttttcattggtcaaaattttttcccccagttttatttttttaagggccaatgccttaatcggccccatggcctttaattcccaaagtttttttgaaattgagcgtgctcctaatgggtcgcctgccaattcccccattaccctttttcatgaggggagcaaattccccat

SEQ ID NO: 122939 - DNA, 399 bp, Glycine max
  unsure (1)..(399): unsure at all n locations
  Clone ID: PAT_MRT3847_8201C.1
acaacacagcacagacacacagggggcagaggaggaaaccancanggcancagcagcancggggagggggggggcaccgaagggggcagcngccaccacagacccaaggggggccacgcgcaacacaaagagggggggggggaggccngnnggacgggccncagaagagccngcagcggcggcacccgccaccgccacacccccagcngaagcggaagcgaaaccaaacccaccacccacgggccccaacagaggcgcgaaggcgaagagccccaggaaggaagcgcacggggacaaaggcaccggcccagngggcgcggccgaccaggaccccaacacgcgcgacccgngcgcgcggcgacgcaacaaagccaaccacgccaacggggcaacaaacaa

SEQ ID NO: 122940 - DNA, 335 bp, Glycine max
  Clone ID: PAT_MRT3847_82020C.1
tttttagtactattattattccaaaccattccatacccaatacatcaatccgtaaagagtacatggtcacttgatgttattgcaaacaattgtacacatggagacggaacactactactaatcgctctacagtcaaacctaaatgatcctcatgttactgtactcagggtgccatgaccatttgactacagtgcatgcccattctatttgtatacaactattgcacatagcacatgaggggatgggacctgtactgttgcaacctttggcccacttctatcggatgttgcctatatacacgaaccctcttaacagcgaacagcatacgctgcaca

SEQ ID NO: 122941 - DNA, 669 bp, Glycine max
  Clone ID: PAT_MRT3847_82021C.1
catgcgtccgcttgctttgtccgcaaaccgttcatgtttgtgttcttctaccacctttcatccacacccactattaaatccttcaccctccctccatttttcaccttcaaccttccatcctcaacccctatgctccctcatcaaacaacacatcataccacaaccgtcgcacaaggcctccattcaccgccgccgctgcagtaactccctcgccacttccgacgcccaattcgcatcaatcattgctctgtttcaagatattggaatcggctttgaagagacccaagtcctcttgtgcaacaaccatgacctagcctctgtgccaattgactcattgcacgttcgctttctctctctgcgctctcttggcttcgaccctctcactctctgcaaattagtcacaaagcgcccaaccatattaacagccaacgaaattgaccctttgttaacctttctgagagacaatttgcaaggaaaactcgagaaacagcaactcaatcgcctcttatcttctacggagcaagaattcttggagagttttcctcagaaggttcaattcctagttgaccgaggaatccccgttgaccaggttgtgcacgtgctaaacaaagtgaatttgtcaaaggtcttgtgtcgtaagtcgcttgaagaaacgacagaccatatctt

SEQ ID NO: 122942 - DNA, 282 bp, Glycine max
  unsure (1)..(282): unsure at all n locations
  Clone ID: PAT_MRT3847_82022C.1
gaagaaacttaaggacaaggtggttcaattngnttncnctttccatatanncncntnaaacccaatgctgattgaacatatggctccagncaagttaggtcagcattgggtttgagggcttatntggaaagagcaaaccaattgangaaacttaaggacaaggtggttgctttggagattaacatgaagaggctcagaggggaacttgntgctgctgaaggagagttngaagtnccaaggagtggcttttntgaagtgagaaaggcttcaatgagatggatg

SEQ ID NO: 122943 - DNA, 622 bp, Glycine max
  Clone ID: PAT_MRT3847_82023C.1
atagaatgtactcgttttattcccgtactaaaaatgagaatcaacctctaagagtacagtgtgtacaattagaaggactgagtacaatagtcacagagagaaaaagaagaagaaagagaaatgttcactcataaccaccctccctcactacaccttctctcccctctaaataccactattagttggttacataatccaccaacctagagttgggttttctctctttcacactctttctgttacccatagtggatacgtgtgatttggcaaatattcccctctgttgagttgtctcaaatgagtcattttttccttctagatgctttcttttatctgagatcattacaatgccatccccttttaaaacaaccttgtcctcaaggttcaagttaggaaagttagcttggaattcagcaacattctcccaagtagcttctgcctcatcagttccctcccaagacgattgcaaatgcggtgcacatgagtatctacacatatcccttggacattgtcccttcacgaactaaaacttgagttttttcatcaaggcacaaattccagatgagcaatcttaggacctattcctggcagcaagagtagttcctttattgagcttggtatg

SEQ ID NO: 122944 - DNA, 133 bp, Glycine max
  Clone ID: PAT_MRT3847_82024C.1
gtttcttttttttggccaccagattcgggtaacttacaattttgaacccttgcatttttttggctcccctcatagagaagggtaaaatcgcaaggcctaagaaaatttcccggacctaccttaatttacctac

SEQ ID NO: 122945 - DNA, 1429 bp, Glycine max
  Clone ID: PAT_MRT3847_82025C.1
tttcccacgcgtccgtacggctgcgagaagacgacagaaggggaaacaaacaatagaaaagcgaaaacaaatgtcattttcgaggttattgagagtccagaatcctggtctctgtctactcttcaattattcccaacctctcacctcttcatcttcttcttccttacctttgaccagagacagagcagcactcacattcacaacgaaggtttcctattcatcagacatggtgaaggcaatcagagttcacgaactcggtggccctcaagttctgaagtgggaggatgtggaaattggagatccaaaagaaggcgaggtccgtgtgaggaacaaagccattggggttaatttcattgatgtctactttcgcaaaggagtttacaaagccccttcttttcccttcactccaggtatggaagctgttggggttgtgacagctgtgggtgctggactcactggtaggcaggttggagatcttgtagcttatgcaggtcaaccaatgggttcatatgctgaagagcagatacttcctgcaaataaagtagtccctgttccttcgtcaattgacccagctgttgcagcatccatcattctcaagggcatgacaactcagtttttgcttcggcgctgtttccaggttgaacccggtcatacaattcttgtccatgcagcagctggcggagttggatccctattgtgtcagtgggcaaatgctcttggtgcaactgttataggaactgtatccaataaagagaaggcagctcaagccaaggaggatggctgtcatcatgttataatctacaaagaagaggattttgttgcccgtgtcaatgaaattacatctggcaatggagttgaagtagtctatgattctgtaggaaaggatacatttgagggatctttggcatgcttgaagcttaggggctacatggtaagttttgggcagtcatctggttcacctgatccggttccattatcttccctggctgcaaaatcccttttcttgactaggcctagtctaatgcaatatgttgtcactcgggatgagctgttggaggctgctggagaggtgtttgctaacgttgcttctggtgtgttgaaggtccgtgttaatcatacttacccattgtctgaggctgcaaaagcacacgaagacctggagaatcgaaagacatcaggatctgttgtgttgataccctaagactctcagttgtgtatgtgttatacaccaagtccttgtttgcttcctcttgaaaagaactctttattatgaatgatattgctaatgtatgttgtttaccatgaatcattgtacttaaataatgatttctctgttgactttggttaaagagtacttttctcatcttagtatcttgacatatttcccccaaaaaaaaaaaaaaaaaaaaaaaaaaaaaaaaaaaaaaaa

SEQ ID NO: 122946 - DNA, 129 bp, Glycine max
  Clone ID: PAT_MRT3847_82026C.1
aaaagcaaaaattttatgacgaggggtattattcacattgacatgggctttaacatatgggaatattatataaattacagctatgaatgtcattacaatgaaagcggccccttcaatggcagggtcaca

SEQ ID NO: 122947 - DNA, 109 bp, Glycine max
  Clone ID: PAT_MRT3847_82027C.1
ggatttgcgcggcggtgctttgatttctttagcaatatacccctacttgaacattgggatcagctttaacactaggcgatttaccatgttcttgactcaacatcttgca

SEQ ID NO: 122948 - DNA, 377 bp, Glycine max
  Clone ID: PAT_MRT3847_82028C.1
acactacccacactatagcttacattgaaatctgctcaaagtatcataatactccactaacatatccaaagatgatacactggtggcagtcatacccctaactgatgtatcaaactgaaatggagctctgccgagcttaagaaccttggaccatgacggactacagatgatgcctttccaacagccacccacatgcttcctgttctgtaacaactactccttgcccatattgatcacaacatactctagaaccggaaagtggctgatatcagcactgctggagaaatccccatccaaatacttagtctgcgagagcctctcctcagcgatgtgcaccacttgcacccaggctctgcagcactcttctaaatcacctt

SEQ ID NO: 122949 - DNA, 232 bp, Glycine max
  Clone ID: PAT_MRT3847_82029C.1
accactttttaattacccgtgcgtcgacccactccttcccacccttcaaacaactaccaattcctttagaaatttcactcactggtcacactacgggagtacttctttcctggagatggcctcaactgtcttttaaatacttctacttcccccactagtgatcgtcttcctttgctttttccctttctcacagactcttaactttttacctttatccattattttttatttt

SEQ ID NO: 122950 - DNA, 346 bp, Glycine max
  Clone ID: PAT_MRT3847_8202C.1
gatattgggcatgccttatatgtttttatgaaactacagtgttggtaacattgtcttctctttgttgtcacataaattatgattccctcactgttccattgctcattcactcgagatgacctattttcctgaatactacttttactggtatacattgaattatagataccacttcttttgtctattctcagatgatctattggccatgaaccacacatatttcattattatccgtaccttctatgagattagtggaagcaaggacactgttggacagtttgagtctcacacattctttacctttactggactttatcgtgttgtgttattattttctttctttgat

SEQ ID NO: 122951 - DNA, 383 bp, Glycine max
  Clone ID: PAT_MRT3847_82030C.1
gggttcgacgccacgcgtggcgtggaacatccaaacgaaaaatggtaggagacatcatactgctaaggaatatccaccagatcacaggggtgcgtgtactcggaatcaatttttctagggatggaatgaacctcagggacaggatttttttggttggtgatcacaatggttcatggatggtatttgagaccttatatattggatctaggattaaccgcatcgaacggaaacgtgcatttaacttgatcaataagcttactactgactttgaaggtgtgacatacaagaagtcagtcataggacaagacctctgcagatagtggaagtaagtctacgagcatcaccataagatcaaagtatgggaaatttaaatagcatcacaa

SEQ ID NO: 122952 - DNA, 309 bp, Glycine max
  Clone ID: PAT_MRT3847_82031C.1
aatcgggggggacatactttttcttgtgtctttcggccaaaaagcgaagaggtttctttttattctggacaaaacctggcaagaataaagaatcctggggtctcttttacatccttgttggcaattcccaacctaataaacaaagaagattccccagtttaatatcctttggggcaaaagaacattagcaagcccgggcgacctatactacccgcaccgggtgggaataactcaacatcttgcccttaaaaatctatagggctgacttagaaccttttaagaaaaaattcttctggggctctccatttt

SEQ ID NO: 122953 - DNA, 423 bp, Glycine max
  Clone ID: PAT_MRT3847_82032C.1
ctcttatcctatgagttcgtatatcccatcaattgtaaatccttcagggataatgagtggctaaacccctagttagggcctgacagacctaaaagtcaagcgatgtatgatatacttactatttatcttgcattattcatattaggggttaaacgctcgggagaggagggtaacttttaaataagatttaaagaaggtatgcatgcattggttttaggggttagacgctcggaagatgataacttttaatagaacaaaaagaaaagatttcataggaaagtcattgctagacatagaatgattattgtatgtccatgcattcttgcaaacatctagaattgatacttatgcatttcattttatttgtttacaaaggaattttaaaaaatagataaataagataggcctgtcatcgagagggat

SEQ ID NO: 122954 - DNA, 276 bp, Glycine max
  Clone ID: PAT_MRT3847_82033C.1
agcgaagagttttttttttataaaaaacaaaagcagacggaagaacagcagcacgtacttacataggaagcggggaacgcgtacatactcagatgacagaaacaaacgcatcaacgaaagcacccaacaaaaagggttaagagaagatgtgtacactagctaatgcgcggtaaccaacaggaccacaaccgcaggcaggcaccaccacagagaaacgaacgaacgaaggcacgcaaatagaccgagcttcacagacgggcagcgaagcaagacgac

SEQ ID NO: 122955 - DNA, 614 bp, Glycine max
  Clone ID: PAT_MRT3847_82034C.1
gcgcccttttttttttttttttttttttttttttttttatttttctttttttttttttttttttttttttttttttttttttttttttttttttttttttttttggaaaaaaaggggggggggggccacccccctttccttttataaaaaaaaaaaaacccatttaaattagggttcggggaagggaaaacacaataaatcactagcacccccctcaaaggtttatatagaataaaaaaactttataaagggggataaccccccccaaaaaatcactacaaaccccttaaaaggttaattccctaagaacaaggctaaaattattatttttagggggaagggtgggaactatttaaaccaaattgggggaaaaataaataaaccccaaaaattttcaggggattcaccaccagttaggaaaagccaaggaaaaacgttccccactgaatccaaagcttggggaaggcccaagggtctaaaagccaaagggggggttttttgccctaaaaaaatattggtccaaaggggggacccatccttggagccccataaatttaaaaaacttccatcccaggaaaaataaggcgaggcaaaacctccttagggggccccaa

SEQ ID NO: 122956 - DNA, 1071 bp, Glycine max
  Clone ID: PAT_MRT3847_82035C.1
ttttcctttcgggattggtttctatggcttctgtttttcctttcgggattggtttctatggcttctgaagtaatagagtaccgatgctttgtcggtgggcttgcttgggccaccgacagcgatgctctcgagaaagccttctctcattatggtgagatcgtcgaatcgaaggttatcatcgatcgtgaaactggaagatcgagagggtttggatttgtgaccttcgcctcggtgcaagcgatgaaagacgaaatcgaagccatgaacggtccggtgcttggggtgtatacggtggtggtggtggttatggcggcggcggttacagccgcggtggaggaggatatggaggaggaggccgccgtgaaggtggtggaggtggctataaccgcaacggtggaggtggtggatatggtggtggtggaggttatggtggtggtggaggtcatggtggcggtggaggttatggtggcggtgggagagaccgtggatatggtggtgacggcgggtcccgctactcgagaggaggcggtgcttcggatggaggaagctggaggaattaggattaggttttttagtgggtgaaaaaatggggggaggttctgttggagtaatatcatccccttgatattaattgtggtaattttaggtttggaatatgcgttgtggtttgagcatatgttactgttatggttggttggtttccgtgttactcctgtcctgtggttctcgtttttgacctctgataatgaatctgtgttcttgaaggaatgaaatgaatggcaagaaattatgatcctaagatttttacaaataacgggaaatctgtttggccatgcgacgataacttttatccttgctgttagggacctgctttgtcaaatcaaatttgttttcaatttgataatcatcaatcaatccctttaaagtttaaacagttcttttatactcattttaaatttctcaaccggctattctttaagttacgttttataggaaggaatgaaaataaagaaagggaaaaaaatactaatagtatattctcctttgtttagattgaatttgtgttcgaag

SEQ ID NO: 122957 - DNA, 576 bp, Glycine max
  unsure (1)..(576): unsure at all n locations
  Clone ID: PAT_MRT3847_82036C.1
gcgcccacgcgtgcgcccacgcgtccgcttgtgtttttcctttcgggattggtttctatggcttctgaagtaatagagtaccgatgctttgtcggtgggcttgcttgggccaccgacagcgatgctctcgagaaagccttctctcattatggtgagatcgtcgaatcgaaggttatcatcgatcgtgaaactggaagatcgagagggtttggatttgtgaccttcgcctcggagcaggcgatgaaagacgcaatcgaaggaatgaacggtcagaacctcgacggtcgtagtatcacagtgaacgaagcacaatcccgtggaagaggcggtggtggcggtggatacggaggtggtggtggttatggcggcggcggttacagccgcggtggaggaggatatggaggaggaggccgccgtgaaggtggtggaggtggctataaccgcaacggtggaggtggtggatatggtggtggtggaggttatggtggtggtttcatatnctgctgcaccgggggtgtaaccggcgcccccgtacccaccaccaacctgcggatttccccgccaccaccgtctttt

SEQ ID NO: 122958 - DNA, 1013 bp, Glycine max
  Clone ID: PAT_MRT3847_82037C.1
cggaattcccgggtcgacttacgcgtcgggaaatgcattcaaagataccgagagtatggatttaaacacaaaagcaattaatacaagactaagcgatttgaagattgaggggatgcaggaactggaagcagtgacaagtgagattgttaggttgattgaaacagcaacagtgcctattttggcagttgatttttatgttccacccattgaccagcaaaaatatctcaagtcccaaatatcatcttgggagaagttctcaaggtagtgtccttgatatattgcccaatacaactaaggagacactactagatcattgggtgtgcagtcaggaattgctgaggcacttttggtcttcatatccaattacaacacagaaccttgttaataagacacgaagactgaaagaatccatatcacaaatatattctaaacttgaggacataaaggtatctgctgagtcagacctgcgacaccatgtttcccttgttgtccatcctatgcagcaggctctgaatgctgccttgttacactatgaggctgacattaggaaaagaaatgcaagaggacagaagcctaacggttatgtttaggaggagaatgttttgctctctgcactgtaagcatcatactataacaatttatgaatgtatattccatcaattttgccgtgaccacaaacccgaatggccatttatacctatatcgtgatgaaaaaaatgaatttccatgagaattagtcagcaacagtcttactagatagttagcatgtaacgttgaattacttgttaacactgtcccaagacaaaggacgagtgaattcacaagtttccagctcctcctttttcctgtctccctgtacgaaatacttcactgctggtttactttagcagtacacaaaacgaaggataagtgaataacatggttttattgattgctctgtacatgttcaagacggaaataattttactgctttgtgcttacagcaatacaatttagtatatttattgtattgc

SEQ ID NO: 122959 - DNA, 1094 bp, Glycine max
  Clone ID: PAT_MRT3847_82038C.1
ggctcgagcagatttttgccctcaaacctgatattctatctctggccctcaattttgtacctagtaaaatgaatgaggtagatttctggaataaatatttcaaagctgagtatctccatagcaccaaaaatgctgttgcagcagctgctgaggctgctgaagatgaggatcttgctgtttttctgaaagatgatgagatattagaaattgaagctcgtttgcaggttcgaagggttgatccaactttagacatggaagcagatcaaggagatgattacacacatcttcctgatcatgggattttccgagatggtagcaaggatatatctgaagcccaaaattctttgtataagagaacattgttgcaagatcttaatagacaaggggcagttgttcttgaaggaaaaactttagatatggagatggaacacccaagaacagtagcagaaattcttgcccggagaaaacaggaatgtgatggggttgtagatgaggagcgacgaaacagaatttctaaaatgaccccgattgatgatcttcaggcacaagataatcatccatatgcaccactctgtatcaaggatcctcgtgactattttgattcccaacgagctaatgctgtaaaaacattggatgattcccaagctggaatggagcaaatgaaatgcagtttgggttctgaggaagcctatgactctttgagggcatcaatatctaaaatcaaaactactggattaagggatcctctctttagtccagatgttgctcttaaggtccttaacggattgactaaaaatatcacaagcaccaaatatcatcttgggaaaagttctcaagagagtgtccttgatattttacccaattcaactaaggagaaactactagatcattgggtgtgcagtcaggaattgctgaggcacttttggtcttcatatccagtttcaacacaaaaccttgtcagtaagacaagaagactgaaagattccatatcacagatatattctaaacttgaggacataaaggtatctgctgagtcagacctgcggcaccatgtttcccttgttgtccatcctatgcagcaggctctgaatgct

SEQ ID NO: 122960 - DNA, 205 bp, Glycine max
  Clone ID: PAT_MRT3847_82039C.1
gtctttttgaagatacatatggattcttacctacgaagtcagcagtcatggcacaagcattggtggcatccacagagatctgacactatgaaagcaacattctttcctaaggcaaggcaaggaggccaatgccaatgctattaggggtagttgaatgcatgaaaactgcgaagaacaacatggcctaaagtgttcatgcattgcc

SEQ ID NO: 122961 - DNA, 742 bp, Glycine max
  Clone ID: PAT_MRT3847_8203C.1
tgtttgattgtgttgatgaggaggattctttgaggaagtttctttaagtgcagcacttaatggtgttgagggtttggactatatgtgaaggaattcctcttgccacatctgagggttttcctcatgtgctttcacgcaaaaatggcgataaaggcataaggagatttgtctctggggatggtgaagagatgacattgattccaggaaccagtgttgaagaggcttacaacaagctaatagttgaacttgagaaaagtgttcctacattggttggcattgaatgtcccaaggatgagaaactttctcgtcgcacaattgttgacaaacctaaaacgcgctgcttaactattctgcctatggagtttaatatcgaggtccgtcatgagtaaagaaattatgtgaggatcattatgaagaaaagggacaagcttagttgtcaagttggaatcaacccatactccatggaatggactggtttggccaataggttactgagcaagggcaacgatattctgtgatgcgattatgctagttttgatggttcgattaccaagcaagttatgagcaagatggcagaaatgataaacagtttttgtggtggcgatgaaaaattgatgcgtgaaaggacacacctgctgttggcttgctgtctaaggattggaatttcgtagaacgatgtttggagagttaaatgtggaatctcttctggatttccgctaacagttatttgcagtagcatttt

SEQ ID NO: 122962 - DNA, 859 bp, Glycine max
  Clone ID: PAT_MRT3847_82040C.1
aattcggctcgagccgaggaagatcagggaaaagctgtaggttgagatggttcaatcaattggacccaagaataaacagaagtcctttcacggaggaagaagaagagcgtcttctagcttctcaccggattcatggcaatagatgggcagtaattgcaagacacttcccaggacgaactgataacgctgtcaagaatcattggcatgtgatgatggcaaggattcggagagaaaggtctaaaaattatagtccaaaacagccactttttcctccaaacttgcaggtcgatcttgagacaaattttgagaccatcccttcttttgttgacaagtattatgaaaagtacagccacccttgtgtcgcactcactcatagctcttttcaatttcccaccaagaatttttactttcaagatccaagttctgctggttccacagtgcctcgagacaattgtgaatcagtagagttctatgattttcttcaagtaaataccgattcgaataaaagtgaagtgacagacaacgccagaagagacgaggaggaagtaagtcaagatgctgtgggaatgaagaataaggacaatggtgttccattcattgattttttgtctactggaggctgctaacatatatataattgccaaagtacaacctcaattacttccaatattgatcaattgatcgagtctgactacagaacaaaatctccacgtacgtagatccatttatgtaattaactacctactgcattcacaaaacagtaatgtatttaaggatatatacatgtacatttataacatgtaaaaaaactgcttctaagaagctccatgcatcgaagatcaaaaacgtacattgcatc

SEQ ID NO: 122963 - DNA, 346 bp, Glycine max
  Clone ID: PAT_MRT3847_82041C.1
accgttattggtaacaaacacaaattactttgcactaatactttagagccttaacctttaaagaagattctagggctcataggaagtattttaactttaacaaaacctttttgttttgtggaacaacaacacagggtttccctaccaaaccaatcgtaaccaaaccaaatcttaagtaaaattagggcctgtcatggttgtccagaaacttcgataagcttaagtggaggtgatgggtttaacctaagccatatctacaacggggcaagtttaggggtgtggataccggtcctataataacctgtaacggggactggtgcccaatcaattaagtaggcttgttaac

SEQ ID NO: 122964 - DNA, 510 bp, Glycine max
  Clone ID: PAT_MRT3847_82042C.1
ctctacaattgtgatcttcacaaatcaacaacgtctctctgtgtgactctgaaagtaggtgaccatggagcatcatcttcatatgtgtgccatgatcattttgatgggtgcaattttcttgttcagttttgatcctgtgccttatttttttgtggagttttatattattattattattattattattattattattattattattattattacaagtgctagtatgttgatctcattcttggtagttagatcgtgttttttgtacggatattgatataaagattgggttttctgtctttctttcggggtcttacttagattagttagtgcagccaccttatttttttatatgattggagctgtaacccattttttaatgctaatatagtgatccaattgtgagtagtagattttttttgtctatgtgcggatagtacttaaagattgtattttttttttcttttttttttcttactgggtctgactctggattaattagtgatttagtgc

SEQ ID NO: 122965 - DNA, 397 bp, Glycine max
  Clone ID: PAT_MRT3847_82043C.1
taaagacactatggcacaggacacgcatacaccatcgacagttagaacgacaacggtgtcagaggtgaacaaatagatatccagcacatctcaagctgtcgagtttgaaccgtctgtcgctgaaattggatcacttttctaggagctatatagacttttattgatgtagccgctggttaagactgaactaaaacagttagtctcgcggatgctggcgctagtttggttggccacgaaaattataaaatatactagatgacatacatcagcttgctgccatcatacttagtgtggatacacaacagctcttgatgtacggcggggatacttgggcagggtgaccttacatgtgttcgtttaccactgatccatcgttgcctgcagtatagttagattc

SEQ ID NO: 122966 - DNA, 316 bp, Glycine max
  unsure (1)..(316): unsure at all n locations
  Clone ID: PAT_MRT3847_82044C.1
ggctcgaggnnncggaagctttcacttacttatatctctttatctcttcatattcttagaaatgtatttcttctaataccttgagacattttcttaccctttttttcttcgtttcttactttgagatttcctttctttgattccatttggtttcctttctttgtattctgatggagttttggaggggttttctttctcatttttttttccaccattccctattcttctgaatcaacctacttctataccgaagcaaaatctttattaccactccttgcaagaaaccaaggctatgataaaacttcacatcatttgc

SEQ ID NO: 122967 - DNA, 236 bp, Glycine max
  Clone ID: PAT_MRT3847_82045C.1
gcctaaatttggaagccactgctgccactgaggaaatagatggacctgcatctgtatctgcatcagataagaaggtttcaaatacacagactcatcaaattgctgctaggaaggaaaagcagatggaagcattgaaggctgctcttggcatagtctcgtctgaagccaatgaaagaaatgcagatgggactgatgagcttggaaatgatgggggaaatggttctaatgtggagggt

SEQ ID NO: 122968 - DNA, 667 bp, Glycine max
  Clone ID: PAT_MRT3847_82046C.1
ggctcgaggtcttgtagcgtgggaaaccggtggttccatcccccaccaccgtttatcaacaatgccttcctcactctccctctcactcacacccctctctgtgttccctccccgcagagtccccactccttctccaaaaccctatcgcctctccgtcaaatcctccatcaacaaaccccctgacgccggcaccaccaagcccagctcctggctcagccccgactggctcacttccctctcccgctccctcaccgccggcaacgacgtctccggcatccccgtcgcctccgccaagctcgacgacgtctccgatctcctcggcggcgccctcttcctcccgctcttcaagtggatgcaggactacggccccatctaccgcctggccgccggcccccgaaacttcgttgtggttagcgaccctgccattgccaagcacgtgctcaggaactacggtaaatatgctaaaggtctcgttgctgaggtctcggagttcctgttcgggtccggtttcgccatcgccgaaggtcctctctggacggcaaggcgcagggctgtggttccatctcttcataaacggtacttgtctgttatagtggatagggtgttttgtagatgtgctgagagattagtggagaagctacaacctgatgcacttaatggaactgct

SEQ ID NO: 122969 - DNA, 206 bp, Glycine max
  Clone ID: PAT_MRT3847_82047C.1
gtactttacggttcattggtttggattgcagatgggtcaccagcgaggtcaacgcgttgctcacctgttaggagcggctctagcgacgctgctcggagccgagcacggctttttcacatgccaggcagtagcgccgcaaggtccgaggccatatggacactgctgatgatatcgagcatttccttcatgcgctggacgacccgtaa

SEQ ID NO: 122970 - DNA, 395 bp, Glycine max
  Clone ID: PAT_MRT3847_82048C.1
tcgcttaaaagtgctcccaatcgcgcactttgagtgcatttgaaattgttccggtacgcggctgtaaactctccaaaagttcttcccgtcggcctgagttttgcgagtgttgtcccatccctcgcagtggccatcgcgtctttgctgactccgatttcatttacgtatttggcggatacaacccatttcactctcctgacagcacttacactgatttttggcgcttcaaccgtctcacccatttatggcaaaaatgcggcctttcctcctctgacccaacgactcagttgccgaattcgttggcttcttttgcattggcttcatcttctaggcccagcgagtgttttatttttgggggtacccggcattcctttggtctcgccgtttcaaatgaa

SEQ ID NO: 122971 - DNA, 215 bp, Glycine max
  Clone ID: PAT_MRT3847_82049C.1
tccacgcgtccggcttccatactcaactacgtatcattgtctagatgaagtaatagatcgcgctgcgtttaactcgtaatctcatcaatcacttgctgaaaggaagcatcctcttcccaaatgagaccggccttaatggtagacccaagagtatggacctaatcctactactagtgtgcaatacaactgtgaacctactataatttaacctgtcc

SEQ ID NO: 122972 - DNA, 1035 bp, Glycine max
  Clone ID: PAT_MRT3847_8204C.1
tctcacaatgtttcaaaaaggggggtgctttttgtgagaatggcgccgttttctcaaaaagcggtcatgaatatgtcaagccttactctaatggttctaaattgaaaagctatccagccggtcataatatcaccattactgatggttttgataaaactagcgcaactttgcaatttagaaagttagcacattgtgattctgtcacgagaaatcttaagcagatgtctaatgttttgtgggtggctcctgctgacaaggcgagttcatggccacaacttgattatgtttccagtaataatctggaaatgcaacaaccttatgcttgtcaatctcgggaatgtgttactagagttgtgtttgctcagtccagaggaagctcgccaatggagaaggaaagctctctctagtattgaatggctgcagaaagctgatgtgcctaccatagcacagattgaagagttccatcccatgcataggatgatgaatgctcctgattcaaatgataatattgacttactgttgagcattgatttgttgggtttacaaggagcaggtcaagcttttccaaacaaaattgtttttgatgataagcttgtgttggctaacacacaagaattctttgatggaaattttccagtggattcttggttaccaatttttgtgaattgtctttatcctgtaagtcaattaccttcagaagctgtcgttgtaaatgttacatgtggtagtggacgtggtggtttacccaccactgcttggattagttctgcagtttacaatcgctccttagatatcaacaaatggattcgcacagtacttgggaaaggtaagaaaatcgattttcttactagagtagatccttttccagtaactttactggctgttctttctggcgttaacaatgaaattctgagttctaacgccactaatcctatgctgacacgacttcttgagaactgtatgattctcaaatatctggttgacgagtgtacttttgcatttgtcaactagcatgtaatgttgtatatacttaaa

SEQ ID NO: 122973 - DNA, 181 bp, Glycine max
  Clone ID: PAT_MRT3847_82050C.1
gcaaaaaaggagaaagagaaggagaaggtgaagccagcagaagtgcctgttcctctccatcaagcctatcccttaatttattatcagatgacaccaccaccatatcctcaaatttactatgttaaaagttacgatgagaatccttgtggctgtgtcatatgctaaatttagaaagtttgat

SEQ ID NO: 122974 - DNA, 205 bp, Glycine max
  Clone ID: PAT_MRT3847_82051C.1
aatacacgtcgcatgcggtcgagctatgtgtacgttcatagctgaaacctcaactcgtcgacataggggcatagattgaacaacttttggatgaacgtcaacatcatcagctacatgagcactagtgaccttttcagctgtggaaaggcttggcatgccaaagtacttagccaatggagacccatcttgcacgtagtggatgcgt

SEQ ID NO: 122975 - DNA, 266 bp, Glycine max
  Clone ID: PAT_MRT3847_82052C.1
gagagagtttcatgttcggtaatttttgatttgataatttcaaccctcaatttttttttatatatccaccaatccgcaaagtgcaaatttcgaatctttcacgtaatgggttcttctcttttccctcttcggcaccgatcgatccaatgctcttcccataggtacgatctgacacaccaagctcagagccaaattggttcgtctcggggacatgggtgctgggaaatccaaccgcgttttgcgcattgtcaaaggtcaaattcccg

SEQ ID NO: 122976 - DNA, 314 bp, Glycine max
  Clone ID: PAT_MRT3847_82053C.1
cagtccgatcgactgggtacttatccatttaaaatgacactgtggatacccatagtctcatagtgtcatactgcaacacataacaatgggatcccttaaggcaaggttggactcgaaccacatttatccgcaatcagcgacactttagaagcatcgctcactcatcaatgattagattgatgacgactggaaattaaatgataagatccatgaagaacaccttaaagctatttccaacttgtcacagatcacacaggctaacataagcacagaacctgataagaacttgcaaaagtcagtgaccatgcctgtga

SEQ ID NO: 122977 - DNA, 611 bp, Glycine max
  Clone ID: PAT_MRT3847_82054C.1
ccccttaaaaaaaactaacacacaacccgtcctaaagggggccactttttccttagggaaaaaccccagaaactaaaaaacccccaaaggaccacttttccttgcaagccacccttacggaaatggggggggaaccggacccctgaaaaaaaaaaaaaaaggggggaaccccctaagggggggggggaccttacaaaaaggaaaccccccggaaaaaaaaaccccaaccccctgaataagggctttggaaaaaaaaaaaaattccgatttaaaaaaaaaacctttttcctgggggccccttttaggcggcaaccaacaataggttttcgcccggaggggcccggggggccacaaaaaacaccatccatggcccaacccaattctttcccgggggggggtccctttttcctgggacgggaaatccaaaagggcccaaaaaaaaccagctgaaagggccctccaccctcttttggaaaaaggtaaaattcgggagaaaaaacgggccaaaaaagttgggcccacacccgggggccacacataggggtggggaaaaggaaaatcaaacaggtgacccccttccgccctaaaacctggaccctcccggggggggg

SEQ ID NO: 122978 - DNA, 562 bp, Glycine max
  Clone ID: PAT_MRT3847_82055C.1
aaagaccagggccccaaaaaaaagaaaaaaattcccaacaaaaaaaaattttcggggggcggccccttctaaaaaaaagggaaaaaaacccccccccccgaaatttgggccaaccttttcccaaaatttattcaacgatttccaaaagcccgcctatcccccaggggggttttcaggcccttgagccccaaaaaacccttaattttcccaaggaaaaaaaattcccaggggggggcctcttcggggggggcccaaacccccccactttaaaaaaaagggggtactatgggcccttccaacttaaccaaaaggaaccccttagtttttacaaaaaccaattccccaaaaatttttggaacttaaaaatttgggggaaaaaacgggtttttccccaaaaccaaaagggttttttcacttttaaaggggggaaattccccaggaatttttgcaacccccgggggaacaaagggctttttccccccccccaaatgggaacccccactttcgggaaaaacgggttcctcaggaatttttgcaaccattgggggaaaaaaaagttttt

SEQ ID NO: 122979 - DNA, 1147 bp, Glycine max
  Clone ID: PAT_MRT3847_82056C.1
actcgagcgaatcggctcggatttacacaaaatcatcaatggcaatggcctctcttgcatcctcaagtgttcttttgaacctcttgttcatcgtttctgcgctccatttgggagcagcagcagcaagaattctgagtgaaaaggaggaccaacaacagttgcagttccaataccacaaaggccctcttctcagcggcaatatctctgtcaatctcatatggtacggtagcttcaagccttcccagcgagccatcatctccgatttcatcacctccctttcctcttctccaaaatccacagcccaaccatccgtcgccacgtggtggaaaggcactgaaaaatactaccaactcatcaagtcggcaccaaaacccagcctcaccctcgctctcggtgcccaaatcctcgacgagaactactcccttggaaaatcactcaccaccgacaacatcgttagtttagcatccaagggtgctcccaatgacgccatcaacgttgctctaacattctcggacgtaaccgttgaggggttctgttccagtaggtgcgggactcacggctcctcggtgggccatggcaagttggcttacgtgtgggtggggaactcggagacgcagtgcccgggccaatgcgcatggcccttccaccagcccatttacggcccacagagcccaccattggtagcgcccaacaacgacgtgggcctggatggaatggtcatcaacgtggccaccctattggccgggaccgttacaaacccttgggggaatggctacttccaaggacccaaagaggctcctctcgaagccgcttccgcttgcacagggctgtacggcaagggcgcttaccctggctacgctggggaactcttgctggaccccactaccgccgctagctacaatgctaacgccgtcaatcaccgcaaatatttgttgccggcactctttgaccctaccacttcagcttgttctactctgccgtaactctaaaactcgggtgcttagcttctatgttagggctacactatcaccccaagagattcttttatttgttgtttatctggatgaataaatatacaatgttcaatgtacaaagcaaaacatatagtatatatatatgaattgaattattggtatttctaggcttc

SEQ ID NO: 122980 - DNA, 449 bp, Glycine max
  unsure (1)..(449): unsure at all n locations
  Clone ID: PAT_MRT3847_82057C.1
attnnnntcgaggaaggccgactgatacactttattttttntttcaatcctctctctcnctaaactttttcangttcaaccccttacnactgcgttttttctaaacagctggggctgacccaaacacnnccaatcaccgcacttgtcactaaataagacgaatgatcggtcttagtggtgggcggtgtacctcgaaattcactatatcggcgatctcttgccactacttgagctcttcattattcctctatagaacatcctcaacaagcgcctcagtcatctcataaaacaatttatgctctcaacgctcctctttcttaaggaatccgatcattatccttgttgcaaaaagtatatggagctttataatgaactaagagaaaactttgagaggctttatttgtattaggctcacactaaaaatctttctcacgatcattcaaactatt

SEQ ID NO: 122981 - DNA, 486 bp, Glycine max
  Clone ID: PAT_MRT3847_82058C.1
aattcggctcgagttggtactatgggaacggcattaatgattatctggttcccagagatcaggatttattggacaggcatccttcaccagactattggtcaaactggggaataagtgcaactgaaggttttaattcacctaaaaatctttttatcatggatttctttgaagaaagattcaataatcaaattgagcttgaaccatctctgcatgataaagatcattctagcagttcaagtgtatgtgggggattgcctgagcaatcttttcaacagacagcattttcatgcgatcagcctaattaccagcttcaagatctaccgagattcgaaccgatgaatgacactttcttggattctgtacctgaaggtcttccatgtgttgacgttgaaaacctagacaaatccatcaacatttcttctgaaaaaccatggcagcagtacacctggtattttgctgtaagatattccacctttaaagtctgtt

SEQ ID NO: 122982 - DNA, 393 bp, Glycine max
  Clone ID: PAT_MRT3847_82059C.1
gacagggggagaacaagcacgagcatggtcttgaacgtgggcctggcagaccaaaacaaggagacactaaaacacatgctagcgtgacctatatagttaaagaggatacgggaccatagcaactgaggctgagccttaataagagtgtctgtctctggctactgaactatctcagtgtttcctatgtggctatgtggtgatctattaatgcatgggagaaacatctatgccaaatgggacacctatagagatagatagagagagagctagagagggtggttagattgaaaagacacaacgctagatgacttgtgaaagatgagagcctatcctgcttggaagagagcctttcagttccgacccattagaacttgtatcatgtagaggaagatg

SEQ ID NO: 122983 - DNA, 1058 bp, Glycine max
  Clone ID: PAT_MRT3847_8205C.1
gctaaagctccaagtatgatcttacaatccttcaaaaattctgtttctttgtgtgtgtatggtgaggataacttaattagtgatcatgaatatgtcacgccttactttactggctctaaattgcacagctttctagctggtcataatatcaccattactgatggcattgacaacactagcgcaactttgctatttacaaagttggcatattgtgatcttctcaagagaaactttaagcagatgtctaatgttatgcgggtggctcctgcggataacgcgagtctatggccacaacttcattatgtcccgtgtcataatctggacatgcaagaagcttatcttgactatctcgtaaatgtgttacgagaattgtatttgcacagtccagaggaagctcgccaattgagaaggaaagctctctctcgtattgaatggctgcaaaaagctgatgtgcctaccatagcacagattgaagagttccattcgatgcagaggatgatgaatgctcctgattcaaatgataatattgatctactgttgagcattgatttgttgggtttacaaggagcagggtaagcttttccaaacaagattgtttttgatgataagcttgtgttggctaacacacaagaattctttgatggaaattttccagtggattcttggttaccaatttttgtgaattgcctttatcctgtaagtcaattaccttcagaagctgtcgttgtaaatgttacatgtggtagtggacgtggtggtttacccaccactgcttgtattatttatgcagttaacaatcgctcctcaaatatcaacaaaaagattacgcgcagcacctgagaaaaggtaacaaaattgtactatttactagaattgaaccttttccagtagctttactaggtattactttttgagatatagaatgaaatcccgggtactaacgccactaattctatgcccacactacttctttaaaactgcatgagggtcaaatttatagttaacgactgggcatttgcttttgagtaccagactcaaatctgatattcactcaaaca

SEQ ID NO: 122984 - DNA, 729 bp, Glycine max
  unsure (1)..(729): unsure at all n locations
  Clone ID: PAT_MRT3847_82060C.1
ccaagctcgaatncgctcgatcagaaaccatctatattttaaatgataatttgggacctaattactctgccaaccttgtgcatagagactgcatacaaaataacattattttctccaaaagcttcctaatagagagggcattcacttaactacatgagttctcggcttctagctaccaaagttacttgcatttcttgttaatcttgttttctttgtgaatcaagttttattgcatcccctgtcaaaaagcattttttgaggtccagaataacattttgaaacattaagtacctgtctggtgacaagactgaaattgggggttaaaagaatgttttgattttgtttcggtccctttgctggttctaataaattggagttcccctattcctatctctctcagctttgtcatttaactccttttatagatatacaaaggtttatctgcaatttcctacaatatcaatgatcgtgatgaagctgcaaccactagacttcaatttaccttaatttaaagcctttggacatacttaaaaattgagcatctggtgtgctgccaaaagatttcactagcacagctaattgttaaatctttaagacttcttagctgtttacttttgttgtcaattttatcacccattttttttttcttccttggttcctattatagtattatttttgaagctctgtacctggtgcagaagaaaaatgaacttatggtgttttttttcc

SEQ ID NO: 122985 - DNA, 252 bp, Glycine max
  Clone ID: PAT_MRT3847_82061C.1
ctcatactcactataattaaatgcatgagcaaaggggataggtgagaaggaaatatttcaaccagaaacaatattgtttttcatcaaactttgcgggtctttgtagagtagatgatatactcaatggttgattttaattcatatgcataatgcctcaaattgacatatcaatgtgtgcgtctgagaagttatctcacttaatttatatagtatatgctaaattgtacgagtatatttaactagatgtgttca

SEQ ID NO: 122986 - DNA, 260 bp, Glycine max
  Clone ID: PAT_MRT3847_82062C.1
ggatggattgactgggcatggaaaagatgggcgggaaggggtcctctgtctgtccgccttcataccccaaaccgaccatctcagctcgttcatttctctctctactcgctatctgactgactacatgatgaactttttgacatgacgttcacacacgcatgccacaaacttctgatttctcttaatttcacaagaaagagttaatgtcccgtggattgtttatgtggacaatgacttcttgactttcaatgctcgcaaaa

SEQ ID NO: 122987 - DNA, 983 bp, Glycine max
  Clone ID: PAT_MRT3847_82063C.1
gcctcagcctttatgggatcggccctcacgtcataccaattggtcccagagtgacataaataatcagggttaaggaattgagggggatattgttaagaacttgagaattcacatggttaggctccatccaaggatgaataatatgcacagaatgctggaggcctgtatggatatgcagcttgagttgcaacgctcaataagacaagaagtctctgcagcagatgaccaagtggaattcatcacaggaatacatgacggtgtttcaacagacgataaatctaaatgggaatgtgtgaggaaaggactttgctgtatatgctgcgaaagcaatattgattctttgttgtacagatgtgggcacatgtgcacatgttcaaaatgtgctaatgatttgctccaaagtagaagaaagtgtccaatgtgtcaagcaccagtggtggaagtgatacgagcttattctatacaatagttttgacattaaagggtcacacatataacagaatacaagatcctaacaagttctatctcctggacgtttccaggtacgtttattttaataaattttttctgttcttgctgtgattactatatttatgtcgagtgcaccaatagaaaacctgatgtctctttttgtggccatgattctgaaaggaataaaaaaagtattttgtttgatttggttgtttgagttttttttctttcaattctatattgttatcaaaatcagatcggttgtcatgtaaatttgctttttctgttttcagcgtattgtttgtaggtttcttaatgaagaaatagccgaatttatgtgacaagtgacggctcagttcacgcttgggttatgtactatctagaaaaacatttttttcccataactatttgacattttgtttttgtatagaattgacattttttccttatatatttgatatttcttacatgaagggggggggggggggggggggggaaaaagggcgcgccgc

SEQ ID NO: 122988 - DNA, 419 bp, Glycine max
  Clone ID: PAT_MRT3847_82064C.1
ttcggccctctcaccacgcgcacgcacactctggggagctcccaaagcaagcactaatctaacaaacgcaatttaaaaaccgcaacaaacttttctctctttcgttcacacacttattctctggcttctttttcttcttccattttcgcttctcgtagcattttcggaacactcatggcttccattgccggatccagctgcgtcgctctccgaaccgccaatttcgcctcctccgataaccggaaaatcggtcagatccggcaatggtctccaattctcactaatctccgtcctgtttccggtcttcgccaccgatcaaatactccgtttagctcctccggtgtaagagcacaagttgctactctggaggaagcaggaactcgagcaacttaaaaagtggaatcgccggttgtagtggt

SEQ ID NO: 122989 - DNA, 115 bp, Glycine max
  Clone ID: PAT_MRT3847_82065C.1
acttaccacactcaatcacgagccaaccatatgctaataacggaagaagccaccatatggggtcggggggagctaagatccataacattacatttacataatgcagcaacatact

SEQ ID NO: 122990 - DNA, 379 bp, Glycine max
  Clone ID: PAT_MRT3847_82066C.1
ctcgagccggcactctccctccaacctctctcttcggcaccagaatcaccctcctacgcgccacctcatcgtcccgttccctccccaacacaagttgcagtgccacgtcagcaaccgtgtcgtttagcctccccaccccgtaagtttctctcttcgccaacacatgtaatgggtttctcgaattttcttctgggtcgtttcggattgcttaaagtttccacctttttcttctcttccattttttttttttgcaggaaacccctttcggattcgcccgataaaaccccaaagtggtcggagagggctataaaatcgtatgcaatgggggaattggaagcgaggaagctcaagtattcaaacacgggaaccggggcgattc

SEQ ID NO: 122991 - DNA, 710 bp, Glycine max
  Clone ID: PAT_MRT3847_82067C.1
aaaattaaaaagaactctaaaagtccaccatgcccatgactcaacccgggaattgctgcagaatggaagcggatatggatctgatgagacaccagagatggttagtcatcatgcatcacgatcattctctcttcctcgtgaacaacacagagaagcggaaattaagaagaaagtatttactcgtgctgctacatttgagcctgttagatcactggaagctcggcatgtgcatcctaagttacctgactgtgatgatctagcagctaggattgcggccttaagagcatgataaaggatagcataagtataatgctcctcttttatcggcatgattgcactcgttatgatcatcacgctttaatcttgttacaatgttaagtgcctggtattactgaagaatgaagattgcatggtggtgcttttatagcaaaatgctgactacttcggtgctgtgctaaatcattatagatggtcccgtctgtgttggttgacaatagtaactttgccattattttacagatgcggctataggtcataatacggagcatcaattcaagttatcttttatgattgtagaagtgtttgtaagaagaaaattatggtgctgagacagacgctattcagagcctcctactcaccttttcttttcttcagataatgttgtttgcacatttatacgtacattatttaattgcttgataatttttgat

SEQ ID NO: 122992 - DNA, 301 bp, Glycine max
  Clone ID: PAT_MRT3847_82068C.1
ggctcgaggtgaatatgaaaatggaaaatggaagaagtttttaatttcactcacatcaatgttggcaacattgtccacgtaattaaatcagataggataggcaaagaccagaaacttgttcttggaaagacagtgcgcagcagcgatagccagcggagtcattggtcaaggcctaaggagacgttgacagaaactatgctatttagtaaatgtcaactataagataacatagttacaaatgttggaaacattgatgtgagtgaatatgaaaatggaaaatggaagaagtttttaatttcct

SEQ ID NO: 122993 - DNA, 520 bp, Glycine max
  Clone ID: PAT_MRT3847_82069C.1
atcttattgctgggtaacttttaacggttactgtattactggtttctaaatttacttcaatagtgagtgctagtattacatgttctcagaaaagatttgatgtaatctttttgacaagtgttcattttatggtatggtgtgtagatcaaactttttatatctgacaatgagttcaacctgactatcattgctaggcgctcacggcattatgctgggaccagatatttgaaacgaggagtgaatgaaaagggtagagtagccaatgatgttgagacagagcagatcatctttacagatgctcgtgatggacgcccaatgcaaatcagttctgtggtgcagatccggggttcaatccctctgttctggtctcaggaaacctctagattgaatataaaacctgacattatattatcaaggaaggactcaaattttgaagccacaagacttcattttgaaaatcttgtcaagagatatggacatccaattattatactgaacttgataaagacacgtgagaaga

SEQ ID NO: 122994 - DNA, 1655 bp, Glycine max
  Clone ID: PAT_MRT3847_8206C.1
ttcacgcgtgcggagatttgtttctggggatggtgaagagatgacattgattccaggaaccagtgttgaagaggcttacaacaagctaatagttgaacttgagaaaagtgttgctacattggttggcattgagtgtgccaaggatgagaaactttcttgttgcataacttttgataaacctaagacgcgctgcttcactattctccctatggagtttaatcttgtggttcgtcagaagtttttaaattttgtgaggttcattatgaagaaaagggacaagcttagtttgtaagttggaatcaacccatactccatggaatggactggtttggccaatagattgctgagtaagggcaacgatatgctgtgttgcgattatgctcgttttgatggcttgattaccaagcaagttatgagcaagatggcagaaatgataaacagtctttgtggtggtgatgaaaaattgatgcgtgaaaggacacacctgctgttggcttgttgtttcaagaatggcaatttgtaagaaagatgtttggagagttgaatgtggaattccttttggatttccgttcacaggtttttgctatagtctttttaatgagatgcttcatttgatttagctatgaaaaattactgcgccaggctaaagctccaagtttgtttttacaatccttcaaaaattttgtttctttgtgtgtgtatggtgatgataacttaattagtggtcatgaatatgtaaagccttactttagtgggtccttaattgaaaagctttcttagttggcaataatattaccatacctgttggtattgacaaaactgtgcaattttgcaattaaaaaggtagccaattgggattttcttaaaaagaaactttaagccagatgtcttaatgttttgtgggtggcttcctgaggacaaggcgagtttatggtcacaacttcattatgtttcgtgtaataatctggaaatgcaagaagcttatcttgtcaatctcgtaaatgtgttacgagaattgtatttgcacagtccagaggaagctcgccaattgagaaggaaagctctctctcgtattgaatggctgcaaaaagctgatgtgcctaccatagcacaaattgaagaggtccactcgatgcagaggatgaataatgcttctgaatcaaatggataattttgacctacctgtggaacattgatttggttggtttaccaaggagcaggtaaggcttttccaacaagaatgtttttaatgataagcttgtgttggctaacacacaagaattctttgatggaaattttccagtggattcttggttaccaatttttgtgaattgtctttatcctgtaagtcaattaccttcagaagctgtcgttgtaaatgttacatgtggtagcggacgggtggtttacccacccatggtttgtattagttgtggattaaacaatctcttctcacacatccacaaagagattcgcacagctcttgagaagggaaagaaaattgtttttctcactagagttgatccttttccagtagctttactggctgttctttttggcgttaagaatgaaattctgagttctaacgccactaaccctatgctgacgcgacttcttgagaactgtaagagtctcaaatatctggttgatgagtg

SEQ ID NO: 122995 - DNA, 310 bp, Glycine max
  Clone ID: PAT_MRT3847_82070C.1
ttctttgggttttgatctttgttatctttctttttccggttcgggttttttcattttattcttccacacattacattaccggacagttaaggagggaacaaaatgggacaaccaaactccaacctagcatatcctgccaaatggaacctcacgatcgaaccgaggacggcaacagttatcaattaaaacggccaatgcaaaccaaaccagaccaaaccccacaggagaggcaccatcacgctgatatggcactggacgcgttatggcccatcataagtacccatcgctatcgctactaaatggggggggg

SEQ ID NO: 122996 - DNA, 2125 bp, Glycine max
  Clone ID: PAT_MRT3847_82071C.1
cggaattcccggctcgaccccgcgtccggaagagcgaaacagaagctctttgttggtgtttttgtttttggaattttctgctggtgatctcgttggaaaacccgagctttctgaggctcgggatctgaattgtgaagatggattcaaattcaacaaaggagaagctgcagaacagtgttgttgttgcagatggagctgaacttaagtcttgttatatgcagaagttcaggctctatgagactcgctcgaaattttacatgattggaagagacaaaaacagaacattttggagggttttaaagattgacagattggagccatctgaattgaatatctttgaagattcaacattatactcagatattgagtgttgtgaccttctgaggcggatacatgaaggaaacaagtcaacaggggggcttaaatttgtaacaacttgctatggaatcatcggatttatcaaatttcttgagccatattacatgctgctcataacaaaacgaaaaaagatcggaacaatctgtgggcacactatatatgctatcacaaagagcgaaatggtcccaattcctcatgctactgtgcgatccaaaatggcttattctaaggatgagaacagatacaagaagctggtatgcagtgtggatcttacgaaggacttctttttcagctactcctacaatgtcatgcttagtcttcaacggaacttatctgatcataatactgcaggacaatcactttatgaaaccctttttgtttggctcggaatgagttcttaactcgtggaattaggaataatctccagaatacttcctggactgtagccttagtgtatggtttttttaagcagatcaaactttttatatctgacaatgagttcaacttgactatcattgttaggcgctcaaagttttatgctgagaccagatttttgaaatgtgtagtgtatgaaaagggtaaagtatttaattatgttgagacagagcagatagtctttacagatgctcgtgttggacgtccaatgcaaatcagttctgtgatgcagatccggggttcaatccctctgttctggtctcaggaagcctctagattgaatataaaacctgacattatattatcaaggaaggactctaattttgaagccacaagacttcattttgaaaatcttgtcaagagatatggaaatccaattattatactgaacttgataaagacacgtgagaagaagcctcgagaaactattctgcgagccgagtttgcgaatgctgttaggtctcttaataaaaatttgaaaggcgaaaatcgcctgaggttccttcattgggatctgcataggcattcaagatgcagcaaagctactaatgtgttgggacaactgggaaaagtggctgcatatgcgctgaagctgactggcatcttctattgtccagtgacatcaaatgtgaggctagatggattttcgcattattcctacaccgagaataacaatgtcactgatcactgcatcacagaacaagctagtataaacaaggataatgttgataaagaaacagaaattatcaattgttactgtagtagtgatgagaacaaagattacagtgtcaaaccccagatgcttcaatctggggtcttgaggactaattgcatagactgcttagatcgtaccaatgttgctcaatatgcttatggactagctgcacttggatgtcagctacaagctttaggatttgttgaaaccccgtatattgatcttgataaccctttggccaaggaattaatggaaatctatgagtccatgggcgacacattagcctttcaatatgggggttctgcagcacacaataagatattttctgagagaagaggtcaatggaaggcagcagctcaatcccaggaatttattcgaacactacagcgttattataacaacacatatttagatggtgataagcaaaaagcaattaacttactcttggggcattttcaaccccaacaaggaaaaccagcactatgggaactagattcggatcagcattacactgtcaagaaacatggtctgtatgtagcagatgacagcgttaggtcaactattaaaagatcactatcagatggtaacattctcagt

SEQ ID NO: 122997 - DNA, 325 bp, Glycine max
  Clone ID: PAT_MRT3847_82072C.1
gctccatgtacacagtgcacctgtgacctaatcgggaggtggtactcagcggctaccaagctgcagaatgaggcggtggtggaccatggagaggagtttatagcccgttgtgactaccctgtctttttcaactttaccaagggcaatggcatcggcttcttcagtggtgatcgatggagggttctgagacagttctctatccatattctacggaatttcgggatggggaagagaatcattgatgagcgaatcctacaggatggcagctatctgctggcggatctgcagaaaactgaatgctatccctttgaccccacgtttgtgc

SEQ ID NO: 122998 - DNA, 2862 bp, Glycine max
  Clone ID: PAT_MRT3847_82073C.1
gtatatgcttactcagagaatatacagaaactgattcttcatctcaggcttctatgagcagaagaggaagtcttaatcaggggggaagaattaagcggcagacttgggcagggtgttgactctgatgttctccatccaaagcttatagaagctctaagatagtacaaatattgaacttgtagcttgtggggaaaatcattcatgtgctgttacactttctggtgatctttatacatggggtaatggaacatacaattatggccttctaggacatggaaatcaagtgagccactgggtaccaaaaagagtaaacggccccttggaaggcatacacgtgtcatatatttcttgtggaccttggcacactgctgttgtaacatctgctggtcaattatttacttttggtgatggtacatttggtgctttaggtcatggggaccggaaaagtgtttcattaccaagggaagtagagtctctcaagggtcttcgtactgtgcgggctgcatgtggtgtttggcatactgctgcagttgtggaagtcatggttggaaattcaagttccagcaactgctcttctgtggacctgtttacttggggtgatggagacaaaggtcgacttgggcatgttgataaggaagcaaaacttgttccaacctgtgttgcccttgctgaacacaatgtttgtcaagttgcttgtggacatagtctcactgttgcacttactacatctggccgtgtctatacaatgggtagtcctgtctatggccagttaggaaatcctcaagctgatgggaagctaccaatccttgttgaagggaaattgtcagagagttttgtgcaggagatagcttgtggtgcatatcatgttgctgttttaacttcaaggactgaagtttacacttggggtaagggtgcaaatggccgtttaggccatggcgatacagacgatagaaataccccaacattagtagaagctctgaaagacaaagatgtcaaaagtattgcttgcggaactactttcactgcagctatttgtttgcataagtgggtatctggtgttgaccagtctatgtgttcaggctgtcgcatgccatttaatttcaaaagaaaacgccacaattgttataattgtggacttgttttttgtcattcatgtagcatgaacatgacgcgtttgaacccgatggcaccaaaccccaacaaaccttatcgtgtctgtgataattgtcttaataaacttattaaaacaacataaactgatgcagggattggcactataggagagaatagggaagtgattgtgattttgtaattccactttttttttccattttaaatacattatccaattttttccctatatgtagcttgtgtgggggttgtggaagagttcaaacaagtggaaagcagatcttcgaagaaaaacaagatattggaattcaacagtagacgtgtctctcccattccaaatgggggttcacaatggggagcatcgaatatttctaaatcttttaatcctgtttttggatcatcaaagaaatttttctctgcttctgttcctggatctagaattgtttcccgagcaacatccccaatatctagacggcctagtccacctcgttcaactacaccaaccccaacacttggaggtcttgcatccccaaagatagttgtggatgatgctaagaggactaacgatagcctcagtcaggaggttattaaattaagatcacaggtggaaaacctgactcggaaggcccaacttcaagaagttgagttggaaagaacaactaaacagctaaaagatgcaatagcaattgctggggaagaaactgccaaatgtaaagcagcaaaggaagtaataaagtcacttacagcccagttgaaggacatggctgagaggctacctgtaggagctgctaggactgtgaaatcaccgactcttactgcttcttttggttccaatccttgttccaatgatgttagctatgcttccattgatcggttaaatattcaagctacaagcccagaggcagatttaactggatcaaacaaccatttacattcaaatggatcaagcactgtcagtagccgtagcacaggacacactaaacagagtcagccagattcaacaaatagaaatgggagcagaactaaggacagtgaatcccgtaatgaaactgaatgggttgaacaagatgaacctggtgtatatatcacactcacctcccttccgggaggtataatagatcttaagagagttcgcttcagtcggaagcggttcagtgagaagcaagcagagcaatggtgggccgagaatcgtggaagagtctacgaacagtacaatgtgtgcatgattgacaagtcttctgttggtgttgggagtgaagacctggctcattgacatgacaacctgtaaatgagatgtttttcaacattttggctgggattagggcaagattgaactgatcaattacatttggcttccatctaatataaaaacaacgagggtagctgggggattggcatagtaggagagagaatagggattgattgtgattttgtaattcctcttcgttttcttctttaattttccactttaatttcactttccattttttttccctatatgatgtactttgtgtgggggttgagggtgagaaatgtaaattcttagtaggttgcaagctctgcttgaaaggagctgcagtgtaaatttcataagcgaatgcatttgcaaatttttcttctacacgggatataaattccttcagccatgggaaaaacggctctaagtagttaaatatacatggccctgccaattgcataaaaaaaaaaaaaaaaaactcgaaaaaaacccca

SEQ ID NO: 122999 - DNA, 255 bp, Glycine max
  Clone ID: PAT_MRT3847_82074C.1
gtggttttttgtacaaaaatatatgcaattagaatttagtccaagcaaaactacctagttggaagatatcctctgcgaatagtattgccatacaacggaaattcctgcaaccagtggtactttaagaatcaatttatgactaacaaaggatgatgatgacgaagatgatgatggacagggcacagccaactccaatgggctgcctctaagcttggcagacagtttagctagttctcgaagaaaaaacacctgcct

SEQ ID NO: 123000 - DNA, 123 bp, Glycine max
  Clone ID: PAT_MRT3847_82075C.1
cccaatactatttacttgatatatttcaccctttcaacttcgcagatttttcaaattttaagcgtccataaactttaaaacttccagtatcaggcctatccaaatgtctaaattgctattact

SEQ ID NO: 123001 - DNA, 336 bp, Glycine max
  Clone ID: PAT_MRT3847_82076C.1
tttttcatcacctacaaaaatcaatgcattaatcaactgcttattcatcaccactggctagaatttaatacatggccgccggaaataaactatccctacctatacatattaaaccacctataaagctatctatcaccccctctataaataatcctagtccaaatataatcacaagaacagaacatcattgtgactactattataacaaaaccacacaattgttcactaaaacgatttgcttcctcaaagaatttttagcctccttcatcggtgtcccaaacctccgagatagaaaattctcatatatcctttaaccattcttcgacttaacaaacc

SEQ ID NO: 123002 - DNA, 159 bp, Glycine max
  Clone ID: PAT_MRT3847_82077C.1
caccagaaattgcggagaaatataattttgttgagacgggtctctggtactaatggactacatgtcttcacgattccattttacattcatcttagaaggatcgtgcttcaaagcttacatgggtagatgggtgagtacaggaaagaggttaatcactac

SEQ ID NO: 123003 - DNA, 656 bp, Glycine max
  unsure (1)..(656): unsure at all n locations
  Clone ID: PAT_MRT3847_82078C.1
tacatcctcatttcgaaaagaattatagaaccagctacagaggaattgattaacaaaacacaactctctcccaaaataatctcaatgtcattacgtcgacttggcggctccacaaaagaatcctacttcacgtactttactgctatccgtcaacaatcgtaggtgtaacacaaatcaagatcgacatcatcaacctctgattgtccttctctaataagaccatcatcatttccaaaatggcagtcaatttgtctaataccatttaaaaccaccttttctttgactgtttcactattctccataactgcagatgtgttgatgacaacccagtgatgccctttgcagcaaccacgannnaatagccaccagaaatctcaaacttgatcggcgaactccttctccgaggtacccagttgcaaaagactcnnntgatctctaaatactcataaatatcttttttttaatagatagattaggcttattaattaatattatatttattattatgcttgttttaatttatgtttatttttatattttttaaatttttattntaatattatatttannntgaatannnaaagaaaaatannnnnatattaaattatattttaggttataaatttattcatcaagtaaattcttttattaataat

SEQ ID NO: 123004 - DNA, 492 bp, Glycine max
  Clone ID: PAT_MRT3847_82079C.1
ggccaaaaaaaggacaaaaaaggggggtggatttgcctttaaaaaaaaaccaacaaggggggtttttccccaaaaaaaaaaaaaaaaaaaaaaaaaaaacccctggaaaaaaaggaaaacctttcttggggcaaaaaaaagaaactgggggggggcctcccactaacaggggaaacttggcggggcccaagggaaaaaaattttaaggggacaaaatcccaaaatttaagttcctttaaacccaaagcggaaaccggggtttggtttttccggggcaaatggacccttttggaaaaatttttacgttaaactgggggccaaaaaaaattcccgggccccccaggggggggggggttttgacccccaaggggggggggaatggggttaaatttttcccaaatttggccccccccctttggggggattgccccagggaaattccccggggaccctttttttataaggccgggggcccggccaaatttggaaaag

SEQ ID NO: 123005 - DNA, 2225 bp, Glycine max
  Clone ID: PAT_MRT3847_8207C.1
aaattgttggtttccatgttgctggaagcaaaggaagattgggctatgcttcattaataccatatgttgagcctgtggtacaagcccaaagtgctgaagtctattttgacttctttcctgtggaagttgatagtcaagagggagttgctcatattggtgaactcaaatctggggtttatgttccactgcccacaaaaactaatcttgtggaaactcccaaggaatggcagttggatttgccttgtgataaaattccaagtgtcttaaccactactgatgagagattggtaggcacagaacatgagggatatgatccttttcttggtggaattcaaaaatatgcaactcccatgatgccccttgatgaggaaattctttctaaagttgcacaagacatggttgaagaatggtttgattgtgttgatgaggaggattcctttgaggaagtttctttaagtgcagcactcaatggtgttgagggtttggactatatggaaagaattcctcttgccacatctgagggttttccccatgtgctttcacgcaaaaatggtgaaaaaggcaagagaagatttgttactggagatggtgaagaaatgtcactaattcctggtaccagtgttgaagaagcatacaataaattgactgttgaactagaaaagtgtgttccaacattggttggcatagaatgtcccaaagatgaaaaacttccccgtcgcaaaatttttgataaacccaagacgcgctgcttcaccatacttcctatggaatttaatctagtggtgcgtcaaaaattcttgaattttgtgcgattcattatgaagaaaagggacaaattgagttgccaggttggaatcaatccatattctatggagtggactggtttggcaaatagactgttgagcaagggaaatgacattttgtgttgtgactatgctagttttgatggtctgataactaagcaagtcatgagcaagatggcagaaatgataaacagtctttgtggtggtgatgagaaactgatgcgtgagagaacgcatcttctgttagcttgttgttcaaggatggcaatctgcaaaaaagatgtttggagggttgagtgtggtatcccttctggatttccactcactgttatctgcaatagcattttcaatgagatgcttatcagatatagttatgaaaagttgttgcgtcaagctaaggctcctagtatgtttctccagtcttttaaaaattttatttctttgtgtgtttatggagatgataatttaattagtgttcatgagtatgttaagccatattttagtggttctaaattgaaaagtttcctagctagtcataacatcaccattactgatggaattgacaaaactagtgcaactttacagtttagaaagttgtcagagtgtgattttcttaaaagaaattttaagcaaatgtccaatgttttgtgggtagctcctgaagacaaagctagtttgtggtcacaattacactatgtttcgtgtaataatttggaaatgcaagaagcttatcttgtcaacctcgtaaatgtgttacgagaattgtatttgcacagtccagaggaagctcgtcaattgagaaggaaagctctctctcgtattgaatggttgcaaaaagctgatgtgcctaccatagcacagattgaagagttccattcgatgcagaggatgatgaatgctcctgattcaaatgataatattgatttactgttgagcattgatttgttgggtttacaaggagcaggtaaagcttttccaaacaaaattgtttttgatgataagcttgtgttggctaacacacaagaattctttgatggaaattttccagtggattcttggttaccaatttttgtgaattgtctttatcctgtaagtcaattaccttcagaagctgtcgttgtaaatgttacatgtggtagtggacgtggtggtttacccaccactgcttggattagttctgcagttaacaatcgctcctcagatatcaacaaatggattcgcacagcacttgataaaggtaagaaaattgcttttcttactagaaatgatccttttccagtatctatactgactgctttttctggcgttcagaatgaaattctgagttctaacgccactaatcctatgctgacgctacttcttgtgaactgtgacactctcaaatatctggtacgatgagtgtactctctcatttgagaacta

SEQ ID NO: 123006 - DNA, 1130 bp, Glycine max
  Clone ID: PAT_MRT3847_82080C.1
agcatggcaaatacaatggcttggctcccgtgctggcttgcacgcccgctcgcaaaaaatcttacttttacttcaacaacaaggacgctggtcacatgttagcttgacttgttggcctccattaattcttatttagcactcaatttaattattaagttttgttagcattgtacatagatctcaacatccccacaagcttgaaatcataggcatattttcttccaaaccgtgtaaggggatagggaaaaaacaagtaatgttgtcaatttacaatttgttttcattttatgaagtctttcattcattttcttaggaggaggactggtgatttttttattttggttctttattacatcaaaagtcaagtgtcaactgtagcgttgtcatactttgggattgtaacaattgctatttcatagccccccattaattgaagaaataagaatttcttaaaaaaaaaaaaaaaaaatcagaaattgaggcagctcagtggatggcaattgaggattacatggcccagccttttgtccgagaaaatgagctatttgactttcttaccaaaatagggttatcaaaatttaatggcaaatacagtggcttttccaccgtactctctagcacttcctcttgcaagaaatcttacttttacttcaacaacaacgacgctggtcacatttagcttccaaactttaacaatttgggacgttaatttcttgcaaattgcaagcttgacttattggcctccattatttagcactcacttaattttaattattaagtgttgttagcattgtacatagatctcgacatccacacacaagtttgaaatcataggcattttttttttcttccaaaccgtgtaaggagataggaaaaattaattaattttttcaatttacaatttgttcattttattaagtctttcattcataatcataggaggaggactggtgatttttttttagttctttattacatcaaaagccaagtgtcaactgtagtgttgtcatactttgggattgtaataattgctatttcatagcccaccattaatggaagaaataagaatttcattataattttattaaaaaaaaaaaaaaaagggcggcagctcgcgatctagaactagt

SEQ ID NO: 123007 - DNA, 469 bp, Glycine max
  Clone ID: PAT_MRT3847_82081C.1
cggctcgagattggactgggaagcaattgggaaaattcttgcacgaggtcatagtcgtgttcctgtatacagtggaaaccccaaaaatataattggcctcttactagtaaaaaaccttcttactgtaagagctgaaacagagactccagttagtgctgtttccatccggagaattcctagggttccagcagatatgcctctatatgatatcctcaatgagtttcaaaaaggaagcagtcatatggcagctgtagttaaggttataagagagagaaacaaccctcagtcacccaatgacactgagaaatccaaggataaggaagtcatcaaacataattctcaactaactatcccattgctatccaggttttatgaaaaatcagaaaatgttgtcaatattgacaaacccaagcttgctgcagaccaacagtttcaaaaggatggccctgcaacaaatggtgtttaccac

SEQ ID NO: 123008 - DNA, 232 bp, Glycine max
  Clone ID: PAT_MRT3847_82082C.1
cccagctgctacgaccgtcaaccgcgccggtgcccgaatggatactccattcacggtcctcaaatccatggttggctccccgaaaaggaacaccaacaatgacattacctgcatagctaactacggcggaagagtacagtgcatgcaggtgaggccaccaatatgcaccaataaattgtagactatatcgtacatgacataccatgatgatgcccaattggcaaaggaagtc

SEQ ID NO: 123009 - DNA, 284 bp, Glycine max
  Clone ID: PAT_MRT3847_82084C.1
ttaccgagaagacgacagaaggggtcttttcaaaactatcgtcctacaaaaaaaaatattcttgtggtaggccctgttcctggtcaaaaatattaaagaataacctttcctattctttccccggattccactactaagagagatgttcagtgcttaaaatatccaaaatacgtaggtgggaacaggggaaggggtcagattaatttggaggggagcaagagtattaatattgtgtataatgctacagcagcgggtatggtaaaaaaaatcatacggaaagaaaa

SEQ ID NO: 123010 - DNA, 284 bp, Glycine max
  Clone ID: PAT_MRT3847_82085C.1
tttatcaacatgtcatgggacttttgatactattggcttaagcttggggtctacattggcgtcgttggttgttttggctccattaatttgaatgtgggaacaggctacaactctattcttgctataggtcctatgtgcatctttagtattagggttttgtcaccgttatgtcattgggtggatttctttcatttgttgaagatatgaaggtggtccaaagggagaggcttaatggacactatggtgtcacttttatctggcatgagtatcacattatttgctgt

SEQ ID NO: 123011 - DNA, 594 bp, Glycine max
  unsure (1)..(594): unsure at all n locations
  Clone ID: PAT_MRT3847_82086C.1
gctgaatcattgacgggggcaaagctgtgttgatctaaccaaaatttacacttggggtggccttgaggggtcatgtggggcagtgcaacacaaacaaaaaaagaatcttgaatcagtattttttgctttttccactgtgtgggcgtttcacaagtgttgcaataacaggacaacaaggcacagatgccctgcaccaccaccacttgcaggaggagcagggaggacctatcactggtgcataacagcaggaggagccttggacctgtgctgaagaaacggggtgggcctattggcgatgcacaagggcgctgtgaaacggatgctggggctggtgaaggtgcgaggggagctggggcttgtgggggaggggggggatgggggctgggggggaagccgntggggcgaacgcgaaggtgctgggcgtgtggcgggggcggggggggcggggggggaggggggggtggggtgggaggggggggggggacgaggacggtgggggggggtgggcgggagtagtgggaagagggggggggttggggggggggggggggggggggggggggaggggggggggcggggggggggggggggggg

SEQ ID NO: 123012 - DNA, 263 bp, Glycine max
  Clone ID: PAT_MRT3847_82087C.1
aagggggtcacctctttgctggttcacttggtgaactatggtgacactattaagtccataggaagggcctatggtgtggatgaacaaagtgtgctagaggccaataagttggcagtttcacaaagtaaaaacagcagctggacctccttgccttgacacctattatagttcctctaatagggaagagctgcaaagagaacccagataaattctattgtagatgttaccaagcaccagatggaagctccaaggggcccttctgt

SEQ ID NO: 123013 - DNA, 666 bp, Glycine max
  Clone ID: PAT_MRT3847_82088C.1
gacttcatcagttggattatttggggccaggctggaggatcttctactttcttgagccgttctattgatcttgcatttatacttttcaagcatggccagtatggtgctgctgagcaattgcttatgattgcggaagcacatttactaaaagagaagacatcccaaagtattcaagatgatgatggtggatggtgcatacgccatcatcttctaggatgttgcttacttgcacaggtgcaatgtggattacatgcaacccagaaggataaaaaagtttctgaggccattcgctgcttttttaggtcttcatctggaaatggtgcatctgaggctctgcagagtttatctgatgacttaggaattccatatcttggctttagtggttgtacatcaattgctgcatggaagcttcaatactatcaatgggcaatgcagttatttgaacgttatagcattagtgaaggtgcttgccagtttgctcttgctgcacttgagcaagttgatgaagctctatatatgaaagatgacaagtgcacaaacaactcaactaatgaatcagtgacaaccatcaaaggacgactatgggcaaatgttttcatatttgcggtagaccttggtcgattttatgatgcatattgcgcaattatttcaaatccagatgaggag

SEQ ID NO: 123014 - DNA, 700 bp, Glycine max
  Clone ID: PAT_MRT3847_82089C.1
tgagtttgaagaagagggggttgggttccttggagagacatgggtgttgttgttgctcacacctcttttctttattttaacccttagcttcattgcttccttccttttgttgccactctttccctttcaagtttggggcgaaaatgtctacctcaaggcctagccaatcatccagcaattcggggagatcaagacgtagtgctagggctatggctctggcaactgtagatgcaaaactccatgcaacttttgaggagtctggtagttcctttgactactccagttcggtgcgcatctctggtacagctgatggagtcaatcaaccacgcgtccgcaaagttacaacagcttacctccaccacatgcagaaaggcaagatgattcagccttttgggtgcttgttggccttagatgagaaaacatgcaaggtcattgcatacagtgagaacgcacccgaaatgctgaccatggtgagccatgctgtccccagtgttggtgaccaccctgcccttggtattggcactgacataaaaactctattcactgcaccaagtgcttctgcattgcagaaggctctaggatttgcagaggttttgcttcttaaccctgtccttatccattgcaagacctcgtggaagcccttttatgcgattatccatcgggtgactgggagtgtgatgattgactttgagccagagag

SEQ ID NO: 123015 - DNA, 1214 bp, Glycine max
  unsure (1)..(1214): unsure at all n locations
  Clone ID: PAT_MRT3847_8208C.1
gggattttcttatgtgccttcaacccaaaaatggggaaaaaggcaaaaggggatttgtttttggggatggtgaagagataacacttgatccgggaaccaagtgtgaaaaggcttacaacaagctaatatgtgaacttgaaaaaagtgttctacattgggtggcattgaatgtcccaaggatgagaaacttnctcgtcgcaaaaattttgacaaacctaagacgcgctgcttcactattctccctatggagtttaatcttgtggtccgtcaaaagtttttaaattttgtgaggttcattatgaagaaaagggacaagcttagttgtcaagttggaatcaacccatactccatggaatggactggtttggccaatagattactgagtaagggcaatgatattctgtgttgcgattatgctagttttgatggtttgattaccaagcaagttatgagcaagatggcagaaatgataaacagtctttgtggtggtgatgaaaaattgatgcgtgaaaggacgcacctgctgttggcttgttgttcaaggatggcaatttgtaagaaagatgtttggagagttgaatgtggaatcccttctggatttccgctcacagttatttgcaatagcatttttaatgagatgctcattagatatagctatgaaaaattactgcgccaggctaaagctccaagtatgtttttacaatccttcaaaaattttgtttctttgtgtgtgtatggtgatgataacttaattagtgttcatgaatatgtcaagccttactttaatggttctaaattgaaaagctttctagctagtcataacatcaccattactgatggtatcgataaaactagtgcaactctgcaattcagaaagttagcagattgtgaattcctcaagagaaattttaagcacacgtctaatgctctgtgggtcgctcccgaggacaaggcgagttcatggtcacaacttcattatgtttcgtgtaataatctggaaatgcaagaagcttatctcgtcaatctcgttaatgcgttccgagaattgtatttgtacagtccaaaggaagcttgcctattgtagaaagaaagctctttctcgtattgaatggcttgcaaaaagctgattgtgcctaccatagcacagaatgaagagttccatccgttgcacaggatgatgaatgctcctgatacatatgatatactgaactact

SEQ ID NO: 123016 - DNA, 523 bp, Glycine max
  unsure (1)..(523): unsure at all n locations
  Clone ID: PAT_MRT3847_82090C.1
tcctctagagttgccgccctttgtttggcttttttttttttttttttttttttttttttttttttttttttttttttttttttttttttttttttttttttttttttggaaaaatgggtcttttttaggaaattttaacccaggggccgactcccggtttggggggttttttagggggggggggaaaaaccccccccaatttttttaaccaacccaaaaaaaatttgggggttttgggggacctttttttttttttttgggggggcgggcaagggggactgggggaggttttttttatggggggcttcgggcctttaaaacaacttncgggaccttggtgggggaagcttttttttttttcttgggggggccccccggcccgggggtttctttggggggctccggaggggagaccttggattttagggggtttttgggggggggggggggggggtttaagaggggggcgaacgttgggggctttttagacagtttcaaaaagggttttgggaaaaaaggaacc

SEQ ID NO: 123017 - DNA, 254 bp, Glycine max
  Clone ID: PAT_MRT3847_82091C.1
ctaaatcaggtgtccacccaaatgtggttatatttacaactgtcataagtggatggtgcagtgttggcagaatggacaatgccatgagggtttttgacaagatgggtgaatttggggtttctccaaatttgaagacttttgagacactaatctggggatatgcagaagcaaaacaaccctggaaagcagaaggaatgctccaaataatggaagaatttcatgttcaacccaagaaatcgaccattttacttgtt

SEQ ID NO: 123018 - DNA, 240 bp, Glycine max
  Clone ID: PAT_MRT3847_82092C.1
gctgccagaagaccactgaaagggaagcaaaaccctaagccctctttcttcctcttcctcaatagtgcgattttcgattctcttccctgcatctatgcctaaccccaaggtcttcgtcgacatgaccatcggcggtcaatctaccggccgcatcgtgatcgaactctactccgatttaactctcatcaccgccgagaacttacgcgcgctctgcattttcaacaaaggcacctggcggat

SEQ ID NO: 123019 - DNA, 1739 bp, Glycine max
  Clone ID: PAT_MRT3847_82093C.1
gacgtcgaatcggtgtggtacggtgtgttttattcattagacaagattggaatgcaagtttaattgattaatactaataatcaatcatcgtagcgagatggtgtcgccgagccaggtggtgaaagtaaagagaaatacgctacgaccatgcatgacatgccctctctgccacaagttcttcaaagatgccaccaccatctctctctgccttcacaccttttgcaggaagtgcatatatgagaaactctcggatgaggagatggattgctgtcctgtgtgccatattgacttaggctgccttccggtggagaaactcaggccggaccataatttgcatgatataagggcaaaaatattcccttttaaaagaaaaaagatcaaagcccaagaagttttgtcttcaatatcattgcctgcaaaaaggaaggaaagatcactttcatcattggtagtcagtgctcccaaagtttcaatgcagcctggctttacaggaaagagaacaaaaaacagtacacgaaaggctgctgctttacgtggatgcagttttcttctcgacgaatcaataaagaaggaacaaacaaatggtgatgataatatggattctcccatgcctgagcattctaagaagcataagccccatgaagatacagagaacagtgtgcaacatacagaagggaaggttgatctttggacaccactgaactgtcttgttgaagctgccaacagaacaaagtcctccaggtcaaattcacaagcaactcctcttgccaaattagagtccccaactactcctcatggtggacaggatgcatctgaaactacaaccaaaacagacctacctgcttctgcccagagtgaattaaacattccaaaatccaaaaataaggatactggacttaaaccaatatttggagatgacaaggatgcaaacagcttgcctttaggaccagtgaagcgaagaagattgcgtcctgctggtcagaaaagggttgcagcatctgagatgtctgcctcatccccagccccactcgatgcaacagggggcaagtgcaacagaaaaaacagtcctatttggttttcattagttgcttcagaggaccagaaaggagattttcccttgccacagatctcagcatgttacttacgaataaaggatggtactgtgcctgtctcatttattcaaaagtaccttatgaagaaacttaatcttgccagtgaagcagaggtggaaataatgtgccgaggtcagccagtgctcccatctttacaactgcataatttagtagatctatggttcccggacagcatcaacctcaaaaaagataccagcatcagtggggtcctcagccaaagattttgtaatggttttatcatattgtcgaaaggccttgcctccttgacaaagtttcctattctatctatatatcattttccctccgctactttacatacatacacaatcaactgttttgatagcattctcaccgatattactgcttagagatttgttcatttagtagcatgcgaggaatctatgattttgttttgctcatgactgaatatgtgcagccagcaattttcagttttcttctgcttcatttgctgctgttctttggatcatgattactatttccttttgatccaatgatgcctttccccttagtaagaatcaaaatgagtggttataaatcaggaagtactctaccaaaatttctctaatccaagatgcaatcattttc

SEQ ID NO: 123020 - DNA, 2265 bp, Glycine max
  Clone ID: PAT_MRT3847_82094C.1
gttgggtttgttagtagtgtatgtatggcgtgtgtattgctttgcttctctttctctaagtctttgttcacgctctcttcttttctttgtcttggtctaatacataacaacacacaaacccaacaagaacaacattgaacggtgccggcttcatctttacgtaatttttgcggcaacaatcgaatcccatcttgcgatttcgcctcctcaaaccccgcgagttaaattccctccccagatccatattgcttcgacgtcgaatcggtgtggtacggtgtgttttattcattagacaagattggaatgcaagtttaattgattaatactaataatcaatcatcgtagcgagatggtgtcgccgagccaggtggtgaaagtaaagagaaatacgctacgaccatgcatgacatgccctctctgccacaagttcttcaaagatgccaccaccatctctctctgccttcacaccttttgcaggaagtgcatatatgagaaactctcggatgaggagatggattgctgtcctgtgtgccatattgacttaggctgccttccggtggagaaactcaggccggaccataatttgcatgatataagggcaaaaatattcccttttaaaagaaaaaagatcaaagcccaagaagttttgtcttcaatatcattgcctgcaaaaaggaaggaaagatcactttcatcattggtagtcagtgctcccaaagtttcaatgcagcctggctttacaggaaagagaacaaaaagcagtacaagaaaggctgctgctttacgtggatgcagttttcttctcgacgaatcaataaagaaggaacaaacaaatggtgatgataatatggattctcccatgcctgagcattctaagaagcataagccccatgaagatacagagaacagtgtgcaacatacagaagggaaggttgatctttggacaccactgaactgtcttgttgaagctgccaacagaacaaagtcctccaggtcaaattcacaagcaactcctcttgccaaattagagtccccaactactcctcatggtggacaggatgcatctgaaactacaaccaaaacagacctacctgcttctgcccagagtgaattaaacattccaaaatccaaaaataaggatactggacttaaaccaatatttggagatgacaaggatgcaaacagcttgcctttaggaccagtgaagcgaagaagattgcgtcctgctggtcagaaaagggttgcagcatctgagatgtctgcctcatccccagccccactcgatgcaacagggggcaagtgcaacagaaaaaacagtcctatttggttttcattagttgcttcagaggaccagaaaggagattttcccttgccacagatctcagcatgttacttacgaataaaggatggtactgtgcctgtctcatttattcaaaagtaccttatgaagaaacttaatcttgccagtgaagcagaggaagtcaagcaacatattgcaagccttgtggacattgtctgggggctgaggctatcttgagaaattagtacaactttgtatgcttctacataatatattacaaatgcacaactacgaacaactgggtagaagagaaatagagtctccactggcatgatcccatgcacccacatgattagctatgtaatgaaaatgaaaatattggaaacaaaattctcgtgttgaagttttaacaagtcaccaagtaggcactcggtgctgaaataacattgaaggtggaaataatgtgccgaggtctgccagtgctcccatctttacaactgcataatttagtagatctatggttccggacagcatcaacctcaaaaaagataccagcatcagtggggtcctcagccaaagattttgtaatggttttatcatattgtcgaaaggccttgcctccttgacaaagtttcctattctatctatatatcattttccctccgctactttacatacatacacaatcaactgttttgatagcattctcaccgatattactgcttagagatttgttcatttagtagcatgcgaggaatctatgattttgttttgctcatgactgaatatgtgcagccagcaattttcagttttcttctgcttcatttgctgctgttctttggatcatgattactatttccttttgatccaatgatgcctttccccttagtaagaatcaaaatgagtggttataaatcaggaagtactctaccaaaatttctctaatccaagatgcaatcattttc

SEQ ID NO: 123021 - DNA, 801 bp, Glycine max
  Clone ID: PAT_MRT3847_82095C.1
tcccgcgtcgacccacgcgtccgatgaactaccatgttgtcctctcgatgctccacagcctctatgttactcccattacttttctccattttccttttccttttcatcattcacctcaagggaaatcagcatctttccttcgagtttcctaatttctccctttccagcataaagggcatcacaacacaactactacgaccccatggtcagtatctggctaactctgcatatagaagccttgagcatagaagtaagaaaaggactagctttgatgtagttgaagaaggtttggcaaaggctcgagcctcgatccgggaagcaattctgtataggaaccacagcaattcagggaagcaagaacactttatccccaaaggttccatttatagaaaccctcatgcttttcaccagagccacatggagatggtgaagagattcaaggtgtgggtgtacgaggaaggagagcaaccattagtgcattatgggccagtaaatgatatatacgccattgagggtcaattcattgatgaaatagacaatagcaagaggagccccttcaaggccaggaaccctgatgaggcacacgccttttttcttcccttaagcgtggttaatgtggttcattatgtttacaaaccttacatgtcgcaaaatgattatagccgtgaccgcctgcaacggttggtggaagattatattggagtggtggctgataagtatccttattggaacagaaagcatggtgcagatcattttctcctttcctgtcacgattgggcaccagaaatctcacatgccaat

SEQ ID NO: 123022 - DNA, 370 bp, Glycine max
  unsure (1)..(370): unsure at all n locations
  Clone ID: PAT_MRT3847_82096C.1
cggaaattcacaaacccggccctagtccaaaatctcataatatgaaagacggtggaacaaatgttgaggtttcagaagatggatctaaaagagaagatacaacctcagagagtggtggtggaggaggccttattaacaacttggtttccactttgatagcacccttgagtccaagcattgggaaagccactgagcatgaaagtggtgctgatgatgatggagaaaaagaaggggttgatggttgtgaagagggaggagggatcatcagaaaaatggtttccaatttcttccatcaaagtgaaggtgaaggtgtggttnnagctgaagaggacaaggaagtcgtggatgaaatcatggctggtggtgaaaa

SEQ ID NO: 123023 - DNA, 343 bp, Glycine max
  Clone ID: PAT_MRT3847_82097C.1
atataggtgaccgactacacgttcaaccacgctaacttttttgttaaaaagcaaggaacaaagactccttggagaaggggtaagggactgtgagcgcaggctgtcctcaaagggggccggtgtggatctaagagaacggggtcgagactgacctcgagcatgttgatcttgatcagggggagcataagacacctgaatactttatcaaacagacctgtggtcaaggtccacctgaacaggaaggtgatctgaggctctacgaatacagggctatgataaggtatagtgcataaaaatatgatgacagcggccctgacctattgggttaaaccttacaggagag

SEQ ID NO: 123024 - DNA, 323 bp, Glycine max
  unsure (1)..(323): unsure at all n locations
  Clone ID: PAT_MRT3847_82098C.1
ttaaaacaaatcactttagatgatgtgaaaaggtacataataaatcctgataaagtcagtaaacaaattgagagaatatgttgcaaatgttcatgttattttttcttgttagngctgtcatgcacaatcaaatgcaaatggccaactaaggtggattcagtcatgcagccccctttttgttcaaaaagtttacaagaatttggtttacaaactagcaaatcacatagaagtcatttttgaagctgacaatctctttctgccttcaaacgtactcttgcaaatagcagaatagcgtaaactggattccaagtgcaggtctgact

SEQ ID NO: 123025 - DNA, 527 bp, Glycine max
  Clone ID: PAT_MRT3847_82099C.1
aatcttcatccaagaatggggaggaacatactgttttttaatacaagtaaacataattaactctatttggaaggcccgaacaaagggttttaaataaaatttgtacaacagccaccccaatcctttggagtgcgactgggttccaaaacattactaactttacctaacaaatttttaacattacaaccaattttgttccaattacaaccaccttattatatatatcacagcggctggtattacgccgaaaaatgctggcaccccaatcatcctaagttggacccttaagaaattttactattcggatgtatgtcctcctccgagaacaagcgatgattccatcaactctaaggatcatgacacctgtctctgatggatagagccaaacaacttgtttaactttgaatgctgggcatatccactcgacaaccttgttttccatagagccggacttagcctgcattgcacactgggagccattctttggatgctctgcacggaggtgagaaataaactcaactgtggcc

SEQ ID NO: 123026 - DNA, 1195 bp, Glycine max
  unsure (1)..(1195): unsure at all n locations
  Clone ID: PAT_MRT3847_8209C.1
gattccgggttccagcgccgaagaggcttacaacatgctaatagctgaacttgagaaaagtgttcctacattggttggcattgaatgtcccaaggatgagaaacttcctcgtcgcataatttttgacatacctatgacgcgctgcttcactattctccctatggagtttaatcttgtggtccgtcagaagtttttaaattttgtgaggttcattatgaaaaaaaagggacaaacttagttgtcaagttggaatcaacccatactccatggaatggactggtttggccaatagattactgagtaagggcaatgatattctgtgttgccatcttgctcataacttgcttggtaatcaaaccatcaaaactagcataatggcaagaaatgataaacagtctttgtggtggtgatgaaaaattgatgcgtgaaaggacgcacctgctgttggcttgttgttcaaggatggcaatttgtaagaaagatgtttggagagttgaatgtggaatcccttctggatttccgctcacagttatttgcaatagcatttttaatgagatgctcattagatatagctatgaaaaattactgcgccaggctaaagctccaagtatgtttttacaatccttcaaaaattttgtttctttgtgtgtgtatggtgatgataacttaattagtgttcatgaatatgtcaagccttactttagtggttctaaattgaaaagctttctagctggtcataatatcaccattactgatggtattgacaaaactagtgcaactttgcaatttagaaagttagcagattgtgattttcttaagagaaactttaagcagatgtctaatgttttgtgggtggctcctgaagacaaggcgagtttatggtcacaacttcattatgtttcgtgtaataatctggaaatgcaaagaagcttatctttgtaattctcgtaaatgtgttacgagaattgtatttgcgcagtccaaaggaagctcgccaattggaaaaggaaagctctctctcgttttggaagggccgcanaaagctgattgtgccctaccctagcccanatggaagaattccattccctgcctaggatgatgaatgcccctggctcaaaggaaatactgatctactgtcggaccattgatttttgggctttcaaggaccaggaaaggcttttcaaaccaaaatggg

SEQ ID NO: 123027 - DNA, 770 bp, Glycine max
  unsure (1)..(770): unsure at all n locations
  Clone ID: PAT_MRT3847_820C.1
cacgcgtccgtgatgaggtgactctccctccctccccgccttctccgcattcattatttctttcttggtatcaaattcagcttggagattgtgaattagctggcgagaatgtcttcgtcttcttcgggcttgattttccgagggcacgaggcccatcccatggacgacgcctattacccgaagccgcagaagccatggctctccttcggctacctcctccgcgaacagcgtctccacttcctcctcctcggctttgtcctcgcaaccctcttcttcttcctcctcccatcatcgtccccttcccaaccccttggagcccacgacccattccccaccccttacttggagcccacccgctggcccaccaactcccgaagctacgacgtcgtctccgtgcattccgtgggaaaaatccctctcgggattaagcggaaggggctccggatcgtcgtcaccggtggggccggcttcgtcgggtctcacttggtggatcggttgattgcccgaggagacagcgtcatcgtcgtcgacaattttttcaccggaatgaaagaaaacgtgatgcaccattttgggaaccccaacttcgagctcatccgacacgacgtcgttgagcctctcctgttagaggtcgaccagatctaccatctcgcttgccccgcatcccctgtccattacaagtttaatccagtcaagactatcaagaccaacgtgggtcggacgctgaacatgnctggactggctaaaaaagtggggccaggttcttgctg

SEQ ID NO: 123028 - DNA, 263 bp, Glycine max
  Clone ID: PAT_MRT3847_82100C.1
aaaaaaaaaaaaaaaagaaatttataaatatttaaaaaaaaaaaaaaaaaaaaaaaaaaaaaaaaaaaaaaaaaaaaaaagaaaaaaaaaaaaggggggacggagtttggggtatccaagttttaagaccccccggtttgcccggtgataggcttcttatttggccccctgcgtgccaccctctgtccgttgttctgcactttctttgctgtggaacccctgggttagcccttttaatttccatgttgggacatcccgctttc

SEQ ID NO: 123029 - DNA, 1088 bp, Glycine max
  Clone ID: PAT_MRT3847_82101C.1
acctctaactatttatattcacatatttctctccttctcagaaatcagaattgagcaagcgggcgggagtggaatttgaaggttatcatcatcatttatagatattattattattataagaagttcatcagaaatattcaatggggagctttgaaactgaactgatgaatcttaaggccacagagttgaggttgggactgcccggctgtgatgaaactaatgagaaaagttcatccagtagtggatctgttgttagaagcaacaagagatcttcaccagaacccagtgtggaagagtccaggtgcaactctaatggttcttcagattctaccaccacaagtgatcatgatcaagacagtgcccaacctgaaaaggtacaagtagtggggtggccaccaattagatcttttaggaagaacagtctgcaacaacagaagaaggtggagcagctgcagggtgatggaggtggaatgtacgtgaaagtgagcatggctggtgcaccttacttgaggaagatagatctcaaggtttacaatagctacccagaactcctcgcagccttgcaaagtttgttcacgtgcacatttggtgaatattcagagagggaaggttacaatggatctgaatacgctccaacttatgaagacaaggatggtgactggatgcttgttggagatgttccatggaacatgtttgtatcctcctgcaagaggctgaagataatcaaaggatcagaagcaaagggtttgggttgtttgtgaccaacaaaacttacaaaagcaaaagcaagatagtcatgagatcttcagagacaaataccctttgtgttgtgcaagcaagtacatggtgttttatgagaactcatatatagtttattataggaaaatagatgaatatatatatacacgttattttttctttattaatttcaacagaggcggctttgaggtctgctttctaaattatatgtaatattcctctcaaaaagaaagagaaagaaaatataagaaaagttaatgctatttcaattgtacagatcgtgaatataattataactaataataacaataataatatcattttgtcct

SEQ ID NO: 123030 - DNA, 1343 bp, Glycine max
  Clone ID: PAT_MRT3847_82102C.1
ctctttacctaattatatatatatatacacatctttctctctttctcagaaatcagaattgagcaagcgattggatttggataactgaaggtgatcatcattttagatattattataagaagttcatcaaataattgatcagaaatattcgatggggagctttgaaactgagctgaatcttaaggccacagagttgaggttgggattacccggctgtgatgaaactcatgacaaaagttcatccagtagtggatctgttgttagaagcaacaagagatcttcaccagaacccagtgtggaagagtccaggtgcaactctaatggttcttcagattctaccaccacaagtgatcatgatgaagacagtgtccaacctgcaaaggtacaagtagtggggtggccaccaattagatcttttaggaagaacagtctgcaacaacagaagaaggtggagcagcagggtgatggaagtggaacgtatttgaaagtgagcatggctggtgcaccttacttgaggaagatagatctgaaggtttacaatagctacccagaactcctcatggccttgcaaaatttgttcaagtgcacatttggtgaatattcagagagggaaggttacaatggatctgaatacgctcctacttatgaagacaaggatggtgactggatgctggttggagatgttccatggaacatgtttgtatcctcctgcaagaggctgaaaataatcaaaggatcagaagcaaaggggttgggttgtttgtgaccaacaaaacttgcaaaagcaaatcaaatcaaaatagtcacatgaggtcttcaaagacaaataccctttgtgttgtgcaagcaaatacatggtgtttatgagaactcatatatatatatatatatatatatatatatatatatatatatattaggaaaatagatggatattatctatgtatacattatttttgctttattaatttcagcagaggcggctttgaggtctgctttctaaattatatgtaatcctctaaaaaagaaagagaaagaaaatataagaaaagctaatgctatttcaattgtacagataaaaaatataataataataataatctcactttgtcttaaaaaaagataggaaacgcatggaggaggacaaggccaaaaaagcagctgacatgcagaaggctaacgataacacatctgcacctgctgatgaagatgatatggacccaactcaataccttgagaataggctaaagtatattgcaggtcataaggcagaggggaataacctctatcctgacaaattctatgtcactatgtcttttgatcaatacatcaaggaatatgga

SEQ ID NO: 123031 - DNA, 284 bp, Glycine max
  Clone ID: PAT_MRT3847_82103C.1
ggaagggaaaattttggcagtttttggaaggttttcaaatttgggcctaaaacttctggtcctggattttggttccaacccaaggttttttatttaacccaacaatttttttatttggttccttataaataaggggattaagccctggtggccagccattccaaaattaatttgcttttggctggctgaaggaaaaagggaagtttttcaccacctttgttcccttgcttgccagggtaccaaaaaggaaaaaaccttttttaggatcaaggggccttgaaaaa

SEQ ID NO: 123032 - DNA, 469 bp, Glycine max
  Clone ID: PAT_MRT3847_82104C.1
gttatgttgtgtgtttttgtttttttttttcgctggtaaaacatttatttcaaaaattctgttggctttcagatgttatacaagaaacgggaagggtttctttcttaggctctaaaacccagaaataagacacaattccatacgtgctgacttttggagtatggagcaacatttcctataacaaataaaagaaatgctctgaatgtgactctttattctggtaggtataatcaacccagtcttgtttacatgcctagatttactttcagcgagtatgtcctgaatgcaaggcgctaagagccttgatgcctaacttgtaacatccgatttctaggcctcttatgcaaatgccaataaaggatctgtgtacagccctagaactcacggcctatgtatctattagcttttcgggggagccactaactctagagcgggcgcaccgcggaggagctccaacttttgttccctt

SEQ ID NO: 123033 - DNA, 433 bp, Glycine max
  Clone ID: PAT_MRT3847_82105C.1
tctgtttctctaagttccctgtatacatgtgcgaaaagaacttgaaacctacaacaactgaatccaaacagattgaattggtttgtctaggtatcaactcacacccaactgtccactattgggctcaacaagctgaaaaacgtgtcattactgaagttatggacttagaaaagactgaaacctcaacttacgacaatccagctagatgtgtagctgaatcagttcgaggaatctaataacttcgtcctctttctgttcactgttagtcccataagacaaacgtaaaacatttacaaatttataaatattactgtaaagttgttctgaaaaggcattttacaaaaaaacaaatcttaatctaaaaaataattatgattaaataaagtaattaacagattacattaaaaaaaaaaaaaaaaaaaaaaaaaaaaaa

SEQ ID NO: 123034 - DNA, 153 bp, Glycine max
  Clone ID: PAT_MRT3847_82106C.1
accatacgtaagctcttattcgctctagattttcatacactttggggattaacttctggaggctattttacttaggggcgtagtcctactatcctattattacttcctttaatcttatttttctaacatagtatttataaccctctacttatt

SEQ ID NO: 123035 - DNA, 190 bp, Glycine max
  Clone ID: PAT_MRT3847_82107C.1
atttagagggtgagaaagattcatatagaattatgaatatacttgattgtatgctaattaaaaggattaattctataaacatattgatgcaactttagacccaaaatccccctaaatatgatactctattatgtatctggaaaatgatcattaaacattccaaattgaaaatagatcctctatgataaat

SEQ ID NO: 123036 - DNA, 839 bp, Glycine max
  Clone ID: PAT_MRT3847_82108C.1
tgggaacattggtgacagtggctggggccatgttgatgaccttgtacaaaggtcctatggtttggaccaaagatgcacctcataatgggcaaatcaataatgcaacaaataccacaacatattcagacaaggattggttcataggctctatcctcctaatcattgccactcttgcctgggcatccctctttgttttacaagccaaagccattgaaacctacaaaaatcaccagctaagcctcacatcacttatctgcttcataggcactcttcaagctattgcagttacttttgttatggaacacaagccatccgtgtggacaattggctgggatatgaacttacttgccgctgcctatgctgggattgttacatcaagcataacatactatgtccaaggattggtaattaagaagaaagggcctgttttcgcaactgcatttagccctctgatgatgatcattgtagccatcatgggctcctttatcctttcagagcagctttttcttggaggtgttcttggtgctatcttgatcgttataggcttatactcagttctttggggaaagcacaaagaacaagtggtgaagaacgaggtagaggatatacccttgcctgtaaagggtgctcaacttgatggaaacccagaaacacttattgattccactgatcagaaatctgattccaacaagatctcttcacatataattaatgtgtctatccctgagcttcccatgaaatctaataacagttaaccaaagaagaagaaaaaatcagcaaattgaaatgtgaatagggatggccttttgttgtgctctcacctagtttcaatataaaaa

SEQ ID NO: 123037 - DNA, 414 bp, Glycine max
  Clone ID: PAT_MRT3847_82109C.1
tacttggtgcaggctggacaaacctcactagtgataattgttccccaatccgggtcttttgcaaacattcagctgataagattttgaaagtgggaatagtagactgaggccacctaaatgaaaattgtgaaaagggtgtcaggtgcatttatcaaatacatttttataatgatatattacttagtttcaaaaacattactaaggcatacaaggacaacaacattcaggaccaccttatatcaaacgtataaagtcaactgctgcaaaacgcatttcttgcaactataattttctcagcaccccaaaccacaccaaaataaagataacttaaaactttatacacaaattaaacatgtataaaaattatgatacaggcgtagctttgtatttggtctacaatacagaaaattcaag

SEQ ID NO: 123038 - DNA, 308 bp, Glycine max
  Clone ID: PAT_MRT3847_8210C.1
ggttcaattgtgtcagtgaatgttgttgtaagtcgttcgtcgtcttttgttgttctgtgtctgtgtctggatcttcacggttctgaaattctcttgctgtagtggtcactgtggtctcgtaatcatctgtatattcggcaacggctgccgatgctgcagagatgtaccctcacattagcgatactgattcgactgccatcgagacagtggtcatactagtggcatgagttactgctcaatttgacggtgctgatatggatgtaccctcatagatctatgacttctatatggacgaaactgctcctgca

SEQ ID NO: 123039 - DNA, 456 bp, Glycine max
  Clone ID: PAT_MRT3847_82110C.1
gagctatatgccggagccattagagaagtgaaggaagaaactggagtaaggctgcgatatatttctctggtgttaccagatattgaatttattcatgttgtataatatagtattattacgtaaagtcagttttcttttattgcttgttgtctatgttgcagattgatactgaatttgttgaagtcatagcattcaggcatgcacgtaatgtggcatttgagaagtcagatttgttcttcatctgcatgttaagacccctgtcagctgagatcattgttgatgatcctgaaatagaagctgcaaaggttagatagtcttactcaattacaaatgaaagaaataataacgaccaattaagatcaagtaactattcattccctttctctcaatctccgtattgaagataaattacacgtacactatgagaaatattagtgcattgcataaaatgaatag

SEQ ID NO: 123040 - DNA, 256 bp, Glycine max
  Clone ID: PAT_MRT3847_82111C.1
caaacagtgtcctggatgatcacatttcttcttatgagattagctctagtagggagtctatctttaagaagcctccaagtgaaaactgcagcttttgggggaattttcaatttccatagtaatgttgaggttctcacttaggggctggagtagggggggttatcaataatttgtaggctgactttgtggaatagttctctgtacttttcgttctcgatgtatttgtagcaacttgtttcaaagaatttagttatcc

SEQ ID NO: 123041 - DNA, 1960 bp, Glycine max
  Clone ID: PAT_MRT3847_82112C.1
ggaaaaaacagagagagagagagacagtgatgactgaatgaaaaaaaaaaaatgaatctcgtataagtaagtcatagatatctttctcagaacttcagctctctctctctctttctctctctggaacttcttctctcctcaacgctggttccagagaaacccaaaacaaaactgcgtcctctttaaaacgcaccatcaatacaaagaaagaaagttttcaaaacgcaaaagccaagaaccaaaacaagaagaacaatgccattttttttctagcacccttttgtttccttccaccaagaaccggttttgccaccgacccatttctccaaatgcttcccctccgcctaagcgccgtcgtttcctcactcattctctgcttcctcttcccgccactgctctgcctcggaatccgctcttttcccaccaccgcagacgacggcgcgttcttccactattcagaagcgccggagtaccgaaacggagcgggttgccccgtttcgtcaacccgtgtttccctcccttcatgggacccttctctggtccacatcgccatgaccctcgactccggctacctccgcggctccatcgccgccgtgaactccgtcctccgccactcctcgtgcccggaaaacgtcttcttccacttcatcgccgccgagttcgacccggctagcccgcgggtcctgacccgactcgtcggctccattttcccctctctgaacttcaaagtttacatctttagagaagacactgtaataaacctaatctcttcttcaatccgacaagccctagaaaaccccttgaactacgcgcgcaactacctcggcgacatgctcgacgcgtgcgtgtcccgcgtgatctacctcgactccgacgtcgtcgttgtcgacgacgttggcaagctctggcgcgccccaatcacgcgcgagcgcgtgatcgccgcgccagagtactgtcacgcgaacttcaccaagtacttcaccgacgagttctggaacgaccctctactctcgcgcgtgttcagcacgcgcaagccgtgctatttcaacaccggggtgatggtgatggatttggcgaagtggagggaggggaactacaggaggaaaattgagaactggatggagttgcagaggaagaagaggatttatgaattgggttctttgccaccctttttgcttgtgtttggtgggaacgttgaagcgattgatcataggtggaaccagcatgggcttggtggggataatcttaatggggtgtgtaggtctttgcaccctggtcctgtgagtttgcttcattggagtgggaaagggaaaccttgggttaggcttgatgagaagaagccttgtcccttggatagtctttgggagccttatgatttgtataaacaggtgaaggatagagtcagagatcagaattggggcttctcttcttctattttggttggctatgctcatgacttgttataatgatgatggtggattctttggtacatttgttgttgcagagattctttgttagcagtgtacagtacacagattgggtagaagagtgattgaattggggttcttcattattctttctgtagagtttttttttttgttaaggtgtttaaattcttgtgatttacagaatatggaatatggattcttttttgtttttctgctgctgggggggttccatctcttggaacgattttggtgggttggttgagttcttttgtatgggaccattggttgtaatgtggcaacaaacaaagtgcagaataacagatagttgtttcaattgttttaaatggattaggtttctatcatccctttgtttcctttcttaccagtgactattgcacattcaatgatgtagtgaggtcaccattagacattgaatgatgaagtgagagggtctttgtttgtttttaaaaaaaagaaaactaaccagagactacttctctctctctctctcc

SEQ ID NO: 123042 - DNA, 320 bp, Glycine max
  Clone ID: PAT_MRT3847_82113C.1
caatggtgaattaatgaatcagccaaaagtgtttgagtttagactcattgtaacttgacagttgcattccctttttttccattgataatttgcttagttttaggttcaaatcttcattgtagcaaaacctcacataccctcttctattttcccgtaaaatatataatgacatcagcacaattcaataacctgagaggaaaattagagaaccaaagcatggttagcaatttgttttaacaattgttatgtgaatgtgattaagggcattgaaagagatacaagacttttttaagtccttaactggtaagtgagtcatgata

SEQ ID NO: 123043 - DNA, 363 bp, Glycine max
  unsure (1)..(363): unsure at all n locations
  Clone ID: PAT_MRT3847_82114C.1
gctgcaatcgtgtgccagtcgtcaagaatacacagacttatgttggcatccccaaaacctcctcctcaacaacccttcaaatcttgcttatgggaaaacaattacagttacaaacccgacagcacaacagcttgttcctccattgaagctctttcaagtactgtgagcaactatgaggctgaggtgtcgctgctgcgactcagccccaagagtttggagctctgcactgagaacctaaggaatgagacagacagagatgacatcataactganactggcattgagttgctctcttcttcttcttcttcttcnacaagggaaccagaaaagtaggaaagcgcgtgaagcagctcggagttttcc

SEQ ID NO: 123044 - DNA, 260 bp, Glycine max
  Clone ID: PAT_MRT3847_82115C.1
gtttcataatattagttcaattagggttagcaaatggggcattttagtgatttttattggtttcactttctgtatgccagacccagatgtattttagtggcttgaagcatcaagaataataaaatcttcgctcatagaagaaaaaaaattgatatttaataagattatagtaggttaggctttggtcagacggagggttcgtagctttcccaaatccatgcatctttcgtatcagctgttacttatctgggtctggttgg

SEQ ID NO: 123045 - DNA, 416 bp, Glycine max
  Clone ID: PAT_MRT3847_82116C.1
ctcagacgatgcatataccgtgggatgaagctgggtgtttatgccttgtgggtgacttgtttaattatgatgcacctggaatggagccatctggcattgaggatttagagcattttctatctaactcttccatccatgatactagcttattaaatggagataataatataatggtagatgcagaccaccttgattctcactcagagattaacagatggttggtttgaggaagatgttaatgcatattgcttttattctagggcacattacaagaaaggagatcaggttctattatgctatggaatttacacaaatttggagcttgttgaacactatggatttctcctacaagaaaatccaaatgacaaagtttttatccctttggaacctgctgtatattcttccacttcatggtc

SEQ ID NO: 123046 - DNA, 1227 bp, Glycine max
  Clone ID: PAT_MRT3847_82117C.1
aattcggctcgagctgatttgaagagaggaatgttctctcaacaagaggaggatcttataattagtcttcatgaagttctaggaaataggtgggctcaaattgcagctcaattaccagggagaacagataatgagattaagaacttttggaattcatgtttgaagaagaagctaatgaagcaagggattgaccctgcaacacacaagcctctcctcagtgctcaagaacacataattataaaggaagagaaggaaaccattttggagacaccaccacctatgttattaccaatgtctcaagggattttagcttcctcacaagagtcaccacttgtagtgaacaattcaagttactgtgatggtggattaaatgtaacagaagctgcttcaagggaagttttcatgagcaagaatgctgctttagaccctttgtcctactttgaattccaaatgggttacaacccaataagacaatttgatcagaaccatgtggggaccaactcaagctatggattctcctcattgccgtgtctgaatagttcttctgatcacgggaacgtgtcggtggcggcggagttttcagataacaactcagcttcaaaaatcagttctttgatgaaggaaagttccagcaatagctcaagtatgagtgtttatccagctgggggagggtgtcaaatgatggaaaatgcagggttctcatgggatggtgagaacaataatactaagatcgatcctttgttacagttccatgtcaatgtgctaaaatctgaagagttcaagacaagttcgtggcaagaagagcagattctgactcagaatttgatagatttcactaactatccgttaatgtcactgtctgaggatctaaccggagcaaattttgatgtgttccagcagatgtgagctgtaaaaaattctcattttcttcttcttattattctgagttgaattttttgaactcttttctttctttctcttgttgaaagttgaaacgaccaagatagaaaacaataggaagatgttgataacaggaaaaattgtagcaaaagatttgagaattgatgagatgatgatctccccccactcccctccggatatctttgtttttcctgttgatgtatctgttttcatcagcagaagtttggatgacgattattgctgattaatgagtgaagctaaattttttttgtgatcctgcacaaaaaaaaaataaaaaaaataaac

SEQ ID NO: 123047 - DNA, 467 bp, Glycine max
  unsure (1)..(467): unsure at all n locations
  Clone ID: PAT_MRT3847_82118C.1
ccgcgtcgaagctggatttgtgagcggccgcctttttttcctttttttctgtnnttcntcgcttnnntnntgtcgctgggaagtctctatactatttttttcctangcgtcctaacgacactcgttcttagtgctgctcaggatttcgctagacttcgnntgtggtcctgtgggggggtaccttccttcgtcttcctgttaatcatatggaatttggatatttgctgcctcccgatgaggggaatgtctgcttacgtgccagcgagagcgcaccttatgctctccgggacggtnnggagatgtccaagtgttgcggggggccagaggtgcgttccctgtttacccctgtagagtggtggtggcttcctgcggctcacagtccctatttcctgcgggggcttctccgggttcgttcccgtcgcctcgtgacgtgtggggaggtggggcccctcttttctgctcgcgat

SEQ ID NO: 123048 - DNA, 402 bp, Glycine max
  Clone ID: PAT_MRT3847_82119C.1
ccggcccaaacccggcgcccacgcgccttctgcagccagaagaccacagaaggggagagggcataatagacagttggtaggttaacccccaaggaaaacgtcgtctaaggtcactagagccacgcgtcgcccagcagacaaatacctctacttaaccttcacatatgcaggcggactcggccctgcaccttcctctatcactccaatcaaaactcaacatggggcttcggaagaggagaagctggacgcggaggaaacccgagacggtaatggcgaagaagaaagcccgacgagaagaacacttgtggctcacacggattatatctacacgcagaagcacaaaccatgagaaacccaaacaaagccggctcccatatcaaacccaggccaaaagccccaccc

SEQ ID NO: 123049 - DNA, 1253 bp, Glycine max
  Clone ID: PAT_MRT3847_8211C.1
ttcccgggtttacttacgcgtcctttatgattgcctcgacgaggaggattcctttggggaagtttttttaagtgcttttctctttgtcgccgagggtttggactatatggaaagaattcctcttgctacatctgagggttttcctcatgtgctttcacgcaaaaatggtgaaaaaggcaaaaggagatttgtttctggggatggtgaagagatgacattgattccgggaaccagtgttgaagaggcttacaacaagctaatagttgaacttgagaaaagtgttcctacattggttggcattgaatgtcccaaggatgagaaacttcctcgtcgcaaaatttttgacaaacctaagacgcgctgcttcactattctccctatggagtttaatcttgtggtccgtcagaagtttttaaattttgtgaggttcattatgaagaaaagggacaagcttagttgtcaagttggaatcaacccatactccatggaatggactggtttggccaatagattactgagtaagggcaacgatattctgtgttgcgattatgctagttttgatggcttgattaccaagcaagttatgagcaagatggcagaaatgataaacagtctttgtggtggtgatgaaaaattgatgcgtgaaaggacacacctgctgttgggcttgttgttcaaggatggcaatttgtaagaaagatgtttggagagttgaatgtggaatcccttctggatttccgctcacagcgtatttgcaatagcatttttaatgagatgctcattagatatagctatgaaaaattactgcgccaggctaaagctccaagtatgtttctacaatccttcaaaaattttgtttctttgtgtgtgtatggtgatgataacttaattagtgttcatgaatatgtcaagccttactttagtggttctaaattgaaaagctttctagctggtcataatatcaccattactgatggtattgacaaaactagtgcgactttggcaatgacatggatattcaagggccaatatgttcctagaaattcagaaccaaagtgtgtggatttaaccaactatactgcagtctaggaaggcttttagtctcatctagaatatgatattaattatagcttgattatgctccgcaggtataatggagagtctggtctttctcaacctggtagtgaattactctccatgattgaagaggttgtgtaatgttacatgcctacattcctcatcttagtcggttt

SEQ ID NO: 123050 - DNA, 452 bp, Glycine max
  Clone ID: PAT_MRT3847_82120C.1
ctgaaaacaatcccgcttggattttcgtgactccctcgaacgcaatacctaataatacaatatacctcgatctgaaaacaatctcgttccccctcaccacgcaaaaccccgtcgttcccttcattgcgccaaccgtggttctcagcaacaccgccagccgctctagaggtgatgaaaaggattgctgaagaggtgatgtcacagaaccatgagaaggcatctgttcaacgaaaaaaaagggaaaagtacagttgaagagatcgaaatataatgaaaaagttactggttgaccgtggtgcaattagatttgtcttggcgggtgcaaacataatgtgtcccggtcttacatcctctgggggtgtttaggatgaagatgtaagggcaaaatgccctgtggccatcatggctaaaggaaaacagcattctcttgctattggctttacaaaaatgtc

SEQ ID NO: 123051 - DNA, 198 bp, Glycine max
  unsure (1)..(198): unsure at all n locations
  Clone ID: PAT_MRT3847_82121C.1
ggtaacaagctgctggagatatgcacaaaatgtgacgacgtgtaaccgataatagattataatcgtctgctatcagacgaaaattgctttaatattgtgtgatcnataataactgatcgctgcgaccggggatacaacgtcaatggtggttaaactatgttcgtcccgctcaaaacacttattgagcaaatacccatt

SEQ ID NO: 123052 - DNA, 210 bp, Glycine max
  Clone ID: PAT_MRT3847_82122C.1
tttttaataccactcaaaccaagggagggattaaaaattgagagctgtgggaaaaataataattataaaccaagggcacacaaaaaacttttgaaaatttttcattcttccataaacctactatttaaagagcattatcacatgtttttcaaagtccatggatctcccaaatattccatattgggaaatacaaaaaactttcaacatttt

SEQ ID NO: 123053 - DNA, 466 bp, Glycine max
  Clone ID: PAT_MRT3847_82123C.1
ctactcgtgcgctaggcgtaggaatataccaagtgcttcctcctaatcggtggccgattgcttaagggaaagaaaatcactctctgtgctggccacagactgcgtgaatcatgtactgttccactctcagtttattggctgaacactctgctattggatataggactccgtgtcagatttaaactttttctgtgtcttcctcagttatctgctgaatttcaagttcaagctggtgcaatcttggatgagtgctcccactctcctatctggcataggacttgaggggtagactactctatgtcagtcctatatttcactcgcgacttctcactgagccgcatggcacgccaaagtgtgcttatttgaaaaacactagggcgttggtacaaatgtcagcttcgatatattcgatggggacaacaggctcactgagaaaacaagctttacttgcagagacttggacatc

SEQ ID NO: 123054 - DNA, 1874 bp, Glycine max
  Clone ID: PAT_MRT3847_82124C.1
gtggctcgagacttacttgaagttgtgctattcaatcccaaagccacagaaataatattattcagattttagagactgaaaacatcatggccaacctcgacctcgacccattccagacaagcatcttaatcctcgtcccaatagcactcctggtggcgttactatctcgtactcgtcgaagagcaccctacccaccaggcccaaagggtttaccaatcataggaaacatgttaatgatggagcagctaacccaccgcggcctcgccaacctggccaaacactacggcggcatcttccacctccgcatggggttcctccacatggtcgccatctccgaccccgtcgccgcgcgtcaggttctccaagtccaagacaacatcttctccaaccgcccagccaccatcgccatcagctaccttacctacgaccgcgccgacatggcttttgcccactacggccccttctggcgccagatgcggaaactctgcgtcatgaagctcttcagccgcaagcgcgccgagtcctggcagtcagtccgcgatgaggtcgactccgccgttcgcgccgtcgccagcagcgtcggaaagcccgtcaacattggagaattagtgtttaacctcaccaagaacatcatctaccgcgccgcgttcgggtcgagttcccaagaaggccaggacgagttcattaaaatactgcaggagttctccaagctctttggcgcgtttaatattgcggattttataccctatctcgggtgcgtggatccacaaggtttgaactcgagactcgctagggcacgtggcgcgctcgatagcttcattgataagatcatcgacgagcacgtgcataagatgaagaatgataagagcagtgaaattgttgatggagaaacggacatggtggatgagttgctggcgttctacagcgaggaggcgaagttgaacaatgaatcggacgatttgcagaactctatcagactcactaaggataacatcaaggctatcattatggacgtgatgttcggaggcacggaaacggtagcgtcagcgatcgagtgggccatggcggagctcatgagaagcccagaagatcaaaagcgggtccaacaagagctggcggatgtagtgggcctggaccgtcgggccgaagagtccgatttcgagaaactcacttatctcaaatgtgccctcaaagagaccctccgcctccaccctccgatcccgctcctcctccacgagacggcggaggacgcgacggtcggcggttacctcgtccccaagaaggcgcgtgtcatgatcaacgcgtgggccattgggagggacaagaacagctgggaggaacccgagagtttcaagcccgcccggtttcttaaaccgggcgtgcccgatttcaaagggagcaacttcgagttcattccattcgggtcgggtcgcagatcctgccccgggatggtgttggggctctacgcgcttgaattggcggtggcgcacctccttcactgcttcacgtgggaattgccagatgggatgaagccaagtgagatggacatgggtgacgtgttcggactcaccgctccaaggtccacgcgactcattgctgtgccaaccaagcgcgtggtgtgccctctcttttaaaaaaacaacaatttgaatcttttttcttccttttttttgtattttctttttatccctcaattatacataatcatattaaaataatataaagggaaaaaaggcagctacacaataagaatgtgagagtatttggaagaaaaaaaaattgtaaacaatcaattatatgtattttgttatttttgccccatttccgttttgattcttatatacgagtagagtaatgatggagtcattcttttt

SEQ ID NO: 123055 - DNA, 697 bp, Glycine max
  unsure (1)..(697): unsure at all n locations
  Clone ID: PAT_MRT3847_82125C.1
tcgggtcgaagagtccgatttcgagaaactcacttatctcaaatgtgccctcaaagagaccntccgcctccaccctcngataccgctcctcctccacgagacggcggaggacgccaccgtcggcggctacttcgtccccaggaaggcgcgtgttatgatcaacgcgtgggccattgggagggacaagaattcctgggaggaacccgaaacttttaagcccgcccggttccttaaaccgggcgtgcccgatttcaaggggagcaacttcgagttcattccattcgggtcgggtcgaagatcctgccccggaatggtgttggggctctacgcgcttgaattggcggtggctcatcttcttcactgcttcacgtgggaattgccagatggaatgaaaccaagtgagatggacatgggtgacgtgttcggactcaccgctccaaggtccacgcgactcattgctgtaccaaccaagcgcgtggtgtgccctctcttttaaaaataaaaaaaaaacacttggatctttctttttttcctctttgtattttctttttatcccttaattatacataatcataataaatgatataaagggaaaaaagggaggtgcgcaataagaatgtgggagtatttggaagaaaaaaatttgtaaaactcttcttgatcattgatgtgagcttttgtgcagaaacaattaatt

SEQ ID NO: 123056 - DNA, 361 bp, Glycine max
  Clone ID: PAT_MRT3847_82126C.1
cggagattgggttttggtcaaacttagaccacaccgccaaggctcagcttcggaaaccacatattctaagctcactaagcgctactatggccccttcgaggtgcaggaacggttgggtaaggtcgtgtatcgactaaagctcactgcccacagtcgcattcatcccgtcttccacgtatcattgctcaaggccttcgtgggagaccctgaaacaactcacgcgggtcccctacctgtcatgatgactgaagaatccaccaacactcctttgacggtcattgacttcaagctggttcccgccgataatgggcctcgacgtatggtgttggtgcagtggccaagtgcttcccgacaggatgcg

SEQ ID NO: 123057 - DNA, 328 bp, Glycine max
  Clone ID: PAT_MRT3847_82127C.1
gaagagctctaccttgttcgctctctttctactttctgccatcttcacctcatacctaccttctacaaccgctaatatcatactcaacacaaatagtgatgttcttcaaaatggtaaccaatattctatattaccaatcataagaagaagtaatggtaaactattattacatacaactaaaaataaaaaataccctctcactattacgcaaactcgcaataagctcaatagaagaattagaacaattatttcatccccattacgaatcgctattatcgccgagaaccatcctttaagcattgcgttcaatttttttccagttatacca

SEQ ID NO: 123058 - DNA, 221 bp, Glycine max
  Clone ID: PAT_MRT3847_82128C.1
ctcggacatttggctagagttctactttcaaggaggagcattctggatgcgataacggtatagaagtaggcgttcaaatcattagtctaaccatcgggacatgagtgatgatgatggctcgcactactgtagatgaacacagggagagagttcctgatcgggacaggggtcgagatcatggatcggtacaggtgacaacttctcatctaagaggcttttgg

SEQ ID NO: 123059 - DNA, 522 bp, Glycine max
  Clone ID: PAT_MRT3847_82129C.1
cccttcctcctctgcccataattgtaagaagaagaagaagaagcccatacctgttttgttttgcattgatcaatgccaccttcatccatttctgtttttcattttcattctcattctcatttcattttattaattgaatcacatttctctcgacttttatgctaactactgagttccctcttacccataaactttcagtagccaaaattttaacttttctataatcatcgaatccaagagcttttttagcaattcgctgacacccatttagtttcactcccgaattcatatattccttacagcaacaaggaaaagatgggcgagggagagaaatttcagctgggaactgttggcgcattgagtatgtctgtggtgtcgtcagtgtcgattgtgatttgcaataaggcgttgatgagctcactgcatttcatttttgctacaactttgacaagttggcatcttcttgtaacattttgttcccttcatgtggcactaaagttgagactttttgagcacaaacct

SEQ ID NO: 123060 - DNA, 4025 bp, Glycine max
  Clone ID: PAT_MRT3847_8212C.1
gtttgattgttttgatgaggaggattcctttgaggaagtttctttaagtgcagcacttaatggtgttgagggtttggactatatggaaagaatttctcttgccacatgtgagggttttactcatgtgctttcacgcaaaaatggtgaaaaaggctaaaggagatttgtttctggggatggttaatagatgacattgattccgggaaccagtgttcaagagtcttacaacaagctaattgttgcacttgagaaaagtgttcctacattggctggcattggatgtgccaaggatgagaaacttgctcgacgcaaaatttttgacaaacctaagacgcgctgcttcactattcttcctatggagttcaatcttgtggtccgtcagaagatattaaattttgtgagggtcattatgaagaaaagggacaagcttagttgtcaaggtggaatgaacccatactccatggaatggactggtttggccaatagattactgagtaagggcaatgatattctgtgttgccatcttgctcataacttgcttggtaatcaaaccatcaaaactagcataatggcagaaatgataaacagtctttgtggtggtgatgaaaaattgatgcctgaaaggacccacctgctggtggcctggtggtcaaaggttggcatttggaaaaaaaaatgttggaaaagtggattgtgaaatcccttctgaatttccgctcacagttatttgcattagcatttttaatgagatgctcattagatatagctatgaaaaattactgcgccaggctaaagctccaagtatgtttttacaatccttcaaaaattttgtttctttgtgtgcgtatggtgatgataacttaattagtgttcaggaatatgtcaagccttactttagcggttctaacttgaaaagctttctagctagtcactaacatcaccattactgatggtattgacaaaactactgcaactttgcaatttataaagttagcatattgtgattttctcaagagaaactttaagcagatgtctaatgatttgcgggcggctactgaggacaaggcgatgcttatggtcacaacttcattatgtttcatgtacataatctggaaatgcaggagggttatcttgtcaatctcgtaaatgagttacgagaaatgtatttgcacagtccaaaggaagctcgccgattgagaaggaaagctctctttcgtattgaatggctgcaaaaagctgatgtgcctaccatagcacagattgaagagttccattcgatgcagaggatgatgaatgctcctgattcaaatgataatattgatctactgttgagcattgatttgttgggtttacaaggagcaggtaaagcttttccaaacaagattgtttttgatgataagcttgtgttggctaacacacaagaattctttgatggaaattttccagtggattcttggttaccaatttttgtgaattgtctttatcctataagtcaattaccttcagaagctgtcgttgtaaatgttacatgtggtagtggacgtgggtggtttacccaccactgcttggattagttctgcagttaacaatctctcctcagatatcaacaaaaggattcgcacagcacttgggaaaggtaagaaaattgtttttcttactacagttgatccttttcccagtagctttactggctgttctttttggcgttaagaatgaaattctgagttctaacgcggctaatcctatgctgacgcgacttcttgagaactgtaagagtctcaaatatctggttgatgagtgtccttttgcatttgtgaactagtatgtagtattttattcacttaaataaagcgcattactatgtgcaatgagtgtgctttcatgtgaatcacaacttacagatttacctttagactccaacaacacccccttctcgcgttgtctccaaagcacgccaaattacccacacgcaaacgacaacaaccgcgcgcgtttcacacctccataactcggagtagcatacgcagcgtcgttgactcgcaactcgtaacttggcctcgcgcgccgatggcgtcggtccccagcaccgtcgctccccgcaccttcctgccgtcgattcccaagccgagagctcctcttcacgccgcgaaatccgtcgccagcgccgcgcgcaactttccgagactttcgcacaacctcattctctccggaaacaaacgcgcggtggcggtgaactcggcggcggaggagttcgacgtgatatcggtgcagagcgaggacattaccgaccagcaggagggcgtggtggtgagccgcgtcgagatggaaggtggagacggcgaattggcgacgcaggtgagcggattcggcgcgaacgagggtttgctgtcgttggaagggttttcttcttcgtcttcgtcgtcgtcttcgtctctgatcgggagtgagagcgtggacatggagaagctaattgatagaactatcaatgctacgattgtgctcgccgctggcactttcgccgtcaccaaacttctcacgattgatagcgattactggcatggatggacgctatacgagatactaagatatgcgcctcagcataactggtctgcttatgaggaagctcttaagacaaatcctgttcttgccaagatgatgattagtgggattgtttactccttaggggactggattgcacagtgctttgaaggaaaacctctgtttgagtttgaccgtgcacggatgttcagatcagggcttgttggttttactcttcatggttctctttctcatttctattatcagttttgcgaggggctatttccttacaaagaatggtgggtagtacctgccaaagttgccttcgatcaaactgcatggtctgcactttggaacagcatatattatactgttgttgcattactgcgtcttgatcctcctatgagtattttaaatgaattgaaggcaacgtttttccccatgttgacggccggatggaagctatggccatttgcccatctcattacttatggtgtgataccggttgaacaaagactcctctgggtggataccattgagcttatttgggtgaccatactttccacgtatgtctatctggatttattttgaaacacatattagaatttgaacattaataacttcatagttggatgaaattaagattgggtgaacttactatgcatgttgccttcagaattgattctgttgcaaattttatcgaaattaagattggcctttacgtttcattttgtcttttgccgtttgcttttgacttttgagagataaattctatttagctggttccctctagtagaaattttgcataatgaaaagctaaacctgcctgctgcacattgttctctttggaaatacataagatggctctaacattatattgtatcgagaatactttaatttattcttgttttttttttctggaggaagggaagggggggagattttgtattactgttaattagcaaattcacctgattctgtcaatgcttgttcagggaatgccgaggctgattaattttaattttagcagtctaaaacaataaaacatttccagcttctcttgcatgattattcatgtttcaaaattttgtattggttctaacgtaggcttttgtgatcattagattttcaaatgaaaaatcagaagcaagaaactctcagtctatggtgccttcagaggtgaaatccaccacatatgttcatcctcctgaggagtaacgagtggagatatgaccagaagcagtgggagaaaaatgactttgctaaatcaaattttgtccttgatatggacatagatttttgatgcggaatgtgaaaaagctaattatatatacgttgcatcccgcggaaattcatgtatgttaggtaacatcaactttccagtaaacagtacacataatgtaattaaatttaatgagtaaataatttatgtcccaaaaaaaaaaaaaaaaaaaaaaaaaaaaaaaaaaaaaaaaaaaaaaaaaaaa

SEQ ID NO: 123061 - DNA, 1027 bp, Glycine max
  Clone ID: PAT_MRT3847_82130C.1
ggagaggcttggctccaccttggtggcccacaggggcagagaattggtggggtgaacaaggccttctggcccatgaacatggcccacctccttataagaagccccatgacctcaaaaaggcttggaaagtgtctctcttggctgcagtcatcaaacacatgtctcctgatttgtataaacttagaaggtcggtgactcagtccaagactttgcaagataagatgacaaccagggacacggcaacttggtccaaggtcatgaaccaggaagaaactctgctgcaactggccaacaagtgcctcaaaatatctccatcagaggaagatgataaaaatgagtgtgaaagctctactagtagcagtactatcatccatgaagggagtcatttaggtggcagcattgagaaaaggaagagtgatttggtgtttgacttagatgctgttattgataagctatatgcccgtgcactatgcttgccaatactatcagtgtccacaaagtgaaatgggtatgggatttcttgacaaaaacacaagaatgaaccatgagtccctctgtgcttaccggactaatgaaggccaacgcgttctccttcaggattctctatccaatgacacacaaaatgagaataataaccttgttggccatctgattaatgatgagtttagagacattgcaggaaagacatcagaagaagattatggaggcttatggccaaattcccttgaagatcttgatttgcaagctgcactgaatcagatggacatggacttgaatccaaatccagagcaagatacaccacatggccaagacgtaacctcaatttgggacttagcctacaaatattaagttcctcgccccatgcttggatcaattgtgcactgctatgtttatactaattaattatagattaattatttaaatattaattaataaagtactgtctcctgatgtaatacaagatagcctttagctccgtacaaatactataagtatttcttcttaatttcatgtttggctcacaatt

SEQ ID NO: 123062 - DNA, 1211 bp, Glycine max
  Clone ID: PAT_MRT3847_82131C.1
ccacgccgtccgcaaaatgcaccaggcgccattgcgaaatacatgccactccttgaaacagatgagttggatccaagttcctacatacatctccttaatgacttgcaagactactctgagttcactactttctgctctgatgcaacattgcatacctccccaaagaagattccctcttgagagaggcttggctccaccttggtggcccagaggggcagagaattggtggggtgaacaaggctttctggcccatgaacatggcccacctccttataagaagccccatgacctcaaaaaggcttggaaagtgtctctcttggctgcaatcatcaaacacatgtctcctaatttggacaaacttagaagattggtgactcagtccaagactttgcaagataagatgacagccagggacacagcaacttggtccaaggtcatgaaccaagaagaaacactgctgcaattggccaataaatgcctcagaatatctccatcatcagaggaagatgaaaacgagtgcgaaagctccactgctagtaataatcatccatgcttaaggcaacattattgagaaaaggaagagtgacctgtttgacttagatgctgttgttgataagctatatgcttgtcaatactatcagtgtccacaaagtttaacgggtatgggatttcttaacaaaaactcaaggatgaaccatgagtccctctgtgcttaccgcactaatgaaagccaatctgttctccttcaggattctcagtccaatgacacacaaattgcaagtgtggatgattggatgatgaacttggaggcagcaagagctaaccagaatgagaataaccaccctgttggccatccgattaacgatcagtttagagatattgcaggaaagacatcagaagaagattatggatgcttatggccaaagtcccttgaagatcttgatttgcaagctgcactgaatcagatggacatggacttgaatccaaatccagagcaagatacaccacagggccaagaagtaacctcaatttgggacttaccctacaaataataagttcctcgccccaagcttggatcgattctgcactgctactgctatgtctatactaattaattatttaaatattaattaataaggcaatgtctcctgatgtaatacaagatagcctttagcttcgtacaagttctataagcatttcttcttaagttc

SEQ ID NO: 123063 - DNA, 532 bp, Glycine max
  unsure (1)..(532): unsure at all n locations
  Clone ID: PAT_MRT3847_82132C.1
gcaattctgtaggatttactgnnttggggggtnnngttatatatgctataggtctgtaaatcataaccatctgtaacataaaaaaaaaacactaannagttttggtttaaacttttggtccatannnnnacatatcatattgcacaattttgccctacaaataagccgagatcaacaacatttatccgagnacgagtcttttttttcaaatgacacgggcatctattccactaaacaaatgacctttttaagcttgaccatatatatgattatcttacacgtcgttacgtgtaatacgtgcctcttccccctcaacacaccatctgatggaggctgaacttgatcatcctcctgaagcggatcctccacgtacccattgnnacaatcattctaaagaacctggcnnctcctaacctgtggcttntatggatctntcacagaagcatacttgccctctttcaatttcatgnncaattcctcaatacacttcacaatcccccacatattacacgtgctcaaattaatcagcgcc

SEQ ID NO: 123064 - DNA, 366 bp, Glycine max
  Clone ID: PAT_MRT3847_82133C.1
gttcgcagaggcacgtgcaagaatgagtggaggagccattacttctaagcagccggacgctcagcaaagtttagagagctaactttacgatacctttattttctgttgaagcatatggtagcacagctcttctcgtaatcttcccgatgcgatgttaatttagctcgaatttgcagaagtctccatccacgagtttgctggcttacgtgaaagtgctcgccacttgtgttcttttagtaatccataattgtaagttaaggtaattacatggagttcttctaaatcctcgtcgagttagaatagatgtatcttacttcagttacctgttgtagcgcctacatcagctactactggcgttattttgac

SEQ ID NO: 123065 - DNA, 446 bp, Glycine max
  unsure (1)..(446): unsure at all n locations
  Clone ID: PAT_MRT3847_82134C.1
accggtccggnaattcccggngtcgacccacgcgtccgggtgttcgctaactgcctgctgcgggaggctaatggaaacactgggcgccttgtctgacctacctggttcgcccagttgtgctcccgcttgcaaccaacgcaggtgctttctgactacagaaggaaagggttgctgattctgcacagtttgtgatggccagaaaatgccgagaggactgtggctgatgatagggttcttgcctgtcctcactttgaggcccccttatgttgagtttgcagtgttacacagagcccggagtatgggaactttgcatctcttgaagggataacatggattgctgtgaaagaaagagttagtttgccatatattcgcttaagagcggaacattgataataaggcattgaaaatgctcaatcttaagcctgacaatgtttcaatgtgtcatg

SEQ ID NO: 123066 - DNA, 377 bp, Glycine max
  Clone ID: PAT_MRT3847_82135C.1
cccatgcgttttttcacgcgtttgcggacgcgtgggcattaaccatcgggtctcttcggtgttcctcttcagatcagacgacacaaagacccactctttaaatcaaactcttctcagaaatgcccgtggctgataacattgcccccgcgcaggagggttccttggaaagtgtaacggaatacaaaactgtgtctggagttgctggtccactggctatttttgatcaagttactgaacctaagtgggatgagaccggaaatatttgctggccagactgatctactcggggtgaaccagagctagaagttgacggtgaataggcagatgttcctgtcttcgagggcacatctaggattgtcaaaaaaactaaaactggg

SEQ ID NO: 123067 - DNA, 337 bp, Glycine max
  Clone ID: PAT_MRT3847_82136C.1
tttccggtgcgcacccacaccgtaacccgatcttctgcaccaatgtgcaatccatacaataacactggtcctgcagcaatgcaatggtgtcccacaccaatggttgcaattcctggcatgtgcccaccaagcattcctttgcaatttgtaccaccatcatactggagtggcacacaactttggaatgctggaaccgggacagtgtcaataggatccaatgcttgcctttaaaaaaaagaaaaggagggaaaaactaaaaattaaaaaaccatgggggaacacaccataaaggttttgtacgattttgttttttgccgggggaatatcttagaggatc

SEQ ID NO: 123068 - DNA, 582 bp, Glycine max
  Clone ID: PAT_MRT3847_82137C.1
cagtcctcaactaaggccattttttcccacaaaaattatactccaaccaatggaggatttgaaaaaggtcattctgaagacaatatttggtcataagatatgccaatcagcacaagttggtgtgcttgccatgttcaatatgtggtgatgaatgaggtggttggtttggtgcataacgatgatatgatgatgatatacctgctttgaactactgcctaatttaggttctttcattaattttgccatgccatcaattattaaaataagtctctaagttcatttgtatctgactgtcaatgtattttctgtaaggatggcatttgtagcacttttctgtagtcacgagcctttgtctctccagacatgttttttcttctgtcttgtacttccttgatggttgttgaattgatttgatgatcattttatctacaaacctagtaagaaatacgttttaatgtaatattatgtaactgaactgaaaatcctgttcaacaagtaatcatctatcttacattagtatcacatgaaaggctacagaagagaaagagacaataacaatccaatgttaatgcactatgtttt

SEQ ID NO: 123069 - DNA, 275 bp, Glycine max
  unsure (1)..(275): unsure at all n locations
  Clone ID: PAT_MRT3847_82138C.1
ttctacatcatatgcacgtgttaaatccacaggtattttatcaaaattttcaaaattctgtacttttgttatgaaattgctagttactagtttagtncatgtgctgacttctattctgaaatttctggactattatctccatttgtttttttctaaagaatcttttaaagataagattgagtcaatgatcctttcctgaggtatcattgaaatatgcctccaccctctctagtttaaaattatgcaagaacctccaaggttggcaaaatctatcc

SEQ ID NO: 123070 - DNA, 455 bp, Glycine max
  Clone ID: PAT_MRT3847_82139C.1
ttcactcgtccgcccacgcgtccgcccacgcgtccgcccacgcgtccgcccacgcgtccgcttttattgtggtattcatggaaaatgaattgagttcggattattcttgttgattattggtttgtctatgccctcttctgtatatcatctgtgtctgttctgtcctaccaaattgtttgggataaggctggtagatttcattgctgctaattttattgtaattgcttgggtgacgttttacttttatagtttttttttttttgcttctggtgtggactataattgcaggacatcagtggaaatgatgtgagtctgaataattaccagcggaaggctctactgattgtgaaatgtcgcctcacacatgtggtttgacacagacaaattacaaagaattgaatgtattgtacgagaagtacaagaatcaaggatttgaaatcttggcatttccatgc

SEQ ID NO: 123071 - DNA, 3852 bp, Glycine max
  Clone ID: PAT_MRT3847_8213C.1
gtgtattctggctagttcctgtgctttgggattggttgaaaaatgtctcatgtctttaggcatgatttctgaatccgttgatttagttggtttgtttgttcgatcagccattgttggggccttctgtgtttctatcaagacgggcaagtttgtttcaaatagtgagttaatcacatgtgctaccattgcagtttctacaattgcaactgttatgtctcaagctttcaaaccttctgaagaaattaaagggcaattccaggctctttctgttttagagggattggcaacacaactcacttcattttgtgacacatctttgattgccatgggaaaaacttgcacagcattcaatcaaatttgcactgctgggaaaaatgttaaagtgattgctggcagattgttggatgtagtttccaattttgtgaggaaacttttgggattggatagtgcttttcttagagatgcagcgcttattttctctcaagatgttgatggttggctgcgcaatatcagctggtgtcaggaacaattcctactgaaagcatacatgtctcaagatgatcttattgtcttgcgttccttagttgtcaaaggtgaaagaatgagagagcaaatgctggaaggagaggttaaagtgtcccctagtgtttgtaatcttattgtaaaaggttgtgaagaagcaagtaagttgatgagagaaagtgtgctacattgttcaaagactgtacggaaaattccatttgtcatttttgcacacggtgattctcgtgttggaaaatctttgctagttgatagacttatcacagacttttgtgatcatctagaaattggggaggatgctgtttattcaaggaatccttcggatcctttctggagtgggtataggagacaaccaatcgtcactattgatgattttgctgctgttgcatcagagccatctggtgaggctcaattgattccattaatttcaagtgctccatacccattgaacatggcaagtttagaggaaaagggaatgcactttgattcccagatcatgatgtgctcttcaaattttttggaaccttctcctgaagccaaaattagagatgacatggcttttagaaatagaagacatgttttgataacagttgagcttaaacctggagtggagtatgatgagagcgattttaccaaaaatcagcggtatttactcaaaacttggtttcatgatcattatgttgtagaccaaacttttgaatcttatgctgatcttttggcatattgcttcactaaatgggagagacatgtgaaggaacaagagtctaatttgtctcaaattaaaggcaagaaaagtgagagtggccatttcaataattttcaacaacttatggatttggcagtttcatggaatcttagtgcaaatatcatgaaggaacgaatcaaagctgataaaagtgatatggtttatgtcttctctgctggaaggaaggacaaaattgtacattgcttcttgaataaagaaggcgaatgtagtatacgtcctgattcaatagaagatccagaagcacaacttttgctcaaagcttcagaaactatgctcatgaaagcttatgcttttttgaagtacaacaatgcgaccaatttgattgtcaggacccatttggcagaattggtcaatgaagacttttatgatgaaaaattcaattttattggcacaattgggactccagcttttcatcgacaaattgctgcacacttggagaaaatgccattatggcaaaaagcaattttgtgtggaatgggacattgtttgtctcggaaaagcaaagaaacatggtattctgggatgaaggaaaaatttgtacaaatgatgaagagcatctatgaaacagaagttacagattggccagtaccactgaaaatcatttctggaaccattcttgcaacaattttgggaacaaccttctggaaactcttttcctttcttagagatgctggtaatgggggagtttttgttggtaatgttgcttcagcattcacaacttcaagtgtgcttgaggcccaaagtagaaagcccaacagatatgaagtttcccaatacagatatcgcaatgtgccaataaagcgcagagcatgggttgaaggccagatgtctttcgatcagtctgtagtagcaattatgtctaaatgcaaagccagcatgagaatgggaaacactgatgctcaaattttgatggttccagggcgcagattcatagctcatggacattttttcaaaaatctgactcagaaagtgcgagtccaaattgttacatctgaaaagagttactggcatgtgtatgatcctgacaagtttcagatgtttgacaacagtgaaataggtctttattctaatcccactttggaagatatcccacattcagcttgggaccttttttgctgggacagtgagaaaactttgccaaataatttttctgcagaattgctctcttgccaaattggatactgttactggccaatattatcctgagtgggctccaattaattgtcgagttcatcgacaaccaattcacatcactgaaggaaattatgtcagaaagcaagatgtcagcattgaatatgatgcatgtacaattccaaatgattgtggttcattggttgttgccaaggttggaaatcacaaacaaattgttggtttccatgttgctggaagcaaaagaagactgggatatgcttcattgataccatatgttgagccagttgtgcaagctcaaagtgctgaagtttactttgacttcttccctgtggaggttgatagtcaagagggagttgctcacattggcgaattgaaatctggtgtttatgttccactgcctacaaaaactaatttggtggaaactcccaaggaatggcaactggatctaccttgtgacaaaattcctagtgtcttgactacaactgatgagagattggtaggcacataacatgagggatatgatccttttcttggtggaattcaaaaatatgccactcccatgatgcccctagatgaagaaattctttctaaggttgcacaagacatggttgaggaatggtttgattgtgttgatgaggaggattcctttgaggaagtttctttaagtgcagcactcaatggtgtctagggtttggactatatggaaagaattcctcttgccacatctgagggttttcctccatgtgctttcacgcaaaaatggtgaaaaaggcaaaaggagatttgtttctggggatggtgaagagatgacattgattccgggaaccactgttgaagaggcttacaacaagctaatagttgaacttgagaaaagtgttcctacattggttggcattgaatgtcccaaggatgagaaacttcctcgtcgcaaaatttttgacaaacctaagacgcgctgcttcactattcttcctatggagtttaatcttgtggtccgtcagaagtttttaaattttgtgaggttcattatgaagaaaagggacaagcttagttgtcaagttggaatcaacccatactccatggaatggactggtttggccaataggttactgagcaagggcaacgatattctgtgttgcgattatgctagttttgatggcttgataccaagcaagttatgagcaagatggcagaaatgataaacagtctttgtggtggtgatgaaaattgatgcggaaggacacacctgctgttggcttgttgttcactgatggcaatccgctaaaaagaagtttgcagagatgaatgtcggatcccttatggatttgcgctcacaggtatttgcaatcgcatttataatgagatgctcactacatatagctatgaaaaattac

SEQ ID NO: 123072 - DNA, 248 bp, Glycine max
  unsure (1)..(248): unsure at all n locations
  Clone ID: PAT_MRT3847_82140C.1
cgcagataaatagtagatatttttcatagtttttcttgttcaaaattattaaactacaaatgaatggcgggggggggnccatgtncacacccttatattcatctgtngtttaataattttgaacaagaaaaactattaaactacatatttttttaacggtgcgcgcatcgaatccaactcgcccttcctctttcgttcaacatttctgcacatgtatatctttgccaaatatctactatttatctgcg

SEQ ID NO: 123073 - DNA, 258 bp, Glycine max
  Clone ID: PAT_MRT3847_82141C.1
ctcagatgaggagtgttttcctcaagtgcaggatgcaggagatggactgtggtgggctgattcgcgtgccttcgccaaaatgtgatccgttgaagaactttggagtggtgtttcctatgttggaggatattttgagctgtgctagagtgatacaaatggtggtgatggaggatgggtttaaggtgatgtgtatggaggatcctttggcgagggaggttgcgttgtatcgccagaatgaggggttttggaatgagttgg

SEQ ID NO: 123074 - DNA, 247 bp, Glycine max
  Clone ID: PAT_MRT3847_82142C.1
tataggctcggctgctggatgactaaaattggttaccgccgctagaattcatctgatgagtactgctgctaccatagacgaagtgggactcatgattacaacgacaataaaatacatgctgataaaaacgacacataggtgcggatgcaaaatgaccacaaaatgttacggttgttagaaaaacgacagcgggagctccgaattttacaagactagattcgaaaggatgcaacaacatttgtataat

SEQ ID NO: 123075 - DNA, 520 bp, Glycine max
  Clone ID: PAT_MRT3847_82143C.1
aattcggctcgagaaaatatcccgtgaagtggatcccacaggggaaagaacatttggagtctttacaaagattgatcttatggacaagggtactgatgctgttgaaatggtggaggggagagcttatagattaaagtatccgtggatcggtgttgtcaatagatcacaagcagatattaacaagaatgttgacatgattgctgctagacgtaaagaacgtgaatatttctctaatacccctgaatataatcaccttgctaacagaatgggttctgagcatctagcatagatgctttctaagcatttggaggcagtaatcaagtccaaaattcctggtattcaatctcttattagtaaaacaattgctgaacttgaagctgaactgagtcgtctgggaaagcctattgcagctgatgatgggggaaagctgtattcaatcatggaaatttgccgctcatttgatcatatattcaaagaacatcttgatggcgtgcgacctggaggcgataaaatttataat

SEQ ID NO: 123076 - DNA, 288 bp, Glycine max
  unsure (1)..(288): unsure at all n locations
  Clone ID: PAT_MRT3847_82144C.1
tgaaagaaagtgtatttcgccacttgtcataacattttatgtcgtcgtgaggcttttcaacctgcaagtccttgagtgaggagtgcccccatcatntgatgatgnttgatgacggtgattgcttcatgaggttagtaagccaagttactggagaaacatnaagcacattgccattgcccattgatgagaaggtttttaccttggcatacatctcctgcaacaaagggaactgtatgtcactcacagtcacacaatggcaccacatgcaacggttgtagtangtgatga

SEQ ID NO: 123077 - DNA, 125 bp, Glycine max
  Clone ID: PAT_MRT3847_82145C.1
cgggtaaagagttgttgctggcggatagggaggtactgctgggatatacaacggttacccattagacacacttcgagggatgcaacataactacaacaatggctctgttttgaccatgctgaggg

SEQ ID NO: 123078 - DNA, 472 bp, Glycine max
  unsure (1)..(472): unsure at all n locations
  Clone ID: PAT_MRT3847_82146C.1
attcgccgaggcgatacagggcgttggagaacagcagcgtgtggcggtcgtccagtgcttcgccctgtggctgcgcggcgtcgatcttgtcgcgcaacacgcgccagcgttccagcggtgcttgctcggtggtgctctccagccaggcgttggcgtcttgcagcaacggcgtgaaccggtcgagaaactcgggggcgcggtgttcgatcgcgtagaccgnatcggtccagcgcgtcgatcaccggcagcaggtgaatcatgcgcccgcgcagttccttggtgttgcgcaccgtctgtggccgagcgccttcgtggggcaactggccgatcatcagttccagggtgttgaaggtggcgaccatgccgccgcgcaaggtgctgatttcttcgggcgcaacgttacgggtcagaaagcgctggctatagacctgggcgtcggcaaaccacttggccaccgagccatcaaacaccg

SEQ ID NO: 123079 - DNA, 201 bp, Glycine max
  Clone ID: PAT_MRT3847_82147C.1
gagggggtgggctttgtcctgttgtcactgctctttccctaggggctcccagctctgcaccgcattatcttgtcacggagcattcacatttgaggggagacggtcgcacgctcttctcgcaccgcacgaggcatacgcgagctggttggtcaatcacgttcggccagctttcagaatggacgttttgcccgtttgccggtg

SEQ ID NO: 123080 - DNA, 440 bp, Glycine max
  unsure (1)..(440): unsure at all n locations
  Clone ID: PAT_MRT3847_82148C.1
cccacgcgttcgcccacgcgttcgctcgttctaatctctgtctatctttctctgtgtctgtggcttttttcgtttccctccacagatctctgaaattccatcccatcaaaccctaagtccgggttgatcctatcggcttcgttaactatccatctccgaagccatttttttttcccaatttctgttgtttattcaaactccataatcttcactcattgatgatcctggaaccttcgcgagtctcccttttcttcatgggcctgcgccacccttacgatgcctgagctgcgttcccggccacacataagccgccttgtagacagcgcaaacgccaatccgaccactcagccagcctcgccgncggccgtcggagcctgtcgaaggaagccagccgtcgccgncgctccgaccgggaggaatcgcangctgaacaacgcgat

SEQ ID NO: 123081 - DNA, 225 bp, Glycine max
  Clone ID: PAT_MRT3847_82149C.1
ttgggtcatgcctatttgtctggttggaatcatgccttgcttcatggaatggactggtctggccaatagaatactgagtaggggcaacgatattctgtgttgcgagtatgctaggtgagatgggttgattaccaagcaagctatgatctagatggcatgaatgataaacaggctctggggtggtgatgaaaaattgatgcgtgaaaggacacacctgctgttggc

SEQ ID NO: 123082 - DNA, 247 bp, Glycine max
  Clone ID: PAT_MRT3847_8214C.1
ctcgagtgctcgagccgaatcggctcgagtgatgtcacaccatttttggatgagcatgcagactgtgatgcagttttgctgacgtcaacaggtagtcaatttctgtttgttggctggttcatattgtccgtctgtaggtcggtcaagcagaagtagtaagtggaaaggagtggagtaagaaactcagccatgtatttttatagggaaggatgccaccattgattttgaagatgtgggccacagtgat

SEQ ID NO: 123083 - DNA, 398 bp, Glycine max
  Clone ID: PAT_MRT3847_82150C.1
caccatgaatcatatgcactattggaccaacattgctgcgtccatagtgcatacgaatcaacagggagttctttatgaatactgtgactgtaacactcagtggacagccccgcgaaataggatcaccacagcaggcagactagtggcaaattgacacctaacaatgagaggaattcgactgaggcctttacaagtggctgggtcaaatagcatctaagcaccccagggcccttttggagctgtggtagaatacgggaagagccacattatccgctatactggcagtgacactgcacagtagtatttggcttcaccaaacattggaatgtgagacagctatagccacagcatccttagcctaattgctaggcccttttacgctgaaaaggcacccactc

SEQ ID NO: 123084 - DNA, 272 bp, Glycine max
  Clone ID: PAT_MRT3847_82151C.1
ttttgatcttccacgcgtccgggaaatgatacagtggatattcaggttaccaaccttggcgaattgggtttatcctgaaaaggaattacctttacaagttgtcgtatgaatgggcccatgtggcagtggttctgtggggtggagtccatgaccaaagatgaactgatagcccgacattcacttgatgggtgaacaacatgaaccgtgatctcagtactgtcggtgacgaaagatagaccgtccgcatctgcgcttaatcttgtatgaggagt

SEQ ID NO: 123085 - DNA, 842 bp, Glycine max
  unsure (1)..(842): unsure at all n locations
  Clone ID: PAT_MRT3847_82152C.1
cggccgtgtctacccacgcgttcgtacggctgcgagaagacgacagaagggggcccaccattgttcttccacagccttaacctctcgggttataaaaccttcgtgggggggggggcacacacatcttcgggcagcgtcagcttagaattattattagtgtgaaattattaattaattcttggctagacaacaacatggcctccgccgcagccgcagacggactcttccggccgatctacgagggctgcatctccgcctacgacaacgacgtggagcgccgcccctaccacaagaactgcggctgcgctctgcacagcaagtcgaggaggaacagcagcagagcgtgcaggcacaagttgccaaaatgcaacaacgtgtcctaccctatgaggagggcttggagtgaagggaatttgtcaatggtttcatcaacaacttccacgcattcctcgccttcttcttctcccgccgctgggttcaggcctcaacacgacgaagagggaaatactaaaaacaaattagtagttttatttgagatgaataattaaataattaattaatcaattaatgagtatttaatactaccagtaccaggatgatctttttgataaaactcctattttgttttgtttcctttttcttttctttttgtagttttgaataattcgactccggttcagttgaggtcttgttaacttttttttttaatttgacttggggctcctgatttagtttgttcggaattggacgacttcgtttattgtaatgaagctaattgattttttttcttattaattatatattaattaatctttttagggtaaaaaaaattnnnnnnaaaa

SEQ ID NO: 123086 - DNA, 578 bp, Glycine max
  Clone ID: PAT_MRT3847_82153C.1
aagaaaagaagagcatattctccttttttctgtgtaaatgtataataatacaattcaggtactcattacataatcagtgtatgggcttaaaaacaccctccagcagaagattaattatgatttatgaatatattttttggttataatgaaagttatgaatatacaacacattttttaccttattctttagtctaatcttcaaaatgaatggtatcgtatccccaaacactcccattgaataaaggagccagccaaattttgaaaactatcattaatcacatacaaaattgtatcgagtctgctcttgtgttgacaatagaatgttcttcaccatccaaccctttcccaccatttgttcaatcaaattagacatatccctttctgtagatctcttggcatcctcaacaattacagaccaatcctccattgttgagtctgatgcatggctttcctctataataatctcccacctagtactgttcaagagtagagcctttctgatgtaacaagcctgcagcaaacccatgattatttggactggctttggcttcttcacctattggaaaggaaggatataa

SEQ ID NO: 123087 - DNA, 830 bp, Glycine max
  Clone ID: PAT_MRT3847_82154C.1
ttcgcctgcaattcggctcgagacggggggtagaagacaactacatttggcacgatccaagaaaaatactatatatatatctacttggtgcccctaaggcttgcaaattgggtcatgaaccaagtgcttgttaaatcatatatatcctttaactaggaaacttcattatactgatcttcgttactcagatcgttgcggctggcaaattgggtcatgaaccaagtgcttgttaaatcatgttatggatttgcaagaaaacttaaaagccatgggtttcattggggtgatctttcatccaaaccattgcatcaaccttcccctttccctaatattgacaagtgtgatttggagtgtagagggtcacaaaccctagcttgtgactttcacaaagtcctcttaaggactcattccttctttccctatttcatgcttgttgcctttgaaggtggaagcatttttagggcattcttcttgctttgttcatgccctatgctgtggatcttaaactatgaaatgaagcttagggtcatgatcttcatctccttttgtggcctcagaatgaaggacatggaaaacacttcaagggcagttttgccgaagttctacttggagaacctcaaccttgaggcctatgaggtagtggcttcagtagggtccagagttttcttcaccactatgcctaaagtgatggttgaagggtttctcaaggagtatttgaatgctgatgctgttatagccacagaattgcacacttctggttgttacttcactggtttgctctctaagtctggtttgcttgtgaagcatagtgccctcatggactattttgg

SEQ ID NO: 123088 - DNA, 759 bp, Glycine max
  Clone ID: PAT_MRT3847_82155C.1
cagattatgatgatcatgcccactatggtcccagtagtgaaggggaagctggatctttgagtgagatagaggaggagtgcttcttgaagcagttggatgagaacaaaaaaggattctcagaggaatctgcagtttatttggataagtatgttagcaccaggagtttctctggctataacatggaaccttctatatctgttactgatggcaaagcagggaattcctgcttgagtacaacactgactgatttggcctcaaatgttgactcaagtagttcatcaataggatgtaccggcaccaaagatgtggagatgatggataagtttgcagattctatttcacctgtgccaccactccttgcttctagttaagaactgattttctttgtagaagttttttagtagcatgttttccagattttgtctcaacaagcagagcaggtttgcttgtgtaaattaatacatggagtaagaaccgcttccttgttgtgtattgggacaggttatgttcagtttagggctgaatttgacctggttctgtatgttcttgtactagaccattctaaccatgacaaattggaatgggctaaaggtgtggccccctcttcaaatttcagtcaagtgctgtgaaatcgatgaattcctgcggaatggggagatcgatttagcttagcctgacacatagatgctttctatgtatcttcagtatgatcaaaatttgaatggttcagaaatttatcaaaaaagaaggaagtgtttt

SEQ ID NO: 123089 - DNA, 479 bp, Glycine max
  Clone ID: PAT_MRT3847_82156C.1
tacggctgcgagaagacgacagaaggggggtataaacactatacatttatactgatcaaagaaactcaaaaaatggtgtcctacttggtgcccctaaggcttgcaaattgggtcatgaaccaagtgcttgttaaatcatgttatggattttctaggaaacttaaaagccttgggtttcgttggggtgatctttcatccaaacccttgcatcaaccctcccctttccctaatattaccaagtgcgatttggagggtagagggtcacaaaccctagcttgtgactttcacaaagtcctcttaaggactcactccttctttccctatttcatgcttgttgcatttgaaggaggaagcatttttagggcattcctcttgctttgttcatgccctatattgtggatcttaaactatgaaatgaagcttagggtcatgatcttcatttccttttgtggtctcagaatgaaggacatggacaacac

SEQ ID NO: 123090 - DNA, 157 bp, Glycine max
  Clone ID: PAT_MRT3847_82157C.1
tgtctaacatctctccgtatccagtctattatcaaacatactcacaaatgaccattattatctctatttcagttcttacatggcaccagagtgtacttttatttatttatttttagatcaagagaagtcaacttccagtgaggagggggggggcgag

SEQ ID NO: 123091 - DNA, 251 bp, Glycine max
  Clone ID: PAT_MRT3847_82158C.1
tttgaatttagcttatgccatgcattgcaatgaagaaataaggtattgttgcttttccattctatagttggcatgttattgtacttcaaagtcttttaggtttagttgcgtgcaacagaaattgaacttcaaacatttgatatgcccatggcttgtcggaaatcttcaataattcttctgtactttacactttttttcactttctttatcacaggttccgctgttgaacttttgtgcatcctcaattggtt

SEQ ID NO: 123092 - DNA, 1659 bp, Glycine max
  unsure (1)..(1659): unsure at all n locations
  Clone ID: PAT_MRT3847_82159C.1
ggacgcgtggggcgatatgatacattccctctgtctctctctctttcactcactcaaactcactatataagattcccttctcggcccattcttcttcttctgctacaccattcattcgagcattcggttttgaatcttttgagcgaaaatgcagtcgagtcctttgcttctggaggaacccataaggatggcctccatcctcgagccatccaagcctagtttctttccagcgatgacaaagattgttggcacacttggcccaaagtcacgatcggttgacgtgatttcccaatgtcttgaggcaggaatgtctgtggcaaggtttgatttttcatggggtgatcctgaataccaccaagagacgttggaaaatttaagggctgctatcaaaagtaccaagaaactttgtgcggttatgctagataccgtgggtccagaactacaagttgtcaacaaaactgagcacccaatttcccttcaggctgacacattggttgtcttaactcctgatcagaacaaagaagctacttcaaatcttttacctgtaaattttagtggactttgattgtgatacatgatgcacgctaggaataggtgccatgctcgtgagtttttatgtaaactaggtattttttatcagacccagatatttggtgggggggggacatanattttttttacattttnattaaatattgngagaagaggatggtatcatcctgtcacgtggaaatttggggatagatcttccaccggagaaggtgtttttatttcaaaaaggaggtatttacaaatgtaacatggttgggaaacctggtgttgtcacacgtgttgtggatactaggatggaagtgatgcaattctccttggagcagagaccctgcggggacaataccctgtagagaccatttctatagttggaaaaatatgtgctgaggcagagaaagttcataatcaagatttgtattttaagaaggctgtcaaatatgtgggagagccaatgagccatttggaatcaattgcttcctctgcggttcgagcagctatcaaggttaaagcctctgttattatttgcttcacttcatctggaagagctgcaagattgattgctaagtacagaccaattatgcctgtcatatccgttgtcattcctcaactgaagacaaatcaactccgatggacattcaccggtgcttttgaggctaggcaatctcttattgtgaggggtctttttcctatgctggcagatccacgacacccggctgagtctaaaagtggaacaaatgaatcaattttgaaggttgctttagatcatggcaaggcttttggcatcataaagccacatgaccgagttgttgtctgccagaaagtagctgactcgtcagttgtgaagattcttgagctcgaagattgattggttcaatacaacttatgtgtcatttgatgcatcataataaaacttcttctcaaccttttcattctagcgtttgtgtttcattgaagtacaataacaaacacataacattgagatacatattgtagagtgggaaagagacttttttgtttgattgtttttttaataggcaatcacagttttgagctataaataatggtattggtatggaaataaaaaaaaatgatgttatatcagtattttat

SEQ ID NO: 123093 - DNA, 467 bp, Glycine max
  Clone ID: PAT_MRT3847_8215C.1
ttttgtttcttttttttatatttttttttttttgacacgatgagagcggccaatttaaggcctgggtctctcttcaccctgactaatttagaaacctgcccatggcctttactgcaaaaaatgagttctacttgattgacatcgtaagtatgggctactacgctggtggcctattatactaaaggagggggaaaaaatgtacgaccgcctgtatactttgaaacagcaggaagacccggattttttgggtctctggaaagagcaaaggacacttatgggcaacaccaagcaacatttttgcacaaggtaggcccccggtttcactatgtccagcaagtctagaccccagaagcggcggcagcgactccacaactgcttaaagaaaaatatttgaatactttcctaatccgcccctcgataaatgagcccatgctgcacatactaagctgctacatgaacatggggac

SEQ ID NO: 123094 - DNA, 641 bp, Glycine max
  Clone ID: PAT_MRT3847_82160C.1
cggccgctcgaggcggcgggcgggagcagtcattacgtgtcctttcatcaaagtcgagcttcactcttcagttaccttcgaaaaggcatgggtccaaaaccagggtcagacatgaagatgaacgcgattaggtcagggatagtggtgctgggagcgcttgcattcgggtacttgagcatacaaatcggcttcaagccttatctcgagaaagctcagaaccagaacgcgctctacgaatctgacccttcttctcaggaagaatcatcttcagctttcccagaacgcacttcgtgacaacactctgtttggtttaagagaaaaggaaggatttttttgttgccccagttgtgtgttggtaattaactagtttcgtattgttcaacttgatgtatccatttgtatttgctcacctaataacaccatctatccgccatgagctttgtgtggttggtgatgatatcatcttgagttgttatattgttttgtctgtttggaattgacaataatatttgttatcattactccaatacggttttatgtgtttggaattggcagtaatatttgttatcattactccaataacgaatcttttttatttgaaatgaaaattttcccgggtttggtagggagttaaaaaaaaa

SEQ ID NO: 123095 - DNA, 1093 bp, Glycine max
  unsure (1)..(1093): unsure at all n locations
  Clone ID: PAT_MRT3847_82161C.1
gggcacgacgatgagttctgctgaaaattaaaaatcgaaataaatccgttaggaagttgttgaagtgggtggaacccaacgaagcagagatggaggttttgctgcaattcgcaccgatgcagagctccgttgatgagggtttctggcaccgtttgtcttctttgaagctcaacaagcttggcattgaccattctccaattcccttattcggtttttatgcaccgtgctctcactctcaagtatcaaatcatttaactgttttagctgagtctttaccttctgaattgagtgaggcatcattaatccctgaacccagccgcggcaaccggaacaggtgttctgttccagggatactttacaacactaatactgtggaaagcttccatgcacttgataagagtgacctgttgaagaaagaggcagcaaagatatgggatgacattctaactggaaaagctgtggaggactgttcagtactttcaacattccttgttatttcttttgctgacttgaaaaagtggactttcaactactggtttgctttcccggctctgatgcttgatcctcctgccactgtggttaatctaaagccagcttctcagtggttcagcgcagcagaggctgaatcactctctgcagcttgtaacgagtggcgtagctcaaaatcaaaaacagatgtcccgttttttttagtcactatagatccaaactcacgtgctactgttaggcttctgaaggactgggaagcatgtcagagcaatgctcacaagatcctttttggattttatgacccatgtcatctaccaaataatcctggatggcctcttcgcaacttcttagcacttatttctgcgaggtggaatctcaactctgttcaatttttctgctacagaagaanccgtggttttgcaatatgaaggttgtcccttgttggtgaagcactgataacagttcccaagggtggaaagacactgtgcctagtgcagttggatgggaacttataaggggagaaaagctctaggtgtataagccttgcgcagtccatggatccaaccaggttggccatatctgctgcagatttgaatttaagctg

SEQ ID NO: 123096 - DNA, 176 bp, Glycine max
  Clone ID: PAT_MRT3847_82162C.1
ccactctaaggtgatcagcggaacactcacctattagacataggactacgcgtcagatttaaactttcaagagtttctccctcagtgctctgctgaatgggaaggacagcctggggaaaacaaggataagtgctcccactctcctatgtggtataggacttcgagggtagactttg

SEQ ID NO: 123097 - DNA, 176 bp, Glycine max
  Clone ID: PAT_MRT3847_82163C.1
ggagtagaggaatggtgtagtagtcgatagaaatcgcgatctggactagggttaaactgaaagatcgagttcaaatgggtttccttggtaacactttggtgtgattgagatttggcgttgggatttcaattggtctcgtgatcaggtacattctcttcaactacttccatagcacc

SEQ ID NO: 123098 - DNA, 393 bp, Glycine max
  Clone ID: PAT_MRT3847_82164C.1
catttttgaattctttaagtttttctatgaaggtagaaaatatttcctaaattttaggggtgtttggtttgggattcgtttgtgatactgtcgagcaagaggtgtattgagggcgcggcagagtatgaaaaaatgaatgagaaatttagtggaaacctggcggcaggttgcacatgcgccaagaagtatttaaagatatgcaacacaacacctgactacccacccttaacactccaaaaaccacctaattatccaccacccactgaaagtgcaaagctcaacaaacacactcaaaagtcttcttcatccacaaacaacactacattttttgtttcttcaaatatcatattcttatttctatttttcaatagaaaagccttttataactaaact

SEQ ID NO: 123099 - DNA, 648 bp, Glycine max
  Clone ID: PAT_MRT3847_82165C.1
aaggccccttttgaattgccaactcttagccattaatgttcaaacataacacaacaaccacaaagaaggttcacaacaatgaccactctgtgatttgttctttcttcttcctctcttgcacttacatgggggctcgttgctctaaattctctttctgctggttccactcccacctcaaaccttctgtccttgaatcctctgacccggaaaatggaatgaagggtgtgcgaaaattgtgctcacgttttgcttagttcaatttggagcaactgccaatagacacaaatgaatggtcctcagaaaacatagtgtctgagcatggtgagaaagctccaaatgttgtttacaaaggaaaacttgataatggacagtggatagccatcaaacgtttcaacaagtttgcctggcctgattctcgccaattcctcgaggaagccaaacaagtggggagccttagtagtgaacgtctagcaaatttggtttcttattgctatgaaggggaagagaggctgctagtagcagagtttatgccacatgaaactctggccaagcatctctttcattgggaggcacaaccaatgaaatgggcaatgaagttgagggtggctatctacttagctcaagctctagaatattgcactagtaaag

SEQ ID NO: 123100 - DNA, 262 bp, Glycine max
  Clone ID: PAT_MRT3847_82166C.1
ctcgagccgctcgagccggttgtagggtggaggatcggacacgcgttggctcactttagctttcaaaacgtcggtttcaaccgcacgcccccttattagtgtgtatagtgagaagaatgaggccacaggacgcacagttgctctacctgcggtgttcaaggcacccatcaggcctgatgtggtgaacttcgtgcaccagaacatggccaagaaccatcgtcagccatactgcgtcaatgaccaggcaggtcaccaaaccagt

SEQ ID NO: 123101 - DNA, 273 bp, Glycine max
  Clone ID: PAT_MRT3847_82167C.1
gtgatttcagcgagtgatcggtgttcacttgatctcatcataatcgtcagcgtcaattgaagaagatgccgatcagaaacatcgccgtcggaaggcctgaagaggcgactcaccccgacacgatgaaggcggctttggctgagttcatctcaaccttcatcttcgtgcatcgccggctcaggctccggcatacggtacaacaagctcagcgataacggcgctggaacccctgccggcctgatctcggcctccatcgcccatgcattcgccctc

SEQ ID NO: 123102 - DNA, 1023 bp, Glycine max
  Clone ID: PAT_MRT3847_82168C.1
ggcatcaccgttaggactttcccccacaggccctgtggtctcaaatgtctcacattccatcaaatactgtttcggaatcaagaagtggttctactatgctgggcaactgcttccaacatcaaaccatgcgagatgctgagctgttgaacctggtaacggaacttcacatgaaccccctcactctttcagctgacaataccaagaaaacttacaggtttggactgaactcagaagcagatgagcacaacgtcttacagaaagatctgggaagtgtgaggtatcaaggttatgactttacctcagatgccatgtggtctcaaatgtctcacattccatcaaatactgtttcggaatcaagaatcggttctactatgctgggcaactgcttccagcatcaaacaatgcgagatgctgagctgttgaatctggaaacggcgaggaccaaagaccttgtctttagtggccagctaagttctgcagggggtatgaaacaggaatatcagtctccccagtctctcttcagtgactgggactggaagaaggatttaagttcctctgcccttgagtataggcccaacaaggattttaactgcaacccagatgtcaatgttgattaaaatgcttctttataaggcttggaaagagtgtttttgtttcgtgtcgtgatatgtcagcatccatccgaagtccattttaatcaggaactggttccctacccttttgttttttcccaaaccaatgaaaatacaagtcctcaggcagtgatgatttttcatccatagctttcagagacccgagggagtcatggtttaatttcgtgttgttcttttatataaacttaaaatacttgaaggagttatgctttctttaaatgtaaacctgtaatagtatttgactgtttttgttgttcttcgttgtaatgtcatgtaatttgactcttgtctcctatggttgtagtcccttgattgttagacagattgtgctattttcaggcagcaagcaaggtcacaagtatgtttaatt

SEQ ID NO: 123103 - DNA, 453 bp, Glycine max
  Clone ID: PAT_MRT3847_82169C.1
aaccaaaaaggaaccaactttttaaactaacaattgctttggacttaagttttaaggggggatgccatttcaaaaataaacacttggatgggggggttcattatggacaaatgaaaaaaaaaagaatgtcatgaaaaaatctaacacgggtggaaacataacctgaggcaaatccctgaaaagttaatagcctctaaaaaaagctggacaacaaacaaaagctaccttaaagccagccaaattcaatttgagccaaacacacctcacgtgttaactacaactggattaggggcatgtcttccgccggtttgggtccaccttggcttcagctcccagggatgcagaaaatgtagcttggggttttttcaaattttcatcagatgaactttgagaacatacaaaaggagcttctttttttggttcttcaaaaggcagccccatgcaagcagaagg

SEQ ID NO: 123104 - DNA, 699 bp, Glycine max
  Clone ID: PAT_MRT3847_8216C.1
agctggtaggaactgatcatatggcctttattccccccaaaaagctcgtggaatcgatgacttccgtaaaatgcctaatggtgtcaatggtattgaagaaagaatgcatttggtatgggatatcatggtggaatctggccaaatatctgtcactgactatgtccggataacaagcactgaatgtgctaaaatcttcaatatatatccaaggaaaggagctattctcccaggatctgatgcagatattatcatccttaatccaaattcgagctttgagatgagtgcaaagtcccaccactccagactggacacaaatgtctatgagggaagaagaggaaagggaaaaattgaagtgactattgtgggaggaagagttgtttgggaaaataatgaactaaaggtcactcctggaactgggagatacatccaaatgccaccgtatagttatctgtttgatggactggacaaaaaggatgccatttatctaaattcccttcaggccccagtaaagagagccaaagccagcacttagaaaatttctgatatcctttctagtcaaatttcaacatttgatagagtggaaaaacaaagatgttaatccagttctgtgcaaataaagaaaaatatgtatattctaataaatatatttcgtattaccttttccactaatgtacatgcaattgcatagattctgatagc

SEQ ID NO: 123105 - DNA, 694 bp, Glycine max
  Clone ID: PAT_MRT3847_82170C.1
ggctcgagctctctctctccaaaatctaatctttctcatctgggtcactgaattaattccccttttcaacttgctgagcggttgcttagcgtgatgatggctgttttctgtcacaacaatgagtgctctgaataggactattatttccttcaacaaaacttcatccttcaatcatcgaaggactctcggcattgcaagtcccagagtgattcataacaaccgcttcggatgtgtctctctcaggtttcaggttcttatcatcactgtctctgtggtttccttctttgtagccgtaggtggttacatgtacgtgcttccaagccttagccgcgcgtttttcaatggccaagttcccttattatctgaacataacagcaacggatcagtgagagaatgtgatgtctttgatggaagctgggtgcaggttaaagatcacaccttgtacaatgccacagagtgtccttttgtggaacgaggattcgattgtttagggaatgggaggggtgacagggattatcttggttggaggtggaagccgaggagttgtgatattccaaggtttgatgtgcgtggtgtgttggaaatgttgagaagcaaaagggttgtgtttgttggtgattcaatgagtcggacgcaatgggagtctctgaattgtatgctcatggctggtgttgaagataagaggggtgtttat

SEQ ID NO: 123106 - DNA, 374 bp, Glycine max
  Clone ID: PAT_MRT3847_82171C.1
tttttgaggaatgaggaatgcattatattaaaaggttatttatgctttgcaaggagattaaccccctgtcctccaaaccaagagaaaaacacaaccccagagaaggtacattacatatacagtacctgatcatgtaatcctaacaataagttattgtcagtaactgacaacataacactcccaagtgagaggcctttacaatttgaactgctccactaaagtttatcacaaaattacacaagtaaacctggaagttaaggcaagtttattatgtccactgcaaataatccttgcagtgacaagtgtttcaaagtaattcattcaacagaaattgcacaagtaaacctaaaccttgtggctaaatggctcatata

SEQ ID NO: 123107 - DNA, 392 bp, Glycine max
  Clone ID: PAT_MRT3847_82172C.1
gcctggatttccggggcggaccacacgcgtccgcccacagggtttggggagagaaaatattcctccaaatttttggccaaaaggcctgggagattccctggtgttagcccaatgaagatatttcctgtcccaattggcaggacaggtccagttgacgcggttttatggcagaaattatggggaaattggggggaggcggttggcaccaccgccggtggttccaccaaagataagctgaagcatgctctaaagggtttaggggccttcctccctggggggggggccacccgttgttttggaagggtggatgccacccacgccggtgagtttggtggcgctgaaatggaacctctcctccaatatctccggcctcatgggtttggaaaatattc

SEQ ID NO: 123108 - DNA, 320 bp, Glycine max
  Clone ID: PAT_MRT3847_82173C.1
ggctactatctgtgaactttatgctatacttagagcgctcgacttgccagagtcagccctgctgatcgagagtgggaatcgctttgaagtttgacagtgtacgcctcttggcatgggttgcattgacaatgctaaactacgattggggtaagagcctatcagttgctacgaccacagaacaaggagtgaaggaaaagcgggtacgactctatcacacagcgctgacatatggtagcggcgagcattaatgacgaagcactttcacgtctgatgactccagggattttaccctttatgccaagtgaccccaactacgcatc

SEQ ID NO: 123109 - DNA, 130 bp, Glycine max
  Clone ID: PAT_MRT3847_82174C.1
tacggttgctagacaacagaaggcgacattattattgtggaatatgccggacaacatgacatcattggtttagtaaattttaaatgggatttgaaaatgtcggttaataattcttatttggatgatttaa

SEQ ID NO: 123110 - DNA, 274 bp, Glycine max
  Clone ID: PAT_MRT3847_82175C.1
ttcgtacgcgagggcggacgcgagggcggacgcgtgttcctttaaacacttattccatgtacacccacggttcctaacattagtgttaaaggcatatatatatagaaaaaaggatagcctattcagctatcttggtcgaatcatcactggcttttgaattgatatagatattaaactgtggctattgaagcataaacgctagcctgatggcacatattgggcgggtggttacatttgacttggtagaaacatggtgacaactaaattgtgcttg

SEQ ID NO: 123111 - DNA, 295 bp, Glycine max
  Clone ID: PAT_MRT3847_82176C.1
gggggaaagggggacgggtggaaccccatctaacaatttgcataaatgggggaaaccacacacgtagggtaactttagggaaatttgacctttggggaaaacccccaaggttcacctttcataaatttggaccatttcccaaaaccccaattgggagcccgaaaatggttttgggggaattttagggggcgtctcactggggttggaaaaaccccagaacccaaacacgtcaaaagcgttccatttcccgcttttagacgcaaacccaacggattttttccactgtggggggggg

SEQ ID NO: 123112 - DNA, 445 bp, Glycine max
  Clone ID: PAT_MRT3847_82177C.1
gatcgactcgatgcagggtactgtattcacacaccacaactgcgtttaagatcctgcaagatcctatcaggaccttacctgcagattatgatatctctttcacaagcgctggtgtcacttgggaggttggataggtacatgtctagcggggaactgatggattcgggtgagagagaccaagggtgtggtggacaccctgctccggagggcaaggatggaacctttagctgggatgatgatggccaccttaaagactcgaaaaatattaacttgacgatgaataagggggagcctacagcaattgctgggactgtaggctcagggaagtcttctctacttgcttgaattcttggcgagatgcacaaactttctgggaaggctcaaggctgagggaccactgcttatgttgcacaaacatcttggattctaaatgggaccatcgaac

SEQ ID NO: 123113 - DNA, 954 bp, Glycine max
  Clone ID: PAT_MRT3847_82178C.1
gttcacaatggtcgaaactaccatgtctccaataaaaaaaacagagatatacttgtttattggtcttcatctcggtgtcttcctcgaaggaatgaacttgccaagaaacttctcagcttactgccacatcattcatttggcaagtgcctaaataatgttggtggtctagacatggctctttctctttatcctgaatgtgccaatgacgccaacgttacaccaaaatggtgggatcatggctcgagcgccatgtctcactacaagtttgttcttgcaattgagaacacttttactgagagctacgtgacagagaagttattctatgccttagactctggtgcagttcctatctattttggtgcaccaaatgtcatggattttgtccctccacattcaataatagatggtagaaaattcaactcattggaagagttggcttcgcacgtgaaggctgtagctaatgatccagtagcctatgcagaataccatgcatggagaaggtgtggtgtacttggtaactatggaaaaactcgagctgtgagccttgacacgttgccatgccgattatgtgaggctgttagcagaaaaggtggaagaaatgcgggaagctaggttgagttttttgctaaatttgtagttctgcatgatagagattgacgcattgaatttaggtttgcaacctgtatagagattgcttgtttctctgagctaatgtacatttgaccaagaaaggcttagctcatgtgatattttattttttattgccccccttttctggtagaaagtggttgatgctatctccacataggttacactatagttgaagtgtttttgttgatgtatgatttttgagaaaaacacgtgcatatgtcaacttgatatgtcaattcatgcaaacatcactcttcattcaaaattgaaaaaaaaaaaaaaaaaaagggcggccacggacgt

SEQ ID NO: 123114 - DNA, 318 bp, Glycine max
  Clone ID: PAT_MRT3847_82179C.1
gttttttttttttttttttaaaaatagcatcacttcttgcataagattcttaaaatgaattggaggattgcttctgatacaacagtgtgacacttaattcatcaaaacttgatcatccgtactcttgtttgccattacataaactctagcaagaatcaaaatttaatttgtacatccaatttggctttgtaacttaaaacacttaaagaaaaaaaaacagtattctataatctacatgtacaaacaaattatccaaacacccaaaatctcaatctgtactcaaaatcctagagctagagcttgagcttctttcatccc

SEQ ID NO: 123115 - DNA, 123 bp, Glycine max
  unsure (1)..(123): unsure at all n locations
  Clone ID: PAT_MRT3847_8217C.1
gcanacatcaganagaanaaatgaattcncttcgtctcactatatgttgtgcngtggcagnncttggagcactaccacacttctcatttgcacagctagatcctcatttacgatagcacttgt

SEQ ID NO: 123116 - DNA, 206 bp, Glycine max
  Clone ID: PAT_MRT3847_82180C.1
tcataaaccacaacttcatatcatattcactcaagacttgaacatatccaacttgtaattctctacaaggctccattaagaacttcttcctcacaaattggttacaccacatatcaaccaattatatcagctaactaaaaaatttcaaagaacaattcctcaaaatccatctcataaaacttctcaacaaaacatttaaacaaaca

SEQ ID NO: 123117 - DNA, 1639 bp, Glycine max
  unsure (1)..(1639): unsure at all n locations
  Clone ID: PAT_MRT3847_82181C.1
ctcgagccgaatcggctcgagctcggttataatacgacacagaaacaacttggagggactgaaactgttcatgatgctaagaatgtgaatgacttcgcttttccctcagagtctgaattccgcaaagcacttggatcagtttcatatggagagacaggcaaatttatgtcaaaatgtatctctgttgaggaaacatacagtaactcaactcttgtaatcaacaaaaaagagcatgatcatattaaaggtttggagtttcccaaagatgttgatctggaagatcttttagatgctgttgttggcaatttttgtggtgctgctgctgatacttcaagtatatccaacagtgttaggtctcttacaaccatgccaacagagtttacaggttccattcagcctgaaaattattcagaagaaagcactttgattgtggatagttcagatgtgaaaaatgatcttatgcctgcaatcatggtcaagggaaaagatgaattttctaaccattttacatcatcttttgatggaaatgcatgcttattgattgacgaggcacggcaggaaaaggctaatagtcatatgcagcctattggtggaccaaagctctctagcacaagcaagaaaagaacaagagttggtaacaaccaaaagtcaaggccaagagatagacagctgatcatggacaggatgaaggagttaagagaacttgtcccggaaggtggtaggtgtagcattgacaacctcttggaacggaccataaagcacatgctgtacttgagaaagataacaagccaggctgagaaactgaaacgaattgccaatcgnggcggtttcctgagtgcaaaagacagaaagtcaatgctagccacccaggaaggagctgtgcatttgactttgaaagtcaactatcatggcctatagtcatagaagatctggaatgctcagggcacatgctcatagagatgatatgcaatgagcatggacttttcttggagattgctcaggtgatccgaaagcttgatgtcaccatcttgaaagggatcttggaaaaccgttccagcaacagttgggcttgtttcattgttgaggttccaagaggttttcacagaatggatgttctgtgtcctctactgcatcttctgcagcttaggagaaaccctgtctcatgtaaaagctgaccctaccatcccagttatcagtttcaaacggcaacttctatttagagaagttaacatacaataatattcatgagggccttcttctgtgtactggtgtaaatgattgtgttcatgccctcgttagtgtacttgctgcatttttggtgcgttcattataagctagtacctaaatatatatgtaaacaaacaaggacgctttaggggtgctactggctgcggaacaatatgtgcatacaagctagctttgaactcatttctagtgtggcattattatgacctaaatagagaacgagaactgtttgctagaacacaggattaagatttaagactataagagtgcggggatgctgccactccagtctcaaatataataggaaaaaaaaaagcgatttacatttacttaaaaaaagttagataattatatttaattgcattaatatcaattaaaaattaattgttttttc

SEQ ID NO: 123118 - DNA, 207 bp, Glycine max
  Clone ID: PAT_MRT3847_82182C.1
tactataaggggcagctattaagcagagtttgtgtggtaatggcttaattaattagttctgagtgtttaataacaataaactctctacaacattttattttttctttagttattgatttgtttaaatttgcttattacctttagtggatagacaataataccaactaattacaagcactatgtattatggacatcaagttttggggt

SEQ ID NO: 123119 - DNA, 531 bp, Glycine max
  Clone ID: PAT_MRT3847_82183C.1
tttttttttttttaaaccaaatggtatctcgtattagactattaaaatatgctgttgaaagttccatgaaacagtatacagaactagttttattctaaaaatttcctgtatgattatagagtttccttacaagatgcaaaataaaatctatatagatgcgcggatttggacatttgcaattagtcgggcgagtttgcttaatgtttcacgagccgatatggtatcaggatgatcttcaccacaaattgaagtcctgatataaacagccttcctgattagatcatcccctatgtcaaattgtgcacctcttagcattagtttgcccctagtctcaagcacagtagctctacacaaagccaactcttgccaaaggcaaggattcaactgatcattagtctggatggacctccaacaaagtgatttgtcgaaccacttgtcaaccggggtaacgaatgcttggtctgcagcttccaaggcattggtgcataggagcgaaagatctatagcagcagtgcatctggaggatgtgat

SEQ ID NO: 123120 - DNA, 417 bp, Glycine max
  unsure (1)..(417): unsure at all n locations
  Clone ID: PAT_MRT3847_82184C.1
tcgcgagaattgacgggtcatgcacgcctctcatagctcggaattcggctcgagggaggtcgtagatcttttagctatgagttctttccaaaggaagggcaacctagtgacaaacccatatttttcccattcctctatgaaacctcagacattgatgaaaacaatctttacccttttgtccacctttctagtgatggcaatctcttcatctttgccaacaaccgttccctccttctcaaccctaccaccaacacagtggttcgcacctaccccgtncttcccggtggttcccggaactacccggctttcggcatgtcttccatcctccctataaaactcgatggcactgagctaagtagtgccttcatcaaggtagaggtccttgtatgtggtggcaacagccatgatagtttcatc

SEQ ID NO: 123121 - DNA, 290 bp, Glycine max
  Clone ID: PAT_MRT3847_82185C.1
accaatccttataccacattcacatttgatcatcaaataattaatgttccttgaggcctattagatatttccattctctcttacccaactaaatttatcaaatccaattccaaagcacaaactacccttgcttacttttaaacatctacctcaactattaaccatataagacccataaatacttccactcatccacttaactaacaattagacattacaaatcttatcaatgactcttctaccacatatcaaccttatataccataaaatgctatcaatttatacctata

SEQ ID NO: 123122 - DNA, 168 bp, Glycine max
  Clone ID: PAT_MRT3847_82186C.1
cccactctctcccaccaccttcagcaccaccagcaaagaagccgtactcactacactcaccacgcgctccttcaccatctccacaagcccgttctctctctacaacaaggtgctatgtttctacttctcttacagtggtgaaatttacctatatctcttccagtctct

SEQ ID NO: 123123 - DNA, 179 bp, Glycine max
  unsure (1)..(179): unsure at all n locations
  Clone ID: PAT_MRT3847_82187C.1
tgcgcccngtgcaaaaaagcgttggagctttactcagaggcccgttatttaccgttcaaacacatctaccactacgattgcatcctcccatggctctcgatacagaattcgtacccttagttaccatcacaagctttcttcctatttgtaaactataattcccatccagatctactatc

SEQ ID NO: 123124 - DNA, 820 bp, Glycine max
  Clone ID: PAT_MRT3847_82188C.1
accagctttataaaggtttctaatattttctcttcattcttcttgtgattttctctctctttctttttttgattttttgagatggaggaagggaggtgtggcagcaggggaccagctgactaacctctccctaagttttcatggagtcaatttagtgtaaaacttagcatatgatacatttttaaccaaaaccttctttgtttattgaatgacaatttatttttgtaagcagatgaactaaactagaagactagaaataacttcctttttgttttagtcatccatcttaattgaaaattcttatgcagctattcgatctaagtggaatcctcaccgctttcttttgtggaatactaatgtcacattatgcatggtataatgtgactgaaacttcaagaatcacaaccaggtattgattagtccatcaaagatttcagtaatttccagattaaatggtctgagatttctgatttctttcccttctctaggcatgtgtttgcaacaatgtcatttattgcagaaaccttcatatttctatatgtgggcatggatgcccttgacattgagaagtggaagatgacccaattaaggtcctaatcctttctacaactctaaataattatattttatctagagttcacctaaactaacacatcacacactgatggaatgttatttatggtctaatgcatgtccttgtatggtgtgtttactcgttaccgattgcatagtgtcactacttacatagacaagttaatgtgacttcaacgacagtttcaacaatctccaaaatatttactggactatgacatcattggat

SEQ ID NO: 123125 - DNA, 172 bp, Glycine max
  Clone ID: PAT_MRT3847_82189C.1
tgtgaccctggctataggtgacaggagcctaggattgtatctagatctgcaccattcctacctcgtaggaaagaataagctgcagtgaaacaacctttctagtttttttctcagcgggatgttatcaaagaacgcccttgcgggcgcctaattaagaccaatcttgaatcat

SEQ ID NO: 123126 - DNA, 1095 bp, Glycine max
  Clone ID: PAT_MRT3847_8218C.1
ggctcgaggaaaaattggccatcagtggaataatattttgaacactggggtcaggaatcatcaacctagctagtgtgtacaacaatgaggaagcccgaggtttctggaaacaacaacaacaacaacaacattaataacaagcttagaaaagggttgtggtcacctgaagaagatgacaagctcatgaactacatgctaaacagtggacaaggttgttggagcgatgtagccagaaatgctggccttcaaaggtgtggcaaaagttgtcgccttcgatggatcaactacttgaggcctgatcttaaacgaggtgcattctcacaacaagaagaggaactcatcatccacttgcattcccttctcggaaacagatggtctcaaatagcggcgcgcttaccagggagaacagacaatgaaattaagaatttttggaattcaacaataaagaaaagactcaagaacatgtcatccaacacctcaccaaatggaagcgagtcctcatatgagcctaataacagagaccttaacatggcagggtttactacttctaatacccaagatcaacaacatgctgattttatgcctatgttcaattcatcatctcaatcaccctccatgcatgccatggttctcaattccataattgacaggttgcctatgctagagcatggactaaacatgccatgttctggtggattcttcaatagcacagggccatgcttctcatcatcacaaagtggagttgacaacaaagggatttatttggaaaatggaggagtatttgggagtgtaaatattggtgcagaaggggatgtgtatgttccccctctagagagtgttagcactacttctgaccataacctgaaagtggagagcacatgcaacacagatactaacaatagttactttgatgacataaacagtatcctccttaataattgcaacattaatagcaacaataagagagctgaaaatagggctggtggggtggagaatttgtttcaggaagagttaaccattggagagtgggacttggaggagttaatgaaagatgtttcatcctttccctttcttgatttttcaaatatccaataa

SEQ ID NO: 123127 - DNA, 492 bp, Glycine max
  unsure (1)..(492): unsure at all n locations
  Clone ID: PAT_MRT3847_82190C.1
ctagtctgagtttttttttttttttttttttgttttttccggttccaacatctttcattccattgctgcggcacttggtatcgtaaggcccggacgacccaactcgctgctaggacagccgtcgtcgaccattcccagcaactcccaggccgtcccagccgtgccacaatcccattgaatgttccgttggtcgcattcgccaccgttcaccactcctccagatccatcatcgtggcgagtagtttacttcctgcggaaagagcagccctcggtaagacgggccttgccaccggtgggctggcagaggacctgggagcagccggcgcagacgacgacggtttgggcgtgcgagaagacggtggtgatggtgaagcagccggggcacttgacgtccatgaagaaggagcgggggccgggcacaagggtcttcagcttgtgctggcgggcctcgtgctgagggctggggttgagaaggtcnaccgccagaaccat

SEQ ID NO: 123128 - DNA, 172 bp, Glycine max
  unsure (1)..(172): unsure at all n locations
  Clone ID: PAT_MRT3847_82191C.1
atacacctcaacaacctatgatttttgtgacgatatttcacttaactncgatgccaatttctctggaacatataagcttaaaaaacgtgccatacaaaataaccatttcattatttctacactattccgttgtgtacatttattcacaattccaaataatttttggtcatac

SEQ ID NO: 123129 - DNA, 127 bp, Glycine max
  Clone ID: PAT_MRT3847_82192C.1
tcgctcgagttggcatattccactataaaaactatctctattactttaacaccatgacagccaaatctgtacctaactaaacagatatactgcacatattatgaactacgggactttctctatcgcc

SEQ ID NO: 123130 - DNA, 315 bp, Glycine max
  Clone ID: PAT_MRT3847_82193C.1
cccacgcgtccgttctagatcgcgagcggcgcccttttttttttttttttttttatttggtttttgggttttttttttttgttgcaccgtattcaaggattctatgttgttttttttaaaaatacttacagcacaattgatttaatggaagctatttaatttgtccagttttgtggccacttatttgaaggcaatctttgtacgttttgtttggtataaattttcatttttgagcgttcaatattagctagttcttatattttaacgcaatattactttctgaaaatctttataaagttaactttttccataatt

SEQ ID NO: 123131 - DNA, 780 bp, Glycine max
  Clone ID: PAT_MRT3847_82194C.1
actccgacgcagccaccgtctttcagcacttcatcccaacaatgtccacgcttccgaagcaccaacccgaagcgaaaccccaagatctccctccggatcaaccagcttcggcgccctcggatgcaaaacccgaagatcttcatccgaaccagccaggttcggagtctcccgaagccaaagcagagggggaagaagaggatgaagaagaagaaggagagtgcgggttctgcctcttcatgaagggtggtgggtgcagagacgagttcatagggtgggaaaattgcgtccaggaggccgaaaacaacaacgaggacctcctcgagaagtgcgcccaggtcaccgccgctctcaagcgctgtatggacgcccactccgactactacgagcccatcctccgcgccgagaagctcgccgaggaacaggccatcgtcgaattggagaaggagaagcagaatcaacaacaacctccgcaagaccaaaaggccgagaaggttgttgaggaagtagccatcattgaattggaggtggaaaagcaaaatttgccaccaaacgagtcccaacccccttctccttccagtcaagaccaaaagtgagaccccatttcattgcccttttttgcttctcttaacccactgtcatactcatacctgtactgtcaatgcaaatagattacagttatttttgtcacaataatcgtgactcattttttttgtcacaataattggaatgactagtattttctttgattcgcagctcaaaaaaaaaaaaaaaaaaaaaaaa

SEQ ID NO: 123132 - DNA, 263 bp, Glycine max
  Clone ID: PAT_MRT3847_82195C.1
agtacttcttagaagtattcttcaaacatcgttgtattagaaagtacatggtgtctctcctgaaaatgtcttgctctcagtcatatctgatgactccgaaacacatagctttgcaaaatcatatgtgagggtcttcacatatttacagattttagctacatcgtttcaaccaccacggacacctaattaattgcaatgatactaattaaaaatgaactcgaacagctcttataagagacttttcgacgataatgatgatgttt

SEQ ID NO: 123133 - DNA, 217 bp, Glycine max
  Clone ID: PAT_MRT3847_82196C.1
ccggacttaattgctggaccgacgcatgcgtaccatcgatctatctgaaagccttcaaatggtatcatcggatatcggatactggataccggaggttctgcttagcgtcagtggttgtattgtgccgctgaatgcggcgctgcatgctaacgcagtcgtgaatacggcctacatggccttctacgccgtttattcaatcgagtaactgtacacggac

SEQ ID NO: 123134 - DNA, 543 bp, Glycine max
  Clone ID: PAT_MRT3847_82197C.1
acagcaacgcatgactcgcaaatggaatatgaacaagacaacagcatggaagacttcttgagcagaggcggagtccttaccctaggcgatctcacagcgggcataatgggcgtgagttcaggcgaagagtgccgcaaattgggcgcgcatatcgcggcacccccggcagaaccagcaccagaccaagtaccaccgcctgataccacagatgctggaaccccaccctacaagaaacttggtctcgacgatggtgtcgacggcttacactattgtcctgatgaagccgagaaactcgaaaaactccgcaagcagcgcgctgaactcttccaccgccgagatatgctaactgcacgaaacacgttcctcacgtctagtgcgccaccgctcaaagagcatcctcgacatacttaagaagaaagatcccaaaggcggctggaaggatatctgcagcttcgatacccggcttgcctggtccgacgaggaattcgacgagtggaggtttgtcagaaccaggtaaataggcgttggaggagggcacgcctg

SEQ ID NO: 123135 - DNA, 326 bp, Glycine max
  Clone ID: PAT_MRT3847_82198C.1
ggctcgagcgccttggctgtagtatgattttgaaacccccacccgttcttatggtccatggttcctccagcgttctatgattgcgagtcccatttcattaggggatgatgatgatgcccatgaacgccataactgtcacgctactcttggaaagagtccagagccatcactgtcgtggagtggctctatagctcgttatacctttcgcatacaccagcttcaactatgctattcaaaccacagatgttatcttgtggccgctcttatgtgggtcaattgcttgaaccctgccacttccgtaccttggcaattgcagccctccagtt

SEQ ID NO: 123136 - DNA, 657 bp, Glycine max
  Clone ID: PAT_MRT3847_82199C.1
cgaattcgagctctttacccggggatcctctagagtcgacctgcagctttacaaaacgctaaaacatttatagagaagtaattctcataagcatagaataaaatattagattacatagctagctcttaactggcttaattaaaccggccgaaaagaaagcacacgctcacttgtacaggttctaggatatagttgggacttgtgaatcatgatcgtctttggaaaataataacatttttttatataataacgtatgtgtaattatatatggtcttgttagaatagttattatattatataattacatctaagatgcatgtattaggaatattggaatgagcagaaaacgccctcgatctggatcattcttctttgactttgactcatacgggtgagagtactagagatcaaagaccgatacattttgatcttagcattaaattaaagcatacaaatatatgcaacaatgaaacaaaaactacccttttcttttaaattcactgtccatacaagtgaagaatgtgcatcaaaacatatatatgtatacatatatatatatactgtaagggcacatgaagaagacaccaaatgacagtacgtgtggctatataagatcaacaatagataggtaagcatattatctatactgtattgacg

SEQ ID NO: 123137 - DNA, 732 bp, Glycine max
  Clone ID: PAT_MRT3847_8219C.1
aatgtctctgcttgagcccttttgtcctccgactccgagaacgacctccccatctcgccgtctcatattcgatcgcaccagcgacggtatagctcgcccataatgcttgccaggtcgtgtttgcgctcgacgcgcaccttcaatggcctccggaacggcccttctgctgtcaccaagcgtgccgcttcctcgagctccagcgccgccagcgatgcctctgccactcgattgaacctggctgccgccgcctcgactaccctcgccctcggctccatggcctggtactatcacctttatggacctgttgcctttgctatgactcccgctgaagagggacttcacgctaccaagtacccttgggttcataacaagtggttcaagaccttcgaccaccaggctctccgccgtggtttccaggtttaccaggaggtctgccagtcctgccactccctcagccgaatcccctaccgaactctcgttggctccgtcttgaccgttgacgaggccaaggcccttgccgaggagaacgagtaccccggtgagcccgatgagcagggcgagatccagatgcgccccggaaagctggccgattacatgctgcctccttacaagaacgaggaggctgctcgatttgccaacaatggtgctcttccccccggatctgtctcttatcatcaaggcccgtcacggtggctgtgactacatcttcagcttgctcaccggctaccctga

SEQ ID NO: 123138 - DNA, 1380 bp, Glycine max
  Clone ID: PAT_MRT3847_821C.1
atttagacccggaagctgaagttgtcgccttgtctccaaagactctcttggcaactaataggttcatttgtgagatctgcaacaaaggatttcaaagagaccagaatctccaacttcacagaagaggacacaatttaccatggaagctgaagcagagatcaagcaaagacattataaggaagaaggtgtatgtgtgcccagaacctagttgcgtgcaccacgagccttcaagggccctgggggacctcactggcatcaagaagcacttctgcagaaaacacggcgagaagaagtggaaatgtgacaagtgctccaagaagtatgctgttcaatcagactggaaagctcactccaagacctgtggcactagagagtacagatgtgactgtggaaccctcttctcaaggagggacagtttcataacacacagagccttctgcgatgcattagcagaggagagtgcaagatcagtgacaggcatagtagccaactcaacaactcaaccaactgaagcagcaggagtagtgatctcttcatcctctcttcatcaagacatgatccatgctagtaataataatttcccattgaagaaagagcaacaaggttgcataccccattggcttgggcaaccatcaccctcttctgcttcatcatcattcttgttctctcatcaagatcatcatctccatgaaaaccctaaccctagaggtggtcccactcttcttcctcctccttaccaccaaacagctcctcacatgtcagccacagcattgctgcagaaagcagcccaaatgggtgcaacgatgagcaaaaccggctccatgattaggacccaccaacagcaggctcacgtgtctgccaatgctgctttgaatttgtcctcacgtgaccaccagatgaaccccactccccatgacttgctacctttcgggaataataaagctgttgataacggtgttggtgtttctccttcactccttcatcatgttatcaattctttctcttcttccccctttgaagggacttttgaggacacttttggtggtggcgatgccatgaccgccgatgaaggtggcggtggcggtgccggaggaaacaataacgaaggcttgacaagagatttcttgggtcttagacatctctctcacactgatatcctcaacattgctggcgtgggaaactgcatgaactcctcccaacacaaccaaacccgaaacccttggcaaggttaactccatatgtcttatacatatttggattctttttctttaatatattaatatacatttattttagcttatttttaaattttgcttttgtttatgatatatattgtcaatcttcccgaacctttcggaatcccaatattttctttcctta

SEQ ID NO: 123139 - DNA, 259 bp, Glycine max
  Clone ID: PAT_MRT3847_82200C.1
tcagtagagcagagaaagggatatcaaaagggctgattcttttggaacctcgcgattcctgaccgtccaagtgttaaccatcggattaaggtctatcgactcactacgtatgcagcgtatagagctcatgagaaggagtccgagatcattatctactctgctcagccatccatgtaagaagtcttcctcgcaattggtcttctagcttgtatccgtcgccttacacgtcgcataactttgatctcatactatcatcgcc

SEQ ID NO: 123140 - DNA, 247 bp, Glycine max
  Clone ID: PAT_MRT3847_82201C.1
attggctgcaaacctatgcatgaaaagggagagacctcaatgtcacaaacatcgagcctggactagcagatcctctgtacagggagcttgcctcttacataatccactatggacaacgtgctcaacccacatctgatgctttcaactcaaaacttaccttgggtcagccaaacaactccgataccgtagagaatatacctcatacagaggaggactggaaaccggataccctttctaatacgaggtg

SEQ ID NO: 123141 - DNA, 340 bp, Glycine max
  Clone ID: PAT_MRT3847_82202C.1
attctacattttcacttctgaattcatgactgacgagcgaggggcacaaacagaacactaccaaaaagacccaaaagggctctgacataaccctcacgaaaatacaaaactatattacagatcaggcacctcaccaaacactaactaacagaaagggaccaggacactgtaacaaaccacatacccctttatctcgtaaacaagcacatggataacggagaagggctctgtttctaagaatggactggacatacccatccccgaactcgcactgcaacaacaacttgtccatacaatcccctaagagcctccaggtcacggggagccttttatcaccccc

SEQ ID NO: 123142 - DNA, 370 bp, Glycine max
  Clone ID: PAT_MRT3847_82203C.1
gcaccagctgatatcataagcttagcagaggtcaaggcaagttagaagtctattctaaaaccatgagcaagagatcgagaaagtgaaaaaccatgttcattattatactttttcattttggtgtaattttttttaaaatttcttgtttagctttttgtgttaagaggcattagacattacagagtgggaagtatcatgcatgcccttccgagagaactagtttctgtcaataattctaccttgataatggcatgtaaccataatggaacagagcattttttggagttcaataatgagattgtaaataagggtgcacaaatttaactgtgcatcttttggtgtccaagcatttaaaaaaaaaaaaaaaaaa

SEQ ID NO: 123143 - DNA, 461 bp, Glycine max
  Clone ID: PAT_MRT3847_82204C.1
gctgcgagaagacgacagaagggggaggaaatgatttctaaaactagttcttatggttgtacaactgctctttatttgaatctctcttgccttgaagaagccaagcctatgattggcgtgactcaggctgtccagttcctaatccagcttcttcaatctgactctgatgttcaatgcaagcaagattctctccatgctctctataatctttctactgtgccctccaatattccatgcctcctttcatttggcatcattagtggcttacaatcccttcttgtaggcgagggggatagcatttggacagaaaaatgtgtagctgttttgataaatttagcaacttctcaagttggaagggaggaaatcgtatcaactcctggactcatcggtgcattggcttcaatattggacaccggggagctcatagaacaggagcaagctgtctcttgtctcctaatttt

SEQ ID NO: 123144 - DNA, 322 bp, Glycine max
  Clone ID: PAT_MRT3847_82205C.1
ggctcgagctgaatattgacctgttggcgaagtctacttgcctgccaacgaaggatggcatgctaacacgtggtcactggccaaagcgaatggtgaagtgaatgatgcattctaccaacaaatcattccgcattggctgagcactcatgctgtcggtgagccatcatggataccaacgaacaggcatctgccggtggtgcaccctaagtacaaacttatgtttcctcactacctccacaccatgcatcataagtcacttgcccgactagcgctttccaccgcaacatggaattataaagaaaacattctcgttggcgtggta

SEQ ID NO: 123145 - DNA, 1424 bp, Glycine max
  unsure (1)..(1424): unsure at all n locations
  Clone ID: PAT_MRT3847_82206C.1
ggatgaaatgatttctaaaactagttctgatgggtgtacaactgctcttggttggaatctctcttgccttgaagaagccaagcctatgattggcgtgactcaagctgtccagttcctaatccagcttcttcaatctgactctgatgttcaatgcaagcaagattctctccatgctctctataatctttctactgtgccctccaatattccatgccttctttcatttggcatcaggctgggggttgggattcccagagcctgttcctacggttgcacaaccgctagatagtgtcagctcttgcaagttgaagggggtccgtgtgtttcctttggaagagagcggtatctcagaggaatctgtggaaaatggaactgaaagtgtttctgcacaagaggaagaccctgagcagtattttagctttctgaaagtcttgactgaggggaacaattggaggaagcaatgtgaagtagtagaagcttacaatcccttcttgtaggcgagggggattgcatttggacagaaaaatgcgtagctgttttgataaatttagctacttctcaagttggaagggaggaaattgtatctactcctggactcattggtgcattggcttcgatattggacaccggtgagctcatagaacaggagcaagctgtctcttgtctcctaattttgtgcaatagaagtgaggaatgcagtgagatggtcctgcaggaaggggttataccagcattggtttcaatatcagtgaatggaactccaagaggtcaagaaaaagctcagaaactcttaatgttgttccgagagcagcgacgggacccttcaccagttaagacacataagtgcccacctgaaactgctagtgatttgtctatgccacctgctgaaatgaaaccgatatgcaagtcgattttgagaagaaagtccgggagagcttttagctttttctggaaaaacaagagctattctgtataccagtgttaagttccattggttgttgtaaatctgtgttagcatgttttatttttgtggccctgtttttatcctcctatacttcctcttcccatggggtgctgcttatttttggttcaaagcgaagaagagatgtacaggcctttgtaatttatggattttgttttcttctttcgctttcctctttgtaatatcaattttccatgtgttgttgcaaaaaaaaaatattctctttgtgtgtcttttctgccggtgcgtctccgagggggctggtatgtcccccggcgctgccattctgtgccgtgcgctgttgaacgttaactgtgaactagtaactatcttaaggtgtttcatggtgaacccactatagagtgttcnncaatagtacgtcnnngtaaagagtgcaagttctgttagaacctcagcgtatgtcgccgtagccattaggcca

SEQ ID NO: 123146 - DNA, 367 bp, Glycine max
  Clone ID: PAT_MRT3847_82207C.1
aagatatttagaagaccaattggctcgtaccaagcatatcgctctaccgaccgcaggaggaagggctgctatgaagcagcttgcaaccaaggctgcacgtaagcttgcaccatctactggcggcgagacgaagccccaccgatatcattctggtaccgatgctcctcgtgagattaggaattaccagaggagcacctagcttctgatgcggaagctgcccttccagaggctggatcgtgaaacacgctcaggacttgaagactgatctgcgtgtccagagccacgccgcgcttgcattgcaggagggtgctggtgcataggttgctgggcaatttgaggactctatcctgagtgctattcacgccaa

SEQ ID NO: 123147 - DNA, 362 bp, Glycine max
  Clone ID: PAT_MRT3847_82208C.1
cgcccaaaatgttttttaaattaacttgaaaaaaaattttgggttttttaaccttccaaccaaaattttttggcccccgtttcaacgggaaaaaaaacccaagggggggaaacccttccccagaaaaagtttccggaaaaattaaataaaccacattttttttttttaataattaaattttccccctttaaaaacaagggctggaaaccttttcgggggtggggtttataaaaacacccttttaaataaccccagaatttcccccttcgatgaggggcccggcccaaaaaatccaggggttggtccaggtccagtttaaaaaagggggcccaaattttaaaggagggtttatggtttttccg

SEQ ID NO: 123148 - DNA, 490 bp, Glycine max
  unsure (1)..(490): unsure at all n locations
  Clone ID: PAT_MRT3847_82209C.1
aacgtaattgaagaaagcagcganacagaagacaccgcgaaccaataaggaagaacaccggccgaaagcacccncaagcagcaacaccaaagcagaaaaagaaacaacccacgaccaggcaaacaaaaagaccaacacaaaccacagggacgagaccaccaggacccaaaccaacaccgaccaccacagacggcccgacgccaaccacaaacaagcgacccccaccgcggagacactctacacagacaaacacgaggcccatggcacaaacgccagacccacacccaaggacgcagacacacacgcaaaacaacccggcaaccaacacgaacccccgaacgcaaaaacaaacagcacaccacaagaccacccaacgaactcggactagacaaagccaccaccaagaaacccgacacggagcaacagaaccaggaggccaaaggacaacacacaccggcgacaggccagagctaaaaagccaaacgacacg

SEQ ID NO: 123149 - DNA, 395 bp, Glycine max
  Clone ID: PAT_MRT3847_8220C.1
ggaaacaaattcaccatctttgggggataagcttgatccaattacattggtttaaatcaaaaatgcctaacagggtttacatttaaccaaaaatacccgtgctggttccaaatttcatcaactcccatgacctgaaaacagaatgtgtgaaacggacaagttgagatcccaactgcggatttttggataaccaaaaaataacaaaatgcctgaattcattttagggatatgtagagcccatatgatatgaggactgcaacctctgctaactaataacatttattaatccaacaaaacaaggggaaaaagaaaaaaaaagtaagccacttttgtgtgagagttaaaaaagtattgaaggggtcctgggtgagctgttctttttgctgtgttgttgg

SEQ ID NO: 123150 - DNA, 1018 bp, Glycine max
  Clone ID: PAT_MRT3847_82210C.1
tcctgttctcaccgcaatgtcagcaggccatgttctccatgttttcattaatgatcaacttgcaggaactgtatgggggggattggcaaatcctaaattaacatttagtgacaatgtgaaactgagggttggcaataacaagctttctttacttaatggggctgtcgggctcccgaatgttggtgtgcactttgaaacatggaatgcgggggtgttaggcccagtcactctgaagggtctaaattgtgggacgaacctcttctggtagccgaaatggtcttacactgtcgggactgaaaggtagcttatcaacaggcttttatagacttgaacgaactgcctcttgaagctgaaacagttgaaaggggatacagtttgcctgaaattactaccggcttacctaaaattcgtggattgccaacttcatctatgtattctactagcagttcgggagactattatgaagcttctcccaagaacacaaagtctaaaaataaaaagtcttcacattctggggaactccaatctccatttcaggattcaaacggaaatggagggccatacacgtcaggttatccaatggctggtgaatgaactcgctgattgtgcttgttagtccaagaaatttgactcagcgtttaattatttgtttatgcttatgcaatttttgaggtttgcaactcctcctggagctggactgcattcagttactatttttcccattaaaatggtcctgagtgttggtgggtgctttctttatctaagttcccttttgttcacatatagcgttatttaccaaggctccggaaagaataataggagcagatgatttttcagttgagagaattttttcactgtattcatgtatattactattaccatttttgttggtggctagtcagctattgttcatagcaattttctagattgatgcattttttcatttttgttcaccacaataactagcaggttgactgtatgaaacagctagtaatggctggcagtattgatttttttt

SEQ ID NO: 123151 - DNA, 367 bp, Glycine max
  Clone ID: PAT_MRT3847_82211C.1
tacggctgcgagaagacgacagaagggcattatcatatttgataatggaaagtatgctttaaaagggtatgggtaaagggaaaaaagagatatattaatagaccaactgaagaagctggaaaacaccttgtatataagaattctgatgaatcctaaagctccagcaaggtgacaatcagtccactgaaccaggaaaaggaaaaatttagcagcttggctgtaggacaatctcaattggaagcaagcaccaccacttggatacttagaagctctgattcaaaccatttttagcacaaacaattagggtaaacttcgaaatgattttatttttccttctaacttttttggtttagaaaattttattatt

SEQ ID NO: 123152 - DNA, 195 bp, Glycine max
  unsure (1)..(195): unsure at all n locations
  Clone ID: PAT_MRT3847_82212C.1
gnttctctctctttgtaactngtaagcatggagtnntnaaagaannatgnttacctntnccnttgcatgctcttcntctagtgtgnaagtnccattctcggttgtgggnantgtggcaanccccccaagaagnnnaagcctggtaaaanaccaangacacncacagtacccgttgttaagccaccagtcagaatc

SEQ ID NO: 123153 - DNA, 408 bp, Glycine max
  Clone ID: PAT_MRT3847_82213C.1
gcgagccttatcctcttaatctttttacaagtcttgcaatctattaaccttaatccattctcactaacccatagagtgtgttagaataagcatgggggagagacctttccttcctatccttcattaattcattcctcgcattataaaacctctccttatcactttctatgagctgtctcctaacttactgcttgatcctatcattcataacttcatacctactcatataacttcacccactatttcctatttttttgcctacaatccttactcattctattcactcaccatatattgttcatgtacccttcaaaacgacatgttgccgtctattcgcttcgataatcatactcctaccccattctattctcatttgaaaaactggaaccaagtccacccataattcat

SEQ ID NO: 123154 - DNA, 249 bp, Glycine max
  Clone ID: PAT_MRT3847_82214C.1
gccatttgtcttggaaaaacaaattgtattgtaagtgcttggtgactagtttattggaatgttagtttgttcaaaaaaaaaaaaaaaaaaaaaaaaaaaaaaaaaaaaaaaaaaaaaaaaaaaaaaaaaaaaaaaaaaaaaaaaaaaaaaaaaaaaaacaaaaaaaaaaaagaataaaactatatacattcaaatactactaggattacatagacatgtacaaaaaccagatataaaccaacgcataaa

SEQ ID NO: 123155 - DNA, 427 bp, Glycine max
  Clone ID: PAT_MRT3847_82215C.1
aaaacttttcctggtagaaaaactctgaaaagcacttacttaaagctttgtatccagacaagttcaagacgacattattttggtcatgtggctagtaaacacgagattttgatcttgtaacaaagttaaggttaactatccctttattgctcatgttctatacaactttgtacaggtactggcttccagtccaaagggtcttacttgtttggtcacttcagcatgtacataaagatggttcctggagattctgctggcacagtcactgctttctatgtatggacaaaatgaaaaaaaaaaagtttctatttttatttgcttcagtcattgtgtagtatgtgaacgtgacctttgttttgttatggttggaactgtgcagttatcttcccaaaacgcggagcatgatgagatagactttgagttcttg

SEQ ID NO: 123156 - DNA, 599 bp, Glycine max
  Clone ID: PAT_MRT3847_82216C.1
ggctcgagatttttttttcttccaaatgatgcacttcttatttataaaaatttaggttaaatttaaaaggataaaaagaagagagggaaagagagaggaacaaggggtcttggggcagggtctagtgcttataaatactctggcattagccagcccacgcgtccgcccacgcgtccgaaaaaaatgggttcttcttcttccatatggaccgtgtgtttgattttggcatcactggcctctgcagcactctgtgccaaccctcgtagaccagtggatgtacaatttggccgaaactacgtgcccacatgggcctttgatcacatcaaatacttcaatggaggttctgacattcagcttcatcttgacaagtacactggtactggcttccagtccaaagggtcatacttgtttggtcacttcagcatgtacataaagatggttcctggagattcagctggcacagtcactgctttctatttatcttcccaaaatgcggagcacgacgagatagactttgagttcttggggaacagaacaggacaaccttacattttgcaaacaaatgttttcacaggaggcaagggtgacagagagcaaag

SEQ ID NO: 123157 - DNA, 675 bp, Glycine max
  Clone ID: PAT_MRT3847_82217C.1
ccacgcgtccgacgaacgatacgagcgggaaagtgaggaaccgaaccacacgctccctctctctctcttttctcagtagcattggagtttgagattgcgtttttcgaggacgacactatataactgttttatctcgcgttttggggttgctcgccccacactttcactcccgctgcgacgtcgtttttgcaccaaacgacggcaccgacactccttgcttcttctccaagctagacgacccttcgtttctctgcattcttcacccaccgcttctccgttgtgcagctgaaaaagaagcattagcattttcccaactgcactctctttgaacaacaaaaaggttgtacattgttttcaaagccacagctgagatggtttattcagctgatgccaggtcagagtgaaatgctggaaaccatccatcagaatgaacagaaaaattaatgacaggttgaaactggagaaagcttctttgtcatatgctgattttcgtcatgaaattaccaaaaatgacaaagacaactctttaaaaccttacggaaataagcaaaagcaagcaacttatcaatgggcaagtgaggaagatgaactggttaagtatatgtcgaatttaccaggttacttggagaagggagaaaaaattcctgataaagctttgaatgttggggtgcttga

SEQ ID NO: 123158 - DNA, 1613 bp, Glycine max
  unsure (1)..(1613): unsure at all n locations
  Clone ID: PAT_MRT3847_82218C.1
aaaacttttcctggtagaaaaactctcaaaagcacttacttaaagttttgtatccagacaagttcaagacgacattattttggtcatgtcactagtaaacacgagattttgatcttgtaacaaagttaaggtgaactatccctttattgctcatgttctatacaactttgtaccggaattcccgggcttcagcttttccctcgttgaaatgacagcgtccgcccagagaagaacaaacggggatcacaattcagcttttccctcgttgaaatgaaaatgggttcttctttgtggactttgtgtctaattttggcttcactagcctcttctgcattctgtgcctttccacggaggccagtggatgagaaaaaatgggttcttcttcttctatgtggacggtgtgtgtgattttggcatcactggcctctgcagcactctgtgccaacccacgcaggccagtggatgtacaatttggccgaaactacgtgcccacatgggcctttgatcacatcaaatatttcaatggtggttctgacattcagcttcatcttgacaagtacactggtactggcttccagtccaaagggtcttacttgtttggtcacttcagcatgtacataaagatggttcctggagattctgctggcacagtcactgctttctatttatcttcccaaaacgcggagcatgatgagatagactttgagttcttggggaacagaacaggacaaccttacattctgcaaacaaatgtgttcaccggaggcaagggtgatagagagcaaagaatctatctctggtttgatcccacgaaagaataccacagatactccattctctggaacttgtatcagattgtgttctttgtggacgaggtgccaatcagggtgttcaagaacagcaaggacttgggagtgaaattcccattcgaccagccaatgaagatctacaacagtttgtggaacgctgatgactgggcaacgaggggtggtttggagaaaacggattggtcgaaagcacccttcatagcagcgtacaaggggtttcacatcgacgggtgcgaggcttcggtgaacgccaagttctgcgacacgcagggcaagaggtggtgggaccagcctgagttccgtgaccttgacgccgcccagtggcgtaggctcagatgggtgcgccagaaatacaccatctacaactactgcactgacactaaacgctatcctcatatctctcctcctgagtgcaaaagagaccgtgacatttaaatttcgagtgaatagatattttagtccgtgatatttaaatttctcattcactttattattgttgcttctcttttcatttttatcaccctgccacacattcacatttccacttcctatgtacaattttatataattatatcctatcatgtcagtttctccttgaattattaattatttaatatgaccaaaataattattcatcatcattaaaaaaaaaaaaaaaaaaaaaaaaaaaaaaaaaaaaaaaattccggggggcccaacctttttccctttaggggggggtaatttaaactgggcccgggcccnntttttaaaaccgtgggggggggaaaacccgggggtccccaa

SEQ ID NO: 123159 - DNA, 383 bp, Glycine max
  Clone ID: PAT_MRT3847_82219C.1
gggagaccgctggatgcctgcacgccgactctagagatcctctggctgaaggccaatttcacattttcaagaaataacgacgcagaaactgttcatatatgaattggaatcattcgctttcttattaggcctatcctgaagccaaaggaaatgagatcggaattcctcgacgaattccaattccacattttcaagaaataaagcggcacaaacgttcatatatgaattgtaatcattcgctttattatttagcctatcctggacccaaaggaaatgatatccgaattcctcgccgaagtccaattccacattatgaagatataaggaggcaaaaatgctcatatatgaattgtaaatatctaggctcttattaaggctatcct

SEQ ID NO: 123160 - DNA, 653 bp, Glycine max
  Clone ID: PAT_MRT3847_8221C.1
taggaattaccctcacctttagattaagaagaagaagaagaagaagaatggttttagttgaattgaacaattgtgcgtaaaaccctaatttactaaaaagcgaggatggaagaaagtaaagcgaaaccggtgtgtgcagaagaagccctcgctcttctcaattgcgtcactcactctccatatgaagaagacaaatgccttccccttttgcattccttgcgccactgcgtcctcgccaagaaagtgaagaacttttccctagctggacaggaaaaacaggaaactaaacccagtggcaagaaggcttaattggcatctctgcatcccaagtgccttctaattcatatcttcatgtaccagaaactgttcagtttcaaatctgaatttctcctatccacaaataattgattttaacatttttttttttttggttttaagtgtaaagttgaatgggaagtgaaatcaatgatggtttgcatctctcatcatcggttattatgttagttttgccccttcctaaccaccttaatcataactgtggtgtgtggttaatattgcctacgatttccactttaccctgttcagcttaaacactgaacccctttgcaggatggaatggaatgtatgacttgttacaatgaatgtgtttctag

SEQ ID NO: 123161 - DNA, 549 bp, Glycine max
  Clone ID: PAT_MRT3847_82220C.1
ttttgaaaaattttaatggaggcgctgttgtgcagaaagctgggtgatgcaacggtatctttggaagacaacgatgatagcccaatagttctgtcaaagaatcatccaattgcctaactcgatgttcccactgcagcaagagtgagaattatagccacatgcttgaactttgccaactacttgcagatactgggcaagtaccaatagaaaccctttttgccctgcattcccggatcggatttttttggcttcgtcgacgccgttggatacaaagtttgcaaattcttagtcagagacgcctgttgctccttcatcggcctcggattcttatctcagttcatgatagttgacgagtcccatatgtttcaagtgccccaaggatgtgatcttgctgctgctgcggcacttgcagtagcctctgagacttcttatttagcacattgtcgttaggcccaatggagctccggacatgagttgttagttttggccgcaccttatagagtggatatttaggtgctgtgcaaatttggaaaagaaatgtggtggcca

SEQ ID NO: 123162 - DNA, 1996 bp, Glycine max
  unsure (1)..(1996): unsure at all n locations
  Clone ID: PAT_MRT3847_82221C.1
gcttggttgtgtttgagttgagcttgcgcaaaacccctaaaccctgtgaatgaagaagagtggcgaagaaaatgggggcaagttcaagctcaagggtgcggataggtcagcgtacttcgcacgcagagaggcagccaaggtcttgaaagtggttctcgaaggagacgctaagcgccgcgctcttgcctccatcaaatccctcatctatcaaccttccgttagaaacaagaaagccacattcgctctcatttgtcaaaccctaaaacgtaactaactacctaccttttcctctctctaaaataccatatcatttctttcacgtgttcttgtgttgtgttttgtttggtccccagatcttcccattatcaattatgtcttggaagctgcttctattctcaacagcaagtggaagaggcaacgagaattgatttatatcattgtctatgatattcttttcggccaggcggttccactagttggtgatgcagagaagttccttatgcgccaccaagatgccctgcgttctactctcaaacagcttttgttgcagagaaatgtcaagacagttaaacagttgattgctctgcatcaagttcctgatgtttctgtacctcgatatgttcgtgtgaatacacttaaactggacgtcgattctgccttgcttgaacttcagaaaaactactcggttcaaaaggatcatttactgcctgacttgctgatactcccaccaggaactgatttacatggttgtgtttgcgacttttttacaagaatctcaaaaacactcccaatagagaagagaaccaagcactaacaagtcgtagcaactctaaatcttgaggtgagcctgcgcaaaaacccttaaccctgggaatgaagaagacggagaagagtggcgaagggaatgggtccaagcttgggaatctttttcctaacattgagacaaacttatgttaagggtaaggcaagttccatggcagcaccagcccttagccctgaaccaggatgggaggttcttgatgcatgtgcagcaccgggaaacaaaactgttcaccttgctgcccttatgaagagaaagggtaagattatagcatgtgagctgcaaagagaaaggattaagcgtttgaaagacactataaagctatctggtgcttctaacatacaagtcctcaatgatgatttcttgaaccaaaatcccaaggatccttcatattccaaggtgaaaagctattcttttggatccttcctgctctggttctgggactgctgcttcaagactagaccatctgctcccatctaaagcagcaggtcaggatactgatacagaaagattgaacaagctcgcaactttccagagaaaggctcttcaacatgctttactttttccagctgttgaaagaattgtatatagtacatgttcaatcaaccaaattgagaatgaagatgtcatcaaatctgttctgcccatagccgaatcaaatggatttcaattggcaaaacccttccccgagtggcaatgccgtggtctaccagtgtttgaaggctctgaatgcctggttcggacagatcctgctaaacacggcgagggtttcttcatcgctttgtttactaggaaagatgctaacttttcagggggctcaaataaaaatgaaactagaatttcccacagcactcccgaaattaaaaacgcgcgaagaaagaagaaacgcgtaccgtttgttagcactaacctattcaaaatgtggttatatgatagtacaattgttaagtcttggcggtcgaattgaagggatagaggtggtggttagatacaaaattatacttcctttattgatgtccgtctaaaacccatttagaaaatggattaactcgagtttgtattttgttttcattctgttacattttaaaataattttcattacaaaaaaaaaaaaaaaaaaatccagctatgccgcgaattggataaagcttacattcaatcaaccanattaagaat

SEQ ID NO: 123163 - DNA, 502 bp, Glycine max
  Clone ID: PAT_MRT3847_82222C.1
gatattttaggagctcagacggtatttttttaagaagactgtaagaagagaattttaatttctcactttttagaaagaaattgaaattccagatttttagttgtttaaaattctgttttaaaattccaaattttaaattttttataaaaagcatccaaacaataaattctaaattacagaaatttaaattctctgataaattactttcctcaattaaaattctctatccaaacgcactattaatgaaattgtgatgcaatatataccattaggagcaattgaaaattagttcttaccttaatgtggtgcaggtccgtggcctgccctgtgctcacaattttcatgttgaatgcattgatgagtggcttcggcttaatgtgaattgtcctcggtgccgttgctcagtatttcctaaccttgatcttagtgctctgtccaatatccgttctgagtctgaacaatcttctgccactgctgtgacaagcagagatatgacaggcca

SEQ ID NO: 123164 - DNA, 495 bp, Glycine max
  Clone ID: PAT_MRT3847_82223C.1
cgcccgcaggaccggtccggattccggcacgcgtcacgccggctgcgagaagacgacagaaggggagcacttgtttgtgttaggtactctaaatcttgagttgagcctgcgcaaaaaccctaaaccctgtgaatgaagaagacgaagaagagtggcgaagaaaatgggggcaagctcaagttcaagggcgcggagaggtcagcttacttcgcacgcagagaggcagcgaaggttttgaaagtgattctcgaaggagacgccaaacgccgcgctctagcctccatcaaatccctcatttatcaaccttccgttagaaacaagaaggccacattcgctctcatttgtcaaaccctaaaacatcttcccattatcaaggatgtcttggaagctgcttctattctcaacaccaagtggaagaggcaacgagaattgatttatatcattgtctatgatatccttttaggccaggcggtttcactagttggtgatgctgag

SEQ ID NO: 123165 - DNA, 420 bp, Glycine max
  unsure (1)..(420): unsure at all n locations
  Clone ID: PAT_MRT3847_82224C.1
aagaagcgtgggcggacgcgtgggttgtgagagtgccacgttacatcttcatgcagtctctaatacgtgtctttccttgctgtcaccgctacacgctctaatccgtggcatgtttgtttctgtttttgattatttcattgctcccagattcagcanaatatatacatttattaaagttagaaccgaaaacaacaacctttgagttcgtgattctctgacctttgattttaatcaacaaagttatcttgatagcttttattgatattgttataaatataaggtagtgaggaatttggtggtatgaacgtaaccattattactataatttgattaatatatgggtatggtgccagtgaatttgattcctgaggtattgaggaatttggttcatgagcacgcactagtggtgcccatatcact

SEQ ID NO: 123166 - DNA, 293 bp, Glycine max
  Clone ID: PAT_MRT3847_82225C.1
caaattcacccatccttttgaaccttctttcaaatttaagaaaaatcaattggagttgtaattatatcgagccccggtcttccttaattatcttatctgtttctgcatagcttcaaacatcactacatctagcacagatgccccaactacaaatgtgtcttcttatacctatgatctgtctgcttctaattcatcttctgttattaatctttaacatactataaaacaaattattttcatatttataatcatttcgttcatacacacaactattcttgctttttaaacttctt

SEQ ID NO: 123167 - DNA, 621 bp, Glycine max
  unsure (1)..(621): unsure at all n locations
  Clone ID: PAT_MRT3847_82226C.1
gcatgcccacgccgtacgtannnagctcggnannattcggcttcgagaagnnaagaagttnnngttgggttgnnnagttgggnntttggatttgtganntttctatatctananntctatacccnntttctgttgttcccttatgccgttttaagggcacgagaatccccttcgtgcccttctctttcttctnnttcttcnnttcttcntgcctgacccccttatntnnattattnnccttgnncccttaccccnntttaggcnnaagggaannggagagaaaggaataaccctatatnntattatcnntttattgnntaatctatctttttanttanntaattataattatttaattattgggttgttattaattnnccttaannntatggattcgccccgtgtctctccaacccgattcggtttctggaattcaaagaccaagtgagtcaatgtgttgacctccctttttggtctgagggctcttccagannaaccctcgttncaccgcctcaaccatttttgaaggaatggagcctggagaatcccaagaagtttttgaatatatgctgatccagctgcattnttgaagtttcaatcatnttccctttcttcctaatc

SEQ ID NO: 123168 - DNA, 524 bp, Glycine max
  Clone ID: PAT_MRT3847_82227C.1
atttttattttttttttttttttttttttttttttttttttttttttttttttttaaaccaattttttttttttgtttagtgaaaaaaaattttgtttttttacaggctttttttttccctttgtttaatgtaaaaaccggcaccggggcccccacaggagaagccacagccataagtggaaaccccaaagtttccaattaggggggccaattaacataagaggaattgggtgagctaactgcctccctggggaaaaaaaagcccgcgcccccatttccaaaaaaaaaccaaccggaaagtaaaagggggaacccgggggggccccaaggggggctatatttaaaacaatgggagggggcagaaatgattgtcttaaaagggaaaagcctgaaagaagttgccttaaacaaacacgcacaacctggcgcggaaaggggataatctgtttggccggggggggcgtatttttttaacaaaaaaaagaaatcaaaagggggttacccaccaccccccagcccaaaaa

SEQ ID NO: 123169 - DNA, 536 bp, Glycine max
  Clone ID: PAT_MRT3847_82228C.1
atgtggagttcttacactcaccttatgcaccaaccataatcagaagtaccactgattaggctgtgcactaacacagtgcgaacacctgcagccttgtgctccatataagaataagatccactattctaaagtgatttaaaaaagcatatttatgggtttctagattgtgcctcttaagaagaagaaaaaaaaagaagctaaagctttgagttgagttgagggtacgtagtacaaggaatctaactgttgcccccaaaattgatgtgattaacttctaacctcaataaactcaatgatattggtttttgaacaatactaacatatctttgggttggtccaatggttaaaaaagaatagaagggaggggtgaaagtagaaggggagttctcattgattttttatggttattgatgtgcttaagaaagaaactattttgcttgactcactttcattagcataaaaagtgattcacaagagttaggtgttgagatactatccaacactatcatgcttacaataacattaattcaatttta

SEQ ID NO: 123170 - DNA, 144 bp, Glycine max
  Clone ID: PAT_MRT3847_82229C.1
attttcttcttttttttctttctccacccagccttaaatacctatgcgggttcttatttcatcttgaatgtcactacacaactagctaagtctcttaaaaagatatcgtgtaggaagtttctctgcctcctatgaagggcttta

SEQ ID NO: 123171 - DNA, 129 bp, Glycine max
  Clone ID: PAT_MRT3847_8222C.1
attctatgcacctccagcttcttcggacgacaattaagcttaaaaatgagcagctccatcggtgtaaaggcgccaaaaagggttacaacccagccaacaaataattcaatgtgctcaaaacgcgggaat

SEQ ID NO: 123172 - DNA, 564 bp, Glycine max
  unsure (1)..(564): unsure at all n locations
  Clone ID: PAT_MRT3847_82230C.1
ggctcgaggttcaatttctagttgctgctattggatttttaatttgggacactttcctttggacctcactttatggccatctcccacctccacaaggtaaggaggagtatcttgaactctcaagttcagtttatccaccaattctgtagctataaaattgtgggaagccccacaatccaacaatatcacaatagaatggccctgtaataaaccctccactttccaggattttgaagtggtaaatccagacatagagcataatgataattgcaaggatttaaaagtctgcaaactgtcttcttgtcctcttcctctacctcttcttctgcttctagaattatcattctgaattgtctatttttgcatctgtgttctctagtaaatggctcaacacatctaaaacgtagtcccttttctcttttctccctcatttctgcccctgttaaatgcttaaattccccacttctatttctcccactttctacaatttggctntgccttgtaccactcctgtactactcacagtagaaacttcattcttcttatcattttccaatttaaact

SEQ ID NO: 123173 - DNA, 263 bp, Glycine max
  Clone ID: PAT_MRT3847_82231C.1
cctttgcgtctgttcgtctggccttgggattggcgtaggaacaccagccaccacactgcttagaccagggcctatatctgtctcgagagatcgagagagaggaggagaataaagcgactaacattacgcctttcattgagagacatggctcaagacatggccaacggggatctgaacagtgaccagcatcatggccaggatcagggacaacagcagcaaggacagcgggcgggggagggggcggcggatgagcatccgcagca

SEQ ID NO: 123174 - DNA, 434 bp, Glycine max
  unsure (1)..(434): unsure at all n locations
  Clone ID: PAT_MRT3847_82232C.1
ccggaccggaatacttggcncgacccgcgcaggcgnacggctgcgagaagacgacagaagggggagcaagagngaagagcgaagagaanggctcccaagggtttaatctttttggctgtgttatgcttctcagcactgtcactgagtcgttgtcttgcggaggataatgatccgttcttgaactggtgcaaagaancangcccncaggcngaagacataatcaacgaacaaggggggcggcgcgacaaccaccacaagaacacngcgnncnccgggcccagaaacaccccccacgacagagcagnncagagnngngacgcnncacagnngccggaccccacaagaaggagccngncggagaaggaaacaganagaagcnnngggcggagaaacnncagggacaccgagaccancaaagaagccnaggaaaggga

SEQ ID NO: 123175 - DNA, 706 bp, Glycine max
  Clone ID: PAT_MRT3847_82233C.1
ttatttttcttaggctaggcaggcctaacctgcacatgcagatatatatctagtatttcatgatcaaaagcagaaatcttttctccacatatattgcccaattagccatccctagcttcccttttctggacatgtaggcgacacatggccagaaacatggtaaaagagttaagactaaaagttcaggtactttaacctccatttcgtgttgcctttatttcttccataatatttaccactgtctatacttcatacttggcagttttcacatacacgctatctctctctctctttatatattatgctaatcggcgtcctaagagtgagtattgattaaaaaatttaaattaaaaatatttttattcgaaattaaaaaattatgttgttcataaatcttttttatgttttcctataattcattcgataaatatttttttcttttattcctttaaccaatgttttaaaaacattgatcagtaataaccatattatattcccatgaatggctggattagctcaacaaagcaagctcgacatatctatatatggcattaaaagtgagtcagagggctacaacaactatagtggaaaccctgcaggtacatatgcatgtgttccttgctagctatgtcgccgcactattcgcgtgcaatctttattgtaaggctagagcagaaaaaacgtacattcattgagcactttcttg

SEQ ID NO: 123176 - DNA, 239 bp, Glycine max
  Clone ID: PAT_MRT3847_82234C.1
gtgaaatttacagataatcttgttggtgggaacaaagctacaaatgatcataactgagatggcactaaggattcaagataggggggaagtcgtcaagggtgcacctgtggttgagccaggagatggattgttctggttcaatcgacctcgcttcatcctctttttgattcatcttgttctctttcaagtaaattttatgatttattttcctatgattcaacctactgtcaaattgaagc

SEQ ID NO: 123177 - DNA, 348 bp, Glycine max
  Clone ID: PAT_MRT3847_82235C.1
aaaaagcccaaccgtttaaaaattacattaatttcaagctccattttttttgaaattcacatgaaactaaaaagaccttttttacgattcatgaaaccttacatcactaaaacttacatttttaaagctttcttttttgggagggcccctaataagaaagaagccccccaaagttgaagtttgggattttccacaagcttagtcaacttttttaattttagggccaccaccagcagcgggcttgttagcccccattggaacattttcaccaggtccagcagcaccctggtacattttaacaatgatgggggtgcagatcccttccaacttcttttggttggcctaaaa

SEQ ID NO: 123178 - DNA, 484 bp, Glycine max
  Clone ID: PAT_MRT3847_82236C.1
cccatgcgtccgagaaaaagtctctcataagcatacaccatttttgtggcagtgaacaattgcacacctctttgcaaggcaacatgacctttcttgtctagaacttccctcccactaacccataactcatatatggccttctttagagcactcaccgttggtgcaaatgtataacccatttcattgccaacaattacagatcctataatgcttgcaagcctagtggccattactggcttcccagtcagcatggcttctagcaaagtgtgatccaaaccttgtgctcttaaagtggggtttacaaaaacgtcaatagcattataaaaagaggccaattcagcttgctccaatggccccaaaaccaacatatttgccccaagatctgtgtatcttgcaccccaaggaccatcttctgcaaccacaaccatgctactctcttggaaagtgctattttcctcaattatctgcttcaatgcctcaaaca

SEQ ID NO: 123179 - DNA, 285 bp, Glycine max
  Clone ID: PAT_MRT3847_82237C.1
cgtaagctaggatcctctacctcggccgctagggaaagccgtttttaaattttttttggacacagaaagggaaagagtcccgacgcagcacaggcggaggcccccaaaagacgcaaaggtttacggtgcaaaagcaggagccggaaaaaaaggggagggcccaagagctggaccaccgtgccaaaggggaggtgggaacccccgaaaaaaaggagcagggaaaaaacccccccgccggggggggggggggcgccccaatattttagacaggggaggaggagagaa

SEQ ID NO: 123180 - DNA, 1356 bp, Glycine max
  Clone ID: PAT_MRT3847_82238C.1
cggggacaaattttaaggtctggaaggaagccgtagaaattgttctcttctgtacggatttggacttggcactggggagggtatgacccatttccagtctggaaacctctaatgaggtaaaaattgagaagtaggatcggtccaaccgaatgtgccttatgatcatgaagcgctctattccagaggcgtttcggggctctatttctgagggtcaaagtgcaaagaaattccttgaggatattgagcaataatttgccaaaaatgaaaaggtggagacaagtaaccttttggctaaactcatctccatgaagtataaaggcaaagggaacataagggagtacattatggagatgtccaatctcgcatcaaaactcaagtcacttaagttagagcttggtgaagacctgctcgtgcacttggttttgatctcgcttcctgcacactttgggcaattcaaagtgagctataacactcaaaaggacaaatggtccctcaatgagcttatatctcattgtgtgcaagaggaggagaggctgtagagagataggactgaaagtgctcacaataagaaaaggaagaagactaaggatgttgcggaaaagacttcttagcaaaagaaacaacagaaggatgaggaatttacctgttacttctgcaagaagtcaagacacatgaagaaaaagtgtcccaagtatgccgcatggcgtgtgaagaaaggtaaatttcttactctagtttgttctgaagttaatttggcttttgtacctaaagatacttggtgggtagattctggtgctactactcacataagtatgactatgcaaggttgcctgtggagccgactgccaagtgatgatgaaagttcatctttgtgggtgatggcaagaaggttgcagtggaagctattgaaacttttagattgcagttaaaaactggattttatttggatttgtttgagacttttgttgcaccgtcttctagatagaatttaatttcttttctagtttggacaaatttggtttttcttattcatttggaaataataaagttagtctctaccagaattcgaatttgattgattctggttccttaattgataatctatatatggtggatgttaattgttcctataatgaaatactgcaaacaaattcacgtggtacaaaaaggaaattaaaagagaattcaaccactttatgacacaaacacttaggtcatatctctaaacagagaatttagagacttgtgtcggatgaaattcttgaacctttagatttatcagactctgaagtctatgttgaatgaataaagggaaaacaaacaaacatacccttctgtcgtcttctcgcagccgta

SEQ ID NO: 123181 - DNA, 341 bp, Glycine max
  Clone ID: PAT_MRT3847_82239C.1
gaatccaaaatttttgggggccatgagacttttaatttaaatttataattttatatataaaacataatttttttggttcttgcaatgaaaaagtaaatttcctagagtccaggaattcctttttttttggttttttgggggaaacgtgggcaaaaaaagtttaaaatttcgtgtttgcttaacgttgggggttggtttccaaaatgagtttgggtgacggtttaacggtgcatttgaaaggaaggttttccagcaaacttccaaatgtcctttttttttttgaattaaaaataaccctttttaacacgcttttgtttttcccgttgctgtttttttttggg

SEQ ID NO: 123182 - DNA, 111 bp, Glycine max
  unsure (1)..(111): unsure at all n locations
  Clone ID: PAT_MRT3847_8223C.1
gccctaccacctcttcgacggcggcggcatgcgccacgcgcttcgcgtcggccatggcnaaagacccacgctctgcagccgctacgttaggacctacgaatacaccatgga

SEQ ID NO: 123183 - DNA, 379 bp, Glycine max
  unsure (1)..(379): unsure at all n locations
  Clone ID: PAT_MRT3847_82240C.1
tcgaggggccggccgggcccgggatgcgnaagcctagnaannagaaatatgggnngcttcccatagagaagcaagaggcttntggtgagtagctcattcgaagcattcaaggcatattttccccaatacagcgttgngttctacaattcgatactggagaaagcacctgcagcaaaggacttgttctcatttctagcaaatggagtagaccccaccaatcctaagctcacgggccatgctgaaaagctttttgcattggcgcgcgactcagatggtcaacttaaaacaaatgaaacagcggcgcctgacgccgaacttgtctctatgcatgacccccatgcgcccaaagagaaattttttgctgctttccccccccccc

SEQ ID NO: 123184 - DNA, 837 bp, Glycine max
  unsure (1)..(837): unsure at all n locations
  Clone ID: PAT_MRT3847_82241C.1
gcaagtaatgtataaattattttgtgaatttattgtattatattttnttttgtagtatcaatggcatcttcgtcgtcatgttcatcaaatattaaaattaagtttggtttgatcgattgtgacgtattatgaatgcaagttaagcatgtttcagaacatgtttggaatggggaagaaaatcgaaaattacacataagacgagctgtccttaggagaagaagaaatatcagaggaaatattcctctacttcgacaatgtagtttttattagataatgaagatgggctacctaaaaataaatgcatcattaatgactgtcttgattgaaagatggaggcccgaaacacatacgtttcacatgagatgagatgcgaagagtgtacaattactcttcaagatgtctctgtattattaggtctgcgtgttgatgggacaccattaattggtcaaactaatcttgattgggctgaattatgtgaaagaattgctgggagtcacaccaccggaaggtgaacttcaaggcagtgtggttaaattaagttggatggctcaccatttttcacaaataaataaccatgacggcaacgtagaacaactacaaaggtttacccgtgcatgaatccttagatttcataggaggtgtcctatttgctgacaaaagcagcagcaaagtttccttaaggtacctgcaacttttacgtgactttgaacagtgcaacacgtatgcatgaggacctgtcgtgcttgctttttcacatagagagatgtgcagcgcctcctgattacaaaattaaatcaatcagaggtatgtgcctttctgtctcttctcgcagccgta

SEQ ID NO: 123185 - DNA, 663 bp, Glycine max
  unsure (1)..(663): unsure at all n locations
  Clone ID: PAT_MRT3847_82242C.1
cttcggccaagccttcggggaccccttggaatttgcatttcaaactttctttaacggttccattatacacaaattccaattcttttttaaacccttaatttcccttattttcattgccccagaagaacccactggccgggtgggacccggttccgaaactggcttcggcgattcttcccccgagggagaggaggagacccaaccttgagcccaggcttagaaaacccaagagccccaaccttaaaagggtttcagaccttggaacccttccaattaatctttattccaagaaatgggttaagaagccattaccttgcttgagggaaaaaccgggtcgagcccataccccaatggcaaggttattgagaagaacacagccgtttcaccgacttcagaagcttctcttacattgagaagctgcgcgncgaactcgcaagtcaagtgttagtccactacaactgtgattttctctctctcgcgcaagagaaagccgagtgcagtcagctagctagccagccgtggaagcagatctangactaatgagccactagccagcagtgtagctaagcaagctcagcagcaaccgtgtaaacaagtntgtgtgcagccagctgtgcgcagccaagcgtaacagtgcagtcagctgtgtaacaagtgtctgca

SEQ ID NO: 123186 - DNA, 510 bp, Glycine max
  Clone ID: PAT_MRT3847_82243C.1
ggccgccggccgcggaatccggcggggacgcaccacgcgcggcgctgtaacacaaagcacaaagcagaggcgatcctagagagagaaaaggggggcagctacaaacacggcaccgccatcaacatcctggggtgggaaggccgtgaagccggggccaacaacccgagaagagggaagggagagcacgaggaagaccgacaccaagcaggacggcccaagaagcccatggcacggaccagaccgaggcaagaacaggggcccatgcacaggagagcccccggacaacacaaccggagaggagccaggcgagcacgggagggacacagcaggggcccacgaaagacccaaaagaactgcgacaagaaccgagaactcggagcggaacaatcaaggggggccaagcgcggagacccgggctgcgtgtaaccggagctgcaggcccgcaacggggggaacaaaggggaaaccggggggcaaaaggacggggcccagagctcgagggaggggggg

SEQ ID NO: 123187 - DNA, 2102 bp, Glycine max
  Clone ID: PAT_MRT3847_82244C.1
ttttttcccttttttttttttttttttttttggaaaacaggaaccaagcgtcatagactgaataaaagttaagttttagagatatacaatcaagccttgggtacaaaatacacaatcaattttaataacctatcaaagtataaaaaagttgtcaaacctgagttctgggggttataattgagacactgttcaatggaaaatttgttaagtattgatttcgactagacttaataggaaaaatgcaagaaaaagatacggtacaacaatttttatttcgtagggaacgacattccctgaacgaagtgcatttatttgctactgtaaaccaatagggacctttgagtcctgtttcctcttatatcaaacaaagaattttgattcgacgtatactgaacatgatccctgtgcccactcggtttgtttagcagaggtccaattctgatgagctctagggtgaaagctttggctttggtgactcccatgtgaattattaaacctagcattgtgatttatttactgatgattttatatccttgccttgaaatatccccaatgatcttgatgatgatttctttcataattatgtgatctagggtgttgatagtcatttctttcgacaggatttgattgctggcgaggatgattgtaccccaccggtggcgcagggtatggttgattataaccatactgcggagcagtagggacagcattgtaaggtgcaaactgtggtctgccttggagtgagggagctgaaataggtggcggcattgcaacatatcccgggcttgattcataaccatgcgaaggcaatggttgtcgatgatgacccatgggtgcaggataagatataggaggaccattatgcggatggcggtatccattagtatcaacctttgcctgtaaggaattgacgatgagtctgtgtgctgcatccccaagctcccgaccagaaatagatcctggagggtttttcctcccattttcagcatggtgtctcctgcctgaatcttcatgccacaaaacaggttcaggttttagatccccaatttcaacaatcttttttggaaatttaactccttgtggtggtcgggtaatatgtttatgtgcatctgggagtctatatattgcacatataacatgattgtccatgatatcttccatgcttgcaataggagacctaaaaataggagggcaaggttctccaccacataaggatatgtaaccattcattccaccactgcatgtatccctttctttggggttgattttttccttgaccacagcccgttcactatttggcatgtttttacacttgttgtcaagtgtacttatgcacgcagagagaggatgacaagaattcacaaagagcaagtcgaacattatagcattccgtcgcttttcatctggtgttaacaagttttcaatcttttgaacttctgcaagaagacgcacttcatcaataaatggcaacttagcaataccctgccaagcaaagcgtttgccattcatgtccacttcaaagtcaattggataaaaatcaatgattggtgagcttggatcagtcataagtctcctatatggctcaggaagtgcatgagagcttgcagcaggaaaaacccctaaaagctggtcatatggtttgaatggggtacccagcttaaagctaatatcaagttcaccaaggcccttgagatcagacgcaaagggagcatagtgataaggataaaaccaattccaagaacaaacaccttcataataatagtgcatcacccaacatagcccttcagtgtatttcaagacaacatctttacgtatcgcttcaagttcctcaggagttttggcagaaaatttttcatcataatacctctctttccagccaggttctcccaatttaatcttatcctcttcagcattctttgagttgaatacatcagatttctcacgaagtatctcctttaattttgttttcaattcatctttattatcttgagcatctatttcaagattattctcagcttcaacaatagcagcagcaacagttgctcctgaagaaaccctagcaactttataaggcctctcaaaggcttctttattgtcttttc

SEQ ID NO: 123188 - DNA, 258 bp, Glycine max
  Clone ID: PAT_MRT3847_82245C.1
ggcgctcgtccttggtcgtcctttttttttttttttttaaaataaaataaaattgtaaaacaccgggggaaacccacgtcttagcttaccgactattggtctacgggcattaaccttatgtttttttgttccaaaaaaaataacaaagtccgctctattttttaaaggggatttagttaaagcacttaccttttttttttgagaacaattcccggttgttttggaccccaagacttgattccttaaaaaaactccctt

SEQ ID NO: 123189 - DNA, 153 bp, Glycine max
  Clone ID: PAT_MRT3847_82246C.1
tttggcctccttggcacacaaaataaacaagtatgccgctactctgagactccttcaccgctacaatgagtctctagtaacccacgcacccattgaatgtgggaggatccaccaacctataatggacctttgacctacatagatataaccata

SEQ ID NO: 123190 - DNA, 472 bp, Glycine max
  Clone ID: PAT_MRT3847_82247C.1
accgaccccgggggggcccccgaaattccgaaccgggaccggaaggcaacccggcttacccaatggcaaagcggattacagcgggaaaaaagtatgcccaaagcagtcccccggggaaaagggccagcagctaaaaattccaaaccccggccgccccaggaagcaacaaactaaacctgggggggcctaaggagctacccaactcccattaagggaaccgggcccaccgcccgctttaaagaaggaaaaccggcccggccagaggcataaaggaatttgccaacccgcggggagaggcgtttcgccaatgggaccccagagggctttttttttttacccgtcaaaccggaaaaaaattaaagcctttcaccccctgccctttaaaaaaaaaaaaaaaatccccactctgggtggcccaagggggcaaaaaacctgaaccggggtgggaaacggcggaataaaaaaagaaaaa

SEQ ID NO: 123191 - DNA, 446 bp, Glycine max
  Clone ID: PAT_MRT3847_82248C.1
ttttttttttttttttttttatatttttttttttttttttttttttttttttgggggggggggtatgaacaagccttgctaaaaagggaaaaaaggcccaacttgtttcccgggcaattgggttttgcctaaaaaaaaaaaattgggtaaaaaatttaatttaatacctgggcctccggagactcaaacctttaagaattacaacattttttggcctgaaacccaaaaaatttggggccccaaattggggtctgggctctccaattctcaattttgggtttaagaaccctttggaaagaaaagagggatttttggcgattagcaaaagctggagcaatttggttaacttccccttttaaaattttccttttggtcacttcaggatttaaaactttcaaaggattttccttttgggtggaaaccaatgagaggttctttggagaatc

SEQ ID NO: 123192 - DNA, 576 bp, Glycine max
  Clone ID: PAT_MRT3847_8224C.1
tttttctttttttttttttttttttttttttttttttttttttttttttttttttttttttttgagggacagggccaacatctaaaaggtcgccaatattaaacaaaagatataggcccatttttttttacgggaaacaaagattctacaaaactaagggggcaaagaaaaatgttttttttttaacaaaaaagggactaaggcggcgcaacacaaggttcagagctttatcactaccaccctaaaaaaaaggggttaaaggaaatttttagcccagccaggaaacaaaactacaatcagggggcccttccgggtttttaaaaaaagacgggaatcatttttttgcagggggggacgggctggggtatttttcaggcgggggactttcaggaccgccataggggggactggccctgggaacaggcaaattattggggccccctccaaaaccatgggagggggggggattccctttttaatcaggacttccggagccaagtccattttcagggctaggcttcccagtatcaggaggactacgggtagaaccaggaccattttgggggcttttcttcc

SEQ ID NO: 123193 - DNA, 549 bp, Glycine max
  unsure (1)..(549): unsure at all n locations
  Clone ID: PAT_MRT3847_82250C.1
gaggctacactgagcatcgtctagctatctcgatcgaactgtccaaggtcctgtcacgtgcaagtgcgaaatcacccgtattttcataactgcgctcattacagtgtgcagctacgatggcagctcgcttggcaataccatttgcatactaaccggcttgcgcacatagctattaacattaatagccgtagccgtggtccacacagtataattaacattaatcgacatgagcaaaacaggcgttctcatatagcttctcaaaggccaggtagtgtgcagcagcggccngtggcacgtgcataaacgtaaccgcggccgtaataggcagtaatacagttcgcagagtctttaccgcgctatccttatggtattacgtctttacaccacaggcccgtgccgcaattacccgtatagcggagcccgagcttattcagcaaatttttcacgatagcttttgtacttagcgttggctaattaaatggccgctgtcttgtatacacggaccaacaagcctattgcgctggccggcaacttacaccgaacatatac

SEQ ID NO: 123194 - DNA, 774 bp, Glycine max
  unsure (1)..(774): unsure at all n locations
  Clone ID: PAT_MRT3847_82251C.1
caaaattcaatgtagtagttagtagtgaggatggagaaaagggtgaggatgaaaacaaggatggtgaagcggtggaaagtgaggatgaattgttggtaattgaggcaattgacgatgttgctgttgaacaagctcctccccaggacgacaagagtcaggacatttctgattcttctgttagtctagagtggtttttaggttgtaggaatagggtttctttgacttctgagcgccctaccaagaaaagaaggcttttgggtgttgaagctggtttggagaaagttgtaatgacttgtccttttgatgagggccagctgttttgccattattgtggcaggggagacactggcagggattccaataggttaattgtctgtgcttcttgtaaagtggcagttcaccgaaagtgctatggtgtgcatgatgatatagatgaggcttggctgtgctcctggtgcaagcaaaaggttgatgttgatgtgtcggtgaatccttgtgttctttgcccaatgaagggtggtgcattaaaaccagttaatagcagcgccggaaggtgtggggtcagtcccatttgtgcacttggtttgctctctgtggatcctgaggtttatatagatgatttgaagaagatggacctgttatgaatgtnggagaaatcaaggaaaccccgaagaaattaatgtgtantggtttgcaaagccaaatgtggtgcatgtgttccgtggaatcatggaacttcanagcttctttcatccttatgtccaagggaagctt

SEQ ID NO: 123195 - DNA, 260 bp, Glycine max
  unsure (1)..(260): unsure at all n locations
  Clone ID: PAT_MRT3847_82252C.1
gnctccgagccacgaacntcancntnattctcgccgacaancccnactaaaacgacttnagcgacntccttntncccancccggactcnanggggnaatnancancacgacaaancatcaacgtcntcgtcctcaacgaacgccgacttctccnncgtcgccgcgaaacaccccctctccgtcgtcagnaacctcntcancctccatatcntcctngaatattcgacaacacacgctccancaatcannaacgggaccag

SEQ ID NO: 123196 - DNA, 306 bp, Glycine max
  Clone ID: PAT_MRT3847_82253C.1
tctacacttacaccatcaaatctaaatgccttctctctcacctacaatgacagaggataacatttcatgattgtttaaaaaataaactgatctaatctcttctgctaaactactctgcaaaattcaaactcataaaaccactgttgaaactgaatatatcgaagaaagttttactgccaaaataatccttgatgatgtcgcaaaagaaattaaagttattgaagtaattgctccaacttttgaaaattaatgtgatattgcaaaattcaaagattaccaaccttcaacatcttaaccaaattaacc

SEQ ID NO: 123197 - DNA, 733 bp, Glycine max
  Clone ID: PAT_MRT3847_82254C.1
aatctttttattgggttgataatataaaaaaattacactaaaagtacatgggcggttaaactcataattgttctcttgataagttgagacacaatgattgcctatttcagccaaaaaaattagctcatcatgttgctttcccagatctaaaaacagtgcaaaatgctctacctgatgggacataggagctaagaacaaaactggcccataatgaaggacctgtctactacaatttttctcaaagttggacaacaaaactcttcaatttgatataaattgcatggctaccacactacacaaatttggagtatatgtacatcttggcgctttcaggcttgattccaccatccaaaccctccaattaaggatgtttgatcaggtgctgactgctatttaagttaaaggtggaagaacctggaaagtagaaaaaaggagaagctaatgaagaaggaacatagcaaattggaaggagacttgtgcaaaatgtagtcataaagtatggattatgatatgtaacaaaatcatgaccaagggtttcaaaagtgtgagttgtgcttcgttagttttcatggctattccgatcgaggggactgtggtcgcggcaattactcattgattgagcaagtgtctatttttgaggtcccatgacaagataaacaacttggtacaaatacttagtggtattcaaattttagcagttagctgactacctttaattttgatgcaggctcgt

SEQ ID NO: 123198 - DNA, 1324 bp, Glycine max
  unsure (1)..(1324): unsure at all n locations
  Clone ID: PAT_MRT3847_82255C.1
cttcgctgggcaagcttccaaaggaatcagaaaagggacaaaacagattatggcagtgaagcaaaagaaagagtgaaacagcacagtttaaggcacggggagaaggcaaaggaatcagactcaaggaaaagatcctctcatgttgatgtcaaggatgataaaaaggaagcagaaaaatcccatagaggtagtgccactgacgatactagccggaaaagggagcatgcaaaggataagggggaacataaatcaaggcaaaaagatgcaagtaataatgacaggcatagaagaaggcgttcatcttcagtaagcagtagaggtagaaccaagaaggattgtattaatcatgctggtgattcaagtggtgaaggatcagatggctcaaaaaggaagctgcattcaagaaagcgtgacttatcaccgtctccagtcagatctaaaagaaggaatgttgattaaaaattacatagctagtggtgacttttcccatttttgtgtgttcaatataatgatactgttattttcctggtttgctactgttctttatatattagtataaatctattagtcggttgccaagggggtgttgactctgcaccaccggtatttttccagaggaactatagtttgctgcatacgccccagcttgttacggtattatttattaagagatccttacattgttcaggtttggaatattgaagtttgggtgtttcagaacatcttgcaatatctttcttcctgttcatatatatatatatatatatatatatatatgtatgtatatcagtatgtgtgtgcacgggggtgtgtgtaaaatacatttaccatcttagtaattctgacatggttaatgtttttctggttattaatagaatcttggtggtttgcaatacaaatagtttttcttagcttatatgtgtaaagttgaatcttaaatgatgatactagtcatactaccagcttttctataatttcctttaacgatttcagctctaggtctatcttctcacgactttaggtgggaggcttaattgctaccctcaatcttgtcactgaagctctttcttgctatctcagaaggccagaaagttctatatttatttctgcattatttttggactttggccgtctaacatttttatgtattttttattcacttgtttggttgataagattttttggtcttattgtataccaatattttttgcaatattatgatagttatctaaatgtgtgtttgactgtttgtgtangttgtaggtattttttctgatacatttttatgtatgatcagttttatctttgctgggcaagcttccat

SEQ ID NO: 123199 - DNA, 740 bp, Glycine max
  Clone ID: PAT_MRT3847_82256C.1
aaaatccccatagaggtagtgccactgacgatactagccggaaaagggagcatgcaaaggataagggggaacataaatcaaggcaaaaagatgcaagtaataatgacaggcatagaagaaggcgttcatcttcagtaagcagtagaggtagaaccaagaaggattgtattaatcatgctggtgattcaagtggtgaaggatcagatggctcaaaaaggaagctgcattcaagaaagcgtgacttatcaccgtctccagtcagatctaaaagaagacaacttttgcggtctcctcatagcaagcgttctcagcgcaggcattctccctatacttctcttgattcttccaggggaaggaggtcaagatccagatcacctgttcggcggcagagatgaatggatggggacagagatggttgactttgcatctacggtgttcattcaagagaacataaatttggaggcgtagggcgaagcttgtgatgtttggtcttcaagggaatgttgattaaaaattaaatagatagtggtgacttttcccatttttgtgggttcaatataatgatactgttattttcctggtttgctactgttctttagggagtagtataaaactgggcagggttgaacatgtgctgtaatatgttttgatgtaaaaaaggaaactgaaaaatcgatagcttctttcattcgaaatccagtatgtacttatatcccatcaatatcataattcgtaatgac

SEQ ID NO: 123200 - DNA, 224 bp, Glycine max
  Clone ID: PAT_MRT3847_82257C.1
tgctgggacacattagagctgtgctcattccccagctcctcagctctatggagatcactgctaatttctacgagttgcagaaatggacgctggcgaatagatcaagaacggcgccagaggaagagagggccgtgaggccctaagagagaagacggtttcaaggtccggcaaggccatactccaattcccagacggatgatttgtccgctattagaacaaaggaa

SEQ ID NO: 123201 - DNA, 1282 bp, Glycine max
  Clone ID: PAT_MRT3847_82258C.1
ctttgctgggcaagcttccattatttacaagattacgtctttcttggttcaacttatgagattactgttactagagttgcctgcaaggggggaaagagaactactgatattctagttttttgtacggtatggtagttgacttatttttaaccttgttcctgtgagaaaacatatttagcctatgacttttggcagtttgaggattctgaagctgataccatgccacagattcaatcatttgggtctttttttggtgaaagttaaattgtcttattgcgtgttatattgattgtttttcataatgttcaagtttgtagtaataatcacattttcatgcatctttggtctactctgatctatcaattatccatctgcaatataatataagacacacgcgaagagacagaaactatagattttgtactaaaaattgttgcacgaaattatccataattgtaaggatatctgtaccctgaatctaagatatctacgtacatttgtagtttctggtaaacgttttactgattctgatcatactcattagaaacagataggatgtattgtaatatgcttcttccaatggaatgtttgacactgtaccaggttgagttgtatttataaacttttgtatactttaaactcaccaagtcagtacggtggtttcatttttagacaacttttgcggtctcctcatagcaagcattttcagcgcaggcattctccctatacttctcttgattcttccaggtttgttgccagagtttttcaagattaagatttatgtttttcagacaaacttccatcatcatataagattaagctgcacaggtgaatttgtcaggcttcatatttatgttacaatggtgccttgtttatttactgtaacccttttatgcaggggaaggaggtcaagatccagatcacctgttcggcggcagaaatgaatggatggggacagagatggttgactttgcatttaaggggttcgttcaagaggacataaattcggaggcgtagggcgaagcttgtgatggtctgcaaagggaattttgattaaaaattaataggtagcgatgacttttcccatttttgtaggttcaataaaatgactgttattttcctgatttgctagtgttctttagggagaagtataaaactgggcagggttggacatgtgctgtaatatgttttgatgtaaaaaagaaacggaaaaatcgatagcttctttcattcgaaatccagtatgtacttatatcccatcaatatcataattcgtaatgcc

SEQ ID NO: 123202 - DNA, 347 bp, Glycine max
  Clone ID: PAT_MRT3847_82259C.1
tttttttttttttttttttttttttttttttttttttttgttttttttttttttttttttttttttttttgggggggaaccctcaaactaagggggaaggactttttgacctacccaaaaaaaaggagggggtcccttgttttaatttaaaaaacttacataccctggaaagggaaaaaaactaacaattctggggggccctttttatacaggttatcaacccattttttttacacataaaaaaaagcctttatttttgcccaccaaccataccaggtcccattgaccctgacaaggtggataaaaaacccctggggggaaattttacccttggatccgggtttccg

SEQ ID NO: 123203 - DNA, 322 bp, Glycine max
  Clone ID: PAT_MRT3847_8225C.1
ccccgatttttcaaacaggctttaacaatttgtcataaccaaaaataatggctgggggtagcaaaaatatatgatcatgcaccggtactgaaattcaaaaccatataaactggcaaggaaatacaaggttggggacaataccctcgtaacaatcttaaaacacacaagcacatgccggaataactgactgaatgagctacagggggcatatcgcataccacataaaataataaaaggtgggacggaaaaacaggcgataaattgacaccgctgttccaagcctagaaaagcagagcaaggccgtaatcattcatttacccac

SEQ ID NO: 123204 - DNA, 458 bp, Glycine max
  Clone ID: PAT_MRT3847_82260C.1
cgggcctgcctgacaagacaagtcgagacactcgcagcctgccagcccgccagacatgactgccacccgccaacggccgctgcgcccgctgtcgtctgccaccgacctgaccgacctcaccgagtacaccaattccgccctcgaccccgatgaaccacgcaatgccgacggcgacgacattgcagactttgaatccgagacgcagagcctgacccccagcatctgggactatgtgcgccagtatggcaggacctaccaccgctacatggcaggagcgtacctctttcccaacgacgcgcgcgaagtcgaacgcctcgatatgcaacatgccatcatcaaggccctcttcaaccaccgcaactggttcgccccgctgaagcgcccgaagcgcatgcttgatattggctgcggtacgggcaagtggtgtctggaaatggccaggcatttccccggctcgg

SEQ ID NO: 123205 - DNA, 452 bp, Glycine max
  Clone ID: PAT_MRT3847_82261C.1
aaaaaaaaaaaatccgtaggtaaatgtgtgaaagactttgtcctacagacattttttctgtcaactttgagggggcatataaagacggctaattatccgacactataggttgtacctactatgtatggggggcaggtaaaagacattaacttctacttattttttctaactggggggaaaagtcttaaatgtgcatctatcattttcaactgtggggaaaagttattaacttctacttatttttcctaactggaggtaaaagtctttaatatgaaccttacttgagaccacaaaaaccttcttttctattaaccaatggcacaaaactacactgtttaaaaacaatgccggaacctaagattagatatgtccaaacatgatgtaaaaacccttgatgtcttttggcagaacttgaatttcttcaacagggacatttgacactgatttttttg

SEQ ID NO: 123206 - DNA, 658 bp, Glycine max
  Clone ID: PAT_MRT3847_82262C.1
ctttgatctgggtgagagaaacgcgtatcgatggattgggttcagtactggtctcacacggtttgttctaacaatttgtactgactgtgtattgatcgatacgggtcgctctcacctaggccagagttgcccaaactttgattaatatgatgtcatgtgtgtctctccaatcttttatccaaattaagtactaaacaagtactgtattaattagtttctagttctgatctccatgatacatgattcttgctttaaattttatgtctgcatgtaatgttatgttatgtttgaattaaagtatgtattttgctttattatttaattgaattattgtgctatgtttgtgaaataaagcactgaatttacatttagtgaagtaaaaaaggggggtgaattcagaatggaagcccgaattgaataagagtggtggataacaagaagatttgactgaataggctgggctgacaagttcaaatattgaattaggtatgcattacccaattctacttgatattccaactcttcagctatatattttagatcataattcaacgataattggatctatataatgcaaaacaatgttttgttgattcaataatcgatctgatctaagctatgctatttatatctataaagtcagagttgaacatgaaag

SEQ ID NO: 123207 - DNA, 422 bp, Glycine max
  Clone ID: PAT_MRT3847_82263C.1
ctaaagaacatcccattgaaacaaaaaaaaaaacacatcctccactaaatgatcaacatagcaaaattaaaaataaaattgaaaagatcaaaatccaaattacaccaagttcatattaataataataactaataacaataagttaaacccaagataataatatttttgaaaaaaaaaaaaaagagtaccggaaagaaacaaggggggggttgttataattttggaatttcccaatgaaacgctcaattatggtcccccttttcatggggctttctgcaaaagatcatgtgctttgggaaaaaaatgcccaattcaccccctctgggcaaatagacagcggtctttaagagcattttattgaaaatcgacggtccccttgggcgcgattcccaaaggggggagaaacagtgacacaatttggt

SEQ ID NO: 123208 - DNA, 388 bp, Glycine max
  Clone ID: PAT_MRT3847_82264C.1
gtgtttggtttttttttttttttttttttttttttttttttttttttttttttttttgggttaaagcctttctttcataccaactagttgccagagtatttatgagtttgaattcaaagtttaattacaggacagggaaaccaacttccctcgatagagggggttaataaaaaagggggacccggggttataaaaggggcccttgaaacaagggtatatgttttttaaagggaaaatggatgggggaataatgacgtttccaatggtggggggccctgggtcaccccagggagccgccaagtttttcaaagggccagggccgggataagctgattggtgaacccagaatcccacaaaagccaacaaagcaagacggccatttttaatt

SEQ ID NO: 123209 - DNA, 398 bp, Glycine max
  Clone ID: PAT_MRT3847_82265C.1
catacatagcgcttattattcctaagatactcatcataccgagcctgatttttcagatcattttacacttgatcgcaccatcagaggcgcaaggcccattcgactggttacatttcctaataccatcgtgcagattgaaccacacatgaattcaaggtttcagcttttgagtaccactaccaatggtgattatgttcaaggaaaagatctcgcattgtttaaagtctatgtatcatgtgctcctgctgtcttgacatcaacttacactacaactacattgttgtaatctggtttgcaaaaagacatatggataattgtacaaaatttctgtaaggatgacttacgttgctcattacgttaatcacccccaaaaaaaagatttgttctagggaaatttt

SEQ ID NO: 123210 - DNA, 264 bp, Glycine max
  Clone ID: PAT_MRT3847_82266C.1
gggaaaggttcaggatccattcttcctttaccatttcatggttaaaaggttaaaatccctatttactttttgggttggttacataaaaagatttctacaaataagggcctttttttacaaccctaaaatccccagtttacatttttaccccctcttatgaacaaaggggccttttttattatattattatgcttgcccttacccccaaatttcacatgttttcagccaggggtttataccagggcccatgaacactaacctggg

SEQ ID NO: 123211 - DNA, 261 bp, Glycine max
  unsure (1)..(261): unsure at all n locations
  Clone ID: PAT_MRT3847_82267C.1
gntggttnagcttccatggaggcanccacagcttttnanancaannggggggaagcctcccaagggnattttactttatggacccccaggtnctggganganattaatancaagagcnntagctaacgaaactggngctttttncttntgtattaatggaccngagattatgtccaaacntgctggagagagtgaaagcaanctcaggaaancgtttgaagaagctganaagaatncaccgnccantanctttatgatgaa

SEQ ID NO: 123212 - DNA, 137 bp, Glycine max
  unsure (1)..(137): unsure at all n locations
  Clone ID: PAT_MRT3847_82268C.1
cccgnngnnancnnnctcagncgnnanncggtcncncccaganccttnagctgctangntngcgagactcgcgattgnacagggngcancagatggagantgagccagcgtttttagggttccattaggtggantcc

SEQ ID NO: 123213 - DNA, 150 bp, Glycine max
  Clone ID: PAT_MRT3847_82269C.1
ggctcgaggagattttaatcttttgtagttctcttgttatcttcactctttgctttgtaaatcaagattgaagataacaagagaactacataatagagattttaatcttttgtagtcgttgtttgatttaatatagttattttctttatt

SEQ ID NO: 123214 - DNA, 490 bp, Glycine max
  Clone ID: PAT_MRT3847_8226C.1
ttcgggaacattctctgatatttcagccgcatagtttttcattgttttactaaatctagaataatggctgcttcaacaatggctctctcttcatcatcattggctgggcaagcaatgaagctttccccctattgccggtgggcctcttggtgaggtgattgacccaatttacctagagggcagcattgacccattgggtcttgctgatgacccagaggtttttgccgagttgaaggtgaaagagttcaagaatcgtaggttggctatgttctccatgtttggattttttgttcaggccattgtaaccggaaagggatctttagagaaccttactaatcaccttgctaatccagtaaacaacaatgcctgggcctatgccacaatgagaaactacgagtgtgaatttcacgttgttatttaatgtaacatatattggatgcgctcctttgcagagagtgtgaattatatatctttttggaacgttttgacc

SEQ ID NO: 123215 - DNA, 1071 bp, Glycine max
  Clone ID: PAT_MRT3847_82270C.1
ctacatgaagggcaataacaatgcaaatataattaaattttccaaaattgaaagacgtatacaagacacaaaccacccattcacatagacaaaagcacacattgataaaatctttgatgacggaaagaaaaacaaaataacaaaactaacgaacatgataaataataggccatacatttatgaaaacaacaaaccggatagagaggaataaacgacaaacatttcatgctctagttaagatcaaaagcaaattttaatcacttcctaccacgctaaactgaatttagggcctattagagactcaagctccccatttaagaattaatatcaacattccattgaagttccaaattttaaatttgttttctatgttactgaaatcttgatacccatagcattaaaaaggatattccaaacacacgcaaagataagggattggaatatcccaggacaaagtgaagaaatataagcaagtcaggaaataaaggagtaaactgtaatggtaaatatgaagtataaatggaaggtattagtcaaaaataaaaaaatctcctcatctcttatacctacaaactatgagttatcttttatagaacattttaattgtagtacttaatctaaattcatagggccgagacccagagaagattcttagataattccttggtattttaagagttctcaaaatgtgcattggttaagaatactatagtattatttaccatgttttcacatcttagattgaaggacagttctacaagaaatgttgccacataacactggctattttttttaacaaaaaccaaatttaaccaattacatagcttttaggggagcaaatgaaaaagaatgactgagacctccaacaagagtatatatagttgtggcaccatagaatttactcatcaaggaaaagaaaaaatatatataattaaaaaaagaagacacctcctaggtcattgagctactgcacttgtaaaaatggacaaggaaacttaccactaaaattccctctagaagagatgatttaagcttgcagacttcatcactaattgtgaaattggttgattc

SEQ ID NO: 123216 - DNA, 2810 bp, Glycine max
  Clone ID: PAT_MRT3847_82271C.1
gaagaagtaatacatgacaaagaagctcaatttagcagcccaaatctgaacgttgcttacaaaatgaatgtccgagaataccaaagtctaactccctatgccacagcattagaagaaaactggggaaaacctcctgggaatctgaattcagatggagagaatctattggtatatgggaaacaatatggtaatgtattcataggtgttcaacccacatttggctatgaaggcgatcctatgcggttgcttttctccaaatctgcaagtcctcatcatggatttgcagcatattactcttttgttgagaaaattttcaaagctgatgctgttcttcattttgggacacatggttcccttgaattcatgcctggaaagcaggtggggatgagtgatgtatgttatccagacagtctgattgggaacattcctaatatctattactatgctgcaaacaacccttctgaggctaccatcgccaaacgaaggagctatgcgaataccatcagctatctgactcctccagcagaaaatgcaggactgtacaaaggtcttaagcagttaagtgagctcatctcctcataccagtccctcaaggacactggccgcgggccacaaattgtgagctcaattatcagcacagctagacaatgtaatcttgacaaggatgtggaactgccagaagagggtgaagagatcccagcaaaagatcgcgaccttgtggttggaaaggtgtatgccaagatcatggagattgagtctcgcctgcttccttgtgggctccatgtcattggtgagccaccctcagccttggaagcagttgcaacactagtgaacatagctgcacttgatcgtcccgaagatggtatttcctctctcccatcaatactagctgagactgttggaagaagcattgaggaagtttatagagggagtgacaaaggaatactaaaggatgtagagcttcttcggcagataactgaagcttcgcgtggagcaattacttcctttgtgcagaggactactaataagaagggtcaagttgttgacgtagctgataaacttacctcaatccttggatttggcataaatgaaccatgggtcgagtacttgtcaaacaccaaattttaccgagctgatagggaaaaactcagaaccttgttcgatttcttgggagaatgtttgaagttggttgtagccgataatgaattgggaagtttgaaacaagccttggagggtaagtatgtggagccaggacctggtggcgatccaattagaaatcctaaagttttaccgacagggaagaatattcacgccctggacccacaggctattcctactacagcagcaatgcaaagtgccaaaatagtggtggatagattgattgagaggcagaaagctgaaaatgggggaaagtatcctgagactgttgcacttgtattgtggggaacagataatattaagacatatggtgagtccctggctcaggtcttgtggatgattggtgtgaatccagtagctgatacctttggaagggtcaaccgggtggaacctgtaagtcttgaagagcttggaaggccaaggattgatgttgttgttaattgttcaggagtattcagggaccttttcatcaatcagatgaatcttctggatagagcagtgaagatggttgctgaattggatgaaccagcagagcaaaactttgtgaggaagcatgcactagaacaagctcaagcccttgggattgacgttagagaagcagcaacaagggtcttctccaatgcctcagggtcctactcctcaaacataaacctggcagtggagaattcttcatggaatgatgagaagcagctccaggacatgtaccttagccgaaagtctttcgcttttgactgcgatgcgcctggtgcaggcatgacagaaaaaagaaaggtctttgagatggctctgagcacagcagatgccacattccaaaaccttgattcatcagaaatctccctcactgatgtcagtcattactttgactcagatccaacaaacctggttcaaagtctaagaaaagatgggaagaagccaagtgcatacgttgctgacacaaccactgctaatgctcaggtgcgtacccttgctgagacggttcgacttgatgcaagaaccaagctattgaaccccaagtggtatgaaggcatgctgtctactggatacgagggtgttcgcgagatagagaagaggctcactaacacagttggatggagtgcaacctcaggccaagtcgacaactgggtgtatgaagaagccaacacaactttcattcaagatgaggaaatgttgaagaagctaatgaacacaaatccaaactcctttaggaagctggtgcagacattcttggaagccaatggacgcggttactgggagacttcagaagacaacattgacaagctcaggcagttgtactcagaagtggaagacaaaatagaaggcattgatcgctgaagtgataattgagatgaacagcagaaacattaactgttttttaactatgccttctttgtatctggagcttctttcccacactgaattgaaagttgttgatggtgtccttttaatgtgattttgctcctctctcctttttccctgctgtaattttaatcattttcagggatcatgttcctttgtgcagttgcaaactccaaaccaacatgtcaaatattgctctcagtttaatatatagagaatgattcccttgtatcgattcctcatgttataaacttgtgtaaactgaaattgaaaataaatataaacttattgaacat

SEQ ID NO: 123217 - DNA, 351 bp, Glycine max
  Clone ID: PAT_MRT3847_82272C.1
accaaaaaaccctttttagaaggccccaaccctgggtgttaaaaactttgacaggaaccgggcatgattcaaactgggtgactccccaaaccctgggggggggaaaccgcccccatttttttttaccaaaatttctttttttggggattttttttgccaaacacatgggaaataccttttcatacatattccttaagggccccaagggccctccgggcaaaggcaattaggggcaaacttggccttcccattatgctcaggggggggaacatccatgttaacaggctcgaggtggttttttttaagttcttcttaaacaccataattttttcccttggggcaattagtttt

SEQ ID NO: 123218 - DNA, 505 bp, Glycine max
  Clone ID: PAT_MRT3847_82273C.1
ccacgcgtccggagcagcacaatataactacaatttgtccaatatggctgtcattgaacccagccttgagagctcaaattaagagcattcttgttgaggacactttcttgcccttctattgatgcccgatactctgtgtcacagggtattggtacaggtgctggcattgacctgcctcataagacagtgactctgaatcgataggatccctgctgtctaatgctcatcagcttgctggccctacctgacatgctacactggaaaacccttgaatacatcgtgcgaagagacttgcccatatgtagtgcacacaggatcatgattagtaaatgctcactgctgatgataaggggataaattcggcagcaaagacccctatgtctggcttggtggcatacttagcattcgacaatgcattgggttttgcccagccttgtttttcaaatgacatggagcgggattatctcatgagaatggtgagtgagacaacacgatctcctgtgct

SEQ ID NO: 123219 - DNA, 535 bp, Glycine max
  Clone ID: PAT_MRT3847_82274C.1
actagcgtcgatctatggctagcaatgtaccagagtcctgtcaccaacaaagccaaatcctaagactataactagacaggcaaggcaagtatacaacaaacaaacaaacaaagtttatcatcgtaagagtacaccacacaaacggcaacacaaaatgcatatatcaacgcacaaaaggaaatatatatcttatcttagtattattctttttaggctttagtgttcctaaatctaatttaaaaattgaatgaatccgtatatgcggttggttggtcggcaggtaaggtaattgtgtgtgtgttaaggtggtagtaatagtggtaattcaaggtttgggttcagcacaggcagggcaagtcacggggctggggttcaaggctctcctcaggtgcacagcaaaagcttcttcaacttcaattaccgcctgcgcacacattgtcgtcaccaacttaaaaaatcgagtcgtagttgtcgtcgagctcgtcgtccctgtgttgagtgtagcgttgggcatactgttgtacgggcccgtaat

SEQ ID NO: 123220 - DNA, 165 bp, Glycine max
  Clone ID: PAT_MRT3847_82275C.1
gattgccatgccacataaagttcaaattcaaaatgctttctttgtaccccaaataaggttccacctttttgttttaaaaaacaaagctgctttgccaaatttgaaaacaagaatgcattttgaatttgtcctttattgggggatggggaatcggggtcggggccg

SEQ ID NO: 123221 - DNA, 261 bp, Glycine max
  Clone ID: PAT_MRT3847_82276C.1
attctctcgagctcgagccgcacaattccttctcctctcatgataatctaaacaagttttttttattttcttattcagttgttagttcgcaggattcaacacctcgacgtggaggcgttcctatctcatcaacaccattttccaattcaattacctctaaaactcctctgtcccttctcaacatgatcttttccttaccaccaaacaatcttttcaattttttaaaacaactattccaaatttttttcaaattaattttta

SEQ ID NO: 123222 - DNA, 129 bp, Glycine max
  Clone ID: PAT_MRT3847_82277C.1
aacacaggtttaataacattttattaccaaggccttcattagattccattaccaaagttcctgggaatttattaacttcctattaccattccggtattacccgggccaaatggctgaattaaaccaaaa

SEQ ID NO: 123223 - DNA, 284 bp, Glycine max
  Clone ID: PAT_MRT3847_82278C.1
taacgcacacactttatatgattattcttcttaatcacagatggtaaccccatattcagggcacatacaaattaatcatctacattctatgtacaccatatcttgagtcttcactggcacggctcaatgaagcagtagagcacaatccaatcacttctctcgcatgcgttggatcaatgatttcatctatccagagccttgctgttgattaatagggacttgcttctctctgatatgcctgcaacacttttcgtgtgacctaattctattgtttcgtagagcat

SEQ ID NO: 123224 - DNA, 670 bp, Glycine max
  Clone ID: PAT_MRT3847_82279C.1
ggagtgtgatacacacattttcatcatcgtctcgtctggccttcttcgctcggaatggctaccttcgcggttgcaacaacactttcgacatcttctatcgctccccttaatgcacgacgtggttttggttttggttttggctccttcctttctccaaccacaaaaccaaaacgcccctcaatcaccactaccctcgctgtcgccaccgactcttccgtttgtttcaatcccaaccccaaccctaaccctaatcccaatcagcttgttctcccttccaacgaatcatcggagatgcttctcagaatccgccacacgagtgcgcatgtgatggcaatggctgttcaaaagctttaccctgatgcaaaagtcacaattgggccttggatagaaaatgggttttattatgacttcgacatggagcctttgactgataaagatttgaagagaattaagaaagagatggatcgaattattggaaaaaatttgccacttgtaagagaagaagtttcaagaggcgaagctcatagaagaatatcggctctgaatgaaccatacaagttggagattttggaaagcattaaggatgatcccatcaccatttatcacatcggtgatgagtggtgggacctctgtgctggacctcatgttgattctactggacatatcaata

SEQ ID NO: 123225 - DNA, 241 bp, Glycine max
  Clone ID: PAT_MRT3847_8227C.1
agcttggagttgttgcttttccttttgggcctcatataacttgcttcctgcagacccctttgcttccagcagacccttagtgttattcgtaacatcttgcttggctaacttcgcatacgtggtccctttgtttgtcacttcgtcttgtttttcttttctagtttgttgactttcctctcatttcgtgtgtttctggtacaccgcttgttcatcttgatatagatcttaattattaaaaaaa

SEQ ID NO: 123226 - DNA, 2707 bp, Glycine max
  Clone ID: PAT_MRT3847_82280C.1
atctgcctaaccctaatcccaatcagcttgttctcccttccaacgaatcatcggagatgcatctcagaagcctcaacatgagtgcgaatggtgagcgtgatacacaaattttaatcaatgtctcgtctggcattcttcgctcggaatgtctaccttcgcggttgcaacaacactttcgacatcttctatcgctccccttaatgcgtggcgtggttttggttttgctttttgatgattccattcacagaataaagttgggaaacgaccacccaaatatcattatcatgatattttaattggcaaaagatggtcatcttatttgtttatgtaatgattggaaaagaatgaaggcaataaacatttgaaacatcatactttgtatattagacaagtattgaatagtccacgtcgttgaagaacaaaggctctggcgtttgcaccaggtaagcatacgatttggctcgttgggccttacttggaaaatgggttttattatgacttcgacatggagcctttgactgataaagatttgaagagaattaagaaagagatggatcgaattattggaaaaaatttgccacttgtaagagaagaagtttcaagaggcgaagctcatagaagaatatcggctctgaatgaaccatacaagttggagattttggaaagcattaaggatgatcccatcaccatttatcacatcgcagaatgaaaatggacaatgtaatgtgtctgatattggaactgtgaagatggaagtgtaaagtagaataacaatgacgaggcaaggatatgctcagagagagtgctgcaggtgatgagtggtgggacctctgtgctggacctcatgttgattctactggacatatcaataagaaagcagttgaacttgagtctattgctggtgcatactggagaggagatgaaaggaagccaatgttgcaacggatatacggtactgcatgggagaatgaagagcagttgaaagcttaccttcacttcaaagaggaagccaagcgtcgagatcacaggcgcctagggcaagatcttgatttgttttctatacaggatgatgctggtgggggtctagttttctggcacccaaagggtgctatggtcagacacataattgaagatttctggaaaaaaattcacatgaaacgtggctatgatctactgtacacaccgcatgtggcaaaagctgatctttggaagatcagtggtcatttggatttctacaaagagaatatgtatgatcagatgagcgttgaggatgagctttatcagcttcggccaatgaattgtccttatcatattttggtgtacaaaagcaagcttcattcctatcgtgatttccctatcagggtagcagaattaggaactgtttatagatatgaactatctggaagtttacatggccttttccgtgttagaggtttcacacaggatgacgcacatatattttgtttagatgaccagattaaagatgagatcaggggtgtcctagatcttactgaagaaatactattgcaatttggttttgaaaagtatgaagtaaatttatctacaaggcctgaaaaggctgtgggagacgatgatatatgggaaaaagctacctctgctttagaagatgctttggatgataaaggttggacctatcaaattgatgatggaggaggtgccttttatgggccaaaggttgatatcaagattgaggatgctcttggtaggaagtggcaatgctcaaccatacaggttgatttcaatctaccacagcgttttgacatcacatatgttgactcaaatactgagaaaaggaggcctataatgatccatagagcagtgcttggatcattggaaagattctttggcattctcattgagcattatgctggtgattttccattatggctttctccaatacaagctcgagttttacctgttactgatgcccagcttgaatattgcaatgttgtgaccaacaaacttaaaatgtatggcatccgagctgaagtttgccatggtgagcgcctacctaaactaataagaaatgcagagaagcagaaaattccattaatggttgttgtgggctcaaaggaagttgaaacagaaacagtcactgttagatctaggtttggtggggagcttggaaccatgccagttgatgattttattgacagaataaagttgggaacagaaaacccaatatcattatgatgatattttaattggcaaaagatggtcatcttatttgtttatgtaatgattggaaaagaatgaaggcaataaacatttgaaacatcatactttgtatattagacaagtattgaatagtccacgtcgttgaagaacaaaggctctggcgtttgcaccaggtaagcatacgatttggctcgataatttgtacttgtatcaatgattatgaaatatagctaatgtaacatcagaattgaattgtagttaattgctattatcatcacatttctgaaaacataatccccatgtatttttatgtttgactcgtgtatttgcttgcggcattgggaattttgtttgctttttcccaagtgaacgcagaagacagttaaagaggcaagtttcaattcatcaatcacagccatcgtgaacccaccctctctcttcttccccacatatcctctatgtacacaagttggtattatttgttataggtgataatggcacaagaaga

SEQ ID NO: 123227 - DNA, 1423 bp, Glycine max
  Clone ID: PAT_MRT3847_82281C.1
ccagtgaagccgcacacacaaatatacatcttggctcaatttgagagttcaagttttctttttccccaaacccaaagattttaggttacagaaaatggcatcttgtcctcctttcctttcttatcttcccatgacactttgagagttcaagtttccttttctttcctacaaatccaaaataatagttttagtttacaaaatggctgtggaactcatggggttcccaaaactagacgaacaaaaggccattcaagaagccgcatcagaaggcctcaagggcatgaaacacctgatccgaaccctttccaaccaaccctctcacttaaacaccgaacttaccgacgttaccgtttcaaagttcaagaaacttatttcactcttaaatcgaaccggccacgcccggttcagacgcgccccggttcagtactcatctccacacgcacccgttcacaacactaacgcttccacctcatcaattcaactccctcctccgccgcaaaaccctaatattcccgcgctggcgcagtttcctactccggcgccggtggccgtgcaccacacgccggtgacgctcgatttcacgaagccgcacaacgcgcttctgagctccaacgccaaatccgtcgagctcgagttctcgaaggaaaccttcagcgtttcctctaactcctctttcatgtcctccgcgatcaccggcgacggcagcgtctccaatgggaagattttcctcgcgccaccggcgacctccgccggaaaacgtccggcgttcaagaagcggtgccacgaacaccgcgaacactccgacgatgtctccggcaacagcaagtgccactgcgttaagcgaaggaaaaatagggtgaagagcactgtgagagtgccggcgattagttcaaaagtcgccgatattccaccggacgagtactcgtggaggaagtacggtcagaaaccgatcaagggttccccatacccaaggggttactacaagtgcagcacgattagagggtgcccagcgaggaagcacgtggagcgcgcaccagacgatcctgcaatgctgatagtgacgtacgagggggagcacaggcacgcggttcaggctgcgatgcaggagaacgcagccggggtggtggggttggtgttcgagtcaacgtagagaatgagaaagaaggtccaataaaaaaataataataaatttggaagtggaggacttttttaaaaaatatatatatataatttttggaaagtgtagtgggaagaaccaagaagtaaggacaatggctgccttgtaaatttgttttatttttatctttattattattgttatattttagttgtcatagactcgtagagaggtgaaaaatggaatctcaagttgtttatttatttctatctcctttgcctcaaaaaaaaaaaaaaaaaaaaaaaa

SEQ ID NO: 123228 - DNA, 367 bp, Glycine max
  Clone ID: PAT_MRT3847_82282C.1
tgcttgattgtgtagttaatttggcacgcatggctgtggtttcatatgaaaaccaccaggataaattcactaatggagaactactgaaaggttatgtgtcttcattgcttatggatcccatgtgccttgaactacaccagtaggagaagctatttcacatataaatgtgtaacacatcttatatcctgctatacgttcgagaagatgtattaccatagtgttatgtactagcaagcataaatagatatgaaaaagtgaactgctgttaggaaagttgatttgtcctacatgatgttccatgtgtgagttgagaaaaatgttgtttgtatgttgttgtttgctcaatgctcaatgtgctattggatac

SEQ ID NO: 123229 - DNA, 620 bp, Glycine max
  Clone ID: PAT_MRT3847_82283C.1
ggggtgaagagcactgtgagagtgccggcgattagttcaaaagtcgccgatattccaccggacgagtactcgtggaggaagtacggtcagaaaccgatcaagggttccccatacccaaggtgagtgatatttaattttgaccgttgatttagttgacttttatctcatcaagactcgttccctgacgtcgattttttttatcatcaggggttactacaagtgcagcacgattagagggtgcccagcgaggaagcacgtggagcgcgcaccagacgatcctgcaatgctgatagtgacgtacgagggggagcacaggcacgcggttcaggctgcgatgcaggagaacccagccggggtggtggggttggtgttcgagtcaacgtagagaatgagaaagaaggtccaataaaaaaataataataaatttggaagtggaggacttttttaaaaaatatatatatataatttttggaaagtgtagtgggaagaaccaagaagtaaggacaatggctgccttgtaaatttgttttatttttatctttattattattgttatattttagttgtcatagactcgtagagaggtgaaaaatggaatctcaagttgtttatttatttct

SEQ ID NO: 123230 - DNA, 644 bp, Glycine max
  unsure (1)..(644): unsure at all n locations
  Clone ID: PAT_MRT3847_82284C.1
ccacgcgtccgagctcccccacacatcaaacgacaaaaaggcactgttccccttttcggagttctaaactccacacaacacactgcttctgcttttcctttccttttctttcctttccccgtaccatcggttcgctgcagcacaccattaaaaccactcccaacacaacacagactccgaaacgaaacccgaaaccctcgtcgcaatggcggaggaggaaaagcatcgtctccaagaagacaccgacaagctcttctgctcctacataggcgcgagcttctcgatgttcctcgccatgctggcgaacaactccgtcccagcgctgcagggcaaggtgcgtccgctctccctgcgcgcggcggaggcggcggaggagctccggcagatgaagtcgcggcggcaggaggactcgaaggcgaacgcgcgcgtggtggagatcttcgcctcgcaccggaacgcgtggcaggcggaggagaagcgcctcctgcagcagatcgacgccgcggcggaggagatcgcgtgcctgcgggggcgcgtggcggagctcgaggacgccgccgcgcacggggagangggacgtcgccgagagggacgagatgatcgggttcatgtcgcggaggatcgaggaggagggattgggtggg

SEQ ID NO: 123231 - DNA, 457 bp, Glycine max
  Clone ID: PAT_MRT3847_82285C.1
gggaaaaaaccggggccgggaaaacaaacaaaaacaacccccctggaaagggttgggttttaccaccccccaaacccaggaacaaaaggaaaaatggaaaccctcccccgcccttggggaaaaagggggggaaaggcaaaggaacccccgggggggggcatcaaaaaaaaaggtcaattttagccaaccaaaaaaaaaatcttttgaaaccaagctttttaacccaaaatgggggggggggggccttttttatcaaccctcgggggcggaaacccacttggaacttcattaacccccggaatcggaaccccctcaacaacttcaaaaggggaccgggtccgagcccgcatctcttggggggggtcttgactttgacccaccatgaaatgcataaacaggtcctaagggttaaactcggtcccaagacccacctttttagggtttttactggacaaag

SEQ ID NO: 123232 - DNA, 400 bp, Glycine max
  unsure (1)..(400): unsure at all n locations
  Clone ID: PAT_MRT3847_82286C.1
atagatgtttttttgtttggagttatcaaaaaggaaatgaatcattggtacttcaaacttcttatattacttttgttctcattaatttttattaacaacaaaatgaggagtttggatatcatgttgagtttgtagttttcttaagactttattaagtgctaatttatgatctaacaatatgttgactaatacaataacttgttaggttactgaaggatttgataaaataattatatgtgattttttatataaattatttttaaatttttatttatttaaaacagttgacataccggtgagagatttaaaaatatgatttataaaaaaattattggtgattatcttgntaaatttcttgatgaagacaaagtcaatgagttattaagatagttgntatgtc

SEQ ID NO: 123233 - DNA, 247 bp, Glycine max
  unsure (1)..(247): unsure at all n locations
  Clone ID: PAT_MRT3847_82287C.1
cactgccactttgatttgattcgtgtgcacatataaggtggggcatggctacacctttccaacactctcccactctcactcgcttcttcccagacccgcacctcttcatccacctccaacactcttctttcgcccctcagttcaaagcttgcgcgtaactaaagctgtcccgtaaanangtgcgaacacacagtgcgcggctcaaaggttgggnctgcaaagccgttnacatatcgaaggtatcgtg

SEQ ID NO: 123234 - DNA, 395 bp, Glycine max
  Clone ID: PAT_MRT3847_82288C.1
tctcattgtctttctccaagaataacaactctcaattccaacctcttcaacttcgatcttccatcttccatcttccatcttccatcttatgcccactaaattctcttctctttcaccttcacttcaattacttcaattaagttgagacttccatcttcgactactagtttcaaactctctctctcacatacactataccattccttttctcgctccctctttctctttcactacaactttcccgattctgtatcatctctgcttcagttcagcatccttacatcctctctatcttccacctatttgatttgttttcatttcttccattttctttctatcttctcacaccttgttccattccacttcttttctcctcgaatctaatccttttggtc

SEQ ID NO: 123235 - DNA, 1343 bp, Glycine max
  unsure (1)..(1343): unsure at all n locations
  Clone ID: PAT_MRT3847_82289C.1
cattaacatgacaagttctaatggtacaggcaacgtcattaatgaagtcttcaccgtttcctttggattcgtacaatatattagcggccccaagaacaccagtaagacgctcgcatgtgtgcgtaggaccgcacggacctcggcctggttgatcttggcggaagttggtcattttgtgaacttcggaaaatttctatccttagtgtgatatctgtggatggtctctcaggatgagttttgatnatanagtttgggccataaaattttataatcaaaactcaaccagtgggttttttccacagattatatatttggaaagttatttcccaatattccctaatccaatccaatccgtcctaatcaagttttcatatatgcaaacgtcattttccctctaaaccctctgtccatcacagctttcgaatgaacaaaggtaataacaacatattgcaaatcacatacaaattcacaatactgctatgatactaaagatggttgaagcagacggatgggatgcagaactcctgcctccagaactgatttgtccttcactgattcctcaccaagtcacgacacgacaccaaatattctcactcgtcgtcttcgtctgcgccctaaccaaattcaattcaaactcttctcatcaaaatccaaggcttcgttcttgaaaccctaattcgatatcctcctcctcagaagaagaaggatcgatgtgggcagcttcttgcctggcgtcatgctgcgcggcctgcgcatgcgacgcctgcaggaccgtcgtatcgggaatcagccgccgttccgccaggatatccaactgcggcatgaaggagttagagatgttcgtcgaaaacttcttgatttacaacacatatttctggatattgcggtgttagtcaacgctcaaggagacatgcttgacaacatagaaacacaggtttcaagtgcagtggatcacgtgcagcaaggcaacaatgccctccagaaggcaaagaaactacaaaggaactctagaaaatggatgtgcattgcaatcatgatacttctcatcgttgttataatcattgttgttgctgtcatcaaaccatgggttaccaaaaagggtgcatagtatcctatcacttatacctcatgattctttttcctgatccattcttttatttccgcatgttttaagaacattctttccgtgttgtttgcacctgaaagaaacattggaccaacaaatattgaattgagttgtatactattgttacataaaagaaaatgtattgattactatctccaacacttccaaaaaaaaaaaaaaaaaaaaaaaaaaaaaagcggccgctctagaggatcca

SEQ ID NO: 123236 - DNA, 2593 bp, Glycine max
  Clone ID: PAT_MRT3847_8228C.1
ctcaaacctggggttgaatatgatgagagtgattttactaaaaatcagcgatatttgctgaaaacttggtttcatgatcattatgttgtagaccaaacttttgagtcttatgctgatctgctggcacattgttttactaagtgggagagacatgttaaggagcaagagtcaaatctgtctcaaattaagggcaagaaaagtgaaagtggtcatttctataactttcaacagcttatggatttggctgtctcatggaatcttaatgcagatatcatgaaaaacaggatcaaggctgagagaagtgacatggtttatgttttttccgcagggaggaaggataaaattttgcattgttttttaaacaaggaaggcgagtgcacggttcgtcctgattcaatagatgatcctgaagcgcaagctttgctcaaagcttcagagacaatgctcatgaaagcctatgccttcctcaaatacaataatgcaacaaatttgattgtcagaacccatttggcagaactggtgaatgaagatttttatgatgagaaattcaatttcattggaacaattggaacaccggcttttcatcgccaaatagctgcacatttggaaaagatgccattgtggcaaaaagcaattttgtgtggaatgggacattgtttgtctcggaaaagcaaagaaacatggtattctgggatgaaggaaaaatttgtgcaaatgatgaagagcatctatgaaacagaagttacagattggccagtaccactgaaaatcatttctggaaccattcttgcaacaattttgggaacaaccttctggaaactcttttcctttcttagagatgctggtaatgggggagtttttgttggcaatgttgcttcagcattcacaacttcaagtgtgcttgaggcccaaagtagaaagcccaacagatatgaagtttcccaatacagatatcgcaatgtgccaataaagcgcagagcatgggttgaaggccagatgtctttcgatcagtctgtagtagcaattatgtctaaatgcaaagccagcatgagaatgggaaacactgatgctcaaattctgatggttccagggcgcagattcatagctcatggacattttttcaaaaatctgactcagaaagtgcgagtccaaattgttacatctgaaaagagttactggcatgtgtatgatcctgacaagtttcagatgtttgacaacagtgaaataggtctttattctaatcccactttggaagatatcccacattcagcttgggaccttttttgctgggacagtgagaaaactttgccaaataatttttctgcagaattgctctcttgcaaattggatactgttactgggccatattatcctgagtgggctccaataattgtcgagttcatcgacaaccaattcacatcactgaaggaaattatgtcagaaagcaagatgtcagcattgaatatgatgcatgtacaattccaaatgattgcggttcattggttgatgccaaggttggaaatcacaaacaaattgttggtttccatgttgctggaagcaaaggaagactgggatatgcttcattgataccatatgttgagccagttgtgccaagctcaaagtgctgaagtttactttgacttcttccctgtgggagggttgatagtcaagagggagttgctcacattggtgaattgaaatctggtgtctatgttccactgcctacaaaaactaatttggtggaaactcccaaggaatggcaactggatctaccttgtgacaaaattcctagtgtcttgactacaactgatgagagattggtaggcacagaacatgagggatatgatccttttcttggtggaattcaaaaatatgccactcccatgatgcccctagatgaagaaattctttctaaggttgcacaagacatggttgaggaatggtttgattgtgttgatgaggaggattcctttgaggaagtttctttaagtgcagcactcaatggtgtcgagggtttggactatatggaaagaattcctcttgccacatctgagggttttcctcatgtgctttcacgcaaaaatggtgaaaaaggcaaaaggagatttgtttctggggatggtgaagagatgacattgattccgggaaccactgttgaagaggcttacaacaagctaattagtgaacttgagaaaagtgttcctacattggttggcattgaatgtcccaaggatgagaaactttctcgtcgcaaaaattttgacaaacctaagacgcgctggtacactattttccctatggagtataatattgtggtccgtcagaagttttctaaattttgtgaggctcattctgactaaaagggacaagcttagttgtcaagttggaatgaacccatactgcatggaatggactggtttggccaatatgttactgagcaagggcaacgatattctgtgtcgcgattatgctagttctgatggtttgattaccaagctagttatgagcaagatggcagatatgataaacagtctctgaggtggtgatgaaaaattgatgcctgaaaggacacacctgctgatggcttgatgat

SEQ ID NO: 123237 - DNA, 612 bp, Glycine max
  unsure (1)..(612): unsure at all n locations
  Clone ID: PAT_MRT3847_82290C.1
cggtccggnnaattcccgggtacgacccacgcgtccggttattatttttctgatgtacattgaatttggggctatgcagggtaaaaagtgagggtgaactttgaaggaggtctcaagtcatatttatgtgtctatgaggttcaggggagttaggattgtttttattttttttttcctgttgaagtaggaaggacaagatactatttatgcagaggaatcttttgtggaggcttccatctaagtgttttcgatagtagagccacatagttggatccaaatcacacacaacccctttaccttttttgaagcagcttcttttcgactattctgacttggtagtaggtgatttgaaagtacaaaaagcacaacagctagtagtgtagtggagtcaagggtcttcctttcaaatttctcatcaatgagcaagtaaagcagggtgctatgctatgctatctttcactgctttgaatcttgttgagttttagaaagcttgaattgcatttttgcatttttgaacttgaggctgctgcatcaacctcgtctagctgctttctgatccacanaagggaaattggcacacatatgctntggatggttgttgagagttcaacc

SEQ ID NO: 123238 - DNA, 1209 bp, Glycine max
  Clone ID: PAT_MRT3847_82291C.1
ggaactttgaacagtcagccctggactgtaccttctgtacaagggcacgcaaacacaccaatgcctcatgcatcgcaccttgtcccaaagcctgccaatgaggctaaatccagtgttgttttacatccttctacagtagacataaaaccaagtggaagaagtgagcttcctgaggatctattcactgtaaaatattcaccgttccctgctccagtcccaggttggcaaatgggtccaccacctagcatgggtatctcaattcaatacaataatgcagtgcccatgccaagttatgcacaaccatcaaaatcaacaaatccatttgatgtcagtagcgaaccaactccagttcaagccccaatgtttccttccatgtcatctttgcaaggtgctctgcctagtgtaacgccttcagttacaatgcacccatcaaacatgggtaatatatctcatgcctggaatccacactcatcatcaccatcttatgtatcgcctcctcaagtacaaactcttgcaccagcaatgggaccgggggcatacatgggacaacaaatggcaactaacatgccaatgccaaggcatcaaggaattgggagttttgcgaccgaggcaactgcttttggattctcaaatccagatcaacagctgactggtaggttgtcaactgctgctaccccaaacacctaccatgcaggagggaaccctttcggatgacctaaagtttttgtctgcttggactctttttaagtcatgcatcgatttgttgcaccctgtacaaacatggttgaactttctggcgtttttcagtcaaaacgaaacactcatcaagcatattgagagatttatgttcagttaccacacgcctgtgggttcaaattcaaatatttgcacctggctttgtaaattgtttattgttataggaaagatgaaagacaaaatctgcttaagggaaaaaggggaaaagaggaaattacggagacactaatattgtggagataaaggtgtccctagtatcattttttcagatttttctgtattgtattattttgtaatctcataattattgtaaggtctttctattcgttgaggtattgttaaataattgtcagtttgagttctatgcctcttgtctgtttgttgatgtttttattaggaaacttgaaagaatggatattgtgtttttattaagaatttaatttgaatacactg

SEQ ID NO: 123239 - DNA, 306 bp, Glycine max
  Clone ID: PAT_MRT3847_82292C.1
ggtcatcgcagataaatatatatatatatatatatatatatatataaccaaggaccagaggttcattgattacataaagatccagtcatttgggtccataaatcttgagcacctatatgtaactattcttacagaatgtttagacgtaaaaatcacagatccctgtaaattacatataaatctcttgattttgagctgaccttgcactggttgaaacatcccctacccctacaaaagatttgagaacatgaaatgatagtctctttgatttattaatgagacaaatctagatgatcaaaatataat

SEQ ID NO: 123240 - DNA, 1343 bp, Glycine max
  unsure (1)..(1343): unsure at all n locations
  Clone ID: PAT_MRT3847_82293C.1
cgcgtgcgcgcgctntaagtctcggatacgagcacttgagagagagagggagaaagctatagtagcatggtcaccaagttagaagtagtatagtagtactagtaagtagcatgaacatgaccaatgaccatgaccacaaagcataaccataaaaactaagcacaaacacaaccattgctacttctacttcccatttttccattaccggaattctaatgagccaaacgctgactcttgattttgtactactactctttaccaacgctctttcctctgtatacaaacactgatcctttcacactttctctctcttcttggattcgctgttctttctctgagatctgtgtgcttttcgactctgttcctcttctgggtctcgttactctttcagattgttgctaaatttggcagaaaaaagccacgtgtacttctgagagattctgttgtgcgtaacgaggactttcgttgaggactggaacctggagtgttgggggttaaggaaaactagaaccgaatgaggcgtactccaattgtcttttcttgtgacactggttttggttgaaggttcatacgtgtgaatattaatggattgtaaggggcgtgaagtactggtacaaatataacagagaatgttattctgcagtgggaaggaagggagagaggaaaaggcttgttttgtggtggagggtgtcattttgtgagaatttcgttgcgtaattggtagtgttgtgattgtggactcgattttgaggttactaatttgctttagccttttttgctcaaatgagactttcttcagctgattttagtcctccaccccaggaaggggaaaaacgagttctagattcagaactttggcatgcatgtgctggtccccttgtctctttaccagcagttggaagccgcgtggtgtactttccacaaggtcacagtgaacaagtggctgtgtcaaccaacaaggaagtagatgctcatatcccaaactatccaagcttgcctcctcaactcatttgtcaacttcataatatgactatgcacgctgatgttgagactgatgaagtgtacgctcagatgaccttgcaacctctgaatcctcaagagcaaaatgaggcataccttccagcagagttgggcactgcaagcaaacagccaacaaactatttctgcaaaactttgaccgccagtgacacaagcactcatgggggattctctgtgcctcgccgggcagctgaaaaagtgtttcctccattggatttctctcacagcctcctgctcaagaattaattgcaagggatttgcatggtaatgaatggaaattcagacatatcttccggggcccagcc

SEQ ID NO: 123241 - DNA, 271 bp, Glycine max
  Clone ID: PAT_MRT3847_82294C.1
ggcacgtacaaacgtatcagccacgtgctagccaagaatggcgcgtcaaagcaatagccacacacattcaaagttgtacaaatctagatgccacaacctcggtgaccttagccgcaatgtccaatgtcaaaaactgttgctttcgtctggatcagaccaatgcctcgcctgctgtttactgcgaaggctacgcgcgcattaagcgccgcaacgtattgacctggaacacacgctttctagtactaagtaacacaaaactgctattctttca

SEQ ID NO: 123242 - DNA, 278 bp, Glycine max
  Clone ID: PAT_MRT3847_82295C.1
ggatcatggccggatgtgaaaacttaaagggcacagattgggacactgttgttgccactcaccttccgctgaagctcactctcactccgtccatcacgcaacagtatttcagttgcatgatcacccatataccctcatattcgcccctataggacccgcagatcacacgtttccgcgttttctacgtgttgcttcttctgggcgtgataacacccgcaccgggggtccactgtattcaccccattgtcactgacagcggttttaagaaatatcagctt

SEQ ID NO: 123243 - DNA, 339 bp, Glycine max
  Clone ID: PAT_MRT3847_82296C.1
ggctcgagccgagatcctcatccgttagcgagtcagctttctgtctccaattctagtgaacatgctctcttcactagaattggagcccgcgcgctgagacgccggcgggcgcggagcacggcacgtgaggcaagtcgagcctacgatcagcgtgaaccagctgaaacagccaacaggggtgatagcgcaagactgactcattggcggcatgcagactagagcgagcctgatgactgaaggatggctagcggctgcttgatggacagtcacggagtggcagtagtgtcaatacttgtagcacacatgcagaattatgcgcgatgagcaccggactgagtg

SEQ ID NO: 123244 - DNA, 2677 bp, Glycine max
  Clone ID: PAT_MRT3847_82297C.1
ccccgagctaaaacgtggacgcaacatagcatagaaagagaaagcgcagggtccgacccgagacctcatctttcgccgtagtgctcgttttcagagttacaaaggaatcgacccaaaagtgagttaaaaaaggccagacacacacacacagagagaaagagatcgagaagatagctttggtgtcaaacgctcccagattcttctgctgtggactccacttctctactgttccaccaattcctgcctgtgcttccacaccattcaccaattcctgctctctgcttccactccgcactacgattctgtgaaatctctgactggacgctctgtaattggtgattttggagccaaactgtttcgtccaatgaaaatcaatcgcgaaagtttccgttgatataattcgtggagaatttactgataaaatagttattcgtcggcgaaattgagcgaatgcgtctccgatcttcagccggccggggacgtaatctgagaggatctgagaatttttcatactaatcgaagctgcaagttctcaattcctgtgtgcgctgccgaattcaaacggaatttgaatttaatctcgcaacgctgtagcggaattgaattctatgagataagagcgaaattcaaaattccgttgaaaaccgggaaggaaaaggaaaacagaaaaacggaaaagcataatattcaggttttgatggagcctcctcaagcacgtccccttggaaccgcagggaggaaaccgatgcatgactttctgtcactctacagtaattcaactgcccaacaagatccaaggccaccttctcaaggaagttacctcaagacccatgatttcttgcagccactagaacgggtagaaacgaaagccagtgcgaaggaagaagccacagatgaaatatcatcggtggttcaaaagccacgttcaccttcagttgagcacctcttacctggaggaattgggacttatagtattagccacatttcatatgttaataataataataataataatcaaaggggggttctgaaaccagagacatcatcccttttcgtgcgtcaagcaactagtacggataggaatgaagaaaactctaactgcagttcaaatacattcatggtttcactttgtgggaagagtcgtcggggaagaggggaaagacaggaaaggagaataatgcgggcgagaaaccctctctaggagagtctgcagcaaagctagggcagtggacaacaacggagcggacgtcacagtcattttccaacaatcgtcacgccagcttcagctctcgctactcatctcacagaactgggctgaaaaagccagagttttattgaagtgatgaggtctgaaaggaatagagcacagaaagaagaccgagaaagagatgaaacaatttttattaactaaaaagggaactcgtaatgccaaagggctgaaagacctgtgaaagaggtagggaacagtatttttcaaaagtaaataaacaccaagactaatacaccctcaaagaaaacacaggatgaaaggtagaatcagaagagtatttgattttcaaggcaaacacactcaagatcataacaaatctggcgacagaacagctggagtaggagcaaaaataaagactgattactaatgccaagagagcttattcaacaatgagacctaatagcaaggataaagcatctatcctgtaagagttatgtgattgaattaaatttacaaaagagcagaagcactacaacgaagttgcatttaaagtgtgtcgataacgagccaaacaattcctgggagtacccagaatgtagaatctggcttgagcacagcaactacctccaagacaatggatcatcaggctggaaaaatgaacaaggcttttccaattcctagttccttcacagctaaatttcttcactccaacccaaatcggctggtccaggtggagtagtgtctcagctcacacatagatcggcatctgatgctgagaacaccaaatatcaaccttcagtggaatgtcagactatgactgctaccaatgaaaagctgaaagagaaagagctcactattgaaggtggtgccattagcatatcaagcgtgtactcaaaagggttgttacatacgcttacacacgcattgcagagttcaggggtggacttgtcacaggctagcatctcagtgcaaattgaacttggtaaacaagcaaacatcagatcaaatgtaccagtgtcagtgtgtggtgctaaggatggtgcagttccttctaacaatcaaaagatgatgcgctctagagttgctagctctgggaagtctgaccaagcagttaagaagctaaagacttgcagaagttaattcgaccgttatattcattctttctttattacaattcttactaattatttggggtaactttttaaaattaatttttggaaggggtattttatgtcttctgctggctttattatccagcgtgggggagatcgactgtacattcagtgtcttcttagtttgttgggatcattaggctcaccccaacaaaataaaatgaattattttagtttctaaatcatataaatataaaggcttccatactaatcgagaagctattttttaaccaaggcttctattcatgtatagattgtaaactctcgctcctttatttgctgcatattctttacc

SEQ ID NO: 123245 - DNA, 681 bp, Glycine max
  Clone ID: PAT_MRT3847_82298C.1
cccccacaaaaattggcacaaagggaatttgcgtgtcatacccttgcacctgaaacaaacaatcacaatggtggtagggaagcaaatacagagccacatcaagctcacgaggcagctcaattatggagcatggctaaacaattgggcgttacaggaggagatgagaatgatgctatcattgaaaaaattaaactaatggaagaaagggataagacagaatatgagagatgggagtaaagtgggcagcaattagaagaatgataaagaaggagggtgcagacatgatatgcttacaagagacaaagaaagaagctgttgacaaagctatgtgtcaggcattatggggggatgtggaggtttgttgggagatgttgccagctaataatatagtaggaggtgtattatgtctatggagtgaaacaactttcaggctacagagtaaactaattggcaatggattcattcacttggctggggagtggattaaagaggcacaacacatcaatttagttaccgtgtattcaccttgcgacattcacaacaagagattactatgagataatataaagcaactgaaagattctttgtctggagggctatggtgtatcctgggcgacttcaacaacattaggaacccaaatgaaagatttgccacaggtaagaggatatcgggggacaaca

SEQ ID NO: 123246 - DNA, 984 bp, Glycine max
  unsure (1)..(984): unsure at all n locations
  Clone ID: PAT_MRT3847_82299C.1
actctattgaggttgaacgtgttaaatgtttactggaactgttcaggaaatgttacttgaatcctttcccttttcttgtccatcttggtggcatgctaggagttgttaatgctgttggagcaggtgcaggaattttggtcaacatgaattttccaaattactctaggcaatctggctatcagaaggagtcttcttctgtcatgggccctctcctctcaagttctgattttgaaccatacttgacatcattggtgcaagagatgtttcttgtggcacagaattcggataatcatcagctacaacagtttgcttcctgggtacttgccttccttcgacatcatttatggtccaaggaacttttgggggttgatagtgataggagcgtggccgcaactaattcaaaatctgtttctcagagtttttcggaggacaatattgttttgaagcttagtttgtggcttacgagtttcaaatatactgagccaggtactattgtacatattagcagagtcattgctgtattaaggtgcctttctacagctcccaggttgccaagcttggattgggggtcaattattaggcgttgtatgagatatgaggccaaagttgctgagttgttaccaaaagattctgcttctaagaatggaactctaagggaggaatgcataatgtttgcaatggcccatgcaaatcaatttgattcactgctaacatttcttgatgagctatctgacttttccagattcaggacacttgaaataaatttgcagtcatgtctgctaaatcatctagcagaccttgtaaaagtatattcaaactccaggcttgagaaactatttggagatgtgagtaatcacttgtcttcctttacttctacaaagagtctagcacctaccccaaagcttgttatgtatttcgtgctggaagggctctacgattgcctagatgaagtttctgtggactcatctggntacatatccatat

SEQ ID NO: 123247 - DNA, 1465 bp, Glycine max
  Clone ID: PAT_MRT3847_8229C.1
gtcgacccacgcgtccgctcaacactcatagagttaggaaagcctttaaattaacaccttttgcttctcccaaaaaaaaaatccaatctttcctagtttgtgtgtctgtttcctccaccatcaatggaacaagaaggacatcaatggatagtgcatcctcatgaagaagaagaagaaattatggaagatggtgctttgataagaaagcaaactgtgtcacataacaagggcaattttattacagatgaattaactttctcatcttcatcttcatcttcttcttctagcaatggcagtgagcatagtaatggagtttgttcagtggtcacagcccccccagatggatatcctgttcagaaagaggaagaagttgcagagataggaggtgttggtgaaaattgcaaccatgttaatggtgatatagtagattatgcagctgctgggcttgcacaagtggcagaatttgcaggagcagaaacaaatggagaggccataactggtgttgttgtgtcacagaataagaacagtgtttactttgatgagcaacaagatgatgaagttaatggagttcaaaatggtgatgctttttggtctgtccatccaacaaatctgggggggagagactttgatgtacaagcggatcagtcagttgttcagaatagtctatgcagtgaaatcaccaatcaatgtatgaaaactgtggacgacaagctcccttctgttacagaaatatctcatttacataattcatctgacatacaagctacagctattacaaattttcctgaagaaactagtacaaaggaagctcctaacctgatagaagagattgatccacaactggaagaatttgatgttgaggcagtattagcaaaacaagagacgcatgacttgttttgtcctaactgcagttcttgcattactaaaagggttatcctcaaaaaaagaaaaaggaacactaaaaaatcaggcagcaaatccaagcgtgataagccggagaatactcataatttagacaacgaagccaagtgtgatgagttacagactagaggcagctcagagctgccagatagttctgcacaacccgaagccaagcaaggtgttcatgcaaatataatgcctgaacctggtattcttagtccagagccatctgctgataataatcaacctcacgaagaaccagaagttttcagatgtttagcatgcctcagcttctttattcctagtggaaaatgttttgataggttccgtttcgatggtgccaataagagtgaaagtgcacgaaatctaccaagtatacctgcaagcaatttgcagaatccttcaattccacaaggctccaatgcaaattggctcatatctctatttccttggaagaagggttcaaaaactagtgatgcaccccttgaatattctggaactggttctgccgagcagcctaactcaacattaacttctaatgatg

SEQ ID NO: 123248 - DNA, 156 bp, Glycine max
  Clone ID: PAT_MRT3847_822C.1
ggtgctaacgcataaaaaaacattttggagagcgcaaaaaccatgtttggccaatgcaaaactcaagtctggccctcccaacagctaataattgcctgtggcatagaaaatagggttgggggccaaataaaaaagtttaaccgaccaaattaatag

SEQ ID NO: 123249 - DNA, 119 bp, Glycine max
  Clone ID: PAT_MRT3847_82300C.1
atcacgtcttttccggtttttccgacgttttcctcaaataaacgttggtggcgactccgcgcgtactcctttcttggagcacacactccgtgagtcacgcatcgccctctcgccgaagg

SEQ ID NO: 123250 - DNA, 463 bp, Glycine max
  Clone ID: PAT_MRT3847_82301C.1
ccccttccttagcctggattctttaaaaccggccgcctttttttttttttttctggcacttatacccttttttggtttggccaaatttttaaaaaccttccttttttaatgctttaaaaaggccaggccttggattaaattttctaaattccagaattaaggctagctatggggctggaaacaagaatgtctttttaaaatataaaagggcctacaaataaatcttgagtaaaggtggcatgttggttcctatgaatcttcctaaatgtcaaggccctttagttttgattccaattcatcatgatcagcatcttcttcagcctcctaataagggtcttctccatcaggattattctcatccaaaggacccagcatatcaggtgagtttttgaatatatttttcaactcatcaatcccttcatcagaaatgaagttagcattaatgttaagcaacttaaaacct

SEQ ID NO: 123251 - DNA, 267 bp, Glycine max
  Clone ID: PAT_MRT3847_82302C.1
ctgcaatcgaagctcgatacagcagcaactagaattggaataaaccctatgtctcttttcaagggtgtttggtctctgttctgctccaaaaccgtagaacaaaaagcagaggagcatgagattgagcagaccctgagtttgtttttgcatgatataggcaggacaatgtcttcagatctcagtgagtataaaatcatcaaggaaagagtagctgagattcttatggacgcaaaggatgaagtcttctataacaaaactcagggcaat

SEQ ID NO: 123252 - DNA, 194 bp, Glycine max
  Clone ID: PAT_MRT3847_82303C.1
ggctcgagattgcatgcaatttattactatccatagagcacgatgaaggcaatggaccgagtgtcaccctgtgatacggcatacgggaacccttcatctgaatgccatattaccctctgatacttttgagctccacatcatcgagcagaacaattcacactgatcttgaggaaagcgtcatcttattttgatca

SEQ ID NO: 123253 - DNA, 204 bp, Glycine max
  Clone ID: PAT_MRT3847_82304C.1
gccttgcggcttcacggcgcagcacatgttcgcttaaggtgtgcatccttgtctcgttctagcctgcatggccgttttcagctttctcatatcgaatgcttctcctgagattgacgcagttaggcgccacgatcggggcagacgtcaccgagcaagacctcttgcaatccacgggtggagcacgcaccatggtttcgtgctcac

SEQ ID NO: 123254 - DNA, 892 bp, Glycine max
  unsure (1)..(892): unsure at all n locations
  Clone ID: PAT_MRT3847_82305C.1
cgaagcttcagcttgtcttgcaagagttccaggtgaacccggcaagtcagaatattgatcagttttattgggttatgaactgggcttctgctattcctattcacctgatggttgatatgatggataaattcttctttgccaaatggcttcaggttttgtatcattggttgtgctcaaatcctaatttcgaagaagttacaaaatggtatttgggatggaaagaactcattccaaaagaactgttggcaaatgaaagtatcagataccagcttaatcgcggtcttgatatgatgaaccaggctgttgaaggtnntggaggtggtccaacctggtttaaaagagaatataagctatcttagggtacttgagcaaaggcaatttgaggctcaacagaaagcagcagcctatactcaacagcaagctgctgctagcttgggtggtgcggtcaacgcagatggtgctcatgaattgagcttgaaagaagtcattgaggctcatgctcagcaacatggtttgctattcaagattaaacctggtagaatgcacaatggtcatcaaatatatgggtttggtaatgtcagcataataatagattccctaaatcaaaaggtatatgcccaaaatgaagaaatgtggtctttggaatctcttcatggtttgctagagttgcataataaatcccttagtaaaagacgctgaattctgcatttgccaaatgtgaagtatctcaattctcaggtgtttataaaccatggtacttcagctgctgcataaatgagtcattctcacagtcagatgatggccctgccaattattccaagtagtatttctgcccatcttgcaaatatcattttgatcaaacaggggaaatgttttatttatgaaattcatc

SEQ ID NO: 123255 - DNA, 1064 bp, Glycine max
  Clone ID: PAT_MRT3847_82306C.1
cccacgcgtccgcctaatataaaatcagctttgcgttccaaattaccaagctttcatgtcgtaaagcagctcaccatatcaaatattaaagaagagatggagaaaacattgcattggctggttctgattgctacaaacacggccaaagcacatcaaggttctggtcgtgtaggggagtgggcaagctctggttgtgagctgaataagaagaccatgaaggctgatgtgttgcggattgaaacgcttcaccatgccgataaagataaagtagaaaattatattcttgaacttctcctatggcttcaccgcttggccgtcaaaagtaaagctggcatcgataccggagaaacaaggtctaccttaaagtcccaagttggcactgcccttcaaactacaaatcaacaatcaacaaaagccttatcgccattgttaacaactgacgagcagaaaatgctgcaagatgttagtaataaaattcgtataagaaggatcagtaaaagcttagactttgacagtgtgatggcagataatgacagacttactaagagtagcagttattcttattcatcaacaagtagaagcaaggaattatcttttaatagaattttgtctaagcttcctgttattgattttggtattgacaaaaagagagcattggatgtgattgacagattagacgtggtcagataatttgcaactattcttgagtgcctttgaaatgaaagggtagtagcaagacatggacagacgaatgggacttctttgtgtaaatatacaagcatacaaatgctgcaagtcttgagtgccaaattttggcaccctggattccttttgcttcattagagtgctttgttttggtgatatgctgctccacatcatgatgtagatatggaaccaaggaaattgttgaggtgataatcattcttgcttgtatcaatgtgattgaagtggccactcgctattggagcggagtggattctgtttttttgttcttgagtgtatagacactgaggatatggtacttacgattggtttttgttacatgtataattattggtttggtt

SEQ ID NO: 123256 - DNA, 244 bp, Glycine max
  Clone ID: PAT_MRT3847_82307C.1
atatgctggcgaacacaggaacgtggagactttcaaatacatttgtagcatatggccatgagattcaaagctgattaataacaatcttactggacgattcgaaatcttgcattcttgatttcaggataccatctacttatatacgataatggtatttgacatgacagtgacaattcagaactattatacgcacattacaatgattgtctactatgacttaactagggatgctgttctaatgaca

SEQ ID NO: 123257 - DNA, 257 bp, Glycine max
  Clone ID: PAT_MRT3847_82308C.1
ggctggggaaaaaaatcaaccccattatgatcccaaagccaccacctgtcattgttaaaagtttctcccttttaaggatgccattttgggaaaattttcggaacccttttgcagaggggtctggatataggagcaaaaaatttttgtaatccccaaaatctaatccccattgcgggttactacccctaatgcctccaaaggatttccacccggaccctgacaaatgtccctggaactttacgcaaacccttattggt

SEQ ID NO: 123258 - DNA, 461 bp, Glycine max
  Clone ID: PAT_MRT3847_82309C.1
atgagatattgaacaaggtggggtcttactggttctccaagaaggccagcaaggaatttaactctgtcggcgatgatatcaacgtaaacaacacaatccttaacaccctttttttatctatttcttttttttttggtcgattcatttttatttttattttacttttatttggtaaagttcccttttttttttttgtcttttccgttttgctttttcatacgagtgactgaattttatagttcctggcttcctgctgtcatgtttgtccctgttgaaaaaaaatatctatggaactaagttcttgcttaaccatggagtcgtggttttggttgagggttagggttgaaattgaaacgtgattgtttattattcatgtgaatgaacacacacgaacatgcccttttgggattctatgaaaagggaaaatttttaatgggtattttctatttttaggttttttt

SEQ ID NO: 123259 - DNA, 3354 bp, Glycine max
  Clone ID: PAT_MRT3847_8230C.1
atttttttttgattaccggttcgacgacattgccgcttcgtccttttttttttttttttagtaagaaaattttattcaatatactagaaatcttttaatgttcctcctctctctttcaaatcccttcaatattagagaagtagaatttagatgaagagcaattatgctctccttcattcccctttcttcctaaaagttgaaacaaacaatcaaagtttataaaatttctccattcctcatttgcttctaaccaaacactgttaaaaaaaaaagtcttattttcttatgatttgctaaaggaagggaatacaggcgattggcgagcaaacaaccttttgaagacacttatattacagacacaaaagaccaggcaacaacatataagattccaatgcttcccaaaaaaaaaaaaaaaacataaactaccgattataaaaatgtgataagacacctcactaggtaaaaagcactagttgttcctctaatcaactaatgacatctaaccttttgaagcgacagtggaaatattaaatatgataatcttgttcactaaaatacacaataatgacaagtgcctaaaaccaccatcagtgcattagaagctggaagtcatcatcattattcaccactttataatcatatccaagtttgttggcacgatcatggaactcatccatctcacttttgggtacctgtattccaactagcacgtttgctccagtttcaccctcccctcggtaatggaataaactgatattccaacgtggactgaaggggtccaaaaatttcatcaaagcaccaggtctttctggaaaggtgaaacgacagagaacctcattctgaatgtttgatcggcctcccatcaagtaacgcaagtggtctttcaccaagtcactttctgtgagattgtaagttttgagctgagaagattccatcctctcctgcattgctcttagttcggagactgtgtgaatcccaacactgtaaaggacaactgccttctcattggagttatatctgtatttgaattctgtgatgttcatctgccccaccaattcacaaaactgtttgaaactgcccggctcctctggcaaaacagttgccagcacagcctcttgtttacggccaacgttagcgagttcagttacaacccgaagtttatcaaaattcatgtttgctccactggttattactacaatatctttcccctggaccccatgatgcttgcagtatgcctcagctccagctagtgcaagtgcacctgctggttctaatatgttccttttctcctcgaacatatcttttattgacgcacaaattgaatcacggcttacaagaacaacgccatctatcaactccttgcatatgcgaaaagtttcttcaccaacctctttaacagctacaccatctgcaaatcctccaacctgatccaaaatcactctctgatcatgatggagtgacaatgccattgcattcgcatcagtgggttccaccccaaaaatcttcacctccggcttaaccctcttcacataagcagcaataccagcaatgagaccaccacctcccacaggcacaaagattgcaaaaattggaccttgcatttggcggacaatttccatgccaattgttccctgacccatgatgacatcaggatgatcaaaaggaggtacgaatgtcctaccctcctctaccccccgcttcttagcatacgcttgtgcttcatcatatgaatcccccacgagcacaactgtagcacccagcgcctccacggatttccactttatttctggagtggtgacaggcatagcaatcaccgcactgcaattcaacctcttggcagccaatgcaactccttgagcatggttcccagcagacgagcagataacccccttttccaacaattccgtcggaagctttgccatcatattataagctccacgaagcttaaatgagaaaacgggttgcaaatcctctctcttgagccaaaccttaaccccgagtctcgcagagagctttggcgccaattgcagaggggactcaatcgccacgtcatataccttcgaagagagaatgttcgtcaaataagtcatggcattattcataccgtcgccgtcgccgccgtctgagcgagagctggcgggaatcgcgccgacgaagccgggcgggtactggagggaatccggcgagacgcgggggcgcggaggaggagccgcctccgagggatcttcgacgatggcgacggcggaggagtgagtggcctccggcggcatggaaagcgtggcgacgatgaggggcgcgcggcggggacgcgcggtgaggggatggggcgccattttgcggagagggtggcggcggaggagaggcggggtggtgggggcgacgcgcagcgcatccatggtactatgctgtgtgtgctgcgagaaaaagtctcgagccccgtgttacgagaattgtatttgcacagtccagaggaagctcgccaattgagaaggaaagctctctctcgtattgaatggctgcaaaaagctgatgtgcctaccatagcacagattgaagagttccattcgatgcagaggatgatgaatgctcctgattcaaatgataatattgatctactgttgagcattgatttgttgggtttacaaggagcaggtaaagcttttccaaacaagattgtttttgatgataagcttgtgttggctaacacacaagaattctttgatggaaattttccagtggattcttggttaccaatttttgtgaattgtctttatcctgtaagtcaattaccttcagaagctgtcgttgtaaatgttacatgtggtagtggacgtggtggtttacccaccactgcttggattagttctgcagttaacaatcgctcctcagatatcaacaaaaggattcgcacagcacttgggaaaggtaagaaaattgtttttcttactagagttgatccttttccagtagctttactggctgttctttttggcgttaagaatgaaattctgagttctaacgccactaaccctatgctgacgcgacttcttgagaactgtaagagtctcaaatatctggttgatgagtgtccttttgcatttgtgaactagtatgtaatattttattcacttaaataaagcgcattactatgtgcaatgagtgtgtttaaatataaaaaaaaaaaaaaaaaaaaaaaaaaaaaaaaaaaaaaaaaaaaaaaaaaaaaaaaacaaaaccataacccccccgttcatgagaccccactcggcgccaagctctcctggaccaactaattctatttatagaccaacattaatcggggcgcctgtccttagactaaccaattttgacacc

SEQ ID NO: 123260 - DNA, 371 bp, Glycine max
  Clone ID: PAT_MRT3847_82310C.1
tggtcggccgtcgtccttttttttagccaacacaaacactggtcataaacatgggcatggtgcgtaatcataacattgaaacacaaatgcatgaggttctttcaggatgcgggcctacactgataccctggctggcgcgacgaacctcaacctctccgaccacagggggaagcgacgttcgactgagaaagacacacacggtcggatgaaccacgaaaagcagacaaaacatgcggccgagacggaggaataactacgtgaggaacaagaggcacataataatccttgccttgggcaactctcgccataaacatggcgacacccattgagacaaacgtgatctttgtgaaaatgacctcgagagacaaaac

SEQ ID NO: 123261 - DNA, 767 bp, Glycine max
  Clone ID: PAT_MRT3847_82311C.1
tgccgctccgcgtggacctcccgcggcggggtgggttagcagcagcagcaagctatggcggaagaaccgaaagttccaccaccttccaatcctacgttgtcgtttgatcctagtcgaacggttggtattatcaagaggaaggccttgatcaaagacttagctgcggtataccatgccgaatgccttgcgtagaagaacggaaagttgcaccaccttctgatcctccgttaccgtttgatcctagtcggatgattggtatcatcaagaggaaggccttgatcaaagacttagctgcggtataccatgctgaatgccttgcatactgtcaagagcttttggaacttcaaactaaatgggaagagccatttattgacttaaaaactccagaggaatcaaaaaaggagacagcacgaccctccaaacgtgtaaaaaagttgcgttaggttttcaggtggttgatgcataactcatttagggcgcaaaagatgcaccatctgaggatatacctttttcttgctgctggtgtgtacctgttagtatcagagcacatatttaatgtagtatcgatgtacttttcaaatgctactgagacttgatgtgtgagatttcatccatcagcctgcagttatggaacatttcccactgctcgataaaatagataaatacataatttgatttttttgttgtgggaatgatgtatagaatgttgtcagtcctgcattcagtttgtgggtacaatccattgttgatattttagcttgctttgc

SEQ ID NO: 123262 - DNA, 662 bp, Glycine max
  unsure (1)..(662): unsure at all n locations
  Clone ID: PAT_MRT3847_82312C.1
ccacgcgtccgagaatgctgattatatagctgttatggaggatggtcaactggttgagatgggtactcatgatgagttactcaccctggatggcttatacgcagagcttcttcgatgtgaagaggccacaaaacttcctaagagaaaatcactttgttctcatccaggatgcctgttcgaaactacaaggagactgcaactttccaaattgagaaagattcttcagaaagtcatagcttcaaagaaccttcatctcctaaaatgataaagtcaccctctcttcagagagtttctgccatatttcggccttcagatggcttcttcaactcacaagaatcaccaaaaatccggagcccaccttctgagaagttgatggagaatggccagtctttagattcatcagataaggagccatcaataaaaaggcaggatagttttgaaatgagactaccagagttacccaagattgatgttcaatgtgtgcatcgacaaacataaatggtttctgatccagaatctcccatttcacctcttttaacgtccgaccctaaaaatgaacgctcccattcacagacttttagcagacctgattgtcatttgatgatcttttggtgaaaatgagtgaaacaaagatgcanggcatcgaaaacaccctcaatttg

SEQ ID NO: 123263 - DNA, 439 bp, Glycine max
  Clone ID: PAT_MRT3847_82313C.1
gtttttcccaatagccaagcacagccaattttttttaattaatttccaccaatctttttgttttgttggttttccatccgcctcaatcggttaggcttaaaccaccatctaattcatatgatggggggaagagggggccatcaagaggggcattctggtgcttttgccgacctttcctttttggttttaaacctccttggctcgcctttgacgttttccgacagggttccgccagcgtaacggcttccggcccaggttaaaatatccccggcgggttccgggtcgttgttgttggaaaaattccctggcgttgttcgctggggggatctgggacgtttttaatggggttcgtgttgatcccctgggtttggggatggataatgctttcttaactagccgaaatcctgtcaaccttttccgttttggccgttcatttttt

SEQ ID NO: 123264 - DNA, 1884 bp, Glycine max
  unsure (1)..(1884): unsure at all n locations
  Clone ID: PAT_MRT3847_82314C.1
gctcgagccgctcgagctgctcgagcatattttcatggatgcttctaaatatagtaagtgggtttgctttctgagctttccaatgttgagttcatggttaaataatttctcagctttccaattctgaagtatatgatctttgtttgcctagtgtagtcaatttgttctgaaactttgctgattatagtttatgaaacccattttttatccttcaatagtaccaaccattgatgggaagaccataagtgaaagattgcaccttaaattgattatacagtgtcattcttattttcagatttgtttcccacgagttcatgttcatgaagaacttctatctttcagcgaatgacaacttcagatgccattgcttctcttcgaccgctgcccgcgctgcgagaagacgacagaaggggagacgtaaaacatctttttgtttatgttgcataatatgtgaacgtgttgaactagtcaatgcacgggacggtgtttatgttctattcacaagacttggtcgttcacaagaaacaacacaagaccaggcagaagaaaacaactttgaattcctctacaacaatttggaaccattctagaaagcaaccttagttaaaagaattgatggaagcttcgggtatgcgtgtcttatggtttgtttttcatatttgatgactctcacacacaaaaacaaacattaataatttagtagttcgtagtgaaggctaagaatatacaaacacaacagatggcatgttctgtgccttttaacaacaagaatttggatataagtttctttgttttcaagccaactattgtaatcatagatgaccttgttcatggactcaaacacttctccttaaccactgagagccttggttgtgttcaaagctctatatttaggagcatccatggaaatatgatcatatggtatggagcatggcagaggcggtcgagtaaggaaaaagaggagctgacctcaacccttaaatcaatgttaagcaacatatcaagcatggctgtgttaattgaacacagtttccttgaagcatacggtggagaatcaagagatggctcttcaactgcaaaattctccactggggacataatatccttgaactcagcagtcaccactactaatgacctcaatgacctttgctacgcggtcctagccattttaaggtcacgctttgcaaaaatggaaggcataaccgctggcctttgcttcaagggacaaagcaaacccagagtggtgtgcattcatgtctggaagtctctccatttttgttactcttggattctcaactctgaccacagaaattggatgatgccatatcttgaacgcttctctatcaacatgaagtatgatattttccgagtagtctatgttaggggtgacaatgtggttgatcttaactgcatttctactcatcagatgttagaaaatgggaaagaaagtagtaggcaagggcaggttatgcagaactgagactgctgcaaagggtttcaaatttagaaccatcaaatttgccaagttatcttgtaaatattgcatattacttttttaagttcaatttacggattagaactcaaagttgcatgttacataagtaccatcctgtgaggccttctcaactatttaacaaagcaatactgtgtataggaatggctttggacagcatggtcttaatcttcagtgaaagtacggatcgtacggcaagatagttgttttcactttgatatgtagagattgagctaggcagggttgcttaaacaacttagctttgtcacggaaacaataattttgtaagtcattttcaaaatatacaaggtttgaatagcaaaattctagtgattcatttaaatgcnnntgaaaagannntgtgtaccgaa

SEQ ID NO: 123265 - DNA, 269 bp, Glycine max
  Clone ID: PAT_MRT3847_82315C.1
ataacaatggttattattatggtgaaaactcattgccagactataatactatacagggtgcctaatgcgagcgtactctccgcgtgcccctacacgcaccattactgatgcgagcccctctcgcaagagttggaatgcgatcaggatcactatgaataacgacctacggtctctcggcatgcctatacgcgaaattgcacacactgtgtctatgacaaaattgtgccctgacgccaatcgtgctatacatgaagttaaatgccgtgaca

SEQ ID NO: 123266 - DNA, 441 bp, Glycine max
  Clone ID: PAT_MRT3847_82316C.1
gctcggaagggggctcgagttggaacttctacaaaactcagagaatatgaacttcagtacatacttcaggacaatggagttcttctcacaacatatgatattgtccgcaacaattctaagtccttacaggggaataattattttgatgatgaggataatgaagaaggcgcaacatgggactacatgatacttgatgagggacaccttataaagaacccaagcacacaaagggctaaaagtttgcttgaaataccaagtgctcatcgcattatcattagcggcactcctttgcaaaataacctgaaggagttgtgggcattgttcaatttctgttgcccagagttgcttggtgaccacaaatggttcaaagaaagatttgaaaatcccatacttcgtggaaatgacaagcatgcttctgacagggagaagcgtgttggttca

SEQ ID NO: 123267 - DNA, 593 bp, Glycine max
  Clone ID: PAT_MRT3847_82317C.1
cgtaagctttcaaggcggctcgagcggagcctttgctcaaggtactgatggctgctctcaagcaggacctgggatggtagtggcaaaattggcaataggacagtgaagcaataatcatgtacaggggttgagactgttgcacaatttggtgtagtgtttcttctctttgctttggggctggagttttccctggcaaagttaaaagctgtgggacctgttgctgttcttggagggctacttcaaattatcatttttatgttcatgtgtggcattctttccatgttatttggagccaaattgtctgagggtgtttttgtcggttcctttctatcaatgtcatcaacagcagtggtggtgaagtttttagtggagcggaatagtaataatgctctccatgttcaagttacaattgggactcttatttttcaggattgtgcagtgggtttactatttgctttgctcccagttttgggtggtaacagtggccttttacaaggaataatgtcaatgggaaaactgttgctagtgttgtctttgtatatcactgctacgtctgtattgtcttggacatttgttcctcgctttcttaaact

SEQ ID NO: 123268 - DNA, 273 bp, Glycine max
  Clone ID: PAT_MRT3847_82318C.1
ccaacgccggctactcacaacctctctcatatatatctacacacactaacccttgggatcgtcatattccaatagggctccaccgacccctcttgaaactccctgcctgctctcttttttcacaaccatgtcttcggaggagacaaccacttattacacctcgttctccttcaaaacgcactacacctccttacactgtgacacgcggctatactctattcctaaaacaaccctaccccaactggctcaaccgtacaccgacaaaaaccaaat

SEQ ID NO: 123269 - DNA, 384 bp, Glycine max
  Clone ID: PAT_MRT3847_82319C.1
cggtcgtaacgacgtcctactccaatataatcatctttacggagagtaccgactatcgacgtcaagaaccactacggaccaccgtaccaaagtttgaacctaacatcgtcaaacgtccagagtctggatacaatgtagacctcggacgagaagtcctttatacccaatggcatcggatcgtacaactcaaccctcatacgcaaagcaatcacgtacgatagtaaaatgcgacgattacaggatcaaccatattccgaacacgttcacaacaataccactaaggcaactcaaggccgaaaaaatagacaaacgcctataaaccgtggctccagactaaaacggccagggcagacgccgtaatccgaaggaacgtccctcggccct

SEQ ID NO: 123270 - DNA, 1224 bp, Glycine max
  unsure (1)..(1224): unsure at all n locations
  Clone ID: PAT_MRT3847_8231C.1
ccgggtcgacccacgcgtccgtacggctgcgagaagacgacagaaggggggaaatgaaaccaacacaacaaagaggagttaataattgaagaaaatgtccaagtatggaacatctctattggtgccttctgttcatgaacttgtgaagcaacctatcaccaaagttccagatcaatatcttcatccaaatcaagatcctcctgatatatctaacacaaccttaccacaagttccagtcatcgaccttagtaaattgttatctgaagatgtcactgagctagagaagctagacgatgcatgcaaggaatgggggttcttccagctgattaatcatggagtcaacccttcaatggtggaaaacgtgaagagagatgttcaagagtttttaaatcttccaatggaaaagaagaagcaattttggcaaatcccagatgaattggagggttttggccagttgtttgttgtatctgaggatcaaaagctagaatgggcagatatgttcttcattcacactcttccaataaacgcaaggaatcttcgcttatttcctaactttcctcaaccattgagggataatatagagaactattcttcgcaattgaaaaaactttgcctcacagtcaaacccttgcctaatgcttttgtcatcaacgttggagacattttggagatattgaccaatgggatttaccggagcatcgagcatcgagcaactattaacaaagagaaagagagaatttccgttgccacatttcacaggcctctaatgaacaaagttataggtccaacacccagccttgttacttctgaaagagctgcagtgttcaaaagaattgctgttgaagattattacaaagcatacttttctcgcgggctaaaaggaaaatcatgccttgatttgatcagggtccaaaaatgatattggtaaaatggtagaagttcatgtatgactttgcatgagatggaaaattaaaacttgtacactgaaagcagctaatattgaataatggtacaaataaggctgctaagtctaaaattacttttcaaggttttaagatggtgatagcgaaagtacatggacttgaaaatttatatcatgggatttgaatagtgtgtattcttcaagtagtaagctgatacgtgtgtctcacgtacgttttcccctccccctttagccaaaaaaaaaaaaaaaaaaaaaaaaaaaaaagcggccgctntagagga

SEQ ID NO: 123271 - DNA, 1616 bp, Glycine max
  Clone ID: PAT_MRT3847_82320C.1
ctccgttttgcctctcaccttctacatttttcctcttttctttgttttcccgctcgttaccaaatttgttattaccttttctctctttattttcttcttttttttttttcctccgactgttagcctgcctttacttctctcatttgtttttcttttttttttctttctttctttttttcatttatcccatgattattatctctccgttggtttgtactttatcgttcttttttttgttctaagaacccctacgtccagactatcctcctaatcatacataaaactttttgtgctgggacaagttaagggtctttcttcttttctcgtattccctccctgagtgacattggtggctacggcaacaccctcttggctgtatgggaataatggcccacaccactctctgtgattaaacctaacaagcttggactgcagtcaaagagtcaacgatccacaacatgttttcgaggggcagagggagtgacattggtggccatggcaacacaaacgtggctgaatgggaattaaggccaggaggaatggtcgtgcagaaacgtaactcggatttgaatcaaaattctgcatctaaattcaccatcaaagtcaaagtgaagtatggctcatcctatcaccaaattcaaatcagttctcatgcaagtttcggggaattgaagaaaatgttaacagaacctacaggattgcacgttcaggatcagaagttgatttacaagaaaaaagagagagactcaaagtcatatcttgatgttgagagggtcaaagatggatcaaaattggtgcttgttgtggacattgagagtagagaaagaaggatacttgagacgttaaaaattgctaaggagaagacatcaaaatccttgacagaaataaaggtggaggttgataaacttgccaagaaggttgcagctttggaggctgctgcttccacaggtggggttatagcagagttagatatagagactttgaccgagaatttgatgagaacattgattgcattggatgaaattaatggtgagggtgaactgaaattgcagagaagagagcaggttaggagagttcagaaacacattgagactctagatatgttgaggatggcaagggaaaactcaatttctctgaaaaatgaagagaaaaacttggcacgtgagagcaaggtgcattgtggtgatcacatgcaggggagacagggaaatcctaagaagcagcaaccgttaaaacatcctgaatcagttgtagtcacaacaaaatgggaaacttttgattgaggattttaaatttgcaacgaaaatgcctcacacaaattaagagtgcaatcaatattcagtgagtcatctagttgtgggttgcttctgccataaaagaaattattatttttctcattatatatctgcaaattagaataatgtttggttcacattatttttgctttacatctacttgcaccctttaaagcatagaatcatttcataggacgaatagcaaaggtaaaaagctgtttaatagtagttgtaaaagtatgtggaataaaaactgacttgaaaaaccaagaggctagttacttcagcaatgggtaattcgggtttcattctcttttattt

SEQ ID NO: 123272 - DNA, 263 bp, Glycine max
  Clone ID: PAT_MRT3847_82321C.1
acctaaaatcaaatattttctacttatagatgacaattttggtcatgacattaaacactatggtgacattaaagttctacaagacactttatttgcaagggcttcagctgcccaaacagacggtgtttatgacacctcaagagctagccactggctacaacacacactcattattcttatccacaagtgaaaatggcactaccttacatattacacaaagactttactatgagttatgacacgcaaaaacataaaaccaacat

SEQ ID NO: 123273 - DNA, 206 bp, Glycine max
  Clone ID: PAT_MRT3847_82322C.1
gtccgtacggctgcgagaagacgacagaaggggacggttcctccgaaaattatcctggcgctagcgcgctcacggtggatcggttgtaaacatgctacccatgttcttggctctgccgaaacgtggatatcgagtaactgcgccgtcagcacgcactgccaacacctctacatgaggattcaggccgtcattaacgattggcggca

SEQ ID NO: 123274 - DNA, 405 bp, Glycine max
  unsure (1)..(405): unsure at all n locations
  Clone ID: PAT_MRT3847_82323C.1
acggctgcgagaagacgacagaagggcaacccaaaaggtacaagcaacgctctcaaggttcttactcaatgtaaccttccaacactctttgagcctctctaatcctttctttcatagccctcttacccctgaccatattacaagcccaataaagcccatgtggatcaaggaataacaaattttcttttaagttgggattctggaatgaaacccacacacgcttgtgattgttaaaaaaatatatatctaacaaagaaaaaagagaatcctcgaggtttcgcccttgcacatataagaacaaaactcattcaaccaagagctcgtggaaaatgcccaaagacaattgtgatagtagggtacatctgatgttagtcgctcaggcatgactccttangattccttttg

SEQ ID NO: 123275 - DNA, 710 bp, Glycine max
  unsure (1)..(710): unsure at all n locations
  Clone ID: PAT_MRT3847_82324C.1
aaaaggtccccaagggaagttcacaaaaaagaagcaaaaaaaggcngcggcggcacaagcagcagccgcagctgctgctgctgctcccacagcttctgttcaagtccgcatcgtgttagatgatggaacatcaaatatactgatgaggtctgttggcacacgcagtgaaccagtcattggtttgcatggaggggcactgcttggtgttgcctatcgaacatctaggagagtcagtcctattgctgctacagctatttcaacaatccagtcgatgcccttatcaggctatggaagcagtggtgtttcttcttttactacttatgatgatggattttcttcacaaagacctcctactgaggcagcacctcaaaacttccagttatacagttgggagacatttcagcctgtggggggtttacttcctcagccagaatggactgcttgggaccaaaccgtcgagtactgtgcatttgcaaaccagcaaaaaataatcatatcttctttacgccctcaatataganacttgggaaatgttgcaatccccccccccccaagtgctgtttggcaccggaggcaactgtttgtggccaccccaactactatagaaattgtttttgtcgacgctggggttgctcaaattgacantgcaactaagaagatgaaagaagagcaaaaaaaaaaaaaaaaaaaaaaaaaaaaaggaaaccaag

SEQ ID NO: 123276 - DNA, 829 bp, Glycine max
  Clone ID: PAT_MRT3847_82325C.1
ccacgcgtccgcagtttcattcttaacatgacatgatgacataggagtaaccagtgaaatttcatgcaccgatttggggttctcaataacaaactgcgtatgagagggtctaacgaaaggaaagtggcccatttgctctgctagttcttccgaatccgatctcaccagtcaccaccctttatcgatatctatctcaatttgagccgtgaatcatttttttctacattcataaaatcatcacaaaccactcttctctccgaaacgcaattcgaccaacaatttgaaagtttctgattatgactaagcccaattcttctctgcaaacttacctggatgtggggaatttatcactgtgtatcacgtttgcattcccatgaacactttgaatcccaacccaccaaccagaatgttgtctaaaagaaaacccctttacagatttccactcattcctgtttttgcccttgtcatatgcctctccttcttggttttgtatcgctactatgcaaaacctgattcccagttcaatggattgtccaaaacttcaacaatgtcacatgcccctcaatgctccgggcaagccctcgccttaggggagaaattcgtgtggtatgcgcctcacagcgggttcagcaaccagctttcggagttcaagaatgctgttctgatggcggggatactgaatcggactttggtggttcctcccattctggatcaccatgctgttgccctaggtagctgtccgaagtttcgcgtagtggatcccatggatgttcgaatttctgttgggatcatgtgattgagcttgtccagagtcgaaggtatatctcca

SEQ ID NO: 123277 - DNA, 423 bp, Glycine max
  Clone ID: PAT_MRT3847_82326C.1
tcgagcggctagagaaggaaccatattattgaacaatttatgatatccttattttccaagctcttatattgacgacacttgtgagacttaaagtcatatcccgaccacttaatacagaatttccaaaaaatcacactaacatcttcaacttcacactcttcagtctacctctcaacctttcttacattcacatatacactcagaccacaccatcttgcacaaaatcccatcattacgtgcaccatcctacaccaacaccactctaaggacttaaacaccaactctttttctagtgagctccaaaaacatcttgctatttggtatcctatcccttattatgattgaactgaaagaccacaatgatatacgcccatcatcgcatcatccttgttggactgcaaaaattttcatcttgcttttgct

SEQ ID NO: 123278 - DNA, 319 bp, Glycine max
  Clone ID: PAT_MRT3847_82327C.1
gggggaggaagctttttattgagttttaaaaacgggacaatcttatgttagttcaagcacaaaaaggtttacctcggtctaacaaaccttccttaaagccgggcttcaccagcagaatttacaataccaatatttctagggggctgcaaagatgggcccacaaaagactgtttatgaaacattgggttaatgggggcccaaggattgtctgcaaaaaaaatcagtttgggaaaagttatctaaacagacacttggccattgggagcggttcttgggatttttatcagcagaggctgatgggacggtgtcagggaggggt

SEQ ID NO: 123279 - DNA, 287 bp, Glycine max
  Clone ID: PAT_MRT3847_82328C.1
cttcgagtctaaccatccaatctctctttccaaaacagaccgaaattgtaatccacaggctgggagatccataaaacgactcaaccccccctgaaccacttttcaacaaactgaattccaaacagcctaacgttagttgattgaaatgcctgtccactgatcgtataaaccgtatcctaacctatccaactcgaacgacaaagacctcatcaacctcaaaaattattcgaccaccctgacgaaaccaaagaaaggaacgaaactagagacctcaactgccttacacc

SEQ ID NO: 123280 - DNA, 256 bp, Glycine max
  unsure (1)..(256): unsure at all n locations
  Clone ID: PAT_MRT3847_82329C.1
acgcgtgattgtgagcacgagtaatttcgtctcagagaatactgcactttggtatccgttgcagttgctgccaccttcgcatacaaagtttgaattganaaccttcgtcctcgtatcttagttaaaacaggtcttgtctcccacacacaaagccatatttcanannctgcgtcttttatctacttnctcttctaactggcaccangttctcagcactcatagccatgagacacatctacgagangcccttatacaa

SEQ ID NO: 123281 - DNA, 525 bp, Glycine max
  Clone ID: PAT_MRT3847_8232C.1
gtcatgtaagaattatcacatgaataataacaaaagggttccattcgtgatcggaagtagaaaataataacagctttgaagaatgaattatatgaataatcagaatcaatattatattcctctatataaattagccagctccaatccaacaaaccctcactgaaaataaactttacccccatctcaaatgcttatcataaacagcatgaacatagtcactgaggaggtcatggagtatctaaagaggatgttcacatggattagtaaattctcctacaaatatacggtggatgaacaggtgcgtctccacgtgcattttggagacatccgatgccacgttttgctgttagatgggccccagatgccactaatcaccatagacgcacatgctacataccacttcccgtttgagcgtaccccttagtgttatattaaccatatcattttctattatgcttactttggatttgagtgactggataacccactgcgattcttgcaacaatttttcaggcatggtgctaa

SEQ ID NO: 123282 - DNA, 753 bp, Glycine max
  Clone ID: PAT_MRT3847_82330C.1
gagagtgaaatgtatcataaggatacatatcctctaacaccgccgccctgatgttttttttttacaagaaaagaaatatccttcgtatatatatgagagtgaaatgtgtcaaatgaatacttatacttcaacagcttataccagatacccatcgtatacactcaagaaaaaatgtcctccgtctatatatatatatgactatatgagagtggagtggtgttttaacaaaaaatttataaaacaaaaactgaaagggcccccctgagttcatcccttgtcaagagagtataaactttctaatgtctaaacaattatggataattataattgctacaaaaggatattatgccaacatactgtaattagcagtctttagaaacaagtttatatcccgaggccattcagctgtgaaacattgttgtcgaacaataactttaatttcgtaagatattgtggaggatcgtccatggaagtagtacctaggattacttccctttttaattttggtgtcaacttgtgacaaactcgcagctctgatcgagtagccccaccaatgataaacacaaagattcgctttcccatccttttgaaatcagtagtcacattcttcaatgtggagtcacttgaatatccatcatccgaagtacgagctcgtccccagtttgcagtcctcctagatctcattgaatgaggagcagtagttggaggtgtctgggtctgtttgctgattctaactgaacctcgggcattact

SEQ ID NO: 123283 - DNA, 471 bp, Glycine max
  Clone ID: PAT_MRT3847_82331C.1
gtgtgattcctggacaaagagcccttgcattgcatctcctttcgtctgtgcttgataaggcattacactatatttgcaaagacagaacagggtatatgacaaaaaatgagaacaaagttgacaaatcagttgactgggaagctgtttgggcttttgcactgggcccagaacctgagcttgtgttgtcacttaggatatgtcttgatgataaccacaattctgtagttctggcctgcacaaaagttgttcaatctgtattgagttatgatgcaaatgagaactactgtgatatgtcagagaagatagcaacttgtgacatggatatttgcacggctccagtttttaggagcagaccagatattaatgatggattccttcaagggggtttctggaagtacagtgccaaaccttctaatattcttcctttcagcgatgattcaatggataatgagactgaaggaaaacatacta

SEQ ID NO: 123284 - DNA, 335 bp, Glycine max
  Clone ID: PAT_MRT3847_82332C.1
cccccccgaaaactggttttatccccttcaaaagggcccggccaatagaaatttttttcaattttcaggggaaatttttttccacccttttttttttttttttttaaaatttcgggccttttaatttaaaaccaaggtttttttggggggaaaacctggtggcaaaaaaaccccttccattatcccccccaaaaaaccacccttggtttttttaaaatggttaacaaccaggtcaaaaaaatttgggccccaaattcccttcccaaaaatttttggtttgacccccccttaaaatttctaaaaaggaacctccttaaccaaggaaaagggcgggt

SEQ ID NO: 123285 - DNA, 435 bp, Glycine max
  Clone ID: PAT_MRT3847_82333C.1
ttaagaataagaatacatgttctcatatcacatatgtctgtataactggcatttaacagtctcttctctacacagctttctgtcagcagttaactgttgtaaattaccagtttatagttgaatcaggctgttcataatgtcatttgagctccttgccacagagataggaattaagcaaaatgcatattgatttttaatagagatggaattcccccatttaacaccatcatacatttatactgtcttttctcttgctcatgagctgatggacttctgtattttctttaaatgctattattcacattattttgatgaaacatatctactaggttgtctgttgttaattgcattacccttgaccctcgtattattagtatgagatatacagcatggtaacaagaatgaaaattttcaaaaggatgactcttattgaat

SEQ ID NO: 123286 - DNA, 516 bp, Glycine max
  Clone ID: PAT_MRT3847_82334C.1
accccaccaacccaaccaaactgaaccaaatcatcacacacacatactaagaagcaacaattcttctacaatggatctcctccttctggaaaagaccctcataggtctcttcctcgctgcggtggtcgccatcgccgtctccaccctccgcggccggaaattcaagctcccaccgggcccactccccgtcccaatcttcggcaactggctccaagtcggcgacgacctcaaccaccgcaacctcaccgatttggccaaaaaattcggtgacatcttcctcctccgcatggggcagcgcaacctcgtcgtggtttcttcccctgagctcgccaagacatggtcttcaccgtctacggcgagcactggcgcaaaatgcgccgcatcatgaccgtccccttcttcaccaacaaggttgtgcaacaataccgccatggatgggaatcggaggctgccgccgtcgtcgaggacgtcaagaaaaaccccgacgccgccgtctccggcaccgtcatccgccgc

SEQ ID NO: 123287 - DNA, 522 bp, Glycine max
  Clone ID: PAT_MRT3847_82335C.1
gcggaggctgccgccgtcgtcgaggacgtcaagaaaaaccccgacgccgccgtctccggcaccgtcatccgccgccgccttcagctcatgatgtacaacaacatgtaccgcataatgttcgaccggaggttcgagagcgaggaggatcccatcttccagaggctaagagccttgaacggagagaggagtcgcttggcgcagagctttgagtataactatggtgattttattcccatcttgagacccttcttgaagggttacttgaagatttgcaaggaggtgaaggagacgaggttgaagcttttcaaggattacttcgttgacgagaggaagaagcttggaagcaccaagagcaccaacaacaataatgaacttaaatgcgctattgaccacagattgacactagtgagaaaggagggcaatttagctagcacatactcaagcattccaccattgtggcaaagccaaggtcattttagactccaccacatgatcatgatcatatgatcaatccccttaatt

SEQ ID NO: 123288 - DNA, 1785 bp, Glycine max
  Clone ID: PAT_MRT3847_82336C.1
cggccgctcgagcggcgggcgggattcccaaaccaaatcataaaacactaacaagtgacaactcttctacaaatggatctcctccttctggaaaagaccctcataggtctcttcctcgccgcggtggtcgccattgccgtctccaccctccgcggccgcaaattcaagctcccgccgggccccctccccgtccccatcttcggcaactggctccaggtcggcgacgacctcaaccaccgcaacctcaccgatctcgccaaaaaattcggtgacatcttcctcctccgcatggggcagcgtaatctcgtcgtggtttcttccccggagctcgccaaggaggttctccacacgcagggcgtggagttcggctcccgcactcgcaacgtcgtcttcgacatcttcaccggcaagggccaggacatggtcttcaccgtctacggcgagcactggcgcaaaatgcgccgcatcatgaccgtccccttcttcaccaacaaggtggtgcaacaataccgccatggctgggaatccgaggccgccgccgtcgtggaggacgtcaagaacaaccccgacgccgccgtctccggcaccgtcatccgccgccgcctccagctcatgatgtacaacaacatgtaccgcatcatgttcgaccggaggttcgagagcgaggaggatccgatcttccagaggcttagggccttgaacggagagaggagtcgcttggcgcagagctttgagtataactatggcgattttattcccatcttgagaccctttttgaagggttacttgaagatttgtaaggaggtgaaggagaccaggttgaagctcttcaaggattacttcgttgacgagaggaagaagcttggaagcataaagagcagcaataacaatgaactaaaatgcgctattgaccacattttggatgcccagagaaaaggcgagatcaacgaagacaacgtcctttacattgttgaaaacattaatgtcgctgcaattgagacaactctatggtcgattgaatggggcattgctgagcttgtgaaccacccagagatccagcagaaggtgagggatgaaattgatagagttcttgaagcagggcaccaagtgactgagccagacatccaaaagctgccataccttcaagcagttgtgaaggaaactcttcggcttcgaatggcaatccctctccttgtcccacacatgaacctccacgatgcgaagcttggtggctatgacatcccagcagagagcaagatattggtgaatgcatggtggctggccaacaaccctgcacactggaagaagccagaggagttccggccagagaggttcttggaggaggaattgcatgtggaagccaatggcaatgactttaggtaccttccctttggggttggcagaaggagttgccccggaatcattcttgcattgcctattcttgccatcactttgggacgtttggtccaaaactttgagctcttgcctccccctggccagtcccagattgacaccagtgagaaaggagggcagtttagcttgcacatactcaagcattccaccattgtggcaaagccaaggtcattttagacttcaccacatgatcatatgattgtggcaatcccctttatttttttcttttcttactctttattattgtatcaatgcttgaaaatggggttgttctggaaatgtcatatataattggcctgctaatgggtaggtaatgtttgtgttgtcccattctaaatctctgaacttgaagtgatgcatgcagagttttgc

SEQ ID NO: 123289 - DNA, 1898 bp, Glycine max
  Clone ID: PAT_MRT3847_82337C.1
tacggctgcgagaagacgacagaaggggaacccaaccaaactgaaccaaatcatcacacacacatactaagaagcaacaattcttctacaatggatctcctccttctggaaaagaccctcataggtctcttcctcgctgcggtggtcgccatcgccgtctccaccctccgcggccggaaattcaagctcccaccgggcccactccccgtcccaatcttcggcaactggctccaagtcggcgacgacctcaaccaccgcaacctcaccgatttggccaaaaaattcggtgacatcttcctcctccgcatggggcagcgcaacctcgtcgtggtttcttcccctgagctcgccaaagaggttctccacacgcagggcgtggagttcggctcccgcacccgcaacgtcgtcttcgacatcttcaccggaaagggccaagacatggtcttcaccgtctacggcgagcactggcgcaaaatgcgccgcatcatgaccgtccccttcttcaccaacaaggttgtgcaacaataccgccatggatgggaatcggaggctgccgccgtcgtcgaggacgtcaagaaaaaccccgacgccgccgtctccggcaccgtcatccgccgccgccttcagctcatgatgtacaacaacatgtaccgcataatgttcgaccggaggttcgagagcgaggaggatcccatcttccagaggctaagagccttgaacggagagaggagtcgcttggcgcagagctttgagtataactatggtgattttattcccatcttgagacccttcttgaagggttacttgaagatttgcaaggaggtgaaggagacgaggttgaagcttttcaaggattacttcgttgacgagaggaagaagcttggaagcaccaagagcaccaacaacaataatgaacttaaatgcgctattgaccacattttggatgcccagagaaaaggcgagatcaacgaagacaacgtcctctacattgttgaaaacatcaacgttgctgcaattgaaacaactctatggtcgattgagtggggcattgctgagcttgtgaaccacccagagatccagcaaaagttaagggatgagattgacagagttcttggagcagggcaccaagtgactgagccagacatccaaaagctcccatacctccaagcagtggtcaaggaaactcttcgtcttagaatggcaatccctctccttgtaccacacatgaacctccacgacgcaaagcttgggggctatgatatcccagctgagagcaagatcttggtgaatgcatggtggctggccaacaaccctgcacactggaagaagccagaggagttccggcctgagaggttcttcgaggaggagtcgcttgttgaagccaatggcaatgactttaggtaccttccctttggtgttggcagaagaagctgccctggaatcattcttgcattgccaattcttggcatcactttgggacgtttggtccaaaactttgagctcttgcctccccctggccagtcacagattgacactagtgagaaaggagggcaatttagcttgcacatactcaagcattccaccattgtggcaaagccaaggtcattttagactccaccacatgatcatgatcatatgatcaatccccttaatttttttcttttttcttttcccttttctttactctgtattgtatcaatgcttgaaaatggggttgttccaaaaatgtcatatatatttggcctgctaatgggtattgtaaatctctgaacttgaagtgatgcacggttttgagatggttttctaataaacctacacttttgtctctaaatactctgtttcatatagtagaactttattgttgtaaaaaaaaaaaaaaaaaaaaaaaaaaccccaaa

SEQ ID NO: 123290 - DNA, 786 bp, Glycine max
  Clone ID: PAT_MRT3847_82338C.1
gaagcaaaggcaagcaatatcacagtagaaaaatatgcacgctaaaggtattgcaggttctgatattcaaaacgctaaggcgccatggttagataacttcaagaaatcagaaatatgatggtccttaggcaagtcagatatatgaatggatatgcctcaaaattctgaattcagaaaggatttttcctttcatacatctaattgaatcatcattgcattctgttttcttattgaatgcgatgaaaagataaaaataaaaccaaaataataaacccagctaaaactataaaaaaaaattgtgctgtgcaagtgtttcccatccgacagaggcattgacaaaaatggcctagtcaaaggagctgaagtctcattggttgaatctaaagagggcacattgggaaaaaccctatttgccatgtagaacaacaaaaagtagagatccaaactccagtggctagaaaggtgtcaatgactcgtgattagaagaacaaggtgggagaaaagaggacccagaaggaaaaccctaaagagaaacctcaaggggtgttaatgtagcgctgctatgactcaaaacgcttccattgtgaaataggggaaggcgatcttaagggcagcgccgacagattcaaaaaattacacgaaaccgaaaagagatcttacaacgttgtctgaaaccgctgctatgactcaaaacgcttccatcgtggaatagggaaggcgatcttaagggcagcgccgacatattccaaaaaacaacagatcttacaacgctgtctgaaacgaaag

SEQ ID NO: 123291 - DNA, 1127 bp, Glycine max
  Clone ID: PAT_MRT3847_82339C.1
tgaaactagaaggaaaaagtaggtggagaaggataaggtgacgaagcaatttcccatcacctactcttgctttgcttctcaagtacgccccattgtttactttattctcaatttcccatctcgtgattctgattccctccttttctatactaagctcggaaatcggcgcacggaaaacatgagatcattcatagatagaagagtaaaatttcactcacataataataatggggtctatgggtaactcaaatccaaatctaaatccaaatccaaatccaaatccatggactccaaaggattgttctgaaggaatttgcagcatctattgtcctcagtggtgttacaaagtgtactctcctccccctccaattctactaggtgatggcgatgatgacccttcaggctttgaattctctcctctcatagttgctgtgattggaatcttggctagcactttcatcttggtcacttactataccattatctcaaggttctgcaggcgcagaaacaacaccaatgattcaacagaagacgatggaaacagcgaattggctcgagtttcttcttctgccaattctggcttagatgaggctctcatcaaatccatcacggtttgcaagtacaacaaacgtggtggtttggtggaaggtcacgattgttcggtttgtttgatcgagttccaagagaatgaaaacttgagattgttgccaaaatgcaaccatgcttttcatctcccttgcattgatacttggctcaagtctcatgctacttgccctttgtgtcgttcttctgtcaccgcttgtccaaatccgaatccaaattcttccatggaacccccaccaagagtcattgttaatgccttgggacaccaacttaggagtaaccatgttgttgttgttgagagttctgaggaacaacagaaagatggttagttttgatgctcatactttgaatgacagtgaagggtatcatacataggggaagctaatatttggggaacagatctgcttcaacaagtacacagagatccatgttcacaaggcatatactatacatatatagtaagtgaatgaattctgttcttccaattatttatttgcatctaatcaaaataatttgtctttttt

SEQ ID NO: 123292 - DNA, 237 bp, Glycine max
  Clone ID: PAT_MRT3847_8233C.1
attcccgcaggagccacgcctcccttaccattttcacacactcaggtcgttctcttacaaggatcccttcaaggggctgtggtcccatacaaggaccctcactctttttcaacccaatgcgccttaaagagactggatgttacataattctctggtctttaatccactttacgtgtcacactatctaacagtgctatagaatccttcattatagaacctttaactttccaactaact

SEQ ID NO: 123293 - DNA, 223 bp, Glycine max
  unsure (1)..(223): unsure at all n locations
  Clone ID: PAT_MRT3847_82340C.1
antgcgtggaactaactactacgaacaattgctggaacggaacaaggaacacattgcaaagcctgctacagtgggagaatacgacctacgtacaaagcaattatgttacacccaccttactagtattcgcaatcataatgagtcctttgtggaaagacttagttgtgtgaataatgtgatgaaaaacaggaagagagctgaaatggaagatgcagcattgggg

SEQ ID NO: 123294 - DNA, 394 bp, Glycine max
  Clone ID: PAT_MRT3847_82341C.1
accatagccacccaaaggggagtccatgtcctgataatataaaacttggttgattaataaacgaactatatgaaacacttttgcataaaccaaccttaactaaattggcattctgtggggtctcacacgagctttccttatattttgaacaggacgacgggccttaatatatgtgtatacggtacaccacgtcgagtaacttttggagagaccaaaggaaacatgggaaagtggtttagtgactggggtatcatctcccatttttacgggaggggctgtaaatatatactctcacatgggataattgcgcacagagcgtgagatggactctttaaaagtttatcacatgcagccgaagcaaaacatattaatactgaagtttttgctgttctaa

SEQ ID NO: 123295 - DNA, 487 bp, Glycine max
  Clone ID: PAT_MRT3847_82342C.1
cacaggttgatgtggcactttgatttgaagaagttcagaccaagtgaagtaccaagggtgaagataagtttggcttgtgtttttgcctttatagcaattggatggccattaattatttacaagactggaatcatgggatggataaaattctggttgatgccatggttgggctatcacttctgggtaatttcaactctatcttgtaaattcatactttgttcgtcagtgttggctccaatgtctttgtttctttctttttgtttcctaaggggcagatgatttatgagagagcactgtgttctacttaaataaagctatggcacttctaatttttaaacttcaaagctgtcatttaaatataatgttaacactcaagtctttataattctttcctggatttcctagttattgctaggggttggaataggccaacgtgcatattaattgcctatggcctatttggcctagcctatttagcaaacaaact

SEQ ID NO: 123296 - DNA, 2071 bp, Glycine max
  Clone ID: PAT_MRT3847_82343C.1
tacggctgcgagaagacgacagaagggggagaatgaaatgattctcctgacaaaaactgttaaacttagtgagtactgagtagggagttgccagccatgtccgttgaactcaagctctctcgttccaatcgtatctatcgcccttcggaagctctggaaggcaaaatcattgtcaaaactcagtcttcaatttgccacgcccggtgctctctcgcgccctcgttccgggcggttctctcgcccttcggctgcacctccccttccctctccccacgctctctccctccaagtccggtccattcttcctctctcgagcaagctgtcccaagcccccttcgtcccaacaccaaggccaaatcatcgtccaatcgcattcgcccatctctcactatggaattcaacttactgtttcaggatccgttaacttgcaggttcgtggaggatcagctggggatgttgagtcattctatggtgttattaaccccagccgatttataattaggaccatttaggttaattcttctggaaagattggttctggtacatgggatataccattctcattgaaactgagaaaaccggatgaagaattagccagacgttatcagactatccattgcactgtaaaattactcaataaatttctttagtttaaaaaattaattaaaaatctaaaaaaataaaaattcttctaataactaaaccattttagaatttagaatttaaaaattctactaattaactttagctgaatcacctagtaggtttgaaactcagttggtagagtaggtgatttactagccttgtccgttgaactcaagctctctcgttccaattgtatctatcgcacttcggttataccatatccaacatctctctctctatctctatatatatacattcttgatgatttgaatttcaaggaagctctagaaggaaaaatctttgtcaaaacacactcttcaatctcccactagggaactgtacttactgtcagaggatccttgaacttgcacatccctgtaggatcagctcgggttgttgaatcagtctaagctgatattaatcccatcccacttgtgaataagactattaaggttaaatcttctcaatagactgaaactcgtacaccagagataccattctcagtgagtcttagacagcgggatggaaatatatgaagatttcatgatactttccatggtgcaagtagttgtttcaatatagatcttgtggatacttttataaatcattttcatcaacaatagatcttactgttggaagtgataattctgatcttgattaatgaccacttaacccatatagttcaatcttttacattagcagagacacatgaatgcatcaataacacgctgcataataatgtaatagtaccgcgccttttgacctgtccaacaactttagctggtcccttcgtcctattagtggtgagttaactgtagaaacatctgcagttccaattcattcaattgatcttcagttgtttcgagttgagtccattcttctcggggagaaaattgtgaccgaaacctctctggttcaaacaacacagatagcagatggagatgtgtgccgcaatatgacgctgcctatttatgtaatagtaccgcgccttttgacctgtccaacaactttagctggtcggcaatggaaacattaccgctagagttgatacagacaaagtaagatgatttgcagcagcaatgtgtcaaaatatgacttgatttcaatatggaacatggctttactcatgcaacatttgatttctcaagtttcatgtaatgtaactcgatcttcacacttgcaacatttgtttccagatgatttacagcagcaatgtgttgacaaacatttcttagtctctcatccaaactaagcgattcactctgatagaaaatgctagttattttaaaaatcatcacgggtggatttagaacgctactcattatattaatttgaagatacctttctattttatgtaactaaaatttaatattattgttatcttaattaattctaatttcaattcagtttttaaaaaaaaaaaaaa

SEQ ID NO: 123297 - DNA, 592 bp, Glycine max
  Clone ID: PAT_MRT3847_82344C.1
ctattagtggtgagttacctgtagaaacatctgcagttccaattcattcaattgatcttcagttgtttcgagttgagtccattcttctcggggagaaaattgtgaccgaaacctctctggttcaaacaacacagatagcagatggagatgtgtgccgcaatatgacgctgcctatttatgtaatagtaccgcgccttttgacctgtccaacaactttagctggtcccttctcagttgagttcaaagttgccattgttataagctttcagtcagagctaagtaaattgcccaaaaaatccgaccccaaaactccgagactctggctggcaatggaaacattaccgctagagttgattcggacaaagtaagatgatttgattgtgtggtttctcaaaatatgacttgatttcaatatggaacatggctttactcatgcaacatttgatttctcaagtttcatgtaatgtaactcgatcttcacacttgcaacatttgtttccagatgatttacagcagcaatgtgttgacaaacatttcttagtctctcatccaaactaagcgattcactctgatagaaaatgctagttatttt

SEQ ID NO: 123298 - DNA, 452 bp, Glycine max
  unsure (1)..(452): unsure at all n locations
  Clone ID: PAT_MRT3847_82345C.1
ccacgcgtccgccatgttccatattgaaatcaagtcatattttgagaaaccacacaatcaaatcatcttactttgtccgaatcaactctagcggtaatgtttccattgccagctgaaagttcacaaaagaaaattgctagtcagaaacatgtcttaatttgccagcttaaaacaaaaatgatacttcaaattgaagattaataaatgatcacatatctaacaatggacctgaacctacccagagtctcggagttttggggtcggattttttgtgcaatttacttagctctgactgaaagcttataacaatggcaactttgaactcaactgagaagggactgcacgaaataatagcattgagatcaaacttagtcgattcagtatccaataatagcacanagtaactcatgagaacatattcatgaaatggaaagtgctaaacacattggagg

SEQ ID NO: 123299 - DNA, 253 bp, Glycine max
  Clone ID: PAT_MRT3847_82346C.1
acgcgtccgaagctctcaattcgtctctaggtcacctcttccaacgatttttttttttttgctcttggttttaaatgttgttttctatatattcggttcaaggggggacctcttacataatttcacaataccatattttgtaaatattgtcgctctcttttcttttattactattgttgccattattataaataatactattaaaactgccattcaagatataaatttttatcctactattttttttaaaacc

SEQ ID NO: 123300 - DNA, 614 bp, Glycine max
  Clone ID: PAT_MRT3847_82347C.1
cacggtgcaaataaaagatacattagttgtgcacttgaaaagttgaattgtattatgtaaacactaaacatcaatgagaaaaggtcatgtggctcatgcaacaaagatattcttgattaggtggatttcgggtgacagggaaaaatctgtactcaatgttctttgtctggtcctattagtggtgagttaactgtagaaacatctgcagttccaattcattcaattgatcttcagttgtttcgagttgagtccattcttctcggggagaaaattgtgaccgaaacctctctggttcaaacaacacaggcaagtgatgctggatttgtattaaagcatacatggcaattcaaaataagctgttaattctcttttttatttagcagatagcagatggagatgtgtgccgcaatatgacgctgcctatttatgtaatagtaccgcgccttttgacctgtccaacaactttagctgggtatgtgtcccttacatgatgattctcctccaatgtatttcacaagagtcacacacacgcacatgggtcattgtacttgatgattctatgttaagaaccttgggagaaccacaccacaccacggaagttagttgttgtagtt

SEQ ID NO: 123301 - DNA, 288 bp, Glycine max
  Clone ID: PAT_MRT3847_82348C.1
ccgtcctattcccgtcgcccacctccgcaataattattatatggtgttgatatcatattatgtatgataaagagaaatggaagagatgcatgatatttattcttttcttctatatactcactatattcagctccactctatctttcgactctacacatccacgattccgtccgtctactctgacctccatcatcctatgccaacctacacgccctccgacctctctcatctttaagaccaatcccttacgtgcgcgcttcatttccactcaatcatatacttaccttt

SEQ ID NO: 123302 - DNA, 559 bp, Glycine max
  Clone ID: PAT_MRT3847_82349C.1
ccggtaaccattacaactttggcggagtggctgcgccgctgttattaccacattccaatactacctgctacccgggtcagctccccttcttttcacttcccgtatatataagcttatataaaccccgttgattctaatccaaactcaacccgacccgaattctttgtttaaaaagagagagagaaatgatactggtggcgatcgtggcggaggtgctggaggagtatacggcgttgctggccagagtggtggagcaggtgttccgttccgcccctgtccctcgacgggttcgttttctgatcctccgaacgcttccctttgtttcttctcgtcctaggaccattctgccccctcctaccccttcctattaggatttctccatcttttgtatatttcttttttatgttctcattaacagtggatacatagatcatctgtttcgtttaacctctcactcttgcctctttgccttccctgcatcactctagaaacttctttcacctctttattatattattatgttaagctctaaatgaaatgagacctactatattttttt

SEQ ID NO: 123303 - DNA, 387 bp, Glycine max
  Clone ID: PAT_MRT3847_8234C.1
tttatttttttttttttttttttttattttttatttttcttttattgggaattttaggttttaaaaacacaaacaaatgcccaaaaggacaaaattaaacaacaaaaatccttacaaaactccaaaccattgtagaacaaaacaataaaatacgggtataataagataaaacatcaacacaaataaaactaaactggcctaaagcacaagacaatactgaaacaaattcaataaccaatacaacataacaagctgatgacttcaaatgtgcactagaatggaaactaaataaagaacacgtatctgagctgcccaatgcgggtacaaaaaccaaacctgttatacaatttccagaccaaaaaccctaaaaaaaccatgccccatctg

SEQ ID NO: 123304 - DNA, 593 bp, Glycine max
  Clone ID: PAT_MRT3847_82350C.1
ccaaaattctttggttaaataaattttgctttaaaagaatgaatgcatgaaatgaaacagattaaagaaaacaataagcaaaggattttagccctagcttctaagcaccatttgggtgattccattagaagctccagcggcttctaaacacctttgtgaaaccagctgagtataaaaactaaacgggatatctatgtacatattggaggacgctaaagacaccaccattccaattggtttacttagactttctgacggacttggatttcttcattttacgagatttatcatccacactggtccatgtgtatcccgcaggaatcgcaaaagggtccgaatccaatgccatacatcgttgcttattcgacacgctattatttcgtctcacccacggcgatgagctcgaagaagagcacctgttttctgctttgctctgatgctcatctcctcctctgcttgcactgaggagcaaatgccttgggctccagaatggagtgtagaattgctccacaggttgcaggtccacgaactttgtgaacgtaatcaccaccctcaccggagggaccaccggtgtaggcaccttaacggggaat

SEQ ID NO: 123305 - DNA, 209 bp, Glycine max
  unsure (1)..(209): unsure at all n locations
  Clone ID: PAT_MRT3847_82351C.1
tctaccctttcgtcaccatgccaccgatactctcactttcactctcactagtgttggtggtgctgtttttcgccgccgtggacgcgcattntccggcgaccggcgagctttcaacgttccgcgaggcttcggcattcagcaatcggagagaatgttgcaaccgcacgcgaaaggactccgtgatccacaacgcgatgacgcttgacgcg

SEQ ID NO: 123306 - DNA, 1441 bp, Glycine max
  Clone ID: PAT_MRT3847_82352C.1
ctcgagccgcgctgataagtacgcacacgacacaagtctttgaattttaaactcctcatccttttctttcttctgttttattattgcaagagttaagaactcgactcaagaagacagcaaaagtactgagccatgggtaccgtcatcgagtcccatttcttagccttcactgcccttgtcactattgcctatcagtttctgtttttcgtcgtcactgcgctcctcaaattcgacaaagtcactgattttgctggaagtacgaatttcatcataattgctgcattgaccctggtcatcaaagcctcctggtattttcgacagataatcctcactttgtttgttgggacatggggacttcgcctctgccttttcctcctattcagaattttgcagtggggagaggaccggcgcttcgatgaaatgcgtagtaatttgggtagactggccatattttggatatttcaggctgtctgggtgtgggttgtgagtttacctgttacgttggttaatgcaagcgacagaaatcccttcctacaggttgttgatatagtagggtggattttgtgggctgtgggttttattgtggaaggtacagcagatcaaccaaagctgcatttcaaatgatcttcagaaaatagagggaagtggtgtaatgttggactatggaaatattctcgtcatcctaactattttggtgaaatattgctttggtggggaatttttgtggcatctacacctgtactgaagggtgctgaatggctggtgatcattggaccaatctttctcacattattgcttctttttgtcagtggcattccacttcttgaggactcagcggataagaagtttggcaatgtagatggatataggatatacaaaaagagaaccagccctttaatcccgttgccacgatcaatctatgggaacttgcccgcatggttcaaaacaacttttctcttcgagtttccattctacagtcgtaatctaccacaagaagagaaccggtgtctgctcaagtgcagagcaaacagtgggaaaatcagtgatgctctgaaaattggctagcacttggttctttgaatttgtttggttcctgtcttacgtcagactgaagttgcagctggtatcatcatccgccatggttagggatgtggctttgtaatgctattgcagctttccttctaaatttaatctttctaatttgcttgttctctcttagatatgtataaatttacgtactatatatgttgtgtgcaagtactatggcttgtgcaggtaactaatggatcaatcatgtttttcaaattcttctattcaactctcattatggacctgcagcatgccaacatattgtatttagcaaaatttatttttgaatccaatgtagttataacctaaaaaaaaaaaaaaaaaaaaaaaaaaaaaaaaaaaaaaaaagaaa

SEQ ID NO: 123307 - DNA, 513 bp, Glycine max
  unsure (1)..(513): unsure at all n locations
  Clone ID: PAT_MRT3847_82353C.1
ataactacattgtattcagaaatgaatttaactaaatgcaatattaggatacatcaacaaaacatttgtgttcaatatctgccgatgttggcatgctgcaggtccacaatgagagttgcaatagaagaaataagatgaaaaacatgattgatccattagttacctgcacaagccatagtacttgcacacaacatatatagtacgtaaatttatacatatctaagagagaacaagcaaattagaaagattaaatctagaaggaaagctgcaatagcattacaaagccacatccctaaccatggcggatgatgataccagctgcaacttcagtctgacgtaagacaggaaccaaacaaattcaaagaaccaagtgctagccaattntcagagcatcactgattntcccactgtttgcactgcaccttgagcagatactaaaaaatttaataccatttcaccagttctcttcttgtggtagattacgactgtagaatggaaactcgaagagaaaag

SEQ ID NO: 123308 - DNA, 274 bp, Glycine max
  unsure (1)..(274): unsure at all n locations
  Clone ID: PAT_MRT3847_82354C.1
caacgcnccnagggccccaggcaggggcccagaagagccagcagcggcggcaccngccaccgccacacccccagcngaagcagaagccaaaccaaaaccaccaccanacgggcccaagagaggngccaaggcgaagaaccgcaggaaggaaaccaaccggnacaaaggcacnggancagcggacgccgccgaccaggaccccaacacncgcnaccccgccgcggccccangcaacaaagacaaccaggccaanggaacaacaaacaaccacgcc

SEQ ID NO: 123309 - DNA, 380 bp, Glycine max
  unsure (1)..(380): unsure at all n locations
  Clone ID: PAT_MRT3847_82355C.1
tttttcttcaatatataataccctcattatattacagtgaaagctatgctggcaagtatgtacctactatagggtattatatattgagggtgatgcttgaaaacagggtcaagctgaacaaacctagttatagcagcaaaaagatgttttgcaacggcgttttgatccattgggatctcttctggggttgaatgttgggtttttcgggctcccctcctatgtggagtaagggtccactttatctcacttatttaagangagaaggctccgattangatgagagaaaaattattttaaagagaaaaacagttacaaaacattgaaagagaaaggagaaggaaaatcattgtgattttcgcacacacaccagaaagcgtttt

SEQ ID NO: 123310 - DNA, 496 bp, Glycine max
  Clone ID: PAT_MRT3847_82356C.1
ctttaatcccgttgccacgatccatctatgggaacttgcccgcatggttcaaaccaacttttctcttcgagtttccattctacagtcgtaatctaccacaaaaagagaaccggtgaaatcgtattaaattgtatactatctgctcaaggtgcagagcaagcagtggaaaaagcagcgatgctctgaaaattggctagcacttggttctttgaatttgtttgattcctttcttacgtcagactgaagttgcagctgccgtggttagggatgtagttttgtaatgctattgcagctttccttctaaatttaatctttctaatttgcttgttctctcttagatatgtataataaatttacgtactatatatgctgtttgcaagtattatggcttgtgcacgtaactaatagatttcttctattcaactctcaaaatggacctgcagcatgccaacatattgtatttagcaaaatttatttttgaatacaatgtagttat

SEQ ID NO: 123311 - DNA, 232 bp, Glycine max
  Clone ID: PAT_MRT3847_82357C.1
gctacagccatcctaagagaaagaacctcggttttggtgcaaccctaagaagcagctgagctgagctgagtctctttctctctctctcttagaccacctctatatctgtgtcataatctcacaccttcccttcttcattttcattcagatagattgcagttgccaaagaacccagctcaacttcaaaaccccataataatctctctttgacattcataaaaaacacacacca

SEQ ID NO: 123312 - DNA, 153 bp, Glycine max
  unsure (1)..(153): unsure at all n locations
  Clone ID: PAT_MRT3847_82358C.1
gncaaagactncggngaagttgagttgtttggtgtggggggnancccttttgctngangggtgcngattgccctggcnctgnagggagtccaatanacttcctttgccgcagatcttnggaagccgngtgntcttctnatcanatccnaccct

SEQ ID NO: 123313 - DNA, 142 bp, Glycine max
  unsure (1)..(142): unsure at all n locations
  Clone ID: PAT_MRT3847_82359C.1
atctcgtaattcttctctatatttatacactgcggtatcaaatattcaatccatcattgtcctccacattccctctacncnnnacacnaacantatcaccancatattcacctctnacaacaacaaataacatcttttaatt

SEQ ID NO: 123314 - DNA, 574 bp, Glycine max
  Clone ID: PAT_MRT3847_8235C.1
cccgggctcgacccacgccgtccggtcgtgttctggcttgtactctatctatcctcctttgcatgtgcccagcggtttaggatttcggtgatgggtctggcctcaggtttgccaacgctgacgagtagactcccctgagcatggctagaactccgacgatattcaaccctgctgtctgccatcttggtagctcggattggtgcaaggcacgaaattgcacggagacgcatgcgcacaccccgcacgtgcacctctaggcatctcgttgggtcggcgctcaacaacactcgttgctgacgcggtgatcatggtaccatcatagatcgcatatgctcggtgtatgatcgcacaactttactcctggctgtgtcttgactctcacagcttccctgtgagccatggtacttgctagtcagcttgggatgagtatggagaaagactcctcgatcgtacgcatatcataatggagccttggtgtgtgcccaacaacagcatacactatctgccgacggacgctccactgtaaccctaaggaataaccgggagaagatgacccagattatgttggagaccc

SEQ ID NO: 123315 - DNA, 508 bp, Glycine max
  unsure (1)..(508): unsure at all n locations
  Clone ID: PAT_MRT3847_82361C.1
ggaanctttgaaacctttgcattgtttacagacactaacagagcacacttttgttgggatgtctgtctttgttgggccttttcctnnnngcagagacccggggggaaaggggagggcctcccttttttttgaaaaaaaaaactaacaatttttttggggggatatttaacacggggggggggggaaaaaattactaaaaaaggggggattttcaaaaatgttttattttgaggggccccctttttgaagaaattttgttgcctgggattttccacaaaccaaatttcccttttttttttttggaaaaaaataatacccccccgcggtactggttttttttggttttttacaagaccccacgtttccgatgttttttttttttgggttttgaattccccgggggggggccccgaaaaaaaaaggggcaaaacggttttggggggccgttggtgggggcctttttttggggggggggaggatgctcttctttatatttccaccctttttt

SEQ ID NO: 123316 - DNA, 282 bp, Glycine max
  Clone ID: PAT_MRT3847_82362C.1
tacggctgcgagatagacgacagaagggctctcactttctagcaacaatttctttttccatatactaattttaaattttgaccatgtaagtaattagcataaattgccaacataagaataattgctgtgtgtcagcaagcagtgtcattgtctgcttaataagatttgaaacagaagatttttaagtatgatatattaattacacaaaaaaatggaagtaagatgaggtgtttgacaggcaaatcctaatgtataacagaagatttttaaaatatgatataa

SEQ ID NO: 123317 - DNA, 151 bp, Glycine max
  Clone ID: PAT_MRT3847_82363C.1
caagcattggcaaattgcggcattaaggtaggcaaatccaaagaacaaattaaaacaaccggttttcaaggcccaattgggccaaggccaatggagttccaataatccccagaattacaaaaggacttttgggaaccagtttccaattggg

SEQ ID NO: 123318 - DNA, 391 bp, Glycine max
  Clone ID: PAT_MRT3847_82364C.1
ggaagagaactttattagaattttttttatgttacatttttacatattagttttttttttatgttacatcttgatggttacaccgaaacccatcacacaatttctttgggcaaagcacccattaggggtaacatgcgggtttttaaaaatataaccattattatgggtggaacacaaactaaaccagccaggcttaaaatattattggggggtacccggcctactggagttacatgggaagaaaaaagcagtgaaaccctatttttggacaaaggaacttgccatgatggggggggtgccaaccttttgagaacgaaaataacccctttcaagaaagatgaccttgatgaggaagtttcacgccttaaacccccatttttactggtaccaa

SEQ ID NO: 123319 - DNA, 403 bp, Glycine max
  Clone ID: PAT_MRT3847_82365C.1
aaggaaggcagtggtagctgccattacatcatgggcatggatatataacgacatattttacacgtatattttcaattgggaatagctaaaaccactaaatgagtcactaacagcacacaactggagagcctaaatctttaattctagctgatataaccaagggcaaaagtatctgagaagtaaactttggctagtacctagtatttcaatcaaccccttgcttcgcttacatcattgtagataaaaggtatacataccggtatgggatggcatgaaaattcaatccttttttgcttacacatatatagttaattatcacttaattataaggagatcatgtccactaggaaacacgcaatgcaaaaatgaatggcaaatatatgagagtcaaactgagactatt

SEQ ID NO: 123320 - DNA, 356 bp, Glycine max
  Clone ID: PAT_MRT3847_82366C.1
tccggaattcccgggctcgacccacgcgtccgcagttcttcttcatcaccatggcccgaaaaaccggtgccattttcgttgaccctcttattatgctctgggttggagttggttgcaaccgatgctgttgcttgtgcgcattcctacagctatgctttaaggcaaccggagttactacaaagagaatcacttgaaatcatcattggtggtggtgggggcggcggatactctgctccttttacttgtacatcttccgctgcctattgtctacctcctgcaccacaacccctggtccggctaaaatatgcgcctagagtgcttcatcggttccataccttgatctatgatccagactg

SEQ ID NO: 123321 - DNA, 478 bp, Glycine max
  unsure (1)..(478): unsure at all n locations
  Clone ID: PAT_MRT3847_82367C.1
gaagggngaccncaagggacaancagtagctgttaaaatcatatccaaagctaagatgacttcagcaattgcaatcgaagatgtaaggagggaggtgaaaatgttgaaagccttatctggacataagaatttggtcaagttttatgatgcatttgaggatgtcaacaacgtttacattgttatggagttgtttttttgtggagaattacttgacagaattctagatagatgtggaagatacccagaggatgacgctaaagctattcttgtacaaattctagatgtagttgcggtttgtcatctacaaggagtagttcaacgggatctaaaaccagagaattttcagtctgtcttgaaagaagaggatgctgggaagaaagttaatgattttgagatatctgattttggtaggacagatgaacggctcaatgaaattggtggcaaggactactacgttgcacctgaaggtggtcataaa

SEQ ID NO: 123322 - DNA, 326 bp, Glycine max
  Clone ID: PAT_MRT3847_82368C.1
cattatgcttacgaactgcactttaagagtggctactttgattctgtcattatatacagatcgagtctggtatcagagggctgcactttaggcgatcgtgatcgcgcgtgtgcttgagcctgatgataccgttgtcttccttgtgtctactatgaactcattcctcatcactactgatgactagatgacaccccagattcatattggatgaaaacttacactgtgattcacatatgcaatgttgacaaactaacttacgtagctgataagagtaacctactatagtataaccaatgtggactacctcttagtatcggctgaatgaa

SEQ ID NO: 123323 - DNA, 488 bp, Glycine max
  Clone ID: PAT_MRT3847_82369C.1
accacgcggtgtgcggctgcgagaagacgacagaaggggaaccaaaatatgagaaaagctggggaggacatagagatgagcaggaaaacagtgtgggacatgggtgctgggattgatgatactgaagctcaaataaacaatgaacgtgtgactataaaggatggtgaattgtctccagaaattaggacaacagtagatgactcggaccgtgctggaatgcatcctaggcgatctagctggggaagaaagagtggaagctgggaaatgtcccctgaagttctggctttggcagccagggtgggggaaccaaaccgtgtcggtggaggtggcagcagtagtagtttggcacacgagaaccgtcatgtatagccattatgcttcaaacagcatggtcaaaggggctttgaagatttgattttatggttatggtgaaaaaatattacactgttcatgtggtatttctacaagcaaattatgtgcaatatggg

SEQ ID NO: 123324 - DNA, 396 bp, Glycine max
  Clone ID: PAT_MRT3847_8236C.1
ccttctttcattctccactgccgtctgatctttgctgccgctgccatggggggagggcctgcgagatgctatcgccagatcaagaacaagccttcccccaagtccatgtactgtcggggtgtccctgaccccaagaacaggatctactatgttggcatgaagagaaagggtgttgatgagatcccctactgtgtgcacctggtatcttgggagaaggacactgtctccagtgatgctcttgaggctgcctttattgcctgcaacaagtacatgaccaactctacaggaaaggatgccttccaccttccggtccgggttcagccattccatgttcttcgtatcaacaagatgctttcgtgtgctggggctgatacgctccagactggaatgaggggt

SEQ ID NO: 123325 - DNA, 376 bp, Glycine max
  Clone ID: PAT_MRT3847_82370C.1
ttttttttaataattttcaatattcattataagaatattttccagtttgtgtctatagatgctgcttttcactaaaaaaaaaaaaaaaatcaccaaacttggcaagaaccaaaagcaaagggcaaacaaaaacccccacaaacccccgcgtttttttatgaacccccaaaagggggccatttgggccataacaaccaaaaaatttgcaaaaaaaaacaaaaccctgaagagggggggaaaaaaaccgctggaaaaaaaagccacccgcaaaaagacccgaacaaaaaaatttgaagaaccccgcccgaagcggggttcccccagcgaaagcacgaagggcgcccgggagcaaaccacaatccctaaaagggagctc

SEQ ID NO: 123326 - DNA, 392 bp, Glycine max
  unsure (1)..(392): unsure at all n locations
  Clone ID: PAT_MRT3847_82371C.1
ncanncgtctcncnntccttcnctcccncntccnctccncncctcnnnctncncnnntctccncnnnccnncttctcnnncnncccgtnccngcnnctctngtncctcncnccgcnnnntcnnnncttcccntctcncntctnccgntnccnnnccccnccttncncnancctctccnnnctnctccaccgtntnctgnncctccncnccnctnnncttcctnctntgcncnccctcncntncnnnnnctcccnnntnncntccnctctccncnnncgncntctgcctncntcgnctnnccngccccctttggtcnntgtcgccnnccntntncccnngcncctcctnctncngcgccncntctnnccnctgntngctcccnctccnttnnt

SEQ ID NO: 123327 - DNA, 300 bp, Glycine max
  Clone ID: PAT_MRT3847_82372C.1
acgctcacgcttctcatcatataacatctgtactctaatttctaaatatatccactcttactgggccgtgaattttctaaccggaagtgaattaaatactcatgcttctgtagtgatctataaatgaagatgaatcattaccaaatctccattactctgtacgacgagactatatcagtttttttgacaaactgacgataactcctatatatacatcatgccatacttcattgtttaaaataatatttttacaagaagctctacatattgtatatagcctatgcaacagcatcactaatt

SEQ ID NO: 123328 - DNA, 965 bp, Glycine max
  Clone ID: PAT_MRT3847_82373C.1
cccacgcgtccgtacggctgcgagaagacgacagaaggatacggctgcgagaagacgacagaaggggaacttcattttctccttccgttcctttcttcgttccttccccaacccaatcttcgccttcgcccacaacaactcctccttcaggatcgctgccaacgttactttccatttttacccttcatcctcgagaaaaaaatggcgaacgcagcatctggtatggccgtccatgatgagtgcaagctaaagtttctggagctcaaggcgaagaggacgtaccggtatatcgtttttaagattgaggagaaatcgaagcaagttattgtggagaagctgggtgaccctgcaaatggctatgatgaattcgctgccagtcttcctgctgatgagtgtcgatatgctgtttatgattttgattttgtcactgaagagaattgccaaaagagcagaattttcttcattgcttggtcccctgatacatctagggttaggagcaagatgatttatgccagctccaaagatagattcaagagggagcttgatggaattcagattgagctgcaagcaactgatcctactgagatgggtcttgatgtgttcaaaagccgtgccaattaaatgattccgattattcataaataggagttgtgatggggatggtcaacttggctaatttggactcaattttccaagttttgacatgaggtctattgcagcttcaacaaagcttctcttgttccagtgtatcttgtggtttgcgacatataaacccgtgtttgggtgtaatcttagtcctattcctagtagttaattttgtaactgttctttgtgtgattgaacgaaaatttgggaccaggtattgatgtaatgttgccagttgccatcttattaatgtcttgtgacttaaattaactaaaatactttcttgaaaacaatttgcgacctactatgtcatccataac

SEQ ID NO: 123329 - DNA, 860 bp, Glycine max
  Clone ID: PAT_MRT3847_82374C.1
ccacgcgtccgtcaactttcttccttccttcctcaacccaacccaatcttcaccttcgcccacaacaaatcccattcctgcatctcctccttcagcatcgctgcaaactttactttccatttttgtccttcctccccgagaaaaaaatggcgaacgcagcatctggtatggccgtccatgatgactgcaagctaaagtttttggagctcaaggcgaagaggacgtaccggtttatcgtttttaagattgaggagaagcagaagcaagttattgtggagaagctgggtgagcctgcaaatggttatgatgatttcgctgccagtcttcctgccgacgagtgtcgatatgctgtttatgattttgattttgtcactgaagagaattgccaaaagagcagaattttcttcattgcttggtcccctgatacatctagggttaggagcaagatgatttatgccagctccaaagatagattcaagagggagcttgatgggattcagattgagctgcaagcaactgatcctactgagatgggtcttgatgtgttcaaaagccgtgccaattaaatgattctgattatgcataataggagttgtgatggggatggtcaacttggctaatttggactcaattttccaagttttgacatgaggtctatagcagcttcaacaaagcttttcttgttccagtgtatcttgtggtttgtgacatataacccgtgtttgggtgtcatcttagccctatttctactaagtaatttttgaactgttccttgtgtgattggacgaaaatttgggatcaggtattgatgtaatattgccagttgccatcttattaatgtcttgtgacttaaattaact

SEQ ID NO: 123330 - DNA, 2312 bp, Glycine max
  Clone ID: PAT_MRT3847_82375C.1
gggaggctactgaaatcattacttatactagttgagaaggcttatgcatggggaggcaatagtagcctcgattattcatagtgaggcaagagtagagcaactcacactggtctttgcttctcattcatcatttctcacctaactttctcttcctctcagtctcagatcaaaaacctcagccagccatggcagcgttccacagaaagatcaaggtcgccaaccccatcgtcgagatggacggaaggatgaaatgaactatgggttatctggaaggtcaatcaaggacaagctcattttgcccttcttggagttggacatcaagtattatgacttaggccttccttaccgtgatgagaccgatgataaagttacaattgaaagtgcagaagcaactctcaagtacaatgtagcaatcaagtgtgcaactatcactccagatgaagctcgtgtgaaggagtttggcctgaagtcaatgtggaagagtccaaatgggactattaggaacattttgaatggaactgtcttcagagaaccaattctttgcaaaaacattccccgccttgttcctggttggacaaaggcaatatgtattggaaggcatgcgtttggtgatcaatatcgggctactgacactagtaattaaaggagctggaaagctgaagctggtgtttgttccagaaggccaaggtgaggaaactgaattcgaggtttttaacttcactggtgaagggggtgtttcattggctatgtacaatactgatgagtctattcgttcttttgccgaggcttctatggcaactgctttagagaaaaagtggccactttatcttagcaccaaaaatacaattctcaagaaatatgatggaagattcaaggacatatttcaagaagtttatgaggcaagctggaaatcaaagtttgaggctgctggtatatggtatgagcatcggctcattgatgatatggtggcgtatgcacttaagagtgaaggaggttatgtatgggcttgcaaaaactatgatggagatgtccagagtgatttcttagctcaaggttttggatcactaggtttgatgacatctgtattggtttgccctgatggaaagactattgaagcagaagcagctcacggcacagttacccgtcattttagggttcatcagaagggaggtgaaaccagcacaaatagcatagcatccatctttgcctggacaagagggctagcccacagggcaaaactggatgacaatgccaaactcttggatttcactgaaaaactagaggcagcttgcattggagtagtagaggctgggaagatgaccaaggatttggcacttattcttcatggatccaagctttcaagggagcattatttgaacacagaggaattcattgatgccgtggcagccgagcttagtgctaagctttctacatagacttgatttaagacaggcggaaaagaagacgatagcaacaaggagcgtgcgtgcgtgcgtatgctgctctctatattcagaagaaataagaaagggaaaaagaagcattggtccttaccttcgcttctttcacaagggttggctgttggttgggagagcaagggttgactgtttcttctccatattggttgtgaactgatttgtcatctgtactttctccctgttcccaacggattttcagctgttataatttcttctccataatattggttgtgaactgatttgtcctttgtaatttcttattgatcccttccaactcccaatttataatggattttctgctgaatttattttgcatgttttgacttattattattctgcaaatgccgtgctgcagagagaaagttaacatccttcccaatctttagtgggtttaataaggccagcaaagtatgtaacttaagaaagagccaactaactcctctttcttgtttaggggttatattagattgagattttaaaaggatattttatagggaaaaatcagttttaattttaatggtccttaccttagccccttttccttcatttgtttgttggttgggaaagcaagggttgactgttttttttccaaattggttgtgaactgatttgtcctttgtattttctaactgatcccttccaacttccaatttttataattggattttctgctgaatttatttttttccatgtttttgacttattatttttctgcaaatgccgtgctgcagacagaaaaggtgaacatccttccgaatctttagtgggtcaccataatccataatagatacagcatggccacatggccagcaaagtatcgaacttctaagagct

SEQ ID NO: 123331 - DNA, 467 bp, Glycine max
  Clone ID: PAT_MRT3847_82376C.1
tctacaacaccgcttattagtaacccccgcgagcggaggcggccaacgggggcatttttacaaaagaaccccggcaaaccggcccaaaggacaccaagggcaaagaggaccaccgccacccgaaaaaaagcccccaccggacgcccagaaaaatataaggcacggaaaaaaaaaaaaaaaaccgacgggaaggagggcaagaggtcacccagaaaaaaaacctccaacaaaacccaggaaaaaaagggcggcgtaaacccacatcaaaaaaaaacaaaaccccggttgacaagaaacaagcggggatggaaccacacccaacccaagaccaatgaagcgtctaaacaaaaacagtctaaccccgaacaaagtttgacgagaaaaacccccgccaaacccaaagagcgtggagggggaaaaaaaccccacggggaaaccccacccggggcactgagggagggcaaaac

SEQ ID NO: 123332 - DNA, 448 bp, Glycine max
  unsure (1)..(448): unsure at all n locations
  Clone ID: PAT_MRT3847_82377C.1
cccacgcgtccgcccacgcgtccggcggaaatcattacttataatagtcttgtacgattattcatagtgcggcaatagcagagcagcgactcacactggtcttcgcttctcattcatcatttctcacctaaccttctcttcctctcagtctcagatcagaaacctcagccagccatggcagcgttccagaagatcaaggtcgtcaaccccatcgtcgagatggacggagatgaaatgactagggttatctggaagtcaatcaaggacaagctcattttgcccttcttggagttggacatcaagtattatgacttaggccttccttaccgtgatgagaccgatgataaagttacaattgaaagtgcagaagcaactctcaagacaatgtagcaatcaagtgtgcaactatcactccagatgaagctcgtgtgaaggaagtntttttttt

SEQ ID NO: 123333 - DNA, 944 bp, Glycine max
  Clone ID: PAT_MRT3847_82378C.1
ggccttcaaaaactatgatggaaatgtccagagtgatttcttagctcaaggttttggatcactaggtttgatgacatctgtattggtttgccctgatggaaagactattgaagcagaagcagctcacggcacagttacccgtcattttagggttcatcagaagggaggtgaaaccagcacaaatagcatagcatccatctttgcctggacaagagggctagcccacagggcaaaactggacgacaatgccaaactcttggatttcactgaaaaactagaggcagcttgcattggagtagtagaggctgggaagatgaccaaggatttggcacttattcttcatggatccaagctttcaagggagcattatttgaacacagaggaattcattgatgccgtggcagccgagcttagtgctaagctttctacatagacttgatttaagacaggcggaaaagaagacgatagcaacaaggagcgtgcgtgcgtgcgtatgctgctctctatattcagaagaaataagaaagggaaaaagaagcattggtccttaccttagccccttttccttcatttgtttgttggttgggagagcaagggttgactgtttcttctccatattggttgtgaactgatttgtcctttgtattttctaactgatcccttccaacttccaatttttataattggattttctgctgaatttatttttttccatgtttttgacttattatttttctgcaaatgccgtgctgcagacagaaaaggtgaacatccttccgaatctttagtgggtcaccataatccataatagatacagcatggccacatggccagcaaagtatcgaacttctaagagctaattaagagcatctccaagaaggtttttcatgagtttaaaactaaacattatttatcaagtttttataataggagaagatgatttg

SEQ ID NO: 123334 - DNA, 343 bp, Glycine max
  unsure (1)..(343): unsure at all n locations
  Clone ID: PAT_MRT3847_82379C.1
tgtgtgatgcgacaggcaaatagtangnngnnttttnttnntgatgggattatattgagcctttnaacctatanaaagaaagggaagaaggttattttgatgctgnaggaaattttgttgaatatgtaagagagaatgagattaaggatggatggtttgataatgtgggagttgatnnaaaatatgttgnattaaggtttgtagnaanaaatgatgaagatgaggggggnnnaganntttnttttaaagatattggaattatgaagaggnggaattgaaatgtttttgaanttggggaaaagggntttgaaggnttaagaaagttaaaaggtaaaagtgatag

SEQ ID NO: 123335 - DNA, 171 bp, Glycine max
  Clone ID: PAT_MRT3847_8237C.1
gacactacctacagcaatcattgctgaagacgctaacaacatggtggtagacgtactggagaacagcgcccctacattgcttgcacttgaaggatgcaaggaggctgacatgtctctgcccgtagtttatgacaaacctaagacgcgctgtgatactatgctgaatatggg

SEQ ID NO: 123336 - DNA, 311 bp, Glycine max
  Clone ID: PAT_MRT3847_82380C.1
gtctattcgttcttttgctgaggcctctatggcaactgctttagagaaaaagtggccactgtatcttagcaccaaaaatacaattctgaagaaatatgatggaaggtatacaattcattattagcttattcatttaatatttttcaaaaacttttactgcattgatcgctgtttaattatattcatttattggttgtagattcaaggacatatttcaagaagtttatgaggcaagctggaaatcaaagtttgaggctgctggtatatggtatgagcatcgactcattgatgatatggtggcgtatgcactt

SEQ ID NO: 123337 - DNA, 291 bp, Glycine max
  Clone ID: PAT_MRT3847_82381C.1
gcgctcgcccttttttttttttttttgtttaaaacatatgactttttttacattgctttttatagtcacaccccagtcatgacgcatgttgcattttgttcatgcgttcgcaaaaggatatgaacatcacagacgaccctgcacataggggtggcgattacagaaggactccgcccttccctatcccctcatcgcgggggttatctgaccccaaaaaaactggactggaatagcaaacccacaaaagtttccataaatgccatgaatatcaatagacatttctctaaacac

SEQ ID NO: 123338 - DNA, 436 bp, Glycine max
  Clone ID: PAT_MRT3847_82382C.1
ctctcacacgcggtcgagctacaacccatttctttatgcaacataccgaaggacatggtactgactcttcacttctaaattccgctatggacaaggcttctctctgatacttccaccaatgacaatgtgtaactaccgaggcacctccataacaacgactcaacgagatgccctgactccgaaccactccttagctaccaccctgcgatctgaatcctgacccaccccggctactgcacctgaggacccctaagcaactcacgagttgggttttaacatcgcgcccatgacattaaatacgcttatgctacagatgctagattcattgcacttatctacaaacactcacctgacaaccttaacaagaacctctattggacgcactgtaggctcttcactagagggtggacagtgtctgacacatattaggatactg

SEQ ID NO: 123339 - DNA, 1533 bp, Glycine max
  Clone ID: PAT_MRT3847_82383C.1
cacgcgtccgcggacgcgtggatccctgtctcatatatattaacccttctgtgctatcctgagagacacacttaactattataatctcttcctcttgtctttgaaatccttttctaattcaaatattatataacgattgaaatggcagcacaagctgaaattgagcatcctaggaaagcattcggatgggcagctagggattcttccggtcttctctcccctttcaatttctgcagaagggaacccggtgagaaagatgtggcattcagagtgttgtactgtgggatatgccactcggacctccacagcataaagaacgaatggggtacttccatctatccaatggttcctgggcatgaggtagctggtgtagtaacagaggtgggaagcaaagtagagaagttcaaagttggggacaaggttggtgtgggatgcctggttgattcctgccgcacctgccaaaactgttgtgacaatcttgagaattattgtcctcaatctacgttcacatatggtgccaaatatagagatggaaccatcacatatggaggctactctgactcaatggttgctgatgagcattttgtggttcgcattccagatagattaccacttgatgctgctgcacctcttctttgtgctggcatcactgtgtatagccctctcagatattatggacttgacaagcctggtctgcatgtgggtgtggttggtcttggtggactaggccatatggctgtcaagtttgccaaagcttttggtgctaaggtcacagtaataagtacttcaccaaacaaaaaggaagaagcaatacaaaatcttggagctgattcctttctaataagccgggaccaagatcagatgcaggctgcaatgggtactttggatggtattattgacacagtttctgccgttcatcctctcttacctctcattggtttgctcaagtctcatggaaagcttgtaatggttggtgcaccggagaagcctctggaactgcctgtttttcctttacttgcggggagaaagatagttgctggcactctgattggagggctaatggagacgcaagaaatgattgattttgcagcgaaacacaatgtgaaacctgacattgaagtcattcctatggactatgtcaacacagcaatggagcgcctccttaaagcagatgttaaatatcgatttgttattgatattggaaacacactgaaattctgagaccaagctcttaaatattgcacgatttacatttcagagaacgaaccgtgggcgactagtagatagtaaataacaaaaggggagagagatgtgataactttcaaccctgccacttgtcatggaactattgatttcgatttatattatgtatttttgttaggtcatgtcttgaataatattttttcttttgcatataacctagtttacattgataccatccctcgtattctcaacaatattttaatatttttttaatcgacaaagttatttgttaatttttattaataaaaaaattaaaccttcaatttttta

SEQ ID NO: 123340 - DNA, 441 bp, Glycine max
  Clone ID: PAT_MRT3847_82384C.1
caatttttcttttacatcaagggcgacagatgagggcaagagaggagattcggacaccattgagtggactgcactctagaatcctacagccactcttttggacatttacatcgcaggtggtgttgctggactctcacaggccatacacaatgggtgccagtccttgcgaccagtcgttgaaaagctatgattgttcttctggctgacagtgcatctgtatccacatcttaaaggtttgatggggctgcaaaatacgacacccaccatttggtggatgtggtcagtgctattggccggtacatttccttactttgggtaagaattgcaacatatgtgctcaagactaaagaacctgagaccaagctatgtggcatcaactgctgaaagagactgctatgcctatagtattattgtttaaaagatgtgtgtaggctacataca

SEQ ID NO: 123341 - DNA, 606 bp, Glycine max
  unsure (1)..(606): unsure at all n locations
  Clone ID: PAT_MRT3847_82385C.1
cttttttttttttttttttttttttagagaattgcatattttattcttcctccgtagcaatgacatcaaattcaatgagagttccaattgacattagggtaggaagaggcagaagctattgcctttctactgctaatttcctctgtaaaatgagaggatgattcatcatctcaaaattccaagtccaatgtctagcgcaatgaacaaccatacatgcaactcgagtcatagttggttactgcactgctgaataccgttgactaggtcgtcccccttctatccaggtgacaacttcgaccccttgggacttgatccagaggcatttgcagaacccagctccaagacagagggggggttgtgtttgtgagggtgagaggtctctgtcagaaataactgataatgctcccttggcttaaaacagaaaatttcacctggcaaactgcacatgtagatgtacataatcaacagctgcactgtttgctgggacctgngagatgttttgggtgtgtgcacacacacatgcacacaaaaaaatgaataccagcaggatttgattcatctgagcgaggttggtaaaatcccccccaataaattagtctgacccat

SEQ ID NO: 123342 - DNA, 399 bp, Glycine max
  Clone ID: PAT_MRT3847_82386C.1
cacactcgtgccctcccagtccttccaaaaccttgttcaaatccaccgtctctgccaaccccctccacaccccttctttccctcgagccccaccgcccccgcgacccctccaacactgttgccctccgccatgctgcaatagtctggttctgcaacgaccttggtctcctcgacaacgatggcctcaccgccgccaacaaagaagccctcgttgtcctccccgtctactgcttcgacaagatcaacccctatcatgttgccttcctcatcgactccgtcttcaacctccgctgtaacttctaggcacgccagtccaatgtcgttgtgcgcatcgggaagctcaaggtgatgttggtggagcttgccaaggcagctggggccaatgtcgtgttgtatatg

SEQ ID NO: 123343 - DNA, 390 bp, Glycine max
  Clone ID: PAT_MRT3847_82387C.1
gtgcaaccctcctttgcaacaaccaccattgttgttaggcaaagatgggtttggtgggcagaagttagtagcagtgacggctgtagagccaggtttgcaccatctggggtcatcatcacatctcatttcataccaagatccacagcttaagccattgcttaacaaagcacagcttagagccacaagcgtgaggatcatattcctgtctatacaaattggcatacaactgtgctgcaccccatgtgactaaactgtcagccaaactgtaagaggaactcatacctctatggacaatacctctcttttcaagtcaccaccattgatggctgaactgtgacaagcttacatgtggcgccactcaattggcaataattccagaccttccaagga

SEQ ID NO: 123344 - DNA, 839 bp, Glycine max
  Clone ID: PAT_MRT3847_82388C.1
ctcgagccgttcaagcaattctcactttctcacaaatggccaatcccttcccaacattcctcccctcttccctcatcttcttttccttcttctttttcttattctcccctctcaccgccgccaaaacacaccgtttcgcgcgcaccatctccccctcctccctgggcctggacggggagcctgagaaactaagccacctccacttcttcttccatgacgttgtcagtggccaaaaccagaccgcggtgcgagtcgcggcggccccggccaccgacaagtccccgacgctcttcggtgcggtggtcatgatggacgaccccctgacggaacagcccgaagccacctccaaggttgtgggaagggcgcaggggatctacgcctcggcgtcgcagagcgagcttgggttccttatggccatgaacttcgccttcaccgaagggaagtacaacgggagctccctcgccgtgcttgggcggaacacggtggcctccgccgtgagggagatgccggtggtgggcggcagcgagctgttccggttcgcgagagggtatgctcaggccaagacgcattctttcagtgcggtagaagctattgtagagtataacgtgtatgtgttccattattgagaacggctttttctttttttaataataataataataataatttattgaaaattcaagcatgattgccacggggaataatcctcgaccctgttagtgacggaggtcagacattgtccattgactgaaattagtgttgtagtaagaggataagtgtatgtgtttcatttttttgtttatgttattgatgcaaaaaatgtttcttatacataaaaa

SEQ ID NO: 123345 - DNA, 270 bp, Glycine max
  unsure (1)..(270): unsure at all n locations
  Clone ID: PAT_MRT3847_82389C.1
gctacgtnttctcctctcccgttacncgaactccacttcctctctccgcnaacnacncccanacgccgtatctccttcctccaaactcggtcctacaccntactccgtnncccgtccacgtcacctccaangtctctctccgnacctcgcgaatccgcgcaantagagnngaatccgcgttggncgancgantcaacgacgtcgaatggaccggaaacggcgcagcgctgctgctgctgacggaaaggcgntccgttngtggatagttaa

SEQ ID NO: 123346 - DNA, 313 bp, Glycine max
  Clone ID: PAT_MRT3847_8238C.1
tcgtccttttttttttatgaccaatggaaactggaccgaaagaaaaatacctgctgcccgttcggggatttcatccactggcaattgtccagcgggacgcaccagaaaggacaatttggtcaggtccttttattttgccaactaacatactgcagctgatacaaccgttacgctcagtgttcttcacgggagccctattgaaggtacatgcattcgggtcagcaaaagggaatgactgcctcacaggatttccttgcccccgattgttaacacagagacccatgccctaagagaaacacgccctttaccacat

SEQ ID NO: 123347 - DNA, 947 bp, Glycine max
  Clone ID: PAT_MRT3847_82390C.1
tacttttgcgagaagacgacagaagggtacggctgcgagaagacgacagaagggtacggctgcgagaagacgacagaagggtacggctgcgagaagacgacagaaggggggtcccactaaccttgaccaagatgataggcgcgtggacttcaacataatttcaggtacatccatggcatgccctcacgcaagcggtatagcagctttgatcaagtcatttcatccagattggagcccagctgcaattcggtctgcgcttatgaccacagcttatacaacttacaacaacggtaaaaaattgctagacagtgccacaaatggcccgtcaacgccgtttgaggtcggtgctggacatgtgaaccctgttgctgcgcttaatccaggtcttgtctatgatttagcagtggatgattatctcaacttcctttgtgcactaaactacacacctgataggattgaggttgtggcgaggagaaagttcaggtgcaatgcacacaagcactacagtgtaaccgacttaaattacccttcatttggtgtggtgtttaaaccaaaagtgggagggtccggtgcaacgatagttaaacacaaacgaactcttactaatgtaggggacgcaggaacatacaaggtatcagttacagttgatatttcatctgtcaagatcgcagttgagccaaatgtgttgagcttcaacaaaaatgagaaaaaatcatacacaatcacgtttacggtttcaggtccaccaccgccaagtaattttggttttggacgtttagaatggtcaaatggaaagaatgttgtcggaagtcctatctcaattacctgggaatcgggacgtgcatgaaaactgtaaaaatgttgatcaaagcctaatggatgtagttataatacaataaagttgaatgttacaatatatgatatttatctaggtggaaaaaaaaaaa

SEQ ID NO: 123348 - DNA, 370 bp, Glycine max
  unsure (1)..(370): unsure at all n locations
  Clone ID: PAT_MRT3847_82391C.1
ggggcgggcggaaggggaccccagccanngnnangggngggngaggggggggggcggnaagaaagnncnggcggggggggaggagagaaccctttttttntgactgcgacaaangaaccaaggggcaatgggggatcagctgggaggtctctcgccngattcatgacaggggtgctgttgtgtgtgtggcaggaattttcaggctatcaagggtgggtggaggattgaacccgtggagtggatgggaatggtaccctgggtgggggtgtcattgatgttgattgatgtacgtgggccttacaggggtaatgggggggtgtgggggtgggtgtcctgttggtgggtggggtgggtgtcgggtgggtgatgc

SEQ ID NO: 123349 - DNA, 421 bp, Glycine max
  Clone ID: PAT_MRT3847_82392C.1
ctatgatctccatttttaaagtttcttctttcccaaaaaggcggatgaaggtgaagatggggggctaactaaaaaatagaaagccttcaggcctccaaataaggtgtatctttcaatgaaaataatcactccggcagatgaaaaaactaatgtggctgtttcaccgttttgtatcattttaaacagataggatggctttgccaaccatggctgacacaggtttatgttctttgaaatctactatttgttaactaagatactgaatttgggagcaaatcagaaatgaatgatttatgctggatgcataactgaatttgaatgatgaaccttatcaacttgttgtaggttcacaaggacaactggaacaggtgtgaacgacctgctgatgaacaagaatactctaaggaggttgaagttggtg

SEQ ID NO: 123350 - DNA, 469 bp, Glycine max
  Clone ID: PAT_MRT3847_82393C.1
aaaataactatgaagaagtttgtgcaggtactatttagtctttggttggtccttctgtttggtttgctagatggtaaacctccccacaccagtaatcgattaataatggacgcgagtgctggtcagatgttcccatctactccatactaccttatgccaaggcatcatgaattaggtggtggtggcatcaaactcatcaagactggaaactcaacttacccaaatactattttgcaatattttccaaacgacaactttggcctcccaattcatttgtacatatctgtaataagcctccttctcatctttgaaggtattccactggctatttgtatggaacagaatccagcttgtgttatatcgtcggtttctgttcctatagagggatctggaaatccaaactcctcaagatggttggtgtttgtggacaattcaatccaaagacatgtgtgggtactggtggtcctga

SEQ ID NO: 123351 - DNA, 277 bp, Glycine max
  Clone ID: PAT_MRT3847_82394C.1
agtcatggcgtgagacccacaaaccgaactttcaaccctgaggccttcatcttcgcggagcgactacacattgaaccccgggccagtgaactaacccgtagagcaaggaacaaggacgggaaaaaattaagttcatagagtcacgtacagagttaggtctgctggtgttcctgctggttttcatcaggccgaacatcgtacggcggacggcctaccctacctattagaacggtacgtagtctccccggccagttccaatattctccatattaccctt

SEQ ID NO: 123352 - DNA, 505 bp, Glycine max
  unsure (1)..(505): unsure at all n locations
  Clone ID: PAT_MRT3847_82395C.1
cccacgcgtcnnncttcacaaaaatctgagatagatttatagatatagagcatagtcatgacaaagaaagagatgaaaacaactggagttataattatgatcatgattatgttgggtttctcacaagctagatataatcctttatttgtgcaaactaggccaacgcatgtgtctgataaacttaattgtcgtgacaaatgtacactagattgttcacctttactactacctccatttgccggtgcatttttaatatgttacttcccgtgtatgaaaaaatgtcacaacaaccccattgatgttgtccacagttgtaagagtgattgtgccttgaccaagtccattaacgccaatagtgatgctcgtgatcctgcgactgacatggttgattcttgtgtacaagaatgtcacaagtaatatttgttacaaaaatgtttaagaatatgattgttagaagaaataatatccatgtaattgataaatcttaatggatgaggaaaatcta

SEQ ID NO: 123353 - DNA, 299 bp, Glycine max
  unsure (1)..(299): unsure at all n locations
  Clone ID: PAT_MRT3847_82396C.1
gtcgcacgcacgcntacgtaagctcggaattcggctcgaggtgtaacccanaaccctatcngngcctgcnatctncntacgncttttncatcanccatcaggntggnntcncaggngaagcatgctcttgntgncnnagttnnnggtcgtactggatccagnngncangtgnctcaggttagagtgaagtntcnggatgatcngagccgtcatatcatnnggaatgtctaaaggaccagtgagaganggaganattctcaccctattcgatctaaaacggaggcaataaggttgcgccn

SEQ ID NO: 123354 - DNA, 582 bp, Glycine max
  Clone ID: PAT_MRT3847_82397C.1
ttttttttttttttttttatttctttattaaatttttttttcggtttttatttttaatcatacccaagtctatttcttttttttttttaaaaaaaacagacccaaagaccaatccactggccaaaaaagaaaaccccgggactggcaaaaggctgcccctccccaacttaaacggcttgcagaaaaaccccccttctccacctggagtaatagccaaaaggcccgaacgaaacgccctcaccaacagacaccacagacaaaatgggaaacgggacgcgccctgccgcggtcataaagcgcggcggtagtggaggttactcgcggcgcgaacaaagacacttgccacccccataaagccggcgccaccccccccattataaaacggacaaccaccggggccagagtgtctcaaaaatccgccacccgggggcgtaaatttaggccccaattaagccccaaaggggattttcctccccccaaaaactccccgaaagaagatggtttaaccccatcccccccatggcccctcaaaaaaaaggcaaaaaaaccccctccacccgtggggggtccccccccccgggg

SEQ ID NO: 123355 - DNA, 222 bp, Glycine max
  Clone ID: PAT_MRT3847_82398C.1
cattttcataacataataaaatagaaacttttgagcttaaggcctcaaaccttatgatttttaggctggttgggaaaacggggttcctttgcaaatctatccccttggatcccatgggttaatttaaaaaaaccctttggagggtttacccttcggtggaaagtcctggaaccctttcccattttctagggcggaaaaagattttttccccaaaatttggaa

SEQ ID NO: 123356 - DNA, 778 bp, Glycine max
  Clone ID: PAT_MRT3847_82399C.1
gcgagttgcatgcatcttagttcatttgcaatgctctctatagaacctgggaattatagttcattttggtttttgctttcctctttattttctagactcttgtgtactaacttttcaagatcctaacacaatataaatgtggctctaaaaatataagaactagtttattttttttggtttgctcattcatgcagaaagtaaattttatttatttatttatctttatgtttcagtggatgttgctctggctatggccttttttattctttctatgtgcaactaaatgtaattgatcataccacacacaactttgaaaatgacaatggagtggtctttttaattgatgagtaacttcatagtttaccaccgagcatatggatcaatgattgttcaagcttaatcagaggtctcagcattcgaatttgggtatatacctgctttaaatactcggaggaagagttttgcagtttatagttgtcctatctgactcgaagagaattgcttccggtagaagatatttgtaatctaaaccaaaaaaaaaatcgtggttttatctagtttccatcatttcaactgcttctgcatattgtatatcattaaatgacgacgtcatatatatgttgtttctgggaacttcaggtgttgcttcatatggtgtcattagtagaagattccattttacctgtatactgttctgcaacaaggtagtcactagttgacgtataaagggccaaatatgcatcattgcccatctcgcaaccgtacgaacgcgtggata

SEQ ID NO: 123357 - DNA, 163 bp, Glycine max
  Clone ID: PAT_MRT3847_8239C.1
aattcccgggctcgacccacgacagtcagcccacgcgctcagtaacgatgacgagaagacaacagtaaggggcacaattgagtttgttgatcgaaatgtctagaaacagtgtgacgatgatgactgtccttgtattctttcgtgcaacaagtttggtcacatg

SEQ ID NO: 123358 - DNA, 1041 bp, Glycine max
  unsure (1)..(1041): unsure at all n locations
  Clone ID: PAT_MRT3847_823C.1
ntnnaggatggatgctgagaggctgttatcagatatgcttaggaagggttgttcccctagtgttgttactttcaatatcttgattaacttcttgtgccggaaacgattactgggtagagccattgatgtcttggagaaaatgccaaagcacggttgtgttccaaattccttgagttacaatccattgcttcatgggttttgtcaagagaaaaagatggatagggcaattgagtatttggaaataatggtgtctaggggttgttacccagatatagtgacctataacactttgcttacagcactatgcaaagacgggaaggtggatgctgcagttgaaatactgaatcaactaagtagcaagggatgctctcctgttttaattacttataatacagttattgatggtcttacaaagggggggaaaaacccagtatgcctgtggaactgttagaagagatgcgcagaaagggtcttaaacctgatataattacatactctacactgcgttcgggacttggtcgtgaaggaaaggttgatgaggctataaaaattttccatgacatggaaggattaagtattaagcccagtgttgtcacttacaatgcaatcatgttgggactttgtaaggctcagcagactagtcgtgcaattgattttctggcttatatggtagaaaaaggatgcagacctaccgaagctacatatgccattcttatagaaggcattgctgatgaaggattagccgagcaagctttggagttgttgaatgagttgtgctccagaggatttgtgaagaaaagttcggctgaacaggtagtagtcaagatgtaggatgatatgcctttttaccttatacgcctagatggctgagtgccatttttgagcacatagattttgttgagcccctcgctttagttacttgttctggattttggattgttattttgaggagggagaggggctagtcaaatgtgtgtcaattttgttaggaggtcattgtaattcagtacggttatatttaattctgataaatattttatg

SEQ ID NO: 123359 - DNA, 362 bp, Glycine max
  unsure (1)..(362): unsure at all n locations
  Clone ID: PAT_MRT3847_82400C.1
agtngcattatagaaagnggagaatcnactcganacacaanannaannnaagnagnggnacanangnncngagnatgnatannanacanancngctgngaganagagcanagggaacaanagnccanttggntagacnacnnnccagcantaaaaggnagggcanaaggnnntcaanannnacaaacnnntnaaangagaggncatggatcagcantnnacaanaaggcaacacaagcnaaacaaancncgnccngnnatnnnaanagaccagnatacccngaaataacancggnaanaagctcaaaggcacanaaannggcanagnnngnaagggcananancnaaaananancnaacanc

SEQ ID NO: 123360 - DNA, 754 bp, Glycine max
  Clone ID: PAT_MRT3847_82401C.1
tgcttctctgcttcggcataacctggataccaattgccggggtccttttcccattgttaatcatgcttcttgtcccagtacggcaatattttcttccaaagtttttcaaaggtgcccatcttcaagagctggacgcagcggcatatgaggaagcacctgctattgctttcaacatgtcctttgaaggtccaagtaaccaggcaccaacagtcaatatcagcggtggggaaattcttgatgaagttattacaaggagtcgtggagagtttcgccacactcaaagccccaaaacaacaagttcaactccaacttcaatgggagatataagaccagctaatagccctcaattaacaaggaggatttctagccctccagtaactgaattgagaggggaaagcagcctcagaccaaccaggaaggagatcaagttaatgcaaacacctagtccacggtcaccaggtcttggaaaagttaccaaagattcaccttcaacctaaaatatattgttagaaccaaactaagtggtgctctagaggtcatgaacttggttttgtaataaattgttgtattctcaatgtctcttttttcttcctttttaccagtgtttgttgtttgattgcaacatgcttggcaatataaaatgggcagggatactattggatgttttagtaatgttgctgtctttgaattttagttttacgtggttcaggtcatcttttaaaaatcaataaaggggtttccatttccatcctgg

SEQ ID NO: 123361 - DNA, 404 bp, Glycine max
  Clone ID: PAT_MRT3847_82402C.1
ggctcgagagcacactcaaaccctatcagcggaacaaacccgcaacaacccaaccgaccataaaacagctgttccgatgtgatcactgggagtaaaaattataaatgacccgcccacaagatgcaatccgagcattctttcgttctggaaacgcttctaggatgatttcgcccaaaggcccaagaacgtcttcacagctggcgacaatagtacatgcttttgaagccaccgtggatgaaaggctgaaaaaacttattcccccaagcttggatgacatcctacacctgacttggatggctttgtgctagcaggcactgtgtaagagtcataatgactttctaacccccgagccacagactgagcttactggacctgagtgtgatgagaaacggatagatgagtac

SEQ ID NO: 123362 - DNA, 225 bp, Glycine max
  Clone ID: PAT_MRT3847_82403C.1
tcccgaatctataggcggacacatgggtcggcccaggcaatacgatgagcagaaacttgtatgcagggacaggtagcaaatataccggagtgatataaagacacgacatgaccatgagaatagcaggcatatatgtgaacagattatgagatctcaaagaattaccaaaggtaataaacttgcataaagatgtagcatactgggaagtctaaggtagtgagaata

SEQ ID NO: 123363 - DNA, 420 bp, Glycine max
  unsure (1)..(420): unsure at all n locations
  Clone ID: PAT_MRT3847_82404C.1
gcacagntcaaagctttaattcatgaacgtagttgtaccccaaccctacgggtactttacattaacaatgggggaaggtaatcccagggttgatgtgttttggccaccatcttgaagaaaggccctatttcccccaaggggttttgtttattgccaagtagggcccccaacatgcagggttccaggaagcgccaaatcccttatcccaaggtggatacatggggcccccttggctttttggaagaaacccaaccctaaggatgttggtccccacagggttttccccccccctgaaaaaacttttcccgtttttgggccccaaaattgggctaaaaattaaagggggcaacttcgcgaacaaaaaacaaacctttttctaatgggcaaaaggctttggcctgaaaaaaaaccctttttttt

SEQ ID NO: 123364 - DNA, 1569 bp, Glycine max
  Clone ID: PAT_MRT3847_82405C.1
tcgtttagtatgtatatccaatcacaacacatacaatttacaagaagtttaacttcaaaataacggaaagaaatgtatgagggggtaactaaatgatacattgttacaagggaaagaatgcttcccactgaaccgagtaagtgattctgtgaagatattttgatttgttttcccaattaaatgtgaataataataataataataataataataataataataataataataaagagaaagtaaggggaaaagaataccaccacaatttcaggtagtattttatatgctaattctgtaagtagatcaaatgctccctaactctaaagaatgtttccctgattcttagtaacaatcaatcattctgaagggacaccaccatgtcgttgcatagcaacaacgggctcactgcacctggaacacctaaacgatggagcagcagcacatcgtgtcctaagacagtagtaacaatatctgtgctggcaaggtagagcaacataaggaattgtgggagtagcctgacaaatgggacatgctgagccatcctcagctgaacttaatgatttatctttagaaaaaggtcgaaggagatttttcacggatgatgaattaagaagggggagaagcaacaataacatttccgaaaattcattccaaactaattgccggttcatatattcaaagctaacagcacgattcatattcgggcttccatatacaagcctagctcgtaaggctctttcaataagatttcgatatcttccagtgcaaagaaatatcaacaggtttccaaatgaagcagctctatatattccttctatccgttgtatcaagatccataaacgtctagccaatggtctctgctcagtatcaccccatctacgaaaagcagagaaggattgtaagcgagcccatatatactgaccacccacatctgcaatcctctcgcagccgttctgagcaacagtgagtccaggtccctccagaccagttcggactttatctcttggttctactgcacgctcgtctctgtacctcaggttcatgagagcaatgcctggggttggcttatccacccaaattgagaacctccaaataagaaactcaaggaaagcatcaagctcggcttcatactgaaataacattcctggcttcattaatgagaacactttaaccaactgttctttcaacatggctgacatttcaacgtccaatctcgctgcatcaacttggttaactcttgatatagaaattggaagagttgactgctgatgagggagggaaagagatttccatctggggaggagtgtgtgtgaagtgtgaatccaagcatcgtgtgaagggagagtcattgcgtcatcatcaggattcttttcgtagcgtttgatgtgtgtccatgcaccgcttcattctctctctctctctctgctacccctactgtttagtttagagagagaaagggggagcaggatggacgggtcgtaagggggcgcacagatgctggccaccaaccgaggcagccccggacccaagcttccgagccagagagagagcaggccccaccagaccagc

SEQ ID NO: 123365 - DNA, 1011 bp, Glycine max
  Clone ID: PAT_MRT3847_82406C.1
ggctcgaggccggtgaagaatcgtgcgattcgtctggaaatcgcgattcaagcacgattcaggaacaaaaacgagacaacctcggattcgtatcgaatcgtgcgatacgtatcgtgaatcgtacgatactaactaccatgcttaaatgtataaatgtgtacatgaagcaaatgaagattgtttcagttgcagttaggtcaatcagtgctaatttgccaaaccagtttcatcagagccacttgctcagaagtctttccacttggaaatttacagataatgcaactggtaatcggcagtttaacaattcagaatctcctgaggagtctgagcagtttggtggaaatcgtgggaaatatgcccaacttgattccatatttgaaaagtttaatcaacagggaatggcaagacaaagacctggttcagtaaatggtgctagttctgagaggatgcacgatctagaagaaacttatgacacattaactgatggaatggatggaaaactgatgaatgctgccacatactttgaatttgatgaggatgaaattgaaaaagaagattatgcatttcgatatgatgccaattttccacttggttcaaaatatgatgtaaaggatctggatcttacaaacctggtgtacacaagccccccaaaagggaggaattcacaacaaccaccaaagaagttcttagtaaagcagatttcaggaacgttagattcttggcaaagttcataacagaggctggaattcttatcaagagaagccagactggcattagtgcaaaggctcaaaggaaggtcgctagggagataaaaactgcacgagcattcggcttgatgccctttacaacaatgggtacgaagtcttttgtttttgggagaactatgcagaatcttgatgaagactttgcatatcaaagtagggtggcggatatggatggggaacctgatatggaaggagaccatgcttagaacattgatataggtacttatgcttgggggggggtgggggg

SEQ ID NO: 123366 - DNA, 256 bp, Glycine max
  Clone ID: PAT_MRT3847_82407C.1
tgcaagcgacaggaggaggagattactggggcgagcacgagggagtcaaagccaaagtctatttcagagcctcggagtaccaagctgagggtcgatcctatttgcaagtagaagacttaaaaatggacttcagtgttaagagcattcaaatgggtatacaaaacgtttataacgggaacgcatcattgaggccgcattgaatctattcatcaactctaatgctcaagatctgcttcgggaaatgaaaccgtcgata

SEQ ID NO: 123367 - DNA, 208 bp, Glycine max
  Clone ID: PAT_MRT3847_82408C.1
gtcccgcccacgcgtccggttctagatcgcgagggccgcccttttttttttttttttttttttttttttttttttttttttttttttttttttcaagactaagtattagctttatgctaagctgttaaagaatgtaacttacgtgtattgtgcatgacacaacaatccttaattttctgttggtgataattaatgtattttatcctgc

SEQ ID NO: 123368 - DNA, 213 bp, Glycine max
  Clone ID: PAT_MRT3847_82409C.1
cattttcgcttttgccgctttgcacacgcgttacatgttgcgtgctcgcgggggccggtgacgtgtggctgccttattccatggcttgtttctgttgcttcaacaatcaggcggtacgcacttcatgtcgctctggcccgggcacgcgccatcagggctcagttcagtatggctttcgcctagttcacgggcaagcaaaccacccaatggcgg

SEQ ID NO: 123369 - DNA, 258 bp, Glycine max
  Clone ID: PAT_MRT3847_8240C.1
ggaaaaaattgcaccacgcaaaaacattccaaaaattttgacagtggaaattgtacccaacccttttggcgtggcatgcatgcaacaaaatcaaacataaccacccccaagaaatgttttttttcccttcaaaattgtcaaaacccctaaaggcagggcaaattccgtggcaacacaaagtttggaaaatttcaacttgcaatttttcaaacggggaaattaaatttggtgggaccaaattaaccccccctccaaatt

SEQ ID NO: 123370 - DNA, 246 bp, Glycine max
  Clone ID: PAT_MRT3847_82410C.1
tcggattagtaccacaaaaatggagaaattgaattactgaatatcgcatagctcaaaataaaggttgaaccaaatgccattcatattaaaaaaggcgatgtattgtttaccaagaaccacaagtctacgcatttaaaaaaaaaagttgaaaacaatttagattccatcttttatcctataaacttatcaaatatgcagattagaaagaactatatatttatggatatagatccctattttaaggtg

SEQ ID NO: 123371 - DNA, 425 bp, Glycine max
  Clone ID: PAT_MRT3847_82411C.1
ctgcgagaagacgacagaagggtacccatttgatctataggttgttggacaaaagctaccgtctacattaactttaatcaccgaaattggaggagggcaccattgtgagtgacttgcgtcctgcggttcaaaagcttatggttttcaacaaccatcacattaaccatatgacaaatattggttggtgtccatttattatcctcaaatatatggttatttcgaaacctccatatccaccaaagcacgatcatcaacctagttgtgtctttatgtctcactatagcctgcaaacatatatcagaattattatggtagaacaccagagagtggatctctgccatacgcatccaaatctccttagaataagggcaatcacgcaaagtgtaaatgttatcctcattagggtgggagcaacaagaacatat

SEQ ID NO: 123372 - DNA, 465 bp, Glycine max
  Clone ID: PAT_MRT3847_82412C.1
tccaagatttgtgaccctaacactcaaacttccttaccttcacgctgccctctgcccgtgtctctccctctcgcttctacctctctctcatttgtacgccgctcgtcatcgctcgctgccactcgtctccgtttgttgctccctacccaccactctccctctcgtttgtgcatctcgttgttgtttgatcaagaacgagaaagggatacggagccaccactgatgccaaagtgggaggttgtggtgagcatgattcggtcgatggacatggtagttcagattttctgcgttgattggtggatgccgtggtgactggtgatttgttttttttaattcagatctgggattaggggttttactgttgcttaattttgtgatgaatatggcgttatttttctgagattcagagaacactcttatgtggtttgttgcttatttgagactatgatgaattcttacggaggt

SEQ ID NO: 123373 - DNA, 602 bp, Glycine max
  Clone ID: PAT_MRT3847_82413C.1
ctgttcaaaatcattttatttacccaatattaataaccatacataattaacaaaaccatttcaaaaaaggaggggaaaactcaaaaatggttctgtaatacgtatattgaacagaattattacactatgaggccattagcaatggcgcggttagtactaacatgagtagtttcatacaccggaagctcctcactataccttccacttccaaacacagccaaatgatcaagctcgaagagatccgagctcgcataactcgatgcatcgtcgtcatgatcatcattgtcatcaccatcctccacaaggttagttttccttaaaggcaagtccttcaaaaccaaattatcattgctcttaatcttggagttgtgtcggttgtactctcttaagaactctccaaaagcttcttcctcttcacacaagcgtttgtccccacagggcctgctatcctcatccacgatcacactcacggggtaaaaacgcaccgttcgcttcaccccattgcgcaacctgtccctttctgaagacatggtcttgctcaagcaagaccgtgaaaacgaagaagcagaggaacacgtggaagaataataacatgaagatga

SEQ ID NO: 123374 - DNA, 352 bp, Glycine max
  Clone ID: PAT_MRT3847_82414C.1
cgggcgcttttcagactatcctttccaatttccaagtgcttcaaagtttctctatgatggtcatggggcattttccgggattatatgtgtccaacgtgctttcaaggttaccatctaacgtgttgtctttatgcaagtgcgtgttcaagtcttcttatgaattcataaccgattctcattttgtttccaattactactgtgactacaacagtctttaaagccaataggattttctcttggtaatttcaagatcctttttttctgtcctcaaaacttacattattgttctttctttgaacaccaattgccccaaaaagcaatttccttctgattttctaaaccccttcctatg

SEQ ID NO: 123375 - DNA, 234 bp, Glycine max
  Clone ID: PAT_MRT3847_82415C.1
ggagggggaaatggtttccaaactccaaatcatggtttagccaatggggtgggtcaatttgaatttgaaaaattggaaattagattttggttaaaaaggttcctaacctttaccaactgttaaaccaccagggagggttctatcataaccaaagaaaaggtgggcccaattttcacccaaccttattcttcctaggccccagttttggaggtccccccagcaaacctaaggcca

SEQ ID NO: 123376 - DNA, 730 bp, Glycine max
  Clone ID: PAT_MRT3847_82416C.1
cgagagggcttgctcacagatatatttttttttttgggtcctcattttctcgagagcgttcagtttctgtggggcatctttcttcttcttaatctttccccccctctctgtgacatcccgcttctctgaatccctttctgcgaatcatctgtgtttcaagcgtaagagtttctgggttgtgttttaggtcaccaaaaagcaaacttagagggagttttcgaaagccaggtgtgttcagaaacgagatccaggttttattgtggaatttcgctagtcatattaatatttcatcatttttttttcctttgagaccagccaagagggggatttttgagccctcaaagctaatttctcattttcttttccgggactgagagaggtgtggtatttgaaatctccttcatcctttcctttcttgtggagaaggttttgtttttgtgttaattaaccagcagttcttcagttttagagagaggcagggtgaattatcatgggagctatgatggagttttacagcgggagcacagagtttggaattggctggagtccattgaggggggagctaatgggagtgcttgaccctttgataggaagggcttggtggacaggttgggggtggaattggtggggggggttggtgcgcggggctgggggtgggggggacgggggctgggggctgggtatgctggggccggggggtggtgggtgcgggggggcggggggggggccg

SEQ ID NO: 123377 - DNA, 1322 bp, Glycine max
  Clone ID: PAT_MRT3847_82417C.1
tgacttgtaaaaatgcacaactcatctgcacctcctcacacacacacccccctcctccgtttcccgtttcccgtttctgtctaccctgtataaaaaagtactaacttttctttcttccgctttctgctcagttattcattctcagagtcacacacacgcacatatattttcttcatcttcgtacaccactgtctcatcatctccttttccttgttctggtggcgctcttgattttcagatgacaacagcaattgggtgaaacgtgaacgccaccaccgatcggggtttgccaaaaccttacaatggaggtcgaaaggatgagacagttgatgctgatgtggtgtagaatacgaagcaaccgtgtcgctcttgtgggtggaaaccataccgctgccaggttttgcagtcgctgaaattctctccttcctatatcgctggctttgtttgttttttctcttccaactttactcaataggatctcatctcgctcggttaatttaatcatcgatggggagcacgatgaagaataagcatttgcacgatggaagaacaattgctgctctcaaccccgaaagtttcctcgttatcaggattcccgatgcgcttgttttgcgcattctgtctcgctcattgttcgtggccatggttcttgctgccttgcctttcttgggaactgttctcaaaggattctatttctcttccagttttgttcccaatgtcgaaactgcagccgcatctgggtctctcgatgtgggactattgaattcgattctacatgatttcgctcatgagggtctcctcagagagaacgataaggcactcgttctgaactctccccttcctaatgtcttcagggaaaagattgatgttgtcatggattctgattgggaaagtaagagcttgtttgctgatgtgtcttatgattttgtgttcacctctggtgatattgatgctgagtttattgatcgcattctgaaaattgatggcattgtggctctcccgttggggtctaaaccgtctaattctgctttcaaagaacaaaataattatagagttgtttcccttaagcgatatggaactgctgttgttgttgcattgaagaaaactgggccagccgttaggttggtagattctgattcttcgccaaagaggaagcttttggcgacaaagacagaggccaagagtgtggcattgaagggtcttgaagatgttctcttggagcctccgagaaaggctttggttaaatcaaggaagtacttgaacaagatcaagtatttacctgacttggtgggtgattctcttgaagttacaaaagaagagtc

SEQ ID NO: 123378 - DNA, 166 bp, Glycine max
  Clone ID: PAT_MRT3847_82418C.1
acatggacgctgtggctatgaacttttccaataggatggaaataggggcatatccattgatgaactaccttctgagcttggtcttggcccatctgttcctgaccatgctgatcttcacaactgcattacgcaccctgatcgaaacctgatcttccttggcgtcgta

SEQ ID NO: 123379 - DNA, 211 bp, Glycine max
  unsure (1)..(211): unsure at all n locations
  Clone ID: PAT_MRT3847_82419C.1
angtcatctnngcttgatgactttatgtactatganaaccgtcaaangatcntgccggctgagaanngcctcgttgctcgtacccgagnttcnatagtccaatatttgtacccgtntnagaagctccccaaacagttgaatttgttnttnattnactaaaagacanntatgagaannattngangcccaagggtgattctgntggntncaa

SEQ ID NO: 123380 - DNA, 804 bp, Glycine max
  Clone ID: PAT_MRT3847_8241C.1
ccacgcgtccgccagttttctactttccttcttcttcttccttccttcactcgtatatcacttccttcctcgtttcgttaaccttctaattcaatccattcctcacttccttttcaaccgaagcttttctccgataatcgcagagagaaagaataatggattggggaaacgtaaccgcggaggatctgatcgacgcgctccgcgaggtcgattggtcgtcgccgccgcgcccgctgtcggaattcttctcgcgattcactgttcccagatcttcctctaaatggaacagccgcctcaaatgcaacctctactactaccggaccaactacttcattttgattgtttctgttctcatattgggttttcttcgaagaccgctagctattgtagctgcacttcttacggcactcagcattgcttttctgaatgacagctttgcaggtacctttagtgagaaggtaacaagaacagttaggcaattttcaccacatttagctgccaaaatgagacctcctctcacgtaagtatatttggttgttattgtctcttttgacttttggaagtttatgcatgcttgtcaattatttgaattccaggcctgttattcgtggacgtccatcatccaagagagcaatttatatatgtggccggccgcgttgggtatttggcttggatatttcttctgcagtttctttctttgggttggttctgctggtctcctgacagttttatgggcttcttgctattggtcctcttgctaccaccctgcatgcaagctttagaacacctaacttgaaagctcgt

SEQ ID NO: 123381 - DNA, 270 bp, Glycine max
  Clone ID: PAT_MRT3847_82420C.1
caccaactctaacagaactcaattttattatttaataaaacagtagaaaatccttgacaggcgacaggaaggaagggggaaaaccaggatttttggaaaagggtaaggttgatccttctaatttttcaaactataaggccggggctcaataccgcaggcaatcgagaagccaaactgcgttttaagtcaggggaaacagcgtgttcaccaatcatggtctccaacaccgccgctgacacagccttgttctctatcactgcagcctccttt

SEQ ID NO: 123382 - DNA, 658 bp, Glycine max
  unsure (1)..(658): unsure at all n locations
  Clone ID: PAT_MRT3847_82421C.1
cacgcgtccggtcaatttcctggatcaattccttcagaaaggtaaattcaccattttgtttttgctttttgctcttgtacagttgatacattttgaagagtaacacctttgctactttttaaggctatatttactagcaaggatgggcaggcatatggatgattcattagtaagtttcttaatttttggctgagaaatgcatggatacctttacacaattactcattttagtgaaaaataccctccaatcttaaatgctgttgcaccttatatctccaggttgcattgttactatgattgtgaatgccactttaaagtccaattatatataacagcatggaggcaaaagaaaaatgaaactgaatatttgcttgtcttgagtactaccatatatacctttccaaattcatgcaattttgtgagataaccattcagttattcttgtcagaaaaattgaaaaaataatattgtgacaacttaagtttgtaatcaccagtctttcatacttttgagaggctataatatttatatggtgcctcagctgttcatattgattcanaatattgaaagaatgggtatttttagataaacagtacactcagtcactcacatgcagttgcatacaaaaggaaaggaatanangaaactttatttttct

SEQ ID NO: 123383 - DNA, 267 bp, Glycine max
  unsure (1)..(267): unsure at all n locations
  Clone ID: PAT_MRT3847_82422C.1
atgaagactggggtcctggcaaaagaaagcgangagnaaaggagtctgatgctgttgattctcttatgactttgcatnaaagtgagaataggcatcccaataatgagnanaacatganangtanagattctncaagcataaagntcaaaaggcnttgttttaggattncacgtgatgcagttgagangcttcncnaagtttttgctgagaacnnncntcctccaagatctataaganagggtntttcaaaagngctgggccttgaca

SEQ ID NO: 123384 - DNA, 320 bp, Glycine max
  Clone ID: PAT_MRT3847_82423C.1
gctggttatagatactgtacactgagacaggagcggggtcttgttgcgctggactcgtacaactgtctttaacagatatatcttactcgaaggtcaaataatgcgcattcttaagagcgtagacccgttcgatgatggcggaaggtggttgtcaataggctactatagttctgaacacattttaaaaacttcgcagaatacttgtatccatggaagtatatggagtgcaagctcttgtatgaatctacccaaacgttctactcgcacaaaggttgatagatagaacagcggataacgcgtaataatgaattcgtccgttg

SEQ ID NO: 123385 - DNA, 1710 bp, Glycine max
  Clone ID: PAT_MRT3847_82424C.1
gtttttccaaaaaggttcaaactttgggtgcagaactgcagatgtataggcaccgtagggaaactcatgaacatcgcaacgcgttaggtagcttcctctccactattcaaaatcggttccattccaatataagaagtgaaagagcccagaactaccaggcaagaacatagtgtatgtgtttcaaaactgtgattttgttatctgttcttcaaaaccattgaagatgaggtggctctttcctctcctctttcttttttcgcttggtcttactgttactggtcaagaatccattgagttcctcaacctttgtgagacaactgaagacattttacaagcctcatcacacgctgagcttcccttggctatttcagtgaatggtggaaacctcaatgaggtttccttcagcattctattggctgaaaaatggctcagacacaacgttcttgcacactaccctgcctcaaatatcaccaccattgttgtggaaaccactgctttttgccaacaagaccaccaacacaacaacaacctcgctgtggttctgtcttctttgaagaatgtctaccactctctcaagagatggggtttggagaaagacattaaagtctctgttgcttttaatctggactgtttgtctctaaactcagtttctcttaacaatgatttgaaactggtcaaacccctcatagagtttctccaagaggtaaactccacatattctgtgatcccacattatggcttctcacgtttttctgataaaagtttgagcttggtctcttcccacttggagtccttgaaaaagcctggatttttctacttgaataacataaatgttctagccattgttccaaaagggagaaaaaacatagcaagaaagctttcagttgttgattttagcccaataggcccattcccagtaaggccagctccagtgccagaaatagccaagtccccaatgactccttccaatgtagccccacgcgcccgcggacgcgtgggttcttcaccccctccaatactttctcccacttttgcccctgaagagccaccatttccatttggtgttccagctaattctcctcatggtttctcactccctccttgtaatccattacacgatggctcaccccaaatattcccgatccagaaactgtggtgtgtggctaagcctagtgttcctgaagaaacactgcaacaggctatggactatgcttgtggagagggtggtgctgattgcatggagatctcaccgcagggaaactgttataatccagacaccttggttgctcatgcctcctatgctttcaacagttactggcagaagcacaagagaagtggtggaacatgcagctttggaggaactgccatgttgataaattctgacccaagtttccttcactgtcggtttattcttagctaagtgaatagaagtggcgtggcgactttctgtttttgttgcagatagtgtggaggattttatgttaaggtgacttttcttttgattaactagcaatcggtttatgtataatgtatggaccaacttaaaacttctatattgggatcttgttggactaacttaatactttctagcttaattgttatgttgtttctccatatgatatataggtattagtagtagtaagttggagttctgttctaaattacttactgattgaatcctatttgcctacgcagagtttgtttattcag

SEQ ID NO: 123386 - DNA, 257 bp, Glycine max
  unsure (1)..(257): unsure at all n locations
  Clone ID: PAT_MRT3847_82425C.1
tgactagaaaaaaaatccatgtgacacatgctcaaaatcagttgttgtttgcgtgtgtgcttttcatgtgtcttgaaaataagatagcatgccatctaacagtacctagtctttggcattcattgctttgttcccaagtttgcatatttaaaacctttagaaataagtggttacnnntatcattttacctgttttcttttccttagaacttcatttctatcctttattcgttgagccttccttagagaaataaaaag

SEQ ID NO: 123387 - DNA, 1188 bp, Glycine max
  Clone ID: PAT_MRT3847_82426C.1
cacgcgtccgatcctagaacaatcggtgctcaccagactctttcctctaaaaaaaaaaaaataacagtagaagtggcttcacctgtccctaaatagagcaaagcatctttgttggaactagatccaattccatttcaaaaactcatacctcttctccaacatgaaagacaccattgttctataccctaatcttggtaggggacacctagtttccatggtggagttgggaaaactcatactgacccaccacccttcactttccatcactattctcatcctcactcctcccaccaccccttccaccaccaccaccaccttagcctgcgactctaatgctcaatacatcgccaccgtcaccgccaccactccctccatcacgttccaccgcgttcccctcgccgcactccccttcaacacccccttcctcccccctcacctcctctccctcgaactcacccgccacagcacgcaaaacatcgccgttgcactccaaaccctcgccaaagcttcgaacctcaaagccatcgtcattgacttcatgaacttcaacgaccccaaagccctcactgaaaatctcaacaacaacgtccccacttacttctactacacttccggcgcctcccctctcgctttactcctttactacccccccattaacccaactccttatagaaaaaaagatacagaccaacctttgcaaatccaaatccctggattacccacaattacagccgatgattttccaaacgaatgcaaagaccccttgagttacgtttgccaagtcttccttcagatagcggaaaccatgatgggtggtgccgggattatagtaaacacatttgaagccattgaagaagaagccatcagagcgttaagtgaggatgcgacagtaccaccacccttgttttgtgtcggacccgtgatttctgcaccgtatggagaagaagacaaagggtgtctgagttggctaaacttgcaaccgagtcagagcgtcgtgttgctgtgtttcggaagcatgggaaggttctcgagggctcagttgaaggagatagctattgggttggagaagagtgagcaaaggttcttgtgggttgtgagaaccgagttgggtggtgctgatgactcgcggagaactgagtctggacgagtgctgccagagggttttttgagaggaccaagagaagggat

SEQ ID NO: 123388 - DNA, 410 bp, Glycine max
  Clone ID: PAT_MRT3847_82427C.1
cactttcaaacccatccaatcctcacatacattctgtctctgccatagctccatgtcacatagcatttacatcggtaccattctttctttacatcacaaccacttattaagcctctgatcctcactttctctcacacaaaaccacactcaccatgtatcatagaaaaccattgttatccactctctgttatgctgctccatatccacacactgcctaggacctaattttagctatttgcacattgctattactctcttcccttgttgccttttgagggtacagggcctccaacacgccgcatgccgacacgcatctgcaacatctaacgatgagcaacgtactcccacatcggtgccttctgcgaaatgatacccggattcgcataggtgtttcttccggggtgtcacat

SEQ ID NO: 123389 - DNA, 1083 bp, Glycine max
  Clone ID: PAT_MRT3847_82428C.1
ccaatcaaaatcttaactactagctgaatggtcccatttacaaccttttccctccttttgcagtaattactctaacgaaagatgggctggaccaactaattgtgggtatcgtgagctgattatggggggtcactagtattagaaagtacaaataaacgccgattggtgtgcattaagtgaagaattcagtgctagcacagaaacaatgagtttctcacaattgaatattgaaaatcaatactacgtgttgaaattggaagtcagattgtgtgaaaacttgaatcagtttaatcatctgactgactgatgactcttgattatgtatgttcaacaaatagggacaaagaagcatcccataacaaagagctaaggtgctagttttggcgcccttgttccttaacaactaatgcctgttgtggttccttctcctctggttctgccatcgctgaatctttctgctgttccttctctcctacttttgcttctccgtcttctaattgtagtaccacatgctgccttaaatatctgaatagtacgagcaatataaaaactgcatggaaaaattattgcacaagaatcaatcaccacaaagttaccaaacccaaatgcaaaattaagtagacaggatttaccatcctctatgtttcattgtacaacaggaaaacgtgtatctattcagaagcaaaacaatctatcccgagacaaatttttagtctaatttccaagtaatctgagattaccagtataattttgcagaaggctatggaattttaatagtgcaaatggtctaagcttatgctaaaattgcttagagtgcgtttgtttgggccaaatcctactttctaatgctcgttgaacccaatcatcctctcgaattggattggcgtccaacaagatggaacattcaaatgcaactgaaattcatgcaaaggtcgactaggatccccgggtgaagagctcgagtttttattgaagatagattccagaaggccatgagtgctgatgccatcactttcttcttgcgagtgcaagcactccatgtgtccaacaaccatgatttcaagccctcagctttctggttta

SEQ ID NO: 123390 - DNA, 1636 bp, Glycine max
  unsure (1)..(1636): unsure at all n locations
  Clone ID: PAT_MRT3847_82429C.1
attcggctcgagctgcggttgtgttgcgagttacaagttacaacatttaacttaacaaaacatgtggcgtcgttatttctcttgaatcgaggaaagtagaagtagaaggcaggagggagcaatttctgagcacagtgccattcatggagggatccatcttgatgcgtcaaaatgctccctctccatccattttccaaatctagcattcttctttggatcaaaatcaaacaccatttttctctcttcactcttcactctcacctctgtccctattcttctttttttctctctcttcccatttctttcacctatgtgacttgctccatctttatgcaaaccgttaaagttaaacttgttctctgactacttctcttctctctccctctctttctcttgagtgggtttgcttctgtctcacagaaaaattatcagcctttcaggtgttcttggctagattgccaccatgataaagcaaattcttagcaaattgccaaagaaggtgccaaaatctgactcatcagattctgcaaggagtgattctagcaataccactacttttgggaatgtttttcagtgtacaaatgttggaagtaccatttcaagcaaattaaatgttgtgaagcgggtatcatccgttgttttcccagcaagcatgagtgctggagtggaagcagttgacccttgtctgtccttcaaagatgtttcaaatacacagaagcaaagcctgttcattagtaagttgaatctttgctgcaaagtttatgacatgagtgatcctgataagaacaccacagagcaagatctcaaacgaaaaacgttgttggagcttgttgattatgtttcttctggatctgttaagttcacagaaccagcaatcgccgcattgtgtaaaatgtgtgcaactaatttgttcagggctttcccaccaaagtttcgaacaagtactactggtggggaaacagaagatgaagaacctatatttgatcctgcctggtctcacctacaagttgtttatgatctactccttcagttcatcaattataactctcttgatgtgaagttggcaaaagcacatatagatcatgcttttattctaagattacttgacctttttattcagaggaccgagagattttgaaaacaattaattttggtggggtttctgttttgaacaaaccttggagtttatcatcagcagtactgaattgttaagtactgaagtattgattttttttttctttcttgtactggtaatgatcttgtcaggtacaaggtctttattggttcctcaagtggttgtgattctcatatctcttcttctattttcagacccagatctccgttttacccacccactattgctgcttctgtaaagtctttaattttggtattgatcgtagccttgtcaatttcttgctttaaaagggtcatttacatttttctttatttttttttttgggattttgcctttccccttttctcttgttgtttgattccaaaatttgttaagatgaacttgttctagcttcttgttgttctgctagtgcttcagggaatgggctagttttgtattctacaacagcttttgggtgtttaattgntgttattagttgaaaaaatactgagattcatctta

SEQ ID NO: 123391 - DNA, 1316 bp, Glycine max
  Clone ID: PAT_MRT3847_8242C.1
gaaatataaaaacgaaagcttcattttccttttctctttcttcactcttttccagtttccaactttccttcttcttcttccttccttcctcgtttcgttttccttcttcttcttccttccttcactcgtatatcacttccttcctcgtttcgttaaccttctaattcaatccattcctcacttccttttcaaccgaagcttttctccgataatcgcagagagaaagaataatggattggggaaacgtaaccgcggaggatctgatcgacgcgctccgcgaggtcgattggtcgtcgccgccgcgcccgctgtcggaattcttctcgcgattcaccgttcccagatcttcctccaaatggaacagccgcctcaaatgcaatctctactactaccggaccaactacttcattttgattgtttctgttctcatattgggttttcttcgaaggccgcttgctattgtagctgtagcttcttacggcactcaacattgcttttctgaatgacagctttgcaggtacctttagtgagaaggtaacaagaacagttaggcaattttcaccacatttagctgccaaaatgagacctcctctcacgcctgttattcgtggacgtccatcatccaagagagcaatttatatatgtggccggccgcgttgggtatttgtcttgatattttcttctgcaagtttctttctttggtttgtttctgctggtctcctgacagttttatgggctcttgctattggtcttcttgctaccatcctgcatgcaagctttagaacacctaacttgaaagctcgtctaaacacattccgtgaagaatttcgtgcagtatggcgcaattatagtgaactgtagcttacataaaatttgttggacttggatgtgttgctgctttattgttgaagtattttctgttaattggaatggaacattccatggcaagctgccgaccattggagactataagcagattgtaaattttcaggaatcttgttttttgtaaagtacactgttttcttgtttatgtctagcggaagctttggaatattgatacacgctgtaacctagacattgtcataattctagttgccaaaattcttaattgctctggacattggtgacataaaatacttcaatttcttttatgtttgttattagtaggtttcattttattttgatattgtggttgtgttctctggtaaagattgtaacaatggttgcttgcattgtatgatgcatgcatctgaagcagtttattttagtaagaagtgggatagtagaacttcaattcttgcatcacatatattatt

SEQ ID NO: 123392 - DNA, 718 bp, Glycine max
  unsure (1)..(718): unsure at all n locations
  Clone ID: PAT_MRT3847_82430C.1
ctgcggttgtgttgcgagttacaacttacaacatcgtccgaacaaaacatgtgtcatgtggcgtcgtttattctcttgaatcgaggaaagtaggagggagcaatttctgagcacagtgccattcatggagggatccatcttgatgcatcaaaatgctccctctccatccattttccaaatctagcattcttctttggatcaaacgccatttttctctcttcactcttcacctctaaacaaaataaagaaacacaacactcactcccacctctaaacaaaataaagaaacacaacactcactcccacctctgtccctcttcttcttcttcttcttcttttttctttctcttcccatttcagttttcacctatgtgacttgctccatctttatgcaaaccgttaaagttaaacttgctctctgactagcttctcttctctctctatttctctttagtgggtttgcttctgtcgcagagaaatcatcaggtgttcttggctaggttgccaccatgataaagcaaattcttagcaaattgccaaagaaggtgccaaaatctgactcgtcagattctgcaaggagtgattctagtaatacaactacttttgggaatgtttttcagtgtacaaatgttggaagtaccatttcaagcaaattaaatgttgtgaagcgggtatcttctgttgntttccctgcagcatgagtgctggagtggaagca

SEQ ID NO: 123393 - DNA, 318 bp, Glycine max
  Clone ID: PAT_MRT3847_82431C.1
tgggacatcaatcacaattaacacacacgcaattccataacatcatggcggtgctaaacgcgtgcttgttgcttcttttcattgtgggggttacacctgcacccatagaactgaacatcttcacaagtgatcagtcatcaatcatacaattactatcattcaccatcatcatgctatgatctcagcatgtgcacacgcgcaatgtttcctcaatccacatgctcacatattatgatgaattcattccaatcagatcgtacgaactcttcgtgaatacactcacagccaagacagtatcttttacccgagatcaacaaa

SEQ ID NO: 123394 - DNA, 229 bp, Glycine max
  Clone ID: PAT_MRT3847_82432C.1
gaattcggctagagtccgctttcgtttatactccgaaaacccctagtttacacatcgctcttcaacatgaacacggcgtagatcatttaacccactccgaaaatgtagatccagggcagcgccagtgataaaggcaccgaggcggaggcgtcgacggcgagactgaggatgcggatgaaccataacaaggagaaaaagcaagatggatacgaggacatgacattggatt

SEQ ID NO: 123395 - DNA, 637 bp, Glycine max
  Clone ID: PAT_MRT3847_82433C.1
ccacgcgtccgcttaatctgagtgtgtgagatttacttagtagtggtagtggcagatgaagaagagagaagaagcagtgaaggatttgagaagttcgagtgggaagtgatgatgatggatgtgtttgggaaccctttttgaaattgagaatcgccagagctgtttatgaagtttggcctcaaattggattgattttcagtcatgttgaggagatgaatggaatttttaatagtggtgtgttgtgaaaagattttgtgatggtataccttgacttgatcgaaaacctcggtcttgttagtatcggatgtgctatatgttcaactttttgcaagttgcaagtgattttagcagcttagtttatatttgaagctgctaacatatctatgattgtaataaataaataaatacaatcttttgatagaaatatagttaagttgcagttatggaattgtctatgggtcattaggttttagctacttcaaagtggttgtcctgtcctgagtatcatatttttccagtagccttattgttgctagtatggtatcgaagagtaaaatggaagcagggacattgagtcctaaccaccctgcttgctttcttcgtcaggcacttgctgctggtgcacctatgcttctga

SEQ ID NO: 123396 - DNA, 338 bp, Glycine max
  Clone ID: PAT_MRT3847_82434C.1
aaaacagcctttactcccacccgggagcgggcttttttttctacccggcaattccacacctgttccttgagtggtaccagattttcctatattgaattctattataaattggcgcatttaaggcaataactggttcatcaggtaaattgttatgcagatgaacattcatacatgatatcagccgggagcctaatactacaatcctcgggcccctaaacagggcaataattacaattaatggtgctgcgctatttcgacgtgtatgagctgaaaaatccttttttctaaaatttttttattaatcatgtcaactcgccaatgagaggcgttgttgttta

SEQ ID NO: 123397 - DNA, 338 bp, Glycine max
  Clone ID: PAT_MRT3847_82435C.1
ggaagcataaaaagggggccaaatgtttcactttttactcaaaaaaaaagaccttttttttccccaaaagtcaaaacaaccttaaaggaacaaacctggttgggtttttatgcaatatagtttaaggggggcctgaacatcctgaacaggtacgggcccccatttttggtctcccaaaggaccacatgacctttagcttcaacttttttaaacggcctttctatatcagcctttttttaaagggggggggggatttttccggtaattttttcaagcttttgcttcaaagggcaaaaaaccttgggcttggcctttccaaaaacctttttttttttctc

SEQ ID NO: 123398 - DNA, 840 bp, Glycine max
  Clone ID: PAT_MRT3847_82436C.1
tcggctcgaggagaaactgtattaaccgtttctgctctgctttgttctgcctgcaactaataatgggcactacatctaccaccatcaaattgcttccactttctcctttgccaaaaccaaccacttcatcttcatggctttcttgcaaaccaatttcccatccctttccaaattctcgtccgcgaggtaatgtcgcagtctcggtttcctacaacccccaaggcaacttcgacctctctttatttgacgatgatgatgaaactaaagctgcacctcctctgcccccaactgaaggccgatttgaagttgtcattgacaatgacgttattagtcggcttgacttgtctccttttcaagctgcaacaggcatgaaatcccctttatctgtaaaaccaaaagaatttcttgaccgcacaatcggcttcaccatcaactatactagagaagatccccgtgatcctcgagaattatcagagtatcctgatattagggtatggtttgtgagacttgatgctacttatccatggttgccagttttgttggattggagagctggagaactggctcggtatgctgcaatgctggttccacatcagatgaatattaaaatgggagtggtcttcaatcctgaggcattggaactgtttgttatgaagaaagtttttattgtgtattcttggttgaagcatcacaacattcccaagcctaaattgaaggcaaatgatatggccagaatgcttggatttacaattggagatgaactatatgactttattgataagcatccgcttgatctgtcgtaaagaacctttgtagcagaaacctacgaaaattcttact

SEQ ID NO: 123399 - DNA, 523 bp, Glycine max
  Clone ID: PAT_MRT3847_82437C.1
cttcccttttctagaaaatcttcagaggatttccattctgtcattgccttccagacctatgcagttggaagcagtggaggatacaagaagggtgtgacagaagcaaaactgaaggttgccataaacggatttggaaggattggaaggaacttcttgaggtgctggcacggtcgcaaagactcccctcttgtatcctccactgcaaccctgccaaccttccttggaaggatttggggatagacttggtgattgaaggaactggggtgtttgtagacagagaaggtgcagggaaacacattcaagcaggagctaagaaggtgctcattactgctcctggtaaaggagacatccccacatatgtggttggtgtcaatgagtatgattacagccctgatgaacccatcatcagcaatgcatcttgcaccactaactgccttgcaccctttgtcaaggtccttgatcagaaattcggtatcatcaagggcaccatgaccaccactcactcctacaccggcgaccaaag

SEQ ID NO: 123400 - DNA, 504 bp, Glycine max
  Clone ID: PAT_MRT3847_82438C.1
caacgacaccggtggcgtgaaacaagcctctcaccttctcaagtacgattcgatcctcggaaccttcgatgctgatgtcaagcctgttggcagcgacatcatctctgtcgatggaaaggaaatcaaagttgtctctgaccgcaaccctgccaaccttccttggaagtaagcctctttttttttatcatccacaaaaccacaaatattagttgttagtttttgttagcgggggaattcgaacccgcgacttctcccctcttcctttctccctacaactactagatcaaccatacatttccgaaggatttggggatagacttggtgattgaaggaactggggtgtttgtagacagagaaggtgcagggaaacacattcaagcaggagctaagaaggtgctcattactgctcctggtaaaggagacatccccacatatgtggttggtgtcaatgagtatgattacagccctgatgaacccatcatcagcaatgcatcttgcaccact

SEQ ID NO: 123401 - DNA, 366 bp, Glycine max
  Clone ID: PAT_MRT3847_82439C.1
gaaacgcgttcctacatgttgcggcgtcgagtgtcccaaggaggggaaacttcctcgacgcaaaatttttgacaaacctaagacacgctggttaactattatccctatggagatcaatctcgcggtccgacaaaagatgttaaattttgcgaggtacattatgaagaaaagggacaaacttaggtgtcaagttggaatcaacccatactccatggaatggactgatttggccaatagatgactgagtaagggcaatgatattctgtgttgcgattatgctaagtttgatggtttgattaccaagcacgttatgagcaagatggcagaaatgataaacagtctttgcggtggtgatgaaaaattgat

SEQ ID NO: 123402 - DNA, 477 bp, Glycine max
  Clone ID: PAT_MRT3847_8243C.1
gcggctgaggattcccaacgagtgaccttcttcgcttctcgcaaagtgtatgtaatcatgggtagggaaaaggctcacatcatcattgtcgtcattggacatgtcgactctagggaagtcaactaccactgttcacttgatctacaagcttgtaggtattgtcaagcgtgtgattgaaaggctcgagaaggaggctgccaacatgaacaacaggtgattcaagtatgcctgggtgctcgacaagctcagagctgatcgtgatagacgaattaccattgatattgctgtgtggaaagatgaaaccaccaacttctactgcacggtcattgatgctgctggacatcgtgactttatcaataacatgattactggtacctcccatgccgactgcgctgaccttattatcgactccaccactggcggttgtgaagctggtattactaacgatggacagacacctgagcatgctcttcttgc

SEQ ID NO: 123403 - DNA, 796 bp, Glycine max
  Clone ID: PAT_MRT3847_82440C.1
acatatatatagagaatgttcagaggatttccattctgtcattgcctaccagacctatgcagttggaagcagtggaggatacaagatgggtgtgacataagcattaggtgaagtttcctgatgcaggattggaaggattgtatggaattccttgaggtgctggcacggtctcaaagacttccctcttgatgtcattgccatctacgacaccggtggcgtgaaacaagcctatcaccttctcaagtacgattcgatcctcggaaccttcgatgctgatgtctagcctgttggcagcgacatcatctctgtcgatggaaaggaaatcaaagttgtctctgaccgcaaccctgccaaccttccttggaaggattcggggatagacttggtgatagaatgaactggggtgtttgttgacatagaaggttcatggaaacacatttcagcaggagcttagaaggtgctcattactgctcctggttaatgagacattcgcacatatgtggtcggtgtcaatgagtatgattacatgcaagatgaacccatcattagcgatgcatatggcaccactgactggcttgcaccctttgtcaaggtcctagatcagaaattcggtatcattaagggctctatgaccaccatttactactacatctgaaactcaaggcttatatgagcgagccatctctagctagagctcgcctagagtgcggctttaaacattgttcccactttactaggagcactagagcagttgtcccttgtacttctaaccattagaggcattcttaatgggcta

SEQ ID NO: 123404 - DNA, 607 bp, Glycine max
  unsure (1)..(607): unsure at all n locations
  Clone ID: PAT_MRT3847_82441C.1
accccagcaaaacaccatgtaatctagtttattttcctattcattcttttttcctactggacacatttcatcatcaacaaatttaacccttctcctaatattttaaactgtcgaaaaattagagaaacagagacctaaaacgtggtcgtgttgacgaggttgtcgctattcctggcagcaccagctcggtaccgattccgagtcaacccggccgagtcgtaaaactcgtcaatctcatcaccatctccatctcccacagttctcaacatgtgcaacacctttctcgccttctccctcgccctctccgtacccgtttcctcaatctccttcaaaacctccgcgactctcgcttccttagccaaacccttgaacctcaagcttctatgactcaagcgcgtaaagcgccgccacgcaattctcccgagtcgcctccgagtccaactcgttccctctcaacagtgatactaaaatctccaccgcgtttgcgtccaacatcgccgtgcggccctccgggacacggcgaggttgcagagaaatagcagcacccggctcgccaaattcccanccaccaccatcgaaaagaaggtgggggaccacgccgagcttc

SEQ ID NO: 123405 - DNA, 1652 bp, Glycine max
  Clone ID: PAT_MRT3847_82442C.1
ccacgcccgtccggtttcttaccaagcctctactatactgcttcaccttctgctctagaaaattcagtgctgaaacatggcttcggctactctctctgtagccaaaccagcccttcaggcaaatgggaaaggcttctctgaattctctggcctccgaagctcatcaggcttccttcccttttctagaaaatcttcagaggatttccattctgtcattgccttccagacctatgcagttggaagcagtggaggatacaagaagggtgtgacagaagcaaaactgaaggttgccataaacgggtttggaaggattggaaggaacttcttgaggtgctggcacggtcgcaaagactcccctcttgatgtcattgccatcaacgacaccggcggcgtgaaacaagcctctcaccttctcaaatacgattccatcctcggaaccttcgatgctgatgtcaagcctgttggcagcaatgtcatctccgtggatggaaaggaaatcaaagttgtttctgaccgcaaccctgccaaccttccttggaaggacttggggatagacttggtgattgaaggaaccggggtgtttgtagacagagaaggtgcagggaaacacattcaagcaggagctaagaaggtgctcatcactgctcctggtaaaggagatatccccacctacgtggttggtgtcaatgagtatgactacagccctgatgaacccatcatcagcaatgcctcttgcaccactaactgccttgcaccctttgtcaaggtccttgatcagaaattcggtatcatcaagggtacccatgaccaccactcactcctacaccggtgaccaaaggcttcttgatggcgagccaccgtgacctgaggcgtgcaagggcagcagcactcaacattgtccccacttcaacaggagcagcaaaggcagtggcccttgtcctcccaaccctcaaaggcaaactcaatggcattgcactccgtgtgccaacaccgaacgtctcagtggtggacctcgtcgttcaggtctcaaagaagacctttgcagaagaagtgaatgcagcattcagagagagtgcagacaatgagctcaagggaatcctctctgtgtgtgatgagccacttgtgtccgttgacttcaggtgcactgatgtgtcctcaaccgttgactcctcgttgaccatggtcatgggagatgacatggtgaaggtcattgcttggtatgacaatgaatggggctactcccaaagggttgtggatttggctgacattgttgccaacaaatggaagtgagagccaaacaaattctcattggtaattaaattattatgtatgtaccatgccattgtaattttgtatgcttactactactactaccactacaacacttgttgcttcatttttcttttaaacttgtactgagaaacagaaccatcaattttctctgccttctcattgtgcaataaaattcttaccttgaaatctgaatgttgatgatcatactgggcctcggcgtgacgaagaagatggataattattgcatgtttaagtattttcctatcacatacgacaagatcaacattctcccaaagtactaatcagtgcgaaaataaaatagttggaaaatggcagcatagttatgctttattgtgtct

SEQ ID NO: 123406 - DNA, 1704 bp, Glycine max
  Clone ID: PAT_MRT3847_82443C.1
tcacttaggctcatgagtcacagccacacatccacgttgcctcctcttgcttccctattaaactttacgagccataacataacatggaacctgaaaatctagtttcttacaaggctctactctactgcttcaccttctgctctagaaaattcagtggtgatacatggcttcggctactctctctgtagccaaaccagcccttcaggcaaatgggaaaggcttctctgaattctctggcctccgcagctcatcaggcttccttcccttttctagaaaatcttcagaggatttccattctgtcattgccttccagacctatgcagttggaagcagtggaggatacaagaagggtgtgacagaagcaaaactgaaggttgccataaacggatttggaaggattggaaggaacttcttgaggtgctggcacggtcgcaaagactcccctcttgatgtcattgccatcaacgacaccggtggcgtgaaacaagcctctcaccttctcaagtacgattcgatcctcggaaccttcgatgctgatgtcaagcctgttggcagcgacatcatctctgtcgatggaaaggaaatcaaagttgtctctgaccgcaaccctgccaaccttccttggaaggatttggggatagacttggtgattgaaggaactggggtgtttgtagacagagaaggtgcagggaaacacattcaagcaggagctaagaaggtgctcattactgctcctggtaaaggagacatccccacatatgtggttggtgtcaatgagtatgattacagccctgatgaacccatcatcagcaatgcatcttgcaccactaactgccttgcaccctttgtcaaggtccttgatcagaaattcggtatcatcaagggcaccatgaccaccactcacttcctacaccggcgaccaaaggcttctcgacgcgaggccaccgtgacctgaggcgcgcccagggcggcagctctcaacattgtccccacttcaacaggagcagcaaaggcagtggcccttgtcctcccaaccctcaagggcaaactcaatggcattgcactccgtgtgccaacaccaaacgtctcagtggtggacctcgttgttcaggtctcaaagaagacctttgcagaagaagtgaatgcagcattcagagagagtgcagacaatgagctccagggaatcctctctgtgtgtgatgagccacttgtgtctgttgacttcaggtgcactgatgtgtcctcaaccgttgactcatcgttgaccatggtcatgggagatgacatggttaaggtgattgcttggtatgacaatgagtggggctactcccaaagggttgtggatttggctgacattgttgccaacaagtggaagtgagagccatcaaattctgaattggtaattcaattattatatgtatgtaccatgccattgtagttttgtatgcttactactactactactactaccactacaaacacttgttgcttcatttttcattctaaaacttgtactgagaaacagaaccatcaattttctctgccttctcattgtgcaataaaattcttaccttgaaatctgaatgttgattatgattctaggccttggggtcacgaacaagatggataatgattgcatgtttaagcaaatatcatatatgagaagatcaacgtacattctctcaaaaaaaaaaaaaaaaaaga

SEQ ID NO: 123407 - DNA, 133 bp, Glycine max
  Clone ID: PAT_MRT3847_82444C.1
taaaacttggtttccttctaatgcgaacctctcttcttctacgctgccacaattggattcaaggcagctacgatgtcttgtcccgcactccatcttccatcagatcacaaagagaccctaacccaaaccctag

SEQ ID NO: 123408 - DNA, 313 bp, Glycine max
  Clone ID: PAT_MRT3847_82445C.1
acggagaagacgacagaagggggctgaacatgatgccagtgttgttgatcttgaaggtggtgcctgtttcatcacccagtggaaatgtgatgggagatctgggtgatgtttacagcacaatgctcacaagccttgatttgggtttggcttgtttctctgagaaagtttccaacttgagcaattttgtgatgcatgtggaaaccaaggagtgtgaacttgaggccttggaaaaagaagatcacattggtgaaaagggtctggaggttgatctggtgtctgggggggtgggttcaaaagggaaagaattggaagg

SEQ ID NO: 123409 - DNA, 320 bp, Glycine max
  Clone ID: PAT_MRT3847_82446C.1
agatttgttccgcggggggttcgaagaacaagtagttagagaaagatgctagagaatcttcaggttcctccgtcgacaacggaatcgaccccagtgctgaagtgctatgctccacccaaccagaggaacgtttctgccaacaggcgcaaatcatctggtaagctcactccttattttctcccaatctttttattcacgtgtactttgctaactttttttttcaatgtcaaagaaatatagcccccccccccccctttttttctaatgagcatgatgtgctttatttagtaaaattaacactcttaatgcgtagatttttt

SEQ ID NO: 123410 - DNA, 151 bp, Glycine max
  Clone ID: PAT_MRT3847_82447C.1
acccacccgtccagcccatcaaccattcttgtgtcacttgccttcaatgaccctgggtcaggtattgttcctgctgctatctccctgctaccactttcgagcgagtacgtgatcccacacctgggactggatctggaacatcggttctcaa

SEQ ID NO: 123411 - DNA, 586 bp, Glycine max
  Clone ID: PAT_MRT3847_82448C.1
aaaagtttaatatacaaaaattgtctatagaattatgtgaagatgttgtttgatgttaatctgaatttcaagagtagggcaagacttgctgcagttgcctactactccgcgtcctcgcctcggcgcgccccccttctctctttcgggtttgatttttcactcaacccctgcactgcagttccaaggctagctgtttgttatggaggacggggataacattctggatgccatatacgatgaggataccttagatgatgacgttgacatggttgatgttgaagaaggagagttggtggagcctgattcccaaaatgttttgggacaaagcagtgccggagatatcaacgaaccaaatcaagaacctctcagtaagaaccaaaagcgtagagctaacaagaagaagaataagaagaaaaggaagggttcaggatctaatgccatggacataaacagatttgtgttagatacatgtcgacggctcaaagagaaaaagtcatacatggtatacactgctgtgggttgccatggagactctgcatttaatgatcttggcaatgaagtggatgcaattcaatacttgttgagg

SEQ ID NO: 123412 - DNA, 231 bp, Glycine max
  Clone ID: PAT_MRT3847_82449C.1
ttgtttgtttttttttttttttttttttttaccagccgctgcccctgacttaaaggtgttaggggcatctcttggggtttaacgcaccttagttcatccaaaaaattccaactaggctggctggaataatctcagtaaattgttgtagcctaaagatctaaacctcaaaatcttgttttgctcaagaatagctcaactttttttgggcgttttttggaatgaacaatttcc

SEQ ID NO: 123413 - DNA, 661 bp, Glycine max
  Clone ID: PAT_MRT3847_8244C.1
aatatgtagatggtgggccaacagaaaatactgctccaccttctgtttatggtactctaacacagatgaattcagccgatgatccccgaagtaatttcaatgtgacttggcagtttgatgtggagcctcaatttcagtaccttgttcgacttcacttctgtgacataatcagcaaaagtctcaatgaactgtacttcaatgtttacattaactcctggtttgttgccaaggatcttgatcttagtacaataaataataatattttggctgctccgttttttaaggatatgattacagccccatctgccagcaccaaaattttcataagcataggcccttctactgtgaatagcaattatcctaatgctattttgaatgggctggaaataatgaaaatgaacaactctgtgagtagtctcagctcatcaacagctgtgcctttgtctagtacttctggttcaggttctaagaaagttggcttgatagtgggtgtgagtgttggggcattccttgcagtggtcattgttggagttttcttttttctactatgcaggaaaagaaaacgtttggaaaaagaagggcattcgaagacatgggttcccttatcaatcaatgatggaacttctcacaccatgggaagtaaatattctaatgcctcaac

SEQ ID NO: 123414 - DNA, 411 bp, Glycine max
  Clone ID: PAT_MRT3847_82450C.1
aaaaaaatggttttgttcaaggttttcttttggaccaaaaaaaacaagggggcggggaccaacctttttttggcaaggaacctggattaattttccacccccggttcgttggaaaaaagggttacacattatttttaccggaaaccagggtgttacgcgcaacccggatatacaacactttccccaaatgcgtccccttaggcgggaattcaaacggggggggaaaaacccatttccttttttcaaaaaaaagggggggggaaaaaaaaaggttggtttttacccccccggtccattttaaggaaaaaaggggggggaaaaaaaaaaggggaaaaaacggggggaactggctatttctgaaccccttggggaggcccagggctaacgggggttctaccaacgaggggggga

SEQ ID NO: 123415 - DNA, 458 bp, Glycine max
  unsure (1)..(458): unsure at all n locations
  Clone ID: PAT_MRT3847_82451C.1
cnnnnggggggnnntttttntttatgtatttttttttttttttttttttttgcggcacctaaaaaaatttcaatcggaggaaccttcaaatttaaaatttccttttgttgtaaaggtttcacgttaaaaaaaaaaatgtggatgggaactttgctataaaacatttgggggctttctcattgggcaagaatcaaaatattttggcaaagtgttttttgcagcctcacttgctgggttttgcttttgggagagttttaaccatgccacttgcaattttccaaaaccaaaattttttcaaaactgccaacccagaaggccccttgatcaaggggtaaaaaccaaaaagaaagattttctttaccttatccaaacgggtcccttttgggggaaaaagggacttgaacaggaaaattcttgccccctggcccccggtggtaaccttttttttttaacataaa

SEQ ID NO: 123416 - DNA, 399 bp, Glycine max
  unsure (1)..(399): unsure at all n locations
  Clone ID: PAT_MRT3847_82452C.1
ccacgcgtccgaccgggtctctttctttcatttcaaaaaatttatagaatttcgattttgaaatgaaagaaaagtgtggggataaatataaatgacaaaaagatatgggaacataatcttnnaaggaatgatgnaaggagnagggcattnnnggncangnnanctagggagatggaatgctaggatgggnnccttatatatgctggnggggggagggggatnnatatgatgaatgttagaggaactggtcgggttttatcagaagcttgtgatttagtttttgatgcaggaagtgagggaaaacgattcttaattggtgggtacaagaagaaaagcagggggatttagggagcgacggggcttggagatgagaggcttggggngggggtttatggttaa

SEQ ID NO: 123417 - DNA, 537 bp, Glycine max
  Clone ID: PAT_MRT3847_82453C.1
cccacgcgtccggtcacattgaagaaaaagtgaacgtcacaacaatcaatatcagatttttacggttatgatccatattcaaaaaaaaaaaaaaaaaaaataaaaaaaaaaaaaaaaaaaaaaaaaatataaaaaaaaaaattataataaaaaaaaacaaaagaagccaaaatacaaagcgtacagaaaaaaaaaaaaagaaaataccggggggggcccctttaaagaaccaaatatctctgcctggaagatgcaagtgtaaacttcttttttgagcgaataaaatctattgcttggggcgcgttacaaaacaaattcatttggtaaaaccccgatgttccccaaatttatctccttgaacaaaagccccttttatcctattgtgaaaaaaaaaaaaggccggcgggggctcctttagaaacaagttgaccaactcatgggtgaaagggaaccccccttgtatagggtcacttaaagtggagtgagtgggggtccccccacagtgacccgaataattaaacactgcctttacccccc

SEQ ID NO: 123418 - DNA, 535 bp, Glycine max
  Clone ID: PAT_MRT3847_82454C.1
attagttccatcatctagagttcctcctgtggttgtattcaaaaaccctgctcagccggaaaaaaaagtaaaacccaagacatacggcaaatcaataaagaaaaagaaggaaaaatggacagatttgaaagttggagatatttggtctggaacaccgacaaaaacggaaagaaagacaagacttaaacttaaatcagttttaccagctttggagttacctcacccaggaacttcgataaatccagctattgaagatcatcaagatcttatcaaaaaagctgctgaagttgaattgaaaaagttgaagaaagacgaaaagattcaaagattactccatggtggtgttaccaaaaaaactcagtctcaaatgcaaaaagaatggcttgaagagatgtctgcaggactgccagtcgcaaatgaggatgatcaagaaaaagatgacgatgaaattgttgctgaagatcctgatcttgcgaatcccaaaaaagtaattagagccgaagaccgtaaatcaaaatctaaaagacgaagagaa

SEQ ID NO: 123419 - DNA, 275 bp, Glycine max
  unsure (1)..(275): unsure at all n locations
  Clone ID: PAT_MRT3847_82455C.1
aaaattcttattacacattctccctaccaattttataattcatcttctagtcacactactgcatgttcaaattgcaagtgtggatggttcactcacatacactagtgcatttatactatatctacaatctctgatgtagttttttttatcactcattaatccatnttttccatctacaactaggctttcacaccaacttgtaattttcaagtttaattcttacattattcttctcttagattgtttcattcaaaattatgcttcaaaactatatt

SEQ ID NO: 123420 - DNA, 227 bp, Glycine max
  Clone ID: PAT_MRT3847_82456C.1
ggcggcgcgtagctgatcagtctgcttattgcgattaccgcacacccccatcacgcatcgtgaacgttgcgaacacaaaggatacacacctggctagtgaagactgcaggaagcacacccgtgaccacgttacccagtacaaaagagagcatgatagcgttcgcgcccatggaaaacgccgttgcgatcgcaaaccatatggctatggggggcaaactaaccccgtc

SEQ ID NO: 123421 - DNA, 390 bp, Glycine max
  Clone ID: PAT_MRT3847_82457C.1
ccgttacggaattccccggtcgacccacacatacgtacacctgccagaacactacagaatttttttctaaaaactattctaaccctaatcgctggggtttttaaaaaaaatggggtcatccaaattaaaccaccattctcacattctacttcccttctaagaacctcaacacacctctatccctaccttatcacactcttatttttcatactttatgtcacaatccaatatccctaacacttcatatacatcttttctcaacatttacaaatctactcttattaccctcacaaactcttatccactcccatctaaatcataatccactcactcttattcattcaaattactcatactcacttaccattattaattcatattattattatc

SEQ ID NO: 123422 - DNA, 2157 bp, Glycine max
  Clone ID: PAT_MRT3847_82458C.1
aattctgctcgaggtcattcagtgaaagctcatagaccaaatactctgtctgcactccagtgcttttacaatcatggaaaatcatggtgcagtgtctgaaaccaagtgtacgtttgatgttttccttagttttaggggtgaagatacccgtcacacatttacttgtaaactctatgatgctttgtggctgaagggaattgacacctttatggataataaagagctgaagaatggagacaaaattggccctactcttcataaagccattgaagaagcaaggatttcagttgttgtcttgtctgaaaattatgcagattcttcatggtgcctcgatgaacttgtcaagatccacgagtgtatggagtcaaaaaaccagctcgtttggcccatcttctacaaagtgaatccctcggatgtgaggcatcagaaaggaagttatggtgtggccatgactaagcatgaaacaagtcctggaatagacttggagaaggtgcacaaatggaggtcaaccttgaatgaaatagccaacttgaaaggaaaatatttggaagaagggtaggtaaaaatggtaaaatatatatgttgttattaattttcgctgtttgcttcttgttaatttatggccaaggatgattgttcatatttcgatttgtggcgtgtctttggctttatatacacttttcctcatcatttttgttttacgcaaaatgaagtttgaacctcatgtgaacatcttttaacttcagtgtacttctgaatgtcatgaaaatgtccgatatataataactacttctgcaggttagtaatttttttcctcctttctattttacttttacttttgggtattctgtctatgaataactgtgttattataggccagaaattttatttccaaacatattttctgctagggatgtaacactttgccgattatgatccaaactcaaatttgtccccagctagaagtaggtcgtagaattaatttttgagaaattcaaacatggtactaaactaagtttggagtttcaatagtatgtttcaagtccccaaatgggtacccaaacatatcctaagtgagctggattggaccagatttgttctgtatattttactacccaaccctgatcaatatacacaaaatataatttggcaaaatcaatttgttgcttaatttaaagagcattgttttttcaggagggacgaatccaagtttattgatgatcttgctactgacattttcaaaatagtatcttctaaagatttatctagagaaatgtttatagtcggacgagagtatcgagttaaagaattgaaattacttctagatcttgagtctcgtgatatcacttgcctgttagggattcatggaactggtggaattggcaaaactacacttgcaaaagctttgtatgactccatttacaagcagtttgacggtacaagttttctcaacgttggagaaacctcaaatcctaagacagacttaaaacatctgcaagaaaagcttttatcagagatacttgaggacgacaaaatccactggagaaatattgaagaaggaaccgcaaaaatagaaaggagacttggttttaaaagagttctaatagttcttgacaatgttgatgacattaaacagttgaataatttggcagggaaatgtgcttggtttggtcctgggagcaggatcatcataacaacgagagataaacatttgctagatcttggtgaggttgaaaagagatatgaagtgaaaatgctagatgagaaagagtctctagagctcttttgtcattatgcctttcgaaaaagttgtcctgaatcaaactataaagatctgtccaatcgagcaatgagttgttgcaaaggccttccattggccttagaagtactaggctctcatttgtttaaaaaaaatgtggatgtatggaaggacgcattggatagatatgaaaaaagtccacatggaaatgttcaaaaagttcttagaataagctatgatagcctgttccgccatgaaaagtctatttttcttgatgttgcatgttttttcaaagggcaacgattggattatgtaaaaactgtactagatgcatctgatttcagctcaggagatggtattacaacattagttaataaatcacttttaactgttgacta

SEQ ID NO: 123423 - DNA, 548 bp, Glycine max
  Clone ID: PAT_MRT3847_82459C.1
gtggtttccctatcatctcgcggcccttgggaaatcaccttgtcctcaaggtgatagtcatggcaaagagtggaccaatcctcccaagatgtatcatctggggataagccatgccattgaaccaagacttcccaagcgtccaaaggggttctgcgataatccacaattgctgccggagtgataataggttgatcattgtgaaattggtctggtaaaggcgcgggagaggtggtctccagttgaccacggaatggtttgagaagagaataatggaagacctcatgaattttcgtatctggtggaagttgcaggtgatgagctactttgccgatggcttcgataacccggaagggtccatagtacctccttgctagtttaccagaagaactctgagagcctttggccgaggtctatctatggggtcgcaatttgagccaaacccaatcaccagaattgtagtttacgtcgcgtcggcgacggtctgcctgttccttcatgcgactttgggctttcaagagctttctacgaaccatttggaaggtctcatc

SEQ ID NO: 123424 - DNA, 250 bp, Glycine max
  Clone ID: PAT_MRT3847_8245C.1
actcgagccgaatcgggtcgaggtacaaaagaatagagccaagaggaccattccaacaaacaacctataatacatgtatgaactatcaacgtcctggagcaagagacgcattcaggtcaccaccaccgggttggaatcggacaaggcaagcgccagtaaatgctaaccttaatccaacaatagacaataacaggatagcatttactcctcctggaccaagatactcaatgccttcccatgagaatatctg

SEQ ID NO: 123425 - DNA, 815 bp, Glycine max
  unsure (1)..(815): unsure at all n locations
  Clone ID: PAT_MRT3847_82460C.1
gaccatgtcaaatgaaacccgacatgctctgccaattgccctgaagaaactttttcagactcacaaagtttgcagcttcaaattgatatgcgaaggattgcgcgaaatggcagtttccaaagctatgctttcaaagggagattctaaaatggctgtggatgcagctcacagtcttgatggtccccataatgagttgatggctgtcataagtgaagttgcatgcgaaatcaatggttcttatgtgctgaagtcatcacccgatgatccattcagggatgttgtaattgatatgctttgtggaagtggacccaatgccaagctgaagaaggctgagatacttgaagctgccagaagaaaactcggtagggaggtcgctagcaatgaatataccaaggtcatgagcgagttatgtgtgtcaaaaggttctgtttgggtcttgaaaagcggtgatggaagtaagtaagcaatgatccgaggtccccgaggattgaactgcccacctgctcatgaatggaagtcatactctgctttctcatgagactaccagagtttagtttattggtcatagtcattattctcaaatattcaaatcttttccaactttttagctttagataaggaataaatttaaagagaatatttttttattgttcgaatcaaaagaaaaaggtagagaagttagatgaaagaaaacaggaatggacaaagattgccctgttagctattaatggaagttatatatcatattttcttctctaaaannaggcgcgcttaagatccagctacgacgcggcaggacgtcatagtctctatag

SEQ ID NO: 123426 - DNA, 1798 bp, Glycine max
  Clone ID: PAT_MRT3847_82461C.1
agctcggaatgaggctcgaggcaacttgcaaatgcagcaccgactgattattgttcaaacttcaaacttcgaaatcaaagtttctgattctgtctatttccgagtactgactagtctttattacataccagctcacccttgatttggtttccttatagaggatcaaaagtcaaaatcataatcaactacaacccaccaacaccaccatgcagaggtggaagtggaacagaaagaaaccccccattttccctttgcttgtgcttattttattgtttttcatagccttctcaaccctccacagtgaacacaccatacaacgaatccatgaaaatccagatcatgttcacaaccaccaagaagtttcttcagccacctttgtcaaaccaaacctctctggtcacctaaagcaagcaccagaggttttggatagattcagtagatgcaactccactgtggagtatagtggccggaaaattgcttggctcggcgattctcggcattccggtcactggagtgcgaggccggagagttgtgatgttttttcaggcaaatgggtgtttgataatgtttcacatccactttacaatgagtcagattgcccttacatgtctgaccaattggcctgtcacaagcatgggaggtctgatttggggtaccagtattggagatggcagccacataactgcaatttgaagagatggaacgtgaaagaaatgtgggagaagttgagaggtaaaaggctaatgtttgttgagattcactaaatagagggcaatggatatctatggtatgtttgttacaatcagtaattcctgctgataagagatcaatgtcaccaaatgcccatctcaccattttcagagcagaggagtacaatgcgactgtggaatttctctgggctcctcttcttgctgaatctaattctgatgatccagtaaatcacagactagatgaacggataattcgtcctgatacggttcttagacatgcatcactgtgggaaaatgctgatatactagtttttaatacatacttgtggtggagacaaggcccagtcaagctattatggactcatgaagaaaatggagcttgtgaagaattggatgggcatggagccatggagttagccatgggagcctgggcagattgggtatcttctaaagtcgatccccttaagaagcgtgtcttttttgtgaccatgtcacctactcatctctggagtcgagagtggaaaccaggaagcgagggaaactgttatggggagaaggaccccattgacaatgagggctactggggaagtggctcagatttgcccacaatgagcactgtggagaagatcctaagcaatttgagctcaaaagtttctgtcatcaacattactcaactatcagagtatagaaaggatggtcatccttccatttttcgcaaattttgggagccccttcgcccggaacaattgtcaaatcccccatcttactctgattgcatacattggtgcttgcctggggtacctgatgtgtggaatgagttactattccattttttgtagaagttgtttattcaattttcttgattgaatatagcagccaatgtctgcattttttaaagagtggcaaaagctgcttacattagttgtttgcacgcaagggtggactgtttttgacaagtgaatgctgaaaatttagagatctcaatgttgatgcgccacgttaaaacttggcttcacccaaaaaggaacaaaaaactaagttatttgtatgatttcttttgtatgtgatttattcccttctccctttcc

SEQ ID NO: 123427 - DNA, 924 bp, Glycine max
  unsure (1)..(924): unsure at all n locations
  Clone ID: PAT_MRT3847_82462C.1
acaagggatctggactctaaacaaagtcactgcttctctagttttgcaacatcaatcttggctcagagagaggttgcaacttgcaaatgcaccaccgactgattattgttcaaacttcaaacttcgaaatcaaagtttctgattctgtctatttccgagctcacgcgtcgatttggtttccttatagaggaaaatcaaaagtcaaaatcataatcaactacaaccctccaacaccaccatgcagagctggaagtggaacaggaagaaaccacctgttttccctttgcttgtgcttattttactgttcttcatagccttctcaaccctccacagtgaacacattatacaacgaatccatgaaaatccagatcatgttcacaaccaccaagaagtttcttcagccacctttgtcaaacccaacctctctggtcacctaaagcaagctgcagaggttttggatagattcagtagatgcaactccactgtagagtacaatggccgcaaagttgcttggctcggcgattctcagcattccggtcactggagtgcgaggccggaaagttgtgatgttttttcaggcaaatgggtttttgataatgtttcacatccactttacaacgagtcagattgcccttacatgtctgaccaattggcctgtcacaagcatggaaggtctgatttggggtaccagtactggagatggcaaccacataactgcaatttgaaaaggtgtagttccctgttactgacactgttaactgaagtggaaggaaaggacatgaactacacccaacaaattttcataaatgggagaccaaggaggatgggtttttcaggggactacaagncgcctatttataggggactaaaaatatattttaacccgccaacaaagggttggtcaggttggtaacggattggaac

SEQ ID NO: 123428 - DNA, 401 bp, Glycine max
  Clone ID: PAT_MRT3847_82463C.1
tcccactcgtccgacctggctttagttttttcttctctcccaccaacatacgttattagaggggtttctcaccatgccagcgtgtgtccatcatcttgatcgttaatttcaagccaagacatgcttggtacactgattacaagctcatgattttcaacaaccatgcagctattattgttattgccttactagtacatgtgaatgaagctattataagttacaaagctttctccctaaagaatgaattgaagaaattgatacaccttgtttttcatgccatcgcattaatacttgtaataggcggagtgtatactgcctttaatgtttacaatgaaagacagattgccattttgtacagcttgcattcattgctttggattggcgttatttgtctttatggc

SEQ ID NO: 123429 - DNA, 318 bp, Glycine max
  Clone ID: PAT_MRT3847_82464C.1
ctacctcataaagacaggaacttttaacgtgctgtcttctaaagtgaaaattgattggcaaccgatgtttataaacaagaccaaacgctcccattaataattctctcaagaaggtggcgaacaccccagctgttgatgcttgggcacttttgcacccatggtattcgcagacgagggtaaaacccacttggcataggggctaccggatttggtaacaggcggcaggttcaatgtgactcgcctagcttatgaagagtggcccactcccataagagggcggaagaagccgttcggaaagtggaggcttcgccagtaggc

SEQ ID NO: 123430 - DNA, 439 bp, Glycine max
  Clone ID: PAT_MRT3847_82465C.1
gttcagagctgagatacgggtacagttcatgcttgtgccaggtaatctgtacaatcggggtttctgtactgatctggggcgggctacaaatgaacttgttataagagttcagcctgatgaggctatttatctgaagataaacaacaaagttccgggtctgggaatgaagttggatcgcagtaatctcaatcttcactacgctgcaaggtattttccttttactctaaaaatcaacttcatgggacccctgaaatacactcttcattggattattaactcacaaacttacctcattcttagtttcttatcttcttaaactggtagcaagatgtgacattgatctaatgtacatataatctttatgggcctgtggcatgtttgcgactctataattgcagtatatcttgctccgtaaatgaaattgggaattttggcggat

SEQ ID NO: 123431 - DNA, 895 bp, Glycine max
  Clone ID: PAT_MRT3847_82466C.1
gtccggaattcccggcctcgacccacgccgtccgaaaaaaaacatttttaaagctcaggaataaaaaataatacactccctaaatttaacaactaaaacagtaattaattagagcatcattggtgggtcttaattgtttattttatggttgcatgaggtttggtttgggtcataatatccgatgcatttatcatctaccctgttaagtgtgaatgcatgaagctgacagatcacaccatggccttccactaaaataaatgccacagcttcgcacttggtagcagatgctccaaaacttccagcaaggtaagtcagttgattttgacaatatcatcaaattggtagtattaaaaataattaaattaatacattgttttaattttttatattacgtgaaaacaaatttagttcttaatttaatcattattaattaattttatctttaatgctttggaaaagtactttaattttttgttttagtgatcattaatcaattgttttctactccctccatcctataactattattttgtaagaagaaaaataataaaaaaaattatcattttagttctttaatgtaaaattattatttttatttatatctcatatataatattaataatgaacaataaaatttataaataaattaatgatgacaaatttaatttcataaaattattactctatttccttaatttaataattttttcttatttctataatgaatgtagtacaacaaataacaaaagaagtatcatttagaattgaattaattatcaatcatttgtatggcatcaggaaacgaaatagaatgaatgaaaatacaaaacagagaaatatagtagacaaagataatgagaaataaagtgaatcttagaaatgtttggtttgatag

SEQ ID NO: 123432 - DNA, 295 bp, Glycine max
  Clone ID: PAT_MRT3847_82467C.1
attatactaacgataataccgctgcaacaactacggaccatactcacagtgcaggtggtgattttgctgtacagactgaaacaaattagaatgctggtaagcttattgctgactatagtattagtgaacgtggaaaacatatagaagatatacccaaagatgttacaggacgagacttctatcttgtatgcaagagacttcagaactgcatggggacggaatatagcgagcctaacgctactgcacagcatgtgggagcaatataaattattattgatagtttagtatgatatga

SEQ ID NO: 123433 - DNA, 1069 bp, Glycine max
  unsure (1)..(1069): unsure at all n locations
  Clone ID: PAT_MRT3847_82468C.1
ctttcaaatgctactgttcacgttcaaaaaaaaaaaagaaaaagaatgaaattgaatacatgaggtcttgggttaagacttggattggtttgaagacttggttgactttgttttgggttgtgaagcatttggtgtcctctacggacttagaggtcttgtaatacggctctttcgcatagaacgagtttttttctttctttctcaaacacgtgccgaattctgttcaattcatactctttatacattcccttgaagtgtttgntttcgacaggttctcactgctggtttgtgtctgggtgtgaaatatggtggtaaagctgcagacacgtgggcagtaggagttactttatactgtatgatattgggtgaatacccttttcttggagacacccttcaagatacatatgacaaaatagtcaataatcctttagtactccccaacgacatgaatccaccattgaaaaacttaatagaaggacttctttccaaagacccaagtttaaggatgactttgggtgctgttgcggaagatagctgggttattggagatgatggtccaattcctgattacctttgttggtgcaaaaggaagagcttgggaattgaggacaatgatgagagcaatactgactaattttttttagtttgcatttatgtacagtggaaaagcagtggttttttttctttgttagactcttcactggtattttatgatttgagtcagtcttaaaggaatctcaatttaagaaaatatagttcatgtaagcatgataagtagcagaggcagaagaatgaatgtttatatttttgtgaaagaatttggtgtctagaagtagaaaccgagagaggccttgtacaatgatccttacacgcatgaaatgaattttgagctctagcttccaggcatagatattcttagtttaaactttgtatgtatcatctcaattaagaaatggcaaccccaaatgttttcactgtcatgaaacaatattgtggttcaaagatcctgttagttctgattacattattgtttatttatcattaataattaatcttttactataaaagg

SEQ ID NO: 123434 - DNA, 144 bp, Glycine max
  unsure (1)..(144): unsure at all n locations
  Clone ID: PAT_MRT3847_82469C.1
nncgtcgcaggcncgcgtacgtcagctcggnattcggctcgagncccatttcagagacaaannttcattcaaacannacnncttgtgatngtncgnagggggcgactntccggtgaggcggcnnttgtggngtnttncnggggg

SEQ ID NO: 123435 - DNA, 296 bp, Glycine max
  Clone ID: PAT_MRT3847_8246C.1
ttagcggtttatgtttaccctccgaaccccttatccgggggggttcttaaacccgccggggagtcataaatccacaacacctgcttcctcaaagtcctcgaccaccgtaccttctcctccgacgcagccgtctcccccgttccctccttcttcgtcttcaccctcttatacctccttttgaccttactctccctcttttaccctcaacgcctacgacaagctcgccgcctatgacttctccatcgacacccccttctggacctcattctacatcatcttctccgaaacctactcct

SEQ ID NO: 123436 - DNA, 502 bp, Glycine max
  Clone ID: PAT_MRT3847_82470C.1
cccgcgtccgataatctccactccaaacaaacctttttacactgacacatgtgtatgtgcatgataaattctctttcagtttgaggtgcaaatccaacttggtcatcactggttctgagtgatcttgcttcagatcaggttttttgctgagaacaactcagattttcagtacactgctactgccaagcagaagttaaattagtgtggataatgattgccacgcttgaagactagaagcaataattcagcagtgtttgtgtcaagatctcttttgcagcgtgagtatatcaaagaactgggctagttctcaatgcaaacacctcagaatcataaaatttcttatggctctggtgggttctatgttgagccagtgcaaaatttggactcatattgcataccatcaagcgagaacatagacaattactcttcctctgataacagcagccaaacaacctacccttcagtccaaactttagaacaatattgcacccttgaatctgct

SEQ ID NO: 123437 - DNA, 327 bp, Glycine max
  Clone ID: PAT_MRT3847_82471C.1
ccggggcggactgcaccagactcagcgtcttcttaccgcggcaatacactactaaagtcgatcgtaataatgctgtcaacagctaccataggctacctaatgacattctacatagggctctactagtgctgatcagatgagatggacagtggctcttgatgacattgcatattaacgatgaaaaacgttgattgatataacttgatcacattgaatagtatggcgacagatgtatcgatcaatgtctgatgctatatagcgatgggatctgcagatagttctacttctaactgttgtcaaaagtagcgggcgaaaacaaggatccaa

SEQ ID NO: 123438 - DNA, 447 bp, Glycine max
  Clone ID: PAT_MRT3847_82472C.1
accagaaacgattgaaattcacctccgtttagttttttcccctcggtggcccttataggtttgggctctcccctctcgtaatggattcaacactatttctaaaccccgcagactttgaattaccccacgactacgacgaaaacgcagaagcaaatctcattgaaattcccgcagactttggattatcccacgacgacgacgacgacgacgaaaccgacgatgaagaagaagacgacgacgacgacgaagacgaagagtatgttcccgccggggcgcctcctagggtttcgcacgacgctccccgtgtcagtacatccaacagcgaagtcgttaccctcatcgaatcgcagaacaagcgccgtagaaccgaaggaggcgaggcttcttgttccttcgcgaatgggagcctgagccaagagaacgagtgggccagccctgacgttgacg

SEQ ID NO: 123439 - DNA, 387 bp, Glycine max
  Clone ID: PAT_MRT3847_82473C.1
gcgccctggcttcgagcttttatttttgcttcaattccatttttgatattttacttcattgcattgcgatgatgcggcatgccacgagccatggcgagatatttctaagctcaaggctcaaacccaatcatgacgctggttcggcgacgccgaagcatttctatctgctgaagatccagctagacgacgttcacgatcgcctgaatctgctgcatgacaggctttcgactgggtggagaaagcctttggacgacagcctgcgcatctcactgatgacagaactgccccaatgggtgttgtacagctaactgcacaccagctagccgacatcctgtgtgatgatgcaaactctagatcttacatgaaacttagctttactaaaggccg

SEQ ID NO: 123440 - DNA, 396 bp, Glycine max
  unsure (1)..(396): unsure at all n locations
  Clone ID: PAT_MRT3847_82474C.1
tctttaaatacttttcattgtataccccacacaaactcatatcaacatttacgactgcgcccaatattgagaagtttataactaacctatcatttantatttcacaccaccaccaataattttcaacatatcaccaccctaattctcaccatgttctcaacaataaaattgtttattaagaggatattattttattatcccgcctcatccacattcttcaccaccacccttaaactcattataaaatcaatgtcgtggaatattaacaaattcctttacattcccctcttctattaatagaaaaatatttattacaacgatcgttactactctccaatgtattttaaatttacaaatgttaaaacacctataacctgttttcatatgtctttttat

SEQ ID NO: 123441 - DNA, 1786 bp, Glycine max
  Clone ID: PAT_MRT3847_82475C.1
gtagatggcacgacagataaaatttactctcttctgagatccaacataccataacaatgtccagttctgaaggtgttgttcatgttgctttcctcccaagtgctggaatgggtcacctcaacccatttctcagattagcagcaaccttcatccgctacggttgcaaagtaacactcatcactccaaaacccactgtctctctcgctgagtcaaacctcatctctcgcttctgttcttcattcccccaccaagtaacccaacttgacttaaacctcgtttctgtggatccaaccacagttgacaccatagacccttttttcctttcagttcgaaaccattcgtcgttctcttcaccttctacctccaatcctctctttactctcaacacctctctctgctttcatctacgacatcaccttaatcacccctcttctttccgttattgaaaaactctcttgtccctcttacctttacttcacctcatcagctagaatgttttctttctttgcacgcgtttctgttctttcagcttcaaatcctggtcaaaccccttcctcgttcatcggtgatgatggtgttaaaatccctggcttcacatcaccaattccaagatcctcggtccctcctgcgatccttcaagctagcagcaatctctttcagagaatcatgttggaggacagtgccaatgtcaccaagctcaataatggggttttcatcaactcgtttgaggagctagaaggagaggcactagcagcactcaatggagggaaagtgcttgaagggttgccaccagtgtatggtgttggacccttaatggcgtgtgagtatgagaagggagatgaagaaggtcaaaagggttgcatgagttcaatagtgaagtggcttgatgaacaaagtaaagggtcggtggtgtatgtgagtttggggaacaggactgagacgaggagggagcagataaaggacatggctttggggttgatagaatgtgggtatggttttttgtgggtggtgaagttgaagagggttgacaaggaagatgaggagggtttggaggaagtgttgggcagtgagttgtcgagtaaggtgaaggaaaagggtgtggttgtgaaggagtttgtggatcaggttgagattctggggcacccttcagttggggggtttctgagtcatggagggtggaattcagtgacagaaactgtgtggaaaggagtgccttgtctgtcatggcctcaacatagtgatcagaagatgagcgcagaggttattaggatgagtggtatggggatttggcctgaggagtgggggtggggaacacaagatgtggtgaaaggagatgagattgctaagagaatcaaagagatgatgagcaatgaatctctgagggtcaaagctggagaattgaaggaggcagctttgaaggctgctggtgttggtgggagctgtgaggttactattaagagacaaattgaggagtggaagaggaatgctcaagccaattgaagctactcacaaaggttaagtgtgtgtttgatttctcgtcacgtcaacacaaagaagctaagatttgcatttgctgcttctgcgtatttcaataattttgacatgatttttaaggttaacgcaagtataaaacataggaacaaacgggtattcaataaaagtagtttttggttctattgtctggggttatatttctaatttgtttacagttttgttgggtgtttaatgcttttattttgttacaataatgttatcttttccccctcttttgttaaaaaaaaaaaaa

SEQ ID NO: 123442 - DNA, 810 bp, Glycine max
  Clone ID: PAT_MRT3847_82476C.1
gtagaactagtgatgcaggacaccagcattcttggtgctgaaagtcaccctctccatttgcatggctttaacttctttgttgttggtcaaggttttggtaactttgatccaaagaaggaccctgtaaacttcaatcttgttgatcctgttgaaaggaacacagttggtgtcccatctggtggatgggttgcaatcagattcctaactgataacccaggggtatggttcatgcattgccatcttgaagtccacaccagctggggtctgaaaatggcttggattgtattggatggaaaacttccaaatcagaagctgcttccaccaccagctgatcttccaaattgttaattattcactagaaattgcgatcataacttgttttttactatgttttttgtgtttttatctttttccgggttttttcttcttttttctcctttgaatggcccggcattcttcatgggctaactgactactactggcatattttccctcgggaaaagagtaaaacggtgtaatgtatcaagatttatgaaaaatatcaaatttattctcggccataactttctgaatatggtgttggtgttttgtttttatctttttcccattttttttctctccttcgttcacatggccctttttgccattcttcccgggctaactgactgtcattagtttcatcttttatttttccccttcggggataatgtggaagtgtggaaaataatattaaggtgtgtcaacaataacagatttgctctcaatattgtaatattctttcacttcaatgagaaatctttgattttaatt

SEQ ID NO: 123443 - DNA, 392 bp, Glycine max
  Clone ID: PAT_MRT3847_82477C.1
gaaattttgatagacccgggatcacagggctggcgacgcttagacctggaaacaacacgcactcgttacttgatggcatgagtctctcaatttgacactacttctatgtgtacgaattcttaagggatagaaaatcactctctgagctggccacagactccgtgaatcaatttcttttacactctcagtttatttgctgaacactctcctattagatataagactgcgtgttatacttaaactccttctgtctctgtcttaaccctctgatataatataagtgcaacctggtgacattcttgcattagatgctcccactctggtatatcgtataggactccgtgggatgactgtcctattgcgctccttaatttcactctcttattctgact

SEQ ID NO: 123444 - DNA, 370 bp, Glycine max
  Clone ID: PAT_MRT3847_82478C.1
ctgtcgcgtgcgcggacgcttggttttggtgataggcttgatcgatccaaagggaagagagcaccggaaagatttgttacagaacatatcaggacaaatgcaccattgattgtgcagctacctgacagcggaataacaaatcttggcagaggacgctatctacgtacatactttgttgagaaggatggacaattgatcactgattggcagggtggtaccaggggccgtgctacccattggggagtggcacctgaaaatacacgacctatattaggttgttctgcgaaagaattacaaggaagggacaacacttcaaagggaactaacgccttgattgcgacaaacactgggatgtcactgatgcatggct

SEQ ID NO: 123445 - DNA, 469 bp, Glycine max
  Clone ID: PAT_MRT3847_82479C.1
aaccggttaaattagtagaccgctgtgtgatgaatttcatgtgtatgacgtcaattctttgtagttaataaggtgtatattcttttacttatacatggaataaaataattaataatactaagttgttttatacgtgaattacgtgcaggccaaatcgattttaatgcttgcaaatagaaaattggaggaaagagtgaggacaccaactgggtcagagccatcttcaccaacagtgatgcaatctaataatcaattgtatagtcctggcactggcccttccatgagaaaatcgttgcaaaggttccttcagaagagaaggaatcgggtccaagaagcatcgccataccgtcactagttgatcatcaaaattgttttcttgtatgagatgagagactttattaagatttaattactgatgtcttattttaatatacacaattattaggtttactacttcacgcttttcttt

SEQ ID NO: 123446 - DNA, 224 bp, Glycine max
  Clone ID: PAT_MRT3847_8247C.1
actttgtttatgtctttaccggggcgttcattgtgggatttcatcacacgctgatgatgatgcatgcttttctggcaaaccagtaatgtcaatctactgaagtgcattgattagttgccattcccaggagcatgcatggctcttgcacacaggatggtgtttgatgataacctggaatttggttacacacactagctgtttggtggatattttgcagtggatta

SEQ ID NO: 123447 - DNA, 175 bp, Glycine max
  Clone ID: PAT_MRT3847_82480C.1
tattgctgagttccattcaaccttgctctttgtctttgccggtggtgattcagacataccctatggcactttgtcatccaatgcatcactttatcctgctcgtttactgccagttgctatttgccacggatgtgcttttctcgtttcacaagcagtcggcgccaacatctctggt

SEQ ID NO: 123448 - DNA, 357 bp, Glycine max
  Clone ID: PAT_MRT3847_82481C.1
ggggtatagctcagccaatattatgactttgagggacgataaagcttatgtatgctacactttacttgtagctggtgaaagtgcaaggccattaaaggaacgcggctcatatgatcggatgggtacaaacaccccaaaatacggacccggttgaactctctagaacattgacaatatgaagaaacaagacacgagaccctgagctgttatgggagattatgcatggcctgggggcgatagagatgatgcctggatagcaagaaagcttgtgggaaggagtcgtcaccgcgattaataaaaaagatgagaccacaattactggacactctaccgctgatggagaaacgatgactgtga

SEQ ID NO: 123449 - DNA, 241 bp, Glycine max
  Clone ID: PAT_MRT3847_82482C.1
tacggctgcgacgagacgacagcagggcattgtcatatttgataatggagagtatgctttaaaagggtatgcttaaagggtctcaatagatgtattcgtagaccaactgaagcagctgggctgcaccttgtgtataagcattctggtgactcctaaagctccagcaacgtgacaatcagtctactgaaccaggaaaaggcggaattgggcagctgcgctgtaggacaatctcaattggaag

SEQ ID NO: 123450 - DNA, 2176 bp, Glycine max
  Clone ID: PAT_MRT3847_82483C.1
gattgattaacatggtggtagtaaaacgcttcagccatacgtgacattgaatgttgcttctccttaattaggatgttactgataccgaataaaggttggatcaagctcagtggggacataacattgtgtccgtcctttccttgactcagtgcaaacatttcactacacacttttttcaaccccaatcatcgttgttaacttggactatatttcaaagaagataaacatgtgattctctttcagttccttgccttctatggggttgaacttggagcacaaccataaccataacaatttcatcatttcatgcacagtagtagaagttattatcctctgctcagctcaccctatataaatcccctaattacggcacttaaaaacccaccaaagttttccttacgcattctcattgggttcagtgagagttctttcttttgtttgcaactcattaaagttaatgcctttcaagtccattcacactgttgtcagttttcatagagagatctagacactttaaccatttggggtgtgaagaacaatcaaactaacttgtggggtgtgtgtgaggttcatcaatcttcatcaagagtcactgaattggtgaccctttgatcaaagggccaaaagggtacccgggaacctccccaatcggttgaatttcgcccctccaaataatggtgtttggaaatagcctgttttatcccattctgggttttgcatcttttgtggttttcatttacatgtcttttgggggcataaagttcagttttttggaggaagggccagaattgagctttgtggagagaaatggaacacagtttgtgttggatggaaaagcgttttatgtgaatgggtggaactcttactggttaatggtccaatccgtggatgtttattcgagatccaaggttcgggaaatgatgaaaactggtgctaagatgggtctcaccgtgtgtagaacttgggctttcaatgatggagattacaatgcccttcaaacttcccctggtcgttttgatgaacaagctttccaggccttggattatgtaatagcagaagcaaggcaacatggaattaggctccttctaagcttagtgaataatttgcaagcatatggtgggaagagtcagtatgtcaaatgggcatggcaagaaggggtagggttaagttcgtccaacgattctttcttctttgatccatctatccgtacttatttcaagaattacatcaagactgtcttgaccaggaaaaatactatcaccggaattgaatatagaaatgaccccagcatttttggttgggaattgattaatgagcctcgttgcatgtctgatccttcaggtgacactctacaaggatggatagacgaaatgtcaacttttgtcaaaatgattgacaagaaccatctgttgactgtgggtctcgaaggtttttatggtccaaacgatccaaaaagttcaactgtcaaccctgagctttgggcatccagacttgggtctgattttattcggaactccaaaatatcaaatattgatttcgcctctgttcacatctatcctgaccattggtttcatgagcaagtattcgaagatcaactgaaatttgtctccaagtggatgctttcgcacattgaagatggtgacaaagtattgaagaagcctgtcttgttctctgaatttggactatcagaaacgaatcagaacttttccatgtccgaccgggaaaaaatgcatagagctgttctggacataatttataaatctgctaagagaaatagatctggagctggtgctctggtttggcaattcctagttgggggaatgaaggagttttctgatgaatatgggatggtcccatgggaaagttcgtcaactccccatgtatttattgaacagtcttgcagattggccaatgcaaagggatggactcaactggatgtaagtttcaaagaacattgttaacagaaacagtgaaaaacaaagtttacaaaatggaatagaaatcgtgataagataatttcctggggtcacatggcgggttttgtacaatatccttctggtttcaacttttcatcaccaaatattggagtggagtgattagttgagtacatgtgataacttgaattacattacagattcttataaacaaagttcaattcaaattgtgtcatactgat

SEQ ID NO: 123451 - DNA, 313 bp, Glycine max
  Clone ID: PAT_MRT3847_82484C.1
tgcggatacagtctacggcaactgcgccctcaccgtgatcatataaagtcccccttcttccgttccagtctgcctactccacatgctcctcggcggcgtcttcctggacgtcttcgacgccgagcaggccagcattttagaggatgctcgcgcccgctcgaagaaggccctgcagcgtgtccccgccgacatccggacccagtgcggcgtggcccgcatgaacgatccgcagctcatcatggatattaagcggtccgtcacgatccacgtgatggtccaagcccgcatcggtcacttcgtctaatcccaaatc

SEQ ID NO: 123452 - DNA, 658 bp, Glycine max
  Clone ID: PAT_MRT3847_82485C.1
tgcgaagcttcagcacaggaatttagtgaggctactggggtactgcattcaatcagaagaaagactgcttgtttatgaatttatggccagcaaaagcttggattccttcatatttgatgaaaacaagagcatgttgctagattggccaacgcggtcgctaattatcaatggggttgctcggggtcttctttatcttcatcaagattcaaggcatacaatagttcacagagatctcaaagccgggaatgttttgttagatagtgaaatgaacccaaagatctcggactctggactggctagaagctttggaggaaacgaaatcgaagcaactacaaagcatgtagttggaacctatggctatctgcctccagagtatataattgatggagcttattcaacaaagtcagatgttttcagcttcggtgtgttgatattggagatagtgagtgggaagagaaataaagggttctgtcatcaagataatcttctggcacatgtatggaggctatttactgaaggcaaatgctctgaaatagttgatgcaacaataatagactcactcaatttacctgaagtgctaagaacaattcacgtgggactactgtgtgtgcaactaagtccagacgacaggccgaacatgtcatctgtggttctcatg

SEQ ID NO: 123453 - DNA, 311 bp, Glycine max
  Clone ID: PAT_MRT3847_82486C.1
ggcccaaataaatgtgtctattaatccgcggggaattctagcacgaactccaattattctggataagcactacattacaattggggtgggggaaatcttaaaaaattctagatcagaaaaaagactacataatccaagggggtaagtctaagccttccccaacaaatgagattcttcacataaatagtacccctccgcatgcctcgaaatgagcttcactcatgaaagggttcactaaaaatattcctgggaaccccaagaaaaattttggggggtcaaaccctatgtttttaaaaggggggtggttttcc

SEQ ID NO: 123454 - DNA, 615 bp, Glycine max
  Clone ID: PAT_MRT3847_82487C.1
tttttgtaatccttttagatattctccctgtatggttagtgctgaaaagtaaagaatattctttcttgagtcatccaagttgtagactgtaattttggttatatcattggatggatcatgcttatttcataagctccttggtctcttttcttttcctattgaattcagatttttacgtaaaaaaaaaaaaatctaaattggtactcaatcatgttttgttaagttggtgatttctcattaccaataaagatcttgtgcgtgaaaagtagcaatttatttattttatttgttttgtacccgttggattgaatagagcttctaaataggtgtttgtgctcatttatagttatatgtggatgcaatgcatgatgttgaattattgttcatcttgtttttgtttttcaggtcatatcagtgttggctgctttttctattgtgtcccattttgttattaagtatagaaaattgtagtttatacctaagggttttacctctgtattctaatgtgttatatcttgttgactcattcattgataattgcaataaagatttgtgtgggattatttttagccaaaaaaaaaaaaaaaaagaaaaaaaaaaaagcgtgcctgccgt

SEQ ID NO: 123455 - DNA, 432 bp, Glycine max
  unsure (1)..(432): unsure at all n locations
  Clone ID: PAT_MRT3847_82488C.1
gtcgtgcgcttagtttaataaataagtttaaagaaattgacccattgacttgtggcacactggctggatggatagtgttatatgatcctcagctggtttaattggtttctagagcaaaactcaatctggtcctttggtcgctgaaaaattgcgcattggttttgaaaaaagtcacccaataatatttcaacattacaacggtagaacgattaagcgacttattctttcaattatttttcttttatttttagtacttaaattagtctttaaaaaagtaaatcatatatgaatttagtgcctgatggaatactattctaaattttcccttgttgaaaatattaactgaagcggatggaaaaagttagtgtcttcactgtcttgcgtttgtaattntgaacaattatttgttgattctttcttttaagattaaat

SEQ ID NO: 123456 - DNA, 2464 bp, Glycine max
  Clone ID: PAT_MRT3847_82489C.1
gcgcccacgcgtccgtacggctgcgagaagacgacagaaggtggcgcatctgcagccatcttctctcggagccgctattatccccagacgccaccgccgcagcaccagaagaagaagaagagtgatggctgagtacgacctaactccgcggatggcgccgaatctcgacaggcaccttgtgttccctctcctggagttcctgcaggagcggcagctctacgacgacgaccacatcctgaaggcgaagatcgaccttctcaacaacaccaacatggttgactacgctatggacatccacaagagcctctaccacaccgaggacgtcccgaacgatatggtcgaccgccgcgccgaggtcgttgcccgccttaagtcgctcgaggaggccgccgcccccctcgtcgccttcctccagaacgaggctgctgtgcaggagctccgagcggacaagcagtacaatctccagatgctcaacgaccgatatcagattggtcctgcacagatagaagcgttgtaccaatatgccaaattccagtttgagtgtggaaactactctggtgctgctgactatctttatcagtacagagctttgtgcacaaatagtgaaaggagtttgagtgcattgtgggggaagctggcagctgaaattttgatgcagaactgggacatcgctcttgaagagctcaaccgcttgaaggaaatcattgactcaaagaattttgcatcacctttgaaccaggtgcaaagcagaatatggctgatgcattggagtctgttcatcttttttaatcatgacaatgggagaacacaaataattgatctgttcaatcaggacaagtatctaaatgctatccaaactagtgctccacaccttttgcgatacttggccacagcattcattgttaacaagaggaggaggcctcaattcaaagattttattaaagttattcaacaggagcagcattcctataaggaccccatcactgagtttttggcttgtgtttatgttaactatgactttgatggggcacaaaagaagatgagggaatgtgaagaagtcatacttaatgatcccttccttggtaaaagagttgaagaaagcaacttttcaactgtaccgctaagggatgagttccttgaaaatgctaggctatttatcttcgagacatactgtagaatacaccaacgcattgacatgggagtgcttgctgagaagttaaatttgaattatgaggaggctgagagatggattgttaatctcatccggagctcaaagcttgatgccaaaattgactccgaaactggagcagttatcatggaacctaatcatctaaatgtgtatgaacaactgatagaccataccaaggcccttaacggacgcacttacaagttggttagtcaacttctggaacatgcacaagctcaaacaacacgatgattgtgtaggtagatcaatgagagtatttgttttatctatccggatgcatcaaattgtttttggctgtttattttggatttagaattacattcaaatttatgggctgtatacctcttggagtagtaggggttctcctgtgttacttgtggatccaaacaagtagtattgataacgattttgcttaaaatgtttgccataagcatcctctcatcacactcagggacgaggtctccaaatacatgattgaaggcgacctgagacggttcaatgcggttaatataaagagactgaaggatattcagtgctacagaggaataaggcatattcaggggcttccttgcagaggccagcgaaccaagaataattgcagaaccttgaagggtaagaaggttgccattgccggtaaaaagaaaaagtaaacggctcctattttttgtgatgttgttttctaattgtcaatgttgtaaggaaaagaataataatgttttctatataattcaattgtttttgtttaagtgttacttggaaatacatgacatcctatgaaagtatgaatcactcacacggcttggtcgtgtcgagttaacattgattattgactcaatagataagggcgtttatagcttcctactgtattgtaccattctgactcactatgtagaccacattcttctgtttatgttgtgtgtcatcattttcatgaccattaatcttattctatatctgcaggtggatagaccataccaaggcccttaacggacgtacttacaagttggtcagtcaacttctggaacacgcacaagctcaaactgcccggtaactgtgtaggtagatcgatgagagtatttgttttatctttcctgatgcatcaaattgtttttggctatgatgtttattttggatttagaattacattcaaatttatgggttgtataccgcatggagtaagttcttctgatgttacttgtatccaaacaagtagtattgatgataaaaccattttttgaagtaggttcttctgatgtt

SEQ ID NO: 123457 - DNA, 472 bp, Glycine max
  Clone ID: PAT_MRT3847_8248C.1
ttctcctccctcggcttgccctcgcctcctcctttcttgtcctcttcgccccattgtccgattctgccaatgttttgttctcttccacatcgctttatcctgtccaccgctttatccaacgtgaattggcttctgaactactgcgtcgtaatcactcagttacttggtttgaatatggcttaagcccgaatcaaatatcactgcctaaagggattgacgaaatatttcttcaagttgaaaattccccgaaaacagctgcactcaaaaataaggccggcaatgtgcagctcatttcgaatgaccaattatggagggagggcttttggcaacccgtggaaaagcccggcggttggttggccagtctggagctgtgtgagagagttctcgaacaacctgaacaccgtaaagcatttcaaactctgctcgagaaaccattcgccgtcgtcgtggtggacgatctgtacaacccatg

SEQ ID NO: 123458 - DNA, 392 bp, Glycine max
  Clone ID: PAT_MRT3847_82490C.1
gatttatgagtattcgattgagaagatctggaaggactggacatggacagagaaataccccgactggcaagaactccgcagctacttcgcctatgtcgaagagaaactccagatcaagaaagacaccgctttcgactctcgagttgtcggcgctcaattcaacttgaagacacacaaatgggacgtcaaaacccaagacggccgcaccgcacacgcaaagtacctcatcaatgccattggctttgctgcaaagcgctacttccccgactggcagggcctggactcgttcaagggcgagatgtaccattcatcattctggccggagggcggcgtttccacgaagggcaagaaggttgctgttattggaactgggtcgactggtatccagatcg

SEQ ID NO: 123459 - DNA, 477 bp, Glycine max
  Clone ID: PAT_MRT3847_82491C.1
ccttttattgatggagacccttaaccaacaaattcgtacacatgagctgaaccattaattatacactcccccacacgaattgactattattttacgcgtgacccatttatgaagctcactattctttgagggtgttgaccagcatcacaaagctgtacccaagaggggagacttctgctttaaccggaagaaaaaatctatggattttacattacaaaccattaaaagccagtgtctcctatcatcaggaaaatggggggttaggaattacctggggacctaacttatttggttctggagcctaatgccgaggtaacacacccctgctggctaggttcaaagctttataaagggccacccaaatacaatgcactggccgcaccttaaaaaagtcctgagtggaaaaaccctgaagtttcccatcttaagcactttgaagcccatccctctttcgccacttggtataaaaccaaataa

SEQ ID NO: 123460 - DNA, 713 bp, Glycine max
  Clone ID: PAT_MRT3847_82492C.1
tttggctgtacttcattgtctaatgatttttgaatcacaactggttctggtgatctgggttgaactggttgtgaaattactttgcggctagccatggctgtttgaggggggcttgctaagcacaaatcacatacaagctttgacacgcccttgcatgctcctttgcagttcaaacagatggaagatttcttcattgtgaagtcaccaaggagcttttggacggcttcatccatggactccaatggaaaatcgcagcagcagcaggcattcatgacatcacggagagtttttccacaattcccatcatggatgtaaatatactcagggggccgcttgtttgcactgccagcatgcagctcaaacacagtgggcgtgacaacctcaaccccattacaaatcttacaaaagcacaaaacaccggagtcttgaatcactccttgaagccccttttctccggctttccaacgtgtcttcgctcccttcatgtacatcactggcagcccctcaagaatccctgttgccagaagatccttcaacttggaaggaaacttcttcaacctagaattcgaaaattttgccgaactaggaggagtcattaacaacgaagcctcagctgaggcttcagtttcccccttaacaccatcatcatcaattccagccacaccaacatgttccacatcatttgtttcctcagattttaccggacgcgaggg

SEQ ID NO: 123461 - DNA, 1890 bp, Glycine max
  Clone ID: PAT_MRT3847_82493C.1
attcggctcgagagagtgacaaaattcaagtcgacaacgttgagctgagctggggttctctcagataacattcgttggatctgatttcatactttctttgtttgtctgtcttttatattctgagaattgagaacagagagcacaaagaaactgccatggacgctctgaggaaacaagccagcaagctcagagagcaagttgccaaacagcaacaggcagtaataaagcagttcagcagtagtggttatgagagttcagatgttgtggtcatcgatgaggtcgaaatgcagaggcaccaccagctggaaaagctgtacagggccacacgtgcagggaaggacttccagaaagaaattgttaaagcagcagaaacatttacagctataggttataagcatattgaaacaggaacgaaactttctgaggattgctgtaaatatggagcagagaacaacagtgacaacatattatctaaggctgcatcagtatatggtgatgcccgcaagcatgtggaaaaggagcacgaagaattaaatcggcttttatctacacaggtattggatcctttgagacaaatgatcaatggtgttcctttggaggatgctcgccatcttgctcaacgatatagtcggatgagacaagaagcagaggcacaaagagaggagattgctagaagacaagcacgggttcgggaagctccaactgctgaacaggttgccaaactgcatgctgcggaagcaaggatgcaggagctgaaagcaaacatggcagttctaggtaaagaagctgcagcagcattggctgctgttgaagcacaacagcagagacttacttttcaaaggcttgttgccatggttgaaggggaaaagacttttcatttaagagttgcagctattcttggtgaaattgaagctgagatggtctcagatagacagaagaaagaatctgctcctccagtaggtatttctgagaatggctcagagaaaacaatgtacttcttggctgaagcaacacatcccttcagtgctgaatcagaaaaggagctgagtttttcgaagggtgattttgttgttgtgcgaaaggtgagcccatcaggatggtcagaaggagaatgcaacggtaaagcaggatggtttccttccgcatatgtggagaaacgacaaagaatcccctctagcaatatggctggtgaagtttactaggttctactcatcttgtgctattcattctttgtttgtttcccatatttggttttgctctgcacatagctcaaagaggataagcaaaaggggtgtagaggattgatggtgggattgatggaagagttatcccgaaatgaagagaaaggaaaaaagggtgttaagctgtggggtaatatacatgtggtctgttctttctcaagggtgacacttgacactagctttgcagacagtttttccatttttttttttttactttgcggccacagacacggttttacttttttatcttttgtatttgtaattgattgattggaatacatgtgtctttgttgatgatcatttcatgttagtggtagtacatattggaagaatgaaggatgataagatttaaatttgtacaatcccaatgtagccctataggtcattaggtccaatggaaagagatgtctgattttctagtaactgaggatcgtgatccgcaagacagaactaatggaactgggccatgtattaccctaaagtgagatcatgttcttttggggactgtttgatcaagttttatacttagttgtagagtacactttacttttaaatggagtttttttatttttttgggtgattatgattatcagtatttgagattatattgcattttgaataattccgagttagtggcacggattcattt

SEQ ID NO: 123462 - DNA, 788 bp, Glycine max
  unsure (1)..(788): unsure at all n locations
  Clone ID: PAT_MRT3847_82494C.1
accggtccgnattccgggtcgaccacgcgtccgggaactctcagatggtctcagatagacagaagaaagaatctgctcctccagtaggtatttctgagaatggctcagagaaaacaatgtacttcttggctgaagcaacacatcccttcagtgctgaatcagaaaaggagctgagtttttcgaagggtgattttgttgttgtgcgaaaggtttgtataaagtcagcaaattgttgcgtgcttctatcactgtcttcacggaatttgcttgattaatttggtttaatctcaatctttttgagcctccatgtttaccaaagttccaaatgctcttacccaggtgagcccatcaggatggtcagaaggagaatgcaacggtaaagcaggatggtttccttccgcatatgtggagaaacgacaaagaatcccctctagcaatatggctggtgaagtttactaggttctactcatcttgtgctattcattctttgtttgtttcccatatttggttttgctctgcacatagctcaaagaggataagcaaaaggggtgtagaggattgatggtgggattgatggaagagttatcccgaaatgaagaaaaaggaaaaaaggggtgttatatacatgtggtctgtcgttgctcaagggtgacacttgacactggctttgcagacagtttttccattattatttttttttttttactttgcggccacagacacggttttacttttatcttttgtattgtaattgattgattggaatacatgtgtctttgttgatgatc

SEQ ID NO: 123463 - DNA, 296 bp, Glycine max
  Clone ID: PAT_MRT3847_82495C.1
ggaagataagtggttttcccaaaaaccgtgttattggaagcggttgcaatctggattcagcccgattccgttacctaatgggggaaaggctgggagttcacccattaagctgtcatgggtgggtccttggggaacatggagattccagtgtgcctgtatggagtggaatgaatgttgctggtgtctctctgaagactctgcacccagatttagggactgataaagataaggaacagtggcaagaggttcacaagcaggtggttgagagtgcttatgaggtgatcaaactcaaaggc

SEQ ID NO: 123464 - DNA, 379 bp, Glycine max
  Clone ID: PAT_MRT3847_82496C.1
tgctgtaaaagtaattgtgtaatatttccgtacaaataacttttactcttatttttacattcagtcacttcaaaatacctagcaaggaatgcatccacgtacaaagtagttgtttctttcttattcaagaagtttataatacgtaaatgggaaaaaagaataaaagagcaacatatatactgccaaaaaaatcgtaaccacgtatacgttaagaggggtgggagatatcaccatcatagcgataaagaagctaagctgaaggaagaacggcggcgaatatagtagaatccacataacattcgtcatcggcaatagaaggataattgcgaaagttgatgacataaaggaacacgtattagcgaccgaaaacaaactaaac

SEQ ID NO: 123465 - DNA, 636 bp, Glycine max
  Clone ID: PAT_MRT3847_82497C.1
ccacgcgtccggtaaccttcgccctcgctgtcttcgtgccactcattttcgccggagcttcctcggccagggagctccggccgtcggaccacggcctcaccttccagacactctcgccggcagggccgcattcctcgccggagatgcgatccttcttcaacagcgccaactcctctccgtccatgtcctcctcctcggacgtcgcacttccccgtgccatggactccggcgaagcctccccgccggcgtggtggcaaaccgacggaggccactccgtcgaaggcgtgggaaaggcgctgacgatggcgagcttggggtgcggcgtggccggcgcggttctgcttgtggcttcgggtttgatctatttgttaaagtaccgaaacagaaacagaaacagaaagcagaagttaaacgcagcgttttgcggtgagaatgagaatcgcggtgaaaatattgatgaggaaaacaacaagttgcaattggtggtacgcaacccttgagtgagtgttgtgtgttcttgatttcattttgattttttgcttgtttcccactagctatgtatgattccacgttgcatgtaaagggtagctgttctaaatttatgactttatataatattatttgtttatctatttt

SEQ ID NO: 123466 - DNA, 294 bp, Glycine max
  unsure (1)..(294): unsure at all n locations
  Clone ID: PAT_MRT3847_82498C.1
cgtttcgattgttaagagagagaagaagaagaagaagaaaagaggggtttacgaagaaaccacgagcaaccccncacacnaaacacccacagagncgaccccccccgcaacaccaacaaaaccgccacccccgcacgaaaggacagggaaccccggcccacgccgcgaacacgccacaacagcccccaccccgcacaagnccaacagcaggggaagcaacggcaccaaaacgcccgcaaggagggagaacccaccccgaacaagaaacgcggcaaaaaggcacgggggagaacc

SEQ ID NO: 123467 - DNA, 704 bp, Glycine max
  unsure (1)..(704): unsure at all n locations
  Clone ID: PAT_MRT3847_82499C.1
gcaaaatcagcaacaaccgaacctatcatttttctcattattgttgttggagttggagttggagttggaccacaagaatagttttgagaagcagangggtagtgtcnatagatggatggggccgcgtccgcgctttccactcctgttgtagtttcttttctcttcgttctgaaatttcgtttctctctccaacgctacaatgtcggaagctaagacccaaattgaatccataaggaagtgggtcgtcgagcacaagctccgtactgttgggtgtctgtggctcagtggtatttcgggttcaatcgcttacaattggtctcgacccaatatgaaaactagtgttaagatcattcacgcaaggtttggttcttataatttcttatcttttcgaatactgtttttgacctaatttaattatctggatttgcatgcaatttctgcaatccctgttgctttgatgttttgtttatgatttgctactacggtttgtttcatcgaggcctttcattgtgatgtgatcccaatttcacctctccacgaagttaatattggcaatcacctaggaaattgaaatgcagatccatttatttcgacctctagatggcaattggaaaagttaattattgggttggcatttacaacaataatttattgggagttnttgatgaacaatactgtaatgtnttgttggtataatgggcttt

SEQ ID NO: 123468 - DNA, 361 bp, Glycine max
  unsure (1)..(361): unsure at all n locations
  Clone ID: PAT_MRT3847_8249C.1
tttttccctggaatccatgaagctggtaaaatggccaaaaatctacctactgcagaatcgtggcctcgngctcagcacgaagtttggaaagtcttaagagtcctccaaccagccctcgctggttttaactccggctaccccccgggatctcaaataaattgatactccaatcaaggttaagttattcctccgtataataaacaacgtttatacgggggagactccctaatttaaataccccacaagaagagatttaggtttttgctctttcccgcttttctatttgtcaatgcctaccattccccaacagttgacataatttctttctgcctggtacctaagctgccccaagtctgtatat

SEQ ID NO: 123469 - DNA, 2797 bp, Glycine max
  unsure (1)..(2797): unsure at all n locations
  Clone ID: PAT_MRT3847_824C.1
ataacattgttgtatttatcacatcttatgaagtggaagcccggaattgggggtgaggcctggcacgctctgtgtacttggtcacttgtccatccttttttttgcctacactcatcgacacttttattgcaaagcttaaagggacttcaatagaggccaaaatatgtaattcttgtgattggtgccatgaagaaaataaacgatagaagagaaataaagcaaagacattatgatggaggcactgaataggggtctagagactgtgtgggcatcgcccgaggaaaagacagaaagagcaacgtcagagagtttgccgtagggttctccttggtttgtggtttccggtattgttttgcactgcttcagatacagagagaagggaatccttcttctctctctctctctttctcttttcctgagtttgaacttggagtaactgagtctatatttttgttcatactagtgtggtcatcactggattttcttggtatatataaaaaaaaaacaaaatattgtctcttgggttggttccaaacaagtagaggaaactatcaattaagtttatagtattttgcttcacagatgtacagaactctctccacttttcattttttttattcccgcagattattttttctttgttggggtttcaaagagtaaatattgttaagtagttaagttgtatatcaattttgcctctttgttctgttcttttctcactagtccagttccagctttttcctttttctgttttaggtgaggattgtcctcagatcccagaagctatccagacttgttacatacgaaaaactcagatctatgtctcatgacaattcacaaaactccaaatatgagaaaagatgaagggtttgaatatttgatgttccaaaaaccatgtctaatttgacttctgcatccggtgaagctagtgcatcttcaggcaacagaaccgaaattggcactgattactcacaacaatactttgctccaccactaagtcaagcacagcctcctccactaaagaaaaagagaaaccttcctggcaacccagacccggaagctgaagttgtcgccttgtctccaaagactctcttggcaactaataggttcatttgtgagatctgcaacaagggatttcaaagagaccagaatctccaacttcacagaagagggcacaatttaccatggaagctgaagcagagatcaagcaacgagattataaggaagaaggtgtatgtgtgcccagaagccagttgcgtgcaccacgacccttcaagggctcttggggacctcactggcatcaagaagcacttctgcaaaaagcacggcgagaaagaagtggaaatgtgacaaatgctccaagaagtatgctgttcaatcagattggaaagctcactccaagacctgtggcactagagagtacagatgtgactgtggaaccctcttctcaaggagggacagtttcataacacacagagccttctgcgatgcattagcagaggagagttcaagatcagtgacaggcataggcatagtagccaactcaacttcaactcaaccaactgcagcagcagcctctcatcaacaagacatcatccatggtaatagtaacaatttctcattgaagaaagagcaacaagcaggtttcagaccaccttggattggacaaccatcaccctcttctgcttcatcattcttggtctctcatcaagaaaaccctaaccctagaggtggtggtcctattcccactcttcttcctccttaccaaacagctcctcacatgtcagccacagcgttgctgcagaaagcatcccacatgggtgcgacgatgagcaaaaccggctccatgattgggacccaccaacaacaggctcacgtgtctgccaatgccgctttgaatttgtcctcacgtgaccaccagatgacccccactctccatggcttggtacctttcgggaataaagctgttcctgctgttggtaatggtgtttctccttcactccttcaccatatcatcgactctttctcttcaccctttgaagggacttcttttgaggacacttttggtggtgctggtggcgatgccatgacgaaaacaaccaccgccgatgacggtgccagaggaaacaataatgaagccctgacaagagatttcttgggtcttagacctctctctcacactgatatcctcaacattgctggtatgggaagttgcatcaactcctcccaacataaccaaaccccaaacccttggcaaggttagctccatatgtcttatacatatttggtttttctttttctttatttcattggtatatatatacatttattttagcctactttttaattttgcttttgtttatgaattatgatatatattgtcaatcttcccaaagtgaaaaacctttcggagtccaaatattttatatgtgtggaggagcgatctttcaatttaaaaggaaagggggggtatgttgcaatttggaattagaacaagatggggttgttagtggtccctttaaaagttgaaagagttggccgattcaatcccagtggtactgtcaatcccttttcccctttggcaaaaaacaatgtccccttttttcttttttattacatggatggcaggatggaagacttccagtagatatcacttgtgtnattagtaaccatcatgggaggctcaaacacccatgtgatacgtcctcttgaaaggcatggcattccttattatttggttatgcacatctaatgaaaataaaagagaaggggagatattgcatttgattaaaatact

SEQ ID NO: 123470 - DNA, 1452 bp, Glycine max
  unsure (1)..(1452): unsure at all n locations
  Clone ID: PAT_MRT3847_82500C.1
aagctgaaaagatgncaacagaagctacttagtgatttgactgtgtgggttantgtntgaactgtcatccctcaattagagggacatgaaaagatgacaccatatttaattcccagaggatatgggttgatctggtgtcttatttcaagtaatatacagatgtctgcatatctggaaatatgaataactggattgggattgttctatgtgatatgttgggtttaattcctacatttccccccttgttgcaaaattcactacacaatgtgtgtattgagtttttttttatgaataattttgaacctactttgggacaccctccataatttcccaagcttattcttcttgctaatgtttctgagctattttatttcgcaaaatcagcgacaactcgaattatgattacaagtcttaatgagcttcttgttggtcttgttgatttactacaaaagtagacttgagccaccactttttgtttggcatagctattctgggcgttcgaattcgtacgctttctattcctttcattgtttcttttctcttcgttctgaaatttcgtttctctctccaacgctacaatgtcggaagctaagacccaaattgaatccataacgaagtgaatcgtcgtttctctgctccggattgcaatgttctatgctaagaccctatttgaatttcaatggatgagggtcgttgtgcacacgctccgtaaactagggtgtctatggctcagtggtatttcgggttcgatcgcttacaattggtctcgacccaacatgaaaactagtgttaagatcattcacgctaggttgcatgcacaggctcttacactgggagcattagccggagctgcactagtagaatattatgatcgtaagacaggagcaaaggcttcgtaaggaattttgacaataagtagaacgcaaccaaagtaccttgaattctttataccgagggatcctagtacactacctgatatgattatagctaaatttgcaattggacttgtactgtactctattcattcttaaaataaaatactaagaaatgttaacatgcctgtggcagagtgaatatatttttttccttgttggaatggattactttggttcttataatttcttatcttttcgaatactgattttgacctaatttaattatctggatttgcatgcaatttctgcaatccctgttgctttgatgttttgtttatgatttgctactacgggttgcttcatcgaggcctttcattgtgatgtgatcccaatttcacctcttcacgaagttaatattggcaatcacctacgaaattgaaatgcagatccctttatttcgacctctagatggcaattgtgaaaagttaattattggttggcatttacaancataaattattggagttntgatgaacaatactgtaaatgtttgtggtataatgggctttggtttttg

SEQ ID NO: 123471 - DNA, 665 bp, Glycine max
  Clone ID: PAT_MRT3847_82501C.1
gcaaaatcagcaacaaccgaacctatcatttttctcattattgttgttggagttggagttggagttggaccacaagaatagttttgagaatcattgttctagtgtcgatagatggatggggaattgcatccactcatgttgtagtttcttttctcttcgttctgaaatttcgtttctctcggccagggctacaatgtcggaagctaagacccagattgaatccataaggaagtgggtcgtcgagcacaagctccgtactgttgggtgtctgtggctcagtggtatttcgggttcaatcgcttacaattggtctcgagccaatatgaaaactagtgttaagatcattcacgcaaggttgcatgcacaggctcttactctgggagcattagccggagctgcaccactagaatcatatgattcgtgatgcgggagcaaaggcttcaaaagaaattttggacaataagtagaacgcaaccaaagtaccatgatgaattctttatatataccgagggatcctagtactagctagtcatacctgatatgattatagcaaaatttgcaattggacttgtactgtactctattcattcttaaataaaacactacattgaaatgtttacaccataacatgcctgtggcagagtgaatatttttttttgtgtggg

SEQ ID NO: 123472 - DNA, 401 bp, Glycine max
  unsure (1)..(401): unsure at all n locations
  Clone ID: PAT_MRT3847_82502C.1
cgagttcgagtgtacgaggcacactggctagtgtctaggcatgtgtgtgagattcctaacgaggaactataatntattgggagagcacttgagtttttgcggacaattggtttcgattcatttgggtttggaaaactctgatttcacaattttttttttaccaatttttaatataaaagatatttctaggagcgcaactgtttgtgctcattcttatgcagcatgccaagtcctgatatgagatttctgaggccgattggtgaagaattatatattaaattagaacagattacagctctggatgaattaatgacactgatgagatttcttctttctgtattaattatttctctggatttgatcacgaaacattgaatagaattgtgaaccttgtttctttg

SEQ ID NO: 123473 - DNA, 1263 bp, Glycine max
  Clone ID: PAT_MRT3847_82503C.1
attcggctcgagcaattctagaatgcaattgactctagattttattcatactgctgcttgcattacgtttgagtaagttgaaataattgaattttgttccatattactacatttaaattgacttgctaacaacttttcactttaaactcgttgataaaatttaccaattattgtttgacttaaccactaaaataaataaacacaaacttactcttatcaaaagtggtattgatgcatattttgatctagttgtatctcagacccatatctatatacagacttgcatattctaactaccctcttctaaactggaatttgtggattgttagcattttgaaaaagcttgtcctttacatcaatgtatatattctcctgagttgtcttgcaacacaaaaatttgactattttcgtacatattatctgcctacatttttgcacttaactaagttatggaaaaataatttgctgatgagatatacttggacagatggatgaaattacaccaactttttataaaaaggaaaagagtgcattttaatagaatgtgctgaaccctgcagaaaagttggtcagaaaaatcactgacttaaatgcaattctatagatttgggatatttcatcaaacaaaaatgttgtgcttgtggacattgtagtatctgctccacgctctgctgcttctcaagcactgatttagtcagctgttgaatgatggaggacaaataacctttttgtaaagttgataagtgtgttgtacaccacagacaatttgatatcagaggcatctattgaccaatctgtgtgctgccagctctatttggagagaagggaattggaattgaagctgaaaaaccatgtttcttcccaagcctagcttgttttattgaaaaggttgggataattgtgctgcaacagtcaaaaagaaaggatgataattttgatgatttttttagttcttctgctaatatacttttcattttgctttacttcaacagcatttgagggggaagagggactttgatatatatttcaatttgcttctccatatatttggtagattttgagtttttttctttttgtaaatatgcgactctagattcttagtttatagtttgtatgtcatctgaaatcttattgttatgcgctgttgaatcaggtttctgttgactcaactagtatgttgtatttctatcaaacttttaattgtattgtaattttgaggttgaggtatgattgatcatatttggtaccaaatgaataaataaa

SEQ ID NO: 123474 - DNA, 278 bp, Glycine max
  Clone ID: PAT_MRT3847_82504C.1
cgtacgcataagaagacagacggggaggggttcgcaggtggtaaatcacagaatccctgttagcactctcgtcgcgacgattccctgtgatctctcagtctgctcttgcagtggatcagacttcacatcacgattcaaaagccttggtcaatactcactcatgtctgttcctaatgatgataacttgtcatattcccagctttcatatgctatcttggatctccttgattccatcatagtctacgtggcatcagaatgtcacatactaccaacgctga

SEQ ID NO: 123475 - DNA, 353 bp, Glycine max
  Clone ID: PAT_MRT3847_82505C.1
ggggggggaaaaacgaacttggtctgggttttattttggcccttcacattagtccaacggggaagactcatggttccccaaaatcttacataagtccaatgcttggccctaaaaaaacaagcccttgttgttttgaacctttacggctcaaaggggggggggatcaacttttcgatgccctttaacgcgggcagaccccagggtttctgattcctctttggtggggtttgaagcgaaataattcatcccacaccctcctaatacattacccgagtttttttggttccaaatgtaacctttttttccccaatttttttcccgtggatttttcgctttccaggaatttacaccat

SEQ ID NO: 123476 - DNA, 405 bp, Glycine max
  unsure (1)..(405): unsure at all n locations
  Clone ID: PAT_MRT3847_82506C.1
cgtaagnaagctcggaattcggctcgagctcaattttccttctctttcagccatgaatccttctgagcaatttgtggaacatggaatgtctcagcagaattgaaagagaacatcttgtgcaactgtgctcactctagcataccaaagtcttggaatagtttatggtgacctcagcacttctcctctttatgtttacaagaccacgttctcagggaaattgaggctcaaagaagatgaagaggaaatttttggcgtgctttcatttatcttctggacatttaccattattgctctcttcaaatatgttctcattgttatgtctgctgatgacaatggggaaggaggtacctttgccttgtactcacttctctgccggcatgcaagactaagcattttacctaatca

SEQ ID NO: 123477 - DNA, 546 bp, Glycine max
  Clone ID: PAT_MRT3847_82507C.1
aattcggcaccagctgagaccgagacaacaaacaaagagttaagagagagaaagagagacatagttagagagagagaagagacaccgttcggtgctccgctgaatacagttgtggccccagcgctccggtgcacactattcactcacatgcaccaacaaccgcattaatgcaaatctcaataatccgcatggaatcgatgagcgatgcagaaaagctaaagaagaaaagatttggaaatgctgctaaagggcttgctcagcgagtcagattggctaagcaaggctcatccgcttaacgaggaagtcagcttgctaagcgagtacaaaatcctagagaatgttgagtcagagagcagcgcgcagccaacccgcccagcgaggatgttgtctcttctcgcgcttagcgcacaaccactgattctcgctcagctagacatgctcgctgagcacgccttcataagctgagaagcccaaaagtctttaaaacactggaaaaagaggggaaatgaagcgttaagcaacgtgggaaggaaggaacaaggcacc

SEQ ID NO: 123478 - DNA, 246 bp, Glycine max
  Clone ID: PAT_MRT3847_82508C.1
gggcaccatatatgatgccgaggccctgccactagacatcactgctaccctcttgatcacagagcagtctagggcctaggatgccatcttacggctgatgtgggacggctttaaagccagggtagagtaattgggttgctacagaacccagatttttttggtactcgttgcgttagtataatcctacatctctgcagtagacaaaagccgtgactttaactgtgtgactaaaaagggagtggaccg

SEQ ID NO: 123479 - DNA, 308 bp, Glycine max
  Clone ID: PAT_MRT3847_82509C.1
aagtcgcctagaactacgaagatggaaatgttttcttcaatgatctccttcccagctgttgccaccgtcaaccgtgccggtgccggcatggttgctccattcaccggcctcaaatccatggctggcttccgcacgaggaagacctactatgtcattacctccattgctagcgtcggagtaagagtacaatgcatgcacgtgtggccactaattggctggaagacgttcgcgacttttcactacttgccagaccttgacgatgctctatttgcataggtagtcgcgttcctcgtaaggaaaggatggtt

SEQ ID NO: 123480 - DNA, 448 bp, Glycine max
  Clone ID: PAT_MRT3847_8250C.1
agcctgtgggcttgtcggcaaagaaacctatgccctgcactcggcgaacgttgactattccgatgatacggatgaatccgtaggggcatgcactctaaccctatagaggctccttaaacacctgggaagcctcagtgcaaccaaacgtaggcatcttacacgtggtccaggatcctccatcgaaggatcctgctgacctgtcgtgctcacggtgcacgaaaccgtgctccaactcgaattccatgcaaggaatgcatcccttcctaaaaaggtattctacttccgtggccaattgtgcatgatcaatgtctggcaggtaggaaagagtctcacacttctgccgaccatctggtggccacgcctgcatgctttgtactctttctacgttgctagctatggagtgtatgtcattgttgtgccttctggtggggaagctagccttggactt

SEQ ID NO: 123481 - DNA, 417 bp, Glycine max
  Clone ID: PAT_MRT3847_82510C.1
cctctggggtattttcggaatccaaatagctcattttttgcactcagttccgaattttatgtcagggtgaccccgttttatacttagactatgggagcctgcctttactataaaatgttatggaaaacaaaaccaaaaaaactacttctaccacttgtttacaatggtggtaaatcaagggaaggaaacattcatgaaaccgtttgttttcaccacagcttatagatgccacttttatttacgatgagcctgcacatctggtactagcttgaccggcttactttttctgctggggatattcagcatatgaataccgcacaccacctgctgccttgataaccagtccactcacattcaaagcgtggacttgaacaccacccagtaagaagaaaccaaaggacggggaaacaacccctt

SEQ ID NO: 123482 - DNA, 273 bp, Glycine max
  Clone ID: PAT_MRT3847_82511C.1
aaaggaaaaggaataaaggcttttttggaaaccctttacctccaataaatattgtttcctaaagggaaataaaaattggggggttaaaccataaaacttttcaaatttcaaactttgccgggaaaaagggaaggccaaaaaaacttttttttttaaggggccccaggggaaaagacatgggaccccgtttttaatttcttgcccccggttttccaaattccccaccattgattggccaccccccaaaggccccattttttttttttcccaaaa

SEQ ID NO: 123483 - DNA, 1551 bp, Glycine max
  Clone ID: PAT_MRT3847_82512C.1
aaggaaggcaagtttatctagggggttatgatatggaagaaaaagctgcaagagcttatgatatggccgcactcaagtattggggaccctcctcccatataaatttccctttggaaaattatcaaaacgaacttgaggaaatgaagaacatgacgagacaagaatatgtagctcatttacgaaggaaaagcagcggattctcaagaggggcctccatgtacagaggagtaacaaggtctcacaggctagcatttacacagcaccaccaacacggaaggtggcaagctcgaattggaagagtggctggaaacaaagatctatatcttggaaccttcagtacccaagaggaagcagctgaagcctatgacattgctgctattaaattcagaggatttaatgctgttacaaactttgatataacaagatatgacgtggaaagaattatggagagcaataaccttcttagtagtgaacaagctaagcggaaaagagagatggatgatggaactagaagcgaggctacagttaaccaaaaaccttgtactactcaagaaaccgttctgatgcagaaaagatgcagaagccaatcagaatggaagatggttcagtatccatcctcccaacagcttgatcagaatccacaaagaattgagtgtagtagaactgagtccttgtcaactgctttagataacatgtttcatcaccaagttgaggaatcgagtaacatgggaacacacttgtcaaatccttcttctctggtgacaagtttgagtagctcaagagaagagagcccagataagacaagcttgccaatgctctttggaatgccttcaacagtgtccaaattattggctgacgtggattctttggatctatcttccaatctcaggccttcgctttctattcctcagatgccaatttttgctgcttggaccgatgcataatcctatgtttttttacctccatcaaaatggcaaaagcttgttttgaatgcttgtttactaaaccagggtgtgaatttccagctagtacaatagggagcttgtgcccatgtttaaaatgttaactgttacattaaacattttcctcgtacgatgagaggaaaactcctaaagtttagtgtatcgcttagcactccaaattcgcatcatcaatttttcggtgttagaatcttatctaaaggttattttgaccctttgccaatgctttttggaatgccttccattgcatcaaaactattgggttctaatccaaataacgtgaatttttgggacccttccccccatttgaggccagcactttctttgcctcaaattccagtttttgcatctgtccaagctgcaaagttcataactcaatagtccttttaattttttgttctctcaagtgaaatttcaatcctttttattgtctttttttgcatgcatgaacaacacaagaggaaggggttgtagctagtcaaatggagggtctaaatattatatcatcacatcactgtcagcaagtttaatttaaactttcaaatcattacattttagcacacattgctgg

SEQ ID NO: 123484 - DNA, 374 bp, Glycine max
  Clone ID: PAT_MRT3847_82513C.1
ctcgagccgagaaaaggttattttgaaaagatatttggattgggtaggaacctttgatatataggtgtggaggcttgaacagatgttgaattgttgtgtattgaaagagagaccaccacaagtgaaggtgaagagaccaccacaagggaaggtgaaggtggaggagtgatataagtgtaggttataccgtttgttctccatttttgtatggaaattgttaaaaaataaattacaccatatcaaggaaaggaaattcaaggggatattgacaaatcatgaggagacatggggtatggaatgtaaaagtttataagtaaaccacctctcattgtttgatgctgcgacaaatggagaatgcgtgttagatcaagaga

SEQ ID NO: 123485 - DNA, 1949 bp, Glycine max
  Clone ID: PAT_MRT3847_82514C.1
ctgtgttacaagttcacctgctatcactaatactgttgccactgataccaagaaaagggggcttcaaatggtggaccagaatcagaagcaaataggtcataggaaatccatagatacctttgggcaaagaacatctcaatatagaggtgtaacaaggcataggtggactggtagatatgaagctcatctatgggacaacagctgcaagaaagagggccaaggaaggaaaggaaggcaagtttatctagggggttatgatatggaagaaaaagcagcaagagcttatgatatggccgcactcaagtattggggaccctcctctcatataaatttcccattggaaaattatcaaaacgaacttgaggaaatgaagaacatgacgagacaagaatatgttgctcatttacgaaggaaaagcagcggattctcaagaggggcctccatgtacagaggagtaacaaggcaccaccaacatggaaggtggcaagctcgaattggaagggtagccggaaacaaagatctatatcttggaacctttagtacccaagaggaagcagctgaagcctatgacattgctgctattaaattcagaggagttaatgctgtcactaactttgatataacaagatatgacgtggaaaaaattatggagagcaataaccttcttagcagtgaacaagctaagcggaaaagagagatggatgatggaactagaagcgaggctacagttaaccaaaaaccttctactactcaagaaaccgttctgatgcagaaaagatgcagaagccaatcagaatggaagatggttcagtttccatcctcccaacagcttgatcagtatcctcaaagaattgagggttgtagaactcagcccttctcaacagctttagataacatgtttctcaaacaagttgagaggaagagaagaacatgaccagacaagactatgtcgctcattttggaaacaaaagcagcggattctcaagaggggcgtccatgtacaaaggagtaacaagggctcacaggcaagcatttacacatgaccaccttcatggaaggtgtcaagctcgagatggtagagtggaaactaacaaagatctatatcttggcaccggtactcaacatgaggagcagctgaagcctatgatattgctgctattaaattcagaggagcgaatgctgctaccaacttgacataacaagatatgacgtggtaatgaacatggcaagcaaaaaccacccaagtagtgagctggttcagcgtccccgcccccagcacaatgatcctcagtgcagtgatgagagtcatagaactcagcccttctcaacggacttagataacatgtttctcaccaagttgaggaacggagcaacatgggaacacacttgtcaaatccttcttctctggtgacaagtttgagtagctcaagagaagagagcccagataagacaagcatgccaatgctctttggaatgccttcaacagtgtccaaattattggctaacgtggattcttgggatctatcttccaatctcaggactgcgctttctatgcctcagatgccaatttttgctgcttggacagatgcataatcttatgttttttacctctatcaaaatagcaaatgcttgtttactaaaacaggatgttaatgcctagctagtacaatagagagcttgtgcggaattttaaaatgttaactgttacatcaagcattttcctcgtacaatgagaggaaagcctcctaaagttttatatcctaggactccaaattcgtatcatcaatctcaagtgaaatttcaatcctttttattgtctttttttgcatgcatgaacaacacaagaggaaggggttgtagctagtcaaatggagggtctaaatattatatcatcacatcactgtcagcaagtttaatttaaactttcaaatcattacattttagcaaaa

SEQ ID NO: 123486 - DNA, 320 bp, Glycine max
  Clone ID: PAT_MRT3847_82515C.1
gaagcacaaaatacgtcgataactttatattattttacatgcatgcatagcatagataggctgctctcaaattaggcagcaggaacaaaaatcgacagatgcaacgagctctaaattacactgtggccataaatatataacgaaaaagagggggtgggatactgagttaatattgaactaatgaacgacagattcccaaaccataactgtgaagacgtcgaacttcaatcgtacgtacggatgatggcgatgtcagaagttaatccaacacaagcccttaggatgttttccagcataactcgctgctttgacagggcatt

SEQ ID NO: 123487 - DNA, 460 bp, Glycine max
  Clone ID: PAT_MRT3847_82516C.1
ccacgcgtccggcgtattactaaatcttatatttgctttgccactgtttcaaccggtgataattgatagactgatccttcacgcttatgtttgacaaagcgggacccttattggatcaaagatatcaaaagaggtgacctaggaagctaacttagatacaggcgaaaatgtcgggaaatactcagatctacaagtttaacgcacccacgtagcctaacacgacagctttctttgaattgatgcgttcacacctcagctaattcagtgaactggctgaacgataccatggtactgcgagcgctcccgatgcctttctgacagtatattttcggaccgacgctttgctagtctattacacttgataacgagccctacattaacaatgggctcttctctggatgggataacatatactgcgttctcctgtgcggcctgcacaacgctaccatgctctgcaagc

SEQ ID NO: 123488 - DNA, 535 bp, Glycine max
  Clone ID: PAT_MRT3847_82517C.1
tcaacaactcgatcatatatatcagtttttattgcaccctcgccccatcatatattacacttacactacatacatagttaacaccaccaataacagaaagttttgatggaacagaaaagcattctgatatcggctttgggtgttggggtgggagtgggagtggggattggattggcctctggacaaagcgttggaaaatggggagccaacactttctcctcgaacgctattactgctgagatgatggagcagtgaatgggtgggagtgggaggggggattggatcggcctttggacaaagacactataaatatggggagtcaacactctcaccctgtacgctattactgatgtgaagatggagcatgtaacgctcatacaagtggttgtccgacgagatagaaacgcccctcttgatcaattcccttatttcctcactgagcacacaatgctattgatgacaagggcgggttatgtgcatctaaagcatgctgtggtttacaagtatacacgacatcattggtgctgcatgcctg

SEQ ID NO: 123489 - DNA, 675 bp, Glycine max
  Clone ID: PAT_MRT3847_82518C.1
gagcaggaagatacttgttacatagttaatgtttaaatccatgattccttaagacgatacaacaccagagccgtgggcgtttgtatcaacgaagaataaagaacgcattcgacaagaaggtacgcccgtgcaagttcaacgagggggacctcgtgctgaagaaaatgtcccatgttgttaaagataatcgaggcaagtgggccccgaattatgaaggacctttcgtggtgaaaagagctttttctgggggtgctctgatactcacccacatggatggcgaggagttgccctcgcccgtgaactccgatgtagttaaacgatattacgcttaaggtctggggcaatcgagaggaccgttgcacgtttttatttctgagtttttttcgttcctcttggtctcctctagggattcccattcattgtatttgtctcgtttctttgaaaagaaagatgggcggggttttagtcctccctttggtgtttcaaactttgtgctttagatttgttataacttgagccctcttcgctcggtgtatggggtgccgcaaacgcttatttaaaattgaacctaactagccttcactaaaataaaatcatcgcattagaggcattcatgcattcatacatgcacatacatatcttgtgattgcaaagagtagaatcgtctcaggccac

SEQ ID NO: 123490 - DNA, 376 bp, Glycine max
  Clone ID: PAT_MRT3847_82519C.1
ccacgcgtccgctgcatcatatatatcagtttttattgcaccctcgccccatcatatattacacttacactacatacatagttaacaccaccaataacagaaagtttgtaagtgtttgtgacagagagagttcttcctctttctctttctgtcttactgtaaaagtttcagttttctttttcttttcttcttcttaagaactttattacttgctcatagtgatggaacagaaaagcattctgatatcggctttgggtgttggggtgggagtgggagtggggattggattggcctctggacaaagcgttggaaaatggggagccaacactttctcctgaaacgctattactgctcagaagatggagcagagaaatgc

SEQ ID NO: 123491 - DNA, 403 bp, Glycine max
  Clone ID: PAT_MRT3847_8251C.1
cggccgctcgaggcggcgggccgggtattcagagaatggcggacgccgaccgctctgcattccaaccgtaaaagaccgaacggtcatgacggcggcgatgctggtgatcggcgccatcttcgaagcggacctgctggagaaccagtatggcttccgcccgaaggtggacgccaagatggcagtgcgccgcgtgttctggcacatcagagatcatcggcgatcagagatcgtcgatgcggacctgagggattacttcacctcgattccgcatgcaccactgatgaaatgcctcacacgcaggatcgccgatggtcggcttctttcgatgatcaaaggctggctgacagtcgcggttatcgagaaggacggccggcggatcacaaggacggcggaggctcggacg

SEQ ID NO: 123492 - DNA, 365 bp, Glycine max
  Clone ID: PAT_MRT3847_82520C.1
gggacgcgggggcagaaccgggaatacaggaccggaccctgaaggcataccagccagaccgaccggggggagtataaaagctgggggaaaacagggacaaagctgatcccgggggaaaattgtgagcacttgaaaattcccgacaagatacaagccggaagaataaagggaaaaaccgggggtgcctaaggagggaactgccccaaattaatggagtggggctaaccgcccgatttgaaatgggaaaaccagcctggcaagcggtataaaaaaatcggccaacacccgggggaaggcggttggattataggccgccaggggggggtttcctttcaccaggaaaaggggcgacagttaaaggcccc

SEQ ID NO: 123493 - DNA, 242 bp, Glycine max
  Clone ID: PAT_MRT3847_82521C.1
tactggttactcctttggttttgtttcataattgaaattgggtcgcatggtagttgaactgggttctgttggagactgatactattctgttaaaagtgaattgatgtttaactataatgctccgagctaagtaactaacagttaccaagtgaatcttgggcccgactttgctatgttattgtacttttgtgctaatcttgttttgcctgtttttgatgcaggtaactgttatcctttcagtg

SEQ ID NO: 123494 - DNA, 517 bp, Glycine max
  Clone ID: PAT_MRT3847_82522C.1
ttattccaaaaatgtccaattccaatcctaacaaccgtaaccgacacgctccgtcgccgccggagcccaagcccatgccgccttcttcttgggccaagaaaaccggcttcaggcccaaactctccggcgagaccaatgtcaccgattccggcccgataaccaccccgcctcccaacgtagatctcgaggccggtcgtgttcggactccggccaccgctaacggcgtcaccaacggcgacaaggctcccgttccggttcctccgccgcctgcggcggcaaagaagcggagagactccgacggcgtgccgaagagttctgttctcagcaccaacggacaggcgccggcggcggagccgccgccgcggaggacggcgaggcacgaggaagtggtagacggtttgccggcggatgacgacgagtttgtgtcgcggcactcgcatatgaagtatgaactcagagattcacctggtttagttcctattggcgtgtacggaattcagcactacttttccatatt

SEQ ID NO: 123495 - DNA, 284 bp, Glycine max
  Clone ID: PAT_MRT3847_82523C.1
ctgaaatggctgatacttgaactgaacaagaaaggagaagctggaggagtgaggttggaagaaatgctggaagagatagaaagaggcagagaagagaaggttgatcagaatgagaggggatggaagccttctttggagagcatcttggaggctcctgaattgcttgagatggacaccacatgattaatgatcattttcttaattactacttttcatcttaattattttcatcccctgttttgtagtctatagaccttttttggaatgatctacgttttaaatct

SEQ ID NO: 123496 - DNA, 429 bp, Glycine max
  Clone ID: PAT_MRT3847_82524C.1
tcctccgcgtccgaacaggtccgagaggaccaggggtgggttttctagagagtgagaggctatacacggcgctcctgaacgctaagtgcaccaacacatataccgtgtcactagcattttgttgttaatgccttgacgcctggagcttttgcttagcaacatgccccgggtgggtccatgccaaacaacccgcacccaaccgttactgggcaagtttcgcgggtcggactcaaacatggagttcgggacccttgcccctagactacccgtccccgaactggagctaccgttcacgcaaagagaccattcttctgaaacgctggaagtacaaggacagactgatcggcatgagatttccactataaccctaaaccagtttgaggactcacatggttaacaccgtataggataaccctagctcaagtcctt

SEQ ID NO: 123497 - DNA, 2346 bp, Glycine max
  Clone ID: PAT_MRT3847_82525C.1
ctgacgcgtgggcggacgcgtgggattaaagtatataagtggaggacagtcctcatcttacaagttgattttctagagttgagttagacagaattccaaattctaagagagttcacattgtttatgtgacatttctaattttgtttcactaaagaaaattcttgtaaaaattaaaaattaataacattgctctttcatgtcacttgacagcttggtaattgtattctccaaggtgaattatgcttccacttccttttagtaaggcagcgtggatcattcattgataccattattgccagaattgggctagaactgagatagaaagaacagtgattaaattgtgtgctgaattgctaactgtttttctaaattaagctcttttgaaattaacaattgggaaggctgcgaaaagacaaaggatagaagcagcagaagcagaaaaagatagagtgaggtgaagaaagatgtcgaatttgcagttacagcttcactctcctccaccatcatccctcttatcatcttcatcatcaccatcatcactatactcttcttcttctcttaagctattcccaaaccaccctttttccacaaagtcccttcctttcaacactcataaacatttctccctaagatgccgccacactgacctcttcgaccagaacaccatagcctccacaccacgaccaacgagaccctctgcttcagttggagctttgccgcctagggtttatgttggttactccatttacaaagggaaggctgcgcttacattgactcctaggcccccggaattcatgccgctcgattcaggagcatacaaaatatccaaggaaggttatgtgctgcttcagtttgcaccggcggttggtacgcgccaatatgattggaataggaagcaggtgttttccttatcagtgagtgaaatggggaagtgtgattagccttggtgcaagggactcttatgaactttttcatgatccttttaagggtaaaagtgatgaaggtaaagtcagaaaaattttgaaggtggagcctcttccagatggttctggacacttctttaacctaagaatgcatctataacccttttacaaagagtgttcaaaacaaccttgtgaatgtggatgaaagcatctatatccctgttacaaaagcagagttggcagttttgacctcaactttcaattttatcatgccataccttttgggttggcacacctttgcaaactccataaagccagaagataatggagtgaataatgccaacccaagatatggaggagactatgaatggaacagatagagatcactttttgcttgtatttcaccaatcaccctgtgaagttctcaacttccaaatttgttaaatcactgcattttgttagctagaattgttttagaaattgtgacttttgagatggtaatgtctaattgagttattcctctcacacaacagaacaggatagttatctgaatggatcttcatcttagtgtgcggcttcctgtttcacttccctgcttctctcactctcagaatgtgaagttacaattgcaaagaaggagattatccaccgtttcctctgccctggctgagactgcagcgtcaatggcagtagctgtaactgtcgttggtgcagcagctacccttcttgtaaagagatccaaaacttctgagtcatcacagattcaattcaaagcatgtgaagattgtggaggttctggtatatgttctgaatgcaaaggtgaaggattcgttcttaggaaacgttccgatgaaagtgctgagaaggcaagagtgcaagctaagaacatggcaacccgattcacagcgggacttccaaagaaatggagctattgcacaaagtgctcttctggtcgatcctgttcaacctgtggtggcagtggaaagctaagttactagtttagcattacatgttgtctacccagttcaaaagacagttagttcctcagcatttcacatgctcttgtttaaatcccggttcagaatgaggcaacataatgaactcaagctgatgagtggttcacattcacttgttttccttaatttattctgcataaagcaaaatcgtatatgtatgtaattcaatggtagtgtatagtatgcatttgttgcatgcactagagaggtgttgagtttaaatcgaccaagtagggtcttgatagaataggatttgagtttactgtcaatacacaaaagagtattggtatttgcactaacttgcacactgcatatgctccccatgcaaattggatagcaccctgatcccttgtaacttattttaaacattcagattatgtccgtaccatggtttttgctagtaaaaa

SEQ ID NO: 123498 - DNA, 404 bp, Glycine max
  Clone ID: PAT_MRT3847_82526C.1
tttgttttttggttttttttgttttttttcttttgtgttcttttttgttgttctgattttaaccttttttttcaggacttcttattatcccctgcaaactaactagttaccggggcggggtccttcgggccctcgttggcaacctcttgtccgtaaccgcccaaaattgcccaacccggcaaattgaaagtaccctctatgacaaaaagcttcttggtaatttttccgaacaactgctgcgtactggccctgggggacgttaaaatcgttaaccccctggttggaaaaattttggcctatcgaaacctggcggcctaaaacctttgcgcgagctttattctgccccccttttattacctggccgctttttacttggagtacctttttgcaagccctgctttttt

SEQ ID NO: 123499 - DNA, 924 bp, Glycine max
  Clone ID: PAT_MRT3847_82527C.1
cggaattcccgggtcgaccacgcgtccggagagagcaagcgatggcgagtgatccgatgcaacaagtggccctaatcctgggcccggactcagcccagctggaatccctaatctcccaattgatgtcttcgtccaaccaccaccgctcccaggcggagtccttattcaacctctgcaagcaggcccgcccggaggccctccttttgggcctggcccatctcctccactcctccccgaacccggagacccgcaccactgtccgccatcctcctccgccgccacctcacgcgccaccacgactccttcctctggcctctcctctcccccccggcccgctcctccctccactccctcctcctctcctccctccacaacgagcccctcaaatccatcaccaagaagctctgcgacaccgtctccgagctcgccgccgccaccctccccgacgactctgccgcctggcccgacctcctccccctcctcttccagtgggtcacctcccccgaccccaggctccaagaaatctcgctccttattttcgcccaattggctcattacatcggccaaaccctactccctcaaatctccactctccactccgtcttcctccgctcccttcactcctccacccccgccgacgtccgcatcgccgccctcgccgccgccatcaccttcatccaatgcctcacgaattcctccgacacggaccgcttgcaaattatactccctctcatcgaatgcctcaactcaccgcggcgctgaactccggccttgaggccctcgctcactacgcgccctagcttctcatcgagctcgctggcaccgagccgcgcttcctccggcgacaaattgtcgacgtcgtggggtccatgttacaggtcgcagaagctgagactttggaggaaggaacacggcacttggcga

SEQ ID NO: 123500 - DNA, 1829 bp, Glycine max
  unsure (1)..(1829): unsure at all n locations
  Clone ID: PAT_MRT3847_82528C.1
tacggctgcgagaagacgacagaagcgtcctgtcctctgtcgccgccagatctcagacacacactctcactctctctccctcaccttccataatgcagctcctccggccactgctcgcggcggcgctgctcctcctcgccaccctctccgacgcccacaacatcaccagcatcctcgcaaagcaccccgagctctccaccttcaaccactacctcaccctcacccacctcgcccccgaaatcaacggcaaaaccaccatcaccgtctgcgccgtcgacaacgccgccatgtcggaccttctctcgaagcacccctccatctacaccatcaagaacgtcctctccctccacgtcctcctcgactacttcggcgccaagaagctccaccagatcaccaacggcaccgccctcgccgccacaatgtaccaagccaccggcaccgcccccggatccgccggctttgtcaacatcaccgacctccacggcggaaaagtcgcattcggccctgaaaacaacgacggcacactctcctcaacgttcgtcaaatcggtggaagaaatcccttacaacatctccgtaattcagatcagtaaggttctcccctctgccgcagcggaagcccctgcacccgcacccacccaacaaaacctcaccaacattatgtcaaaacacggttgcaaagtcttcgccgacactctctctgctcaacccgacgctctcaacaccttcaatgacaacctcgacggtggcttaaccgtcttttgccccctcgacgacgcgtttaaagcctttctccccaaattcaaaaacctaacaaaatctggtaaggccgcgcttcttgaattccacgctgttccggtttaccagtccaaagctactctcaaatccaataacggacttcagaacactctcgccactgatggcgccaacaagtttgacttcaccgttcaaaacgacggtgaagatgttactctgaagacgaagcttacaactgccaagatcaccgacactttgattgatgaacagccgcttgcgatttttgctattaataaggtgcttcagcctaaggagttatttaagggtgaggcggaggctccggcgccggcgccggagccttctgccgccgacgctcctgcgccggcgaagaaggggaagaagaagaagaaggcggctgatgcgccggcggatgattctgatgctcctgctgattctcccgatgacgctgccgatgtgaccgccgatgatagtaacgacgccgttagacgtaacggcgggaggtacggtggtggtgttgttgccttggttttgagtttggtttttgggttaccgttaatgctttgatgtgagttaattaaaaaaaaaaaaagagtttagggttttttttcaagggggattcgaagtgatattcctttttttttttctctgtgttttttaatatttttatttgattattgtcgtatttgataatgttgtgtaattttgctggtggtgagagagagcgggaattgatacactgatgtgaatgtttttataatgtaaacaatttgtttaatttcctccaatgagcgttaattagagatctgttatggtaatgtagatcttaaatttctggnngggaaaaaaaaaaaaaaaaaaaaaaaaaacttcgggggggggcccggtacccatttcnccttatagtgagtggatatacccgcgcttactggccgtgttttacaacgtcgtgactgggaaaaccctgccgttacccacttatcgccttgcgcaacatccccctttcccagctgggttaataggaaaaggccggacccgttccccttccaaaagttg

SEQ ID NO: 123501 - DNA, 232 bp, Glycine max
  Clone ID: PAT_MRT3847_82529C.1
gcctgaggctatgggcctatccaatgatttgcaatggaggaatgctcactgcttcaatgcactctccgatgtgtgaagagctctaggaacagttttgaggggaggtgtgctcgttaaatctatggctgccgcttgtgctgataggtcactcagtgaagaacctcccgggggctgtgctattaggtcttggtctggcttttaagagggtgtcgtttgttaaggctgtgatgag

SEQ ID NO: 123502 - DNA, 303 bp, Glycine max
  Clone ID: PAT_MRT3847_8252C.1
agccttcgaacggttgtaaaaaaacaacagaaggtatccacagcggcggttacaaaagaacaagcggagaatgggtcgagtgagatctaaaactgtttactaatactatcaccaggtgttagagcgtcactactagcgcatgcttttgtgctttacatttaacttagaactttttcatagtatagtcgatagaacagaacatgtgtgaaagagtttagcttcactttatattggatcggagtggtttacttacaactgactgttcttctcatcgatatctattttgacttaatgaacatcttg

SEQ ID NO: 123503 - DNA, 293 bp, Glycine max
  Clone ID: PAT_MRT3847_82530C.1
ttttttttttttttttggtttgtttttttttttattttattttttttttttggttatttttggggcccattggcaaattggggggaaattaaaatccttttctaggaacgaagttggaaaatcattcttgaacacaagacggggaagatttttcccttgttaagaaacccctggtaacaccaaagtgtgaaagttttttttatggatccctcctttttggaaccactttcagggggaaaggagactccctagtttgggagccaaagcttcaaacgctttatgggttcccgggg

SEQ ID NO: 123504 - DNA, 240 bp, Glycine max
  Clone ID: PAT_MRT3847_82531C.1
ggctcgaggttctcttctaagtaactatttggaaacctctcactctaactctctctctagaaagtcccagccagccaggtaggtaaaggttgtaatcaatcaatcaatcaatcaatcaatcaatcctcttcttcccatccctgccttgcttttctgcctcaacaaattcataccccagcacaaagactatgtttttactatcattttctgtttggcctgcaaaaagtaactgtttttatt

SEQ ID NO: 123505 - DNA, 419 bp, Glycine max
  Clone ID: PAT_MRT3847_82532C.1
tctcgagccgaatcggctcgaggttttaattaaattgtggtcacggggaaaatacggctaatgtgactgcaattgcggttgtggaacgctatttaaaatcatattaacccccttctatccccctcaaaattctttcactgaaaagcagcaagaggaggagaatgaggaatggtttcatgtgccactctgaggcatcaacaacagtgtgcatgagaagctgcgatactattactgggtctgtggttgtgcctaggactaggagtaggaggcatcaaagaagtgtttctcttgatgatacaaggttgatcaaatatgccaagtactccaaacttgttgactctagcactagcagcaggttgttcaattcagctcacaagaaaggtgactctgtctctgtaccaaacatcaagcctcaagag

SEQ ID NO: 123506 - DNA, 329 bp, Glycine max
  unsure (1)..(329): unsure at all n locations
  Clone ID: PAT_MRT3847_82533C.1
ggtcatcctttcatgacggaaggcgcgggagccgcgcaccgataaggtcaaatcaagagaatccaaacgggccagcaaagacagagcaaagggagggaagcgcacaccaaacaagcccgccgcgaaagcccncccaacggaccggcgcccatancngaagagaccgcaaaggggagagcaaaagcgcacaaccccacaaagaaaccgcctgtggggtggtgacaatacccatcacaaaatgccttgggtgaaatgggaggatattagtcagcccaagcatgaggggggtcagcgtgcaaaggatatttcgaaacaaaacacatggctat

SEQ ID NO: 123507 - DNA, 185 bp, Glycine max
  Clone ID: PAT_MRT3847_82534C.1
cgaccacgcgtccgcagattttaactctctctcggccaaagttacactttgatcgacctctatctcacatagcgtttgttaatggctactatttcatttaacacaaaaactttctttaacaattccacttggaatccccacattgttaaactcatctgcccagaggaaggcatcgtctatcacac

SEQ ID NO: 123508 - DNA, 312 bp, Glycine max
  Clone ID: PAT_MRT3847_82535C.1
ggatacactacagacaacaaggctaaattttattgttattgacatatatcgttttggatcatgactaagatttcttttacaacaattctcgctcttgcccttttcctcacacttatttcacagacgagtgaaacactgatagagaaccaatgttcgacagtgttggatccaaatgattgcaacctcagctggtgtcaatgcaattgtcgtcaacaatatcaacgatttggatcttgcgttgacgtaaatcttcacaaatgtgttcgcatctacgactgtacccccaaattgatctactgaatgttcctattt

SEQ ID NO: 123509 - DNA, 504 bp, Glycine max
  Clone ID: PAT_MRT3847_82536C.1
tagtgggaattctttagactcttcatataagttacttatatacaaacggactgtctttaaagatcttataaaaagaacatataaacaatgttacacagaatatttaagatgcactgctcgcactctgagcagactcttccttattaactttttccactgactctctaacaataatctccatatggtccataggctggtctgaagtgagatctgcgaatctatggtttacctctctatgcatcatctcatctgctctgatagtcacaatcatatctgtaactgttgagtttgggttcaaattccaataattaacagcagtttcaggcgccttttctgtattccagttgtacaaagaacctggttgctgcatatcatgaaggcaatgagtataagtccagactgcctcttcttctaaatagcctacaaaacgatgggctgttcttggagatagtacataaaagagctgataggccataacaaaaactgcctgtccagcttagatca

SEQ ID NO: 123510 - DNA, 244 bp, Glycine max
  unsure (1)..(244): unsure at all n locations
  Clone ID: PAT_MRT3847_82537C.1
ctaaacataaacacagcatgttaatttataggtgatgcccatacccttgactacttgtagaacagatagaactatgctcattaagtcttgcaaactttcttttgaacctttttttttttacccttttaattttaagaggaataaaagaatatggttactatagtttgccatgtggactatgggtatcccngactacaatggngagaacttttgtttctnctttgagcatgaaactaatttctgt

SEQ ID NO: 123511 - DNA, 265 bp, Glycine max
  Clone ID: PAT_MRT3847_82538C.1
caaagatggcaaccaacgcggccagtcccactcgcagtccacgctcccaacaacctcccacccaaagcccaaggacaccctcgtcaaggcccacgctcaggtccacctctttctccaacaatccctccacctcctacagcggctccaccggttaccgcctctcctctgacacctccatctcaagcttctcctccatcacctccctccgcgacacgctccccgaaaacccccacatctacgacttctccgaaatctgtgccgccac

SEQ ID NO: 123512 - DNA, 395 bp, Glycine max
  Clone ID: PAT_MRT3847_82539C.1
gggcccggaaggaccggcccgacccacccacgcgcgttagtacacaagcaacgacacggccaaaacaggcaaaccccgaaacagaagcacggagcgggcaagccacgaagcgaaccgagggaaagggcgagaaacaaagggacaccggaaggaccgccaccccaacggacgaagaacaggaaacacacgacgggcacaaaagcccaaaggaacgaaaccccaggagccgacagggcgcaaaacccacaagacacaaagggggcaaaaaggaggaaggggaaacagagtggcccccagggcactaaccccagtgccaaaagagaagccgcaaacaagagagcgcggagctggagcaaagaaaacaacagggaagaaaaagccaaacgcagaacccc

SEQ ID NO: 123513 - DNA, 920 bp, Glycine max
  Clone ID: PAT_MRT3847_8253C.1
ccacgcgtccgtgtcttcttacattctattatcctccaactcacttctactagaccaccacccccccctctcctttttctttctctctcttcctttttctctccttggctgggtcccaatccctgcacacacagctggttcattattaaatcttcctcaaccagcaacttcaacttcctcgttcccccccttcattaccctcgtaactcgtaacggcttcatacccctttcttttccttcgttcaagttagaatcttttgcttcactcagtgagccatggatgacgctgagttggacgccgcgttcgggtttccgtctgagttcccctacgagtttgactcggttggggccgaaccggctgattccggttcgaccggaaccgagagcagcgacgaggaagacttcttcgccgggttgactcgccggctgagtcacacctcactcaatgaaacaaggaaggaacaacaaaaactcaatgttcccatctgcaacagcgacaaaaccgagaatcagaagatgatggctcgcggtttggccgggtcgcctcagtctatactgagcggaatcggaagctggtcgggtcggagcggaaggtccggcgacggaagcccgaacgggtcttcccgtgttgcgtcgccaaccacgacgccgtttgagggctcaaacgacgcgttggatgtgctgtatgcagctgcagggcaagttgcgaggttgaagatgaacgacgaagtctcttcgaagttcgattttcagagcaggggagtgctgggtggtcttcctccacctgttgcggcggagaacgcgttttttgcaaaccagagtgtttctcaagttcggtaccagcaagtgagaacagagcaggtgctggagcagcaatgtggttcggtttgggggaggcaagagaaggcttattgggcaac

SEQ ID NO: 123514 - DNA, 628 bp, Glycine max
  unsure (1)..(628): unsure at all n locations
  Clone ID: PAT_MRT3847_82540C.1
agcggactcccgatagaacgcagttgttgttgtcgacgggaattggggttcatcctatgacgtgtcgaattctaaacgacgcagaagtcaggcatcggattctggtctgttctttgcttgtctgaatgatgtcatgtcttgtagtaactcgtaaccctctccattttcgttccgaaagaaaacaaaagaattacgacaccgtaaacaaaaataatataataaagcttttgtgcggatgcaaataacgcagtacggccagccagccatcacgagccaccattcaacgcaaatcctgacaacgtttttgtctatatatctatatctattccacacacacagtcactcccatcacatgttagaacaacattagcattggttagggactgaaaatgggtccgaaattggcgaaaacggggtcgttccgtcatggattggcggagaagaaggagaggcttctgtcggcgaagatgcggcaggaggaagaggaagaggaagaggaagaacgcaggtggtggtggtcgaagtggaacagtgtgaaacgcgtggctgagaaggcttgggagatgggtcggtctgatccaaggaagataatcttctctgcaaaaatgggattgctttgaccctnatt

SEQ ID NO: 123515 - DNA, 375 bp, Glycine max
  Clone ID: PAT_MRT3847_82541C.1
gggggtctctcactctctctctctatcttggggtacctgccactcgtgagcggcgttacctttttgcaatggcaaatcatgtgtcacacacagcacactgcaactaactcttgtttgcttctgcttttgtaacaaactttgtcttaaagctactttctctctcataatttaggctttgataataatcttgggtgagtaaaataatgaatagggatagtactaaattactaataatgatctcactgtattagtaatatttccttgcgatttgcatgtatgcggaatagataaccaaattcagcgggaaattagcaacccgctcaaatttaatgttcacattttaaaataacatgtccgattggtctattaattatg

SEQ ID NO: 123516 - DNA, 438 bp, Glycine max
  Clone ID: PAT_MRT3847_82542C.1
cattaactaattggaaaaaattttttcaatatttttaagaggataggccatgaaaaataaatttatatttttaaatggaatattatatccatatatggaattaagtaattaaatatattattttacatttattagttaattcattggttaatttttattaaatcctttcaatttaatcaattagattatgaactctcaacttttccattctaaatttctaactaacaaactttttagtagcttatctagtttggggaaacacacctaaaaaaaacctgtttaaattgactataaaaaaaaaacctagtttaaaaaacggcggggaaataaatactaggatgggaggggctttgggttgggccattttgatacaaaacgctttaatttatcatttggggaggaaggacccaaccgacggcagtttaaaacaaaacgacg

SEQ ID NO: 123517 - DNA, 319 bp, Glycine max
  unsure (1)..(319): unsure at all n locations
  Clone ID: PAT_MRT3847_82543C.1
accgtttgacgtgtgcttcaatacggaaaacatactcaccggcttttggggctctgttccaacgtagtgatcttttcctgcagagacgcagaagagagtttggatgatttttggaactaactggatggttactgtaaacaatgataaggtgctataccttatgtttgtgaatggatgtgagaatcccatgacttggatagtgattgcatgatatgatgtagactataatgttgtgcaggtcnaggtgcctacttcaagatgttgattcaggtgtttgctctgtggaagccgaactactggtgctaacttcaacttggcc

SEQ ID NO: 123518 - DNA, 344 bp, Glycine max
  unsure (1)..(344): unsure at all n locations
  Clone ID: PAT_MRT3847_82544C.1
gttattgtttatatattacanaatnnnggnnnngnnnggnnagnnggggcttggccattgccattacttcccatatacagataccagaatgactcccatggctggggtcatgaaggattttttttttactggcaaaaacttggataccccctcgggtcaatatattacaacccgaaacaggcctggctggggttccgtgaaaacaaggcccttttcttcaagtaaataaccctgtacaactttcgggagtcttgcgggagtgcgggaacccccagtatggggacccatgccaacacaaaaggaaacctggaaacgctggtcaaaggctttgggcgggcttttta

SEQ ID NO: 123519 - DNA, 647 bp, Glycine max
  unsure (1)..(647): unsure at all n locations
  Clone ID: PAT_MRT3847_82545C.1
acgagatttttttattttatttttaggaatattaagttttaaaaaaaaatattttcatcgtttatattttagtatttttcttttctgatttagtatatcaaattttaaaagttttattttaaatttttatggtttcattttaactcttttttttttattttctgttaaaaatattagtcttttatagggacaagtacatgaatctagatacatttataatcatttctatggtacatgatacaatatttacaactatcctaaaaatattattttaattttaatttttctctcgtgctctctccctctccctctccctctcttttaattttccccacaagctttttgtgtttattatactctcttttcaattaggggtttgcagaaaaaggtggtagggttgtggattcccaaacaaatttttatggtagtttctcagagcagaaatagaattagttggcacctgatgtggctcgaagtaagagtatttctagcagaaagttaactaaacactaggtaatgagtgtcttttattcttcattcatttggacttcccttttcacagaatcagagttgtcatgaccttgaatttgtatatttttttaatcactctcattattgnnnttcgatcctctttttattgtatagtt

SEQ ID NO: 123520 - DNA, 377 bp, Glycine max
  Clone ID: PAT_MRT3847_82546C.1
tgtgtggaaaaacaaacaacaaccctaaaaagggaaggaggaccatcaaagacaaacgcaaaacaaaacgacaaacacagcgcctgcacccaactgcaaaacaaatggacaggcaaactacacaaacgaaagccacctaaaataaaaggggagacagagaaaaacgagagcagaatggaagactatacacaacaagatgcaggtgaaaacggaagaagttccataatgacgggttgctgctctgacggaaacgttgctgcgaatccgaagtcaaatgggaacctaagaccacctctcttggaagggggtataggaagtggcaaaccttcgggggggaccaccaatatataggttggaggaatagcagcgtagacggg

SEQ ID NO: 123521 - DNA, 1308 bp, Glycine max
  Clone ID: PAT_MRT3847_82547C.1
ctcgttctaagacactcgctcggccgctcgagttcatttcctttcactcactcttctattttccaactttacaatttcatttcagatagcttcttgactcgttactgactcactcaatggctgaccgagttcaccccagccactcgccttccgtttccgccgattcacaaccgccatcgcctcaagactcctccgtcgttccgaaaccgccgtcgccaccgtcaccggagaagccagtgcctccgcctggaacctacgtcatcaagatccccaaggaccaagtctaccgcgtccctccgccggagaacgctcgccgctacgaccaatacgctcgccgtaaacaccgccggagccgatgctgctgctgcttctgctggctcatcggaatcctcttcattctcgtcgtgctcctcgccatcgccgccggcgtcctctacctcgttttccgtcccgaggcgccgaaatactccatcgaaaacatcaccgtcagaggaattaacctcacctcgccgtcgtccgtggcggcgatctcgccggagttcaacgtcaccgtcaaggccgataaccctaacgacaagatcgggatccgttacttgaaggatagctccgccgaggtgttttataaggacgcgaggctgtgtaacggcgctctgccggcgttttaccagccgtcaaacaacgtgacggtgtttgggacggcgttaaggggtgacggaatcgattgaccgttaggattagggcgccggtgaaaataaaagtggggtccgtcaggacgtggaatataaccttagaattaggctgtcagtgaaaataaaagtggggtccgttaggggccagaatattttcgtaaaggtgaactgtgatgggacggtgaatgagttaacggcgcaggccaagattgtttctaaacgttgtagttatgacgtggatctttggtgaagaaaacggtgacaacagagggtgtttttttttttttttttttcgtttatagataggaccgaaatattggagattatacaaattttcgtatacattaatgttacattgtagcgcatttattgatacgcgtacgccatgtatcttaggatttgatttggttttgtgcatatgtcatgtgatttttattgaatgataaagtaagtaatttcattgttcatttggttgaccttgctccaccaaatgaactacgaaaccttgttttgagcaaaaaaaaaaaaaaaaaactcgagtttttttttttttttttcgctgggttgttggtcgttgtttttgagagagtgaccgggggaaactagctttcttgcttga

SEQ ID NO: 123522 - DNA, 446 bp, Glycine max
  Clone ID: PAT_MRT3847_82548C.1
atacaagataagtagtcagtttgaacagtcttgcaacagaaggcttttagtttaacagtgattatgctgatttattaactagttgtcatgcatgaacttgaaaaatcagtaaccaagaaatgaagcagtctagctagttagctaggcagaatagaattcatgcttgctttgaatttgatgggtaaattatgtttcaaggctcaagtttcttttttagaattcttcatatttgttcgtgttgtttattagcccactaaggactaggcaatgacagtatgagggaattctgttctttcactgtatcagctatcaaaattatgatggaagtgtcaatgttgatgctttatgatcttttaaggttagggaaaagatgaaacaaacaaaaaacgattaaattatttattaatcaaagttcaatttgaaactctggaattaatctcttttct

SEQ ID NO: 123523 - DNA, 1239 bp, Glycine max
  Clone ID: PAT_MRT3847_82549C.1
ctttcgcgtccgcccacgcgtccgagacattttagaatagggttttctcaatctcttttcattgctcctagatcaaatagcttcttgactcgttactgactcactcaatggctgaccgagttcaccccagccactcgccttccgtttccgccgattcacaaccgccatcgcctcaagactcctccgtcgttccgaaaccgccgtcgccaccgtcaccggagaagccagtgcctccgcctggaacctacgtcatcaagatccccaaggaccaagtctaccgcgtccctccgccggagaacgctcgccgctacgaccaatacgctcggcgtaaacaccgccggagccgatgctgctgctgcttctgctggctcatcggaatcctcttcattctcgtcgtgctcctcgccatcgccgccggcgtcctctacctcgttttccgtcccgaggcgccgaaatactccatcgaaaacatcgccgtcagaggaattaacctcagctcgccgtcatccacggcggcgatgtcgccggtgttcaacgtcaccgtcaaggccgataatcctaacgataagatcggaatccgttacttgaaggatagctccgccgaagtgttttataaggacgcgaggctgtgtaacggcgctctgccggcgttttaccagccgtcaaacaacgtgacggtgtttgggacggcgttaaggggtgacggaatcgaactgaggagcgaggtccgaagagcgttgctggaggcgcagaccaaacggagggtgccgttgaccgttaggattagggcgccggtgaaaataaaagtggggtccgttaagacgtggaagataaccgttaaggtgaactgtcatatgacggtgaatgagttaacggcgcgggccaagattgtttctaaacgttgtaattatgacgtggatctttggtgatgaaaacgcggacaaaagatgattttttttttttttttttggttatagataggaccgaagcattcgagattatacaaattttcgtatacattaatgttaaatggtagcacatttattgataccttaggatttgatttggttttgtgcataagccatgtgattttttattgaataaagtaatttcattgttcattcttgagtgtgaattctttgttgattggtatggtggtgtctaaataagaaaccgcagcttgcttgtacccaccaaaggaaactattactgtatgcaactacgaaccctaattttgcc

SEQ ID NO: 123524 - DNA, 206 bp, Glycine max
  Clone ID: PAT_MRT3847_8254C.1
gaatacaatactgatgaagagagtattaagatgacattgcaacagaaaagaaaagtaatacttgcattggtagcaaagacaaaggataaaagcaaagacatattacctataattgagagacttattcctaaagaagattcatactttggagctcatatataagggctccatgaaaaacaggggaacatggcaggagaatcataaaa

SEQ ID NO: 123525 - DNA, 2675 bp, Glycine max
  Clone ID: PAT_MRT3847_82550C.1
gtagcatgctcgagtatttttgctagatctattttttttttgtaacaaggatagatgaaggtatgatatactttttagttattgggagaacccgagtactctctttcggatccaggaaatagctctcagagatcttttttccttttggaagatacaggagcggaacaatcaacctattgatattggaagactcagatgattcttccaatgtatcatttttgggtccaatggaattcataggtatagtaagaagccttgtcaaatagggattttttctttcgaccatttttcgattgttaatacgatagataaggaccgctactacaaagactcttagaaagaaaaaaacttaaatcaaaatacttaatagcatggcgatacatttatacaaaacttctaccccaagcacacgcaatggagccgtagacagtcaagtaaaatccaatccacgaaatcatttgatctatggacagcatcgttgtggtaaaggccgtaatgccagaggaatcattaccgcagggcatagagggggaggtcataagcgtctataccgtaaaattgattttcgacggaatgaaaaaaacatatatggtagaatcgtaaccatagaataagaccctaatcgaccttcatacatgtgtctcatacaccatccggatctgaatggtaaaatcgccctactcccaattggcgaattcgtaggttcaattcctactggatgcacgccaatgggaccctccctccaataagtctatcggatttttgttcaagaatgaaatcttattggaactgtccagttcaccctttggaaccatatcacatcccggatatgatgaaataggatgaattgagacggtattttgtaagtacataattatcttgaataaattcactatttctttattttccgatcgcctggaaagaacaagatgtttcttttgttctttcttcaacaatttctgatctctagtagacctctcagtaggattcgaactcagatgaagttctgaccatctgtcagagaaaaaagaacgagtagctctgtatcaatggaatctcatcatccatacataacgaattggtgtggtatattcaaatcataacatatgaacagtaaaaactagtattttaattgagactagaactcatagggaagaaaatagatttatgaatggaataaaatatgcagtatttacagacaaaagtattcggttattggggaaaaatcaatatacttttaatgtcgaatcgggatcaactaggacagaaatcaagcattgggtcgaactcttctttgatgtcaaagtaatagctatgaatagtcatcgactcccggtaaagggtagaagagtacgacctattatgggacatacaatgcattacagacgtatgattattacgcttcaaccgggttattctattccacctcttagaaagaaaaaaacttaaatcaaaatacttaatagcatggcgatacatttatacaaaacttctaccccaagcacacgcaatggagccgtagacagtcaagtaaaatccaatccacgaaatcatttgatctatggacagcatcgttgtggtaaaggccgtaatgccagaggaatcattaccgcagggcatagagggggaggtcataagcgtctataccgtaaaattgattttcgacggaatgaaaaaaacatatatggtagaatcgtaaccatagaatatgaccctaatcgaaatgcatacatttgtctcatacactatggggatggtgagaaaaaatatattttacaccccagaggggctataattggagataccattgtttctggtacagaagttcctataaaaatgggaaatgccctacctttgaccgatatgcccttaggcacggcaatacataacatagaaatcacactcggaaagggtggacaattagctagagcagcaggtgctgtagcgaaactaattgcaaaagaggggaaatcggccacattaaaattaccttctggggaggtccgtttgatatccaaaaactgctcggcaacagtcggacaagtgggaaatgttggagtaaaccagaaaaatttaggtagagccggatctaaatgttggctaggtaagcgtcctgtagtaagaggagtagttatgaaccccgtagaccatccgcatgggggtggtgaagggagggccccaattggtagaaaaaaacccgcaacatgcaggattcccaagaaattcttcgatttcttgcggaagcagatgattattcatctgcttctcacgttccatgaatagtcggcacattgaggaatatccagaaaggattttagggaatcgctctgattctatgtctgttcgttccgtctgaagaaagaaaggatcccatcaacagaatcgatctttcttttagatgttgaatctctctttgattgatcaatgtgtgatatttcgaatcgtcattcataatggaatggaatataatgccttggattcgatcagcaagatcctttcaattgggtagaacccgttacttgaatgaaactagatctcgtggaatcatattgaatatttgatgatgcattccgtaccgtgctaaaaaaccgatccttgtttgccatccacacatgtctaccaaatccaattctctctcgacatgatgttcctcaaaaaatccgatcggacgcggg

SEQ ID NO: 123526 - DNA, 1785 bp, Glycine max
  Clone ID: PAT_MRT3847_82551C.1
ccgaattcgagcggccgctttttttttttttttttttttttttttttggctaaaatcagaacttttttactgcattttatttattttcttcaatcattctttaacttccacaaggtttgggtaatcaactcctgagaaagaaaaaaacttaaatcaaaatacttaatagcatggcgatacatttatacaaaacttctaccccaagcacacgcaatggagccgtagacagtcaagtaaaatccaatccacgaaatcatttgatctatggacagcatcgttgtggtaaaggccgtaatgccagaggaatcattaccgcagggcatagagggggaggtcataagcgtctataccgtaaaattgattttcgacggaatgaaaaaaacatatatggtagaatcgtaaccatagaatatgaccctaatcgaaatgcatacatttgtctcatacactatggggatggtgagaaaaaatatattttacaccccagaggggctataattggagataccattgtttctggtacagaagttcctataaaaatgggaaatgccctacctttgagtgcggtttgaactattgatttacgtaattggaagtaaccaactaggtttacggcgaaacctagaaatcgatcactgatccaattggagtacctctacaggatagacctcaacagaaaactgaagagtaacggcagcaagtgattgagttcagtagttcctcatataaaattattgactctcgagatatagtaatatggagaagacaaaattgtttcaagcaccgacagaaccggaagcaccctttgtttcaaagtttcaaagaggggaggacgggttattcacatttcatttgatggtcagaggcgaattgaaagctaagctgtggtaattctaaggattccccccgggaaaaatagagatgtctcctacgttacccgtaccatgtggaagtagcgacgtaatttcatagagtcattcagtctgaatgctacatgaagaacataagccagatgaaggaacgggaagacctaggatgtagaagatcataacatgagtgattcggcagatttggattcctatatacccactcgtgcggtacttcattgtatgatctatatctatatatctatatctatatatctatctatagatatatagatatataagatccatctgtatagatatcatcatctacatccagaaagccgtatgctttgtaagaagcttgtacagtttgggaagaggttttgattgatcaaaaagaagaatctacttcaaccgatatgcccttaggcacggcaatacataacatagaaatcacactcggaaagggtggacaattagctagagcagcaggtgctgtagcgaaactaattgcaaaagaggggaaatcggccacattaaaattaccttctggggaggtccgtttgatatccaaaaactgctcggcaacagtcggacaagtgggaaatgttggagtaaaccagaaaaatttaggtagagccggatctaaatgttggctaggtaagcgtcctgtagtaagaggagtagttatgaaccccgtagaccatcccgcatgggggtggtgaagggagggcccccaattggtagaaaaaaacccgcaactcctttggggttttccctgcacttggaagaagaagtagaaaaaggaagaaatatagtgataatttgattcttcgtcgtcgtactaaatagtagagaaaatagaaaaatgtttcttcgtctttacaagaaaaggagtattaactgtgacacgttcact

SEQ ID NO: 123527 - DNA, 291 bp, Glycine max
  Clone ID: PAT_MRT3847_82552C.1
ctcgagccgcaaaattaaaatggatggtggacaaaaaagggtgaatattgcacaagaattgtgatgtccggaacttgcaatacacaaaacgaatagaccgagcctcattgaatcaaagaattcataacctgggggccccccctcttagcatttcgatccccgcgaatttaattacctgcgggtcctttgggggcgaacagtttttccttatagaggtctgtttaactcatgggcaaatctcgattttgcctttttcctgggcaaaattggtttcctctccaatttaccccc

SEQ ID NO: 123528 - DNA, 388 bp, Glycine max
  Clone ID: PAT_MRT3847_82553C.1
cctattacagttttctgcgacaaacccagtgatcaagccattccaattcatcgtgaatgaacccatcattatcatagctcattgtcccagggtgaatcatcgatcaagcatcaatgaggtaactaactacgaagcttattcatgtgacgaccactgttgatgtggtatttaaagtagttgtatctttgtttgaacagtacaagctttgtatctccgtcagaaatcttggtggttttaaaccatggtctattgcaatgggttgaaatggacatttgttgagggtgaattatggtaacttggtaagtgacaattttttaatgttatctttcaagaaattcaaaagagtggggaatgttgaactaatccgccagtgaagtataatgaaaga

SEQ ID NO: 123529 - DNA, 530 bp, Glycine max
  unsure (1)..(530): unsure at all n locations
  Clone ID: PAT_MRT3847_82554C.1
tggggatctcacgcctgagatttttctctttgaaaaaagcagacggctctnnnnntggcgggcttanctgggcgtgcctntctccgttttgcggattccgacgcctttaggttcctccctcgaggctgtgtccggccccccttggtcgatttgcctctttcccgaaaaccgggaaaaacgacacaagggaaattgaccccctttttgttcattaacatacgggtagggcttccctaaatcctcctctcaaactagcgcttccctttcgaacccttttacccaactttgcattgcctttctgcatcattccggcaggttcctgtgggtctattcgtccatctttatcttgatcagcttttgggatcatttcctccaagcgaacatctccaatgccatattcttcacaagcttgctgaagctcatcttgcgtgatgccccccctcccatctttttcaaaataagcaaatgctgccactaaatgatcttctctttcaaccttggttagatgccatgtcgccgctttgaacttc

SEQ ID NO: 123530 - DNA, 459 bp, Glycine max
  Clone ID: PAT_MRT3847_82555C.1
accgttcgcatcgcacgccgtaccgtaagccctggacccttctaggaggggcccgcccccccccaccccccccccccacacacccccaccccccaccctcagacaaaagtaagggtctatatcaacagaattcaaagcgggaatttttaggctccatatcaaaagctgcttctaataagatcatatactcaaggaataatgctcatactacactgtaattttttttatcgagacgaaaatataaaacaaaactccgatttataagagaatatacatagtccttctccccgcacgacaaaatatatatcatccagaaaaactattgttgatgagaactatattgcataaaaacatcaaatgtttttcaataaaaacccaccactgctgaagcattagttcatgccataatgaacattcaactgcttagatattctacacttgttgggttacacaaagttt

SEQ ID NO: 123531 - DNA, 473 bp, Glycine max
  Clone ID: PAT_MRT3847_82556C.1
ggcttctgttcccagaggccgaatatctggagcttgtgccaagcctgcagatgaccctggcctcaaacccacaagtgacagaatactcgctcccagtgccctgacccccccagaggaagcccctcaccttggcggaagccttcagcacactcctcagtttgccgtaccaggctgtgggcattctgcaccacagcaggaagtcgggcataccagctcctcagcacatcctgcggacggggcaggagaaggggtggtgaggacccaggcccagctggcaggccccctgcctgcctccctcatgctggggccagagctcacctgcagcaggttccgagccaggcgggtcttgccagtgtacaccaagagcaggtggtcattgagcttctggacaaagccctcaggcaccgtgacctcttctacctccaccttcaatggcagctgaaccccggagcgccccaccttgatgccaggca

SEQ ID NO: 123532 - DNA, 470 bp, Glycine max
  Clone ID: PAT_MRT3847_82557C.1
ttttcgcgtggggtttaaacttttggaattttccaagatgtaattaaaaaacatggaaatcctttcatcaaaaagatttccatgtttttgatgaaaggatcatacaaccatttttgtcaaataacaaaagttgcacattgtaatgttttttttctataattcataaaattgcatcagtgtggtgctttgctgaagtttgtttgcaaatgtatcctattatgtatccaattcaacccttgcccctctactttaccccaaaaataagccttgtacttttattaagagaatcgtggcatacaccaacaatactagtctgaataataagacctgaaacgaaatcctttttgtttatatttgctcaccaacaaaaatatctaagtcttctttcatttcaatttttttttcaaccaaggtggatcttttgaagaataattaagatttgatgaagccctttactacaaagaagagtc

SEQ ID NO: 123533 - DNA, 468 bp, Glycine max
  Clone ID: PAT_MRT3847_82558C.1
acgtgattcattttcaacattttatttctccattgagagtgtgacaaaccaaaagttgaaggaataattttttagccctttttttcctgtgatcatactttattttctaactaaaattttcttttctctgatcatactttattttctaacatgaacatgctagccagaatagaaagaatttcagaagtgactaacatactaaccatctaaccaaagccagaatctcctgactattttttaactccctctaatttaaatctatacactttaaatggtagtagcacatgcctcgaccaaaacgagctggcatgataattaccaagcgtttatggatcgaactgccaggacgagcggaatttctaatcatcgcagccaatataatccaccctacttttcattttgacatatttgatgttggtcgaatctcaatattgactttagaataacccgaaaaacaattatacgaag

SEQ ID NO: 123534 - DNA, 364 bp, Glycine max
  Clone ID: PAT_MRT3847_82559C.1
cgccctttatttctttttttttaatttaacaccgcgcctggatatataaagccagggaatggtctcgtttttcaacataatctctttttttcagacacatatgggattataccgtggtgaaataagatgaatcttaccatgaagaggccttggaagaaaacacgaattactttaagccgtaacctaattctaatggaaagcgacacgagaccctaaacttaagctctcttgcctctgattctgcgagcgagttgaatgttcttgggcataatggtaactcgtttagcgtcgatagcgcataggttagtgttctcaaagagcccaacgagataagcctccgcggtttcctgaagagcctgaaacg

SEQ ID NO: 123535 - DNA, 157 bp, Glycine max
  Clone ID: PAT_MRT3847_8255C.1
gacccacacgtaagttcagatgtcagtacagcagagaggggaccatagaagggggacagttcttctcttcactcttcacattctgttcatcctcgtgactgtctatcgatatcttggccgcgttgatctctttctctggcatattccgtcgactctg

SEQ ID NO: 123536 - DNA, 391 bp, Glycine max
  Clone ID: PAT_MRT3847_82560C.1
gccacacgttcgaccagacgtccggtttgtagacgaaacacaatcttctccttttgttgaaaagagattgtgattggttgctctctcaactgataacggattgcagtggcgataactgggggtgcgtaagtttctgcaaatgctgaaacgggatgcgctggctgtaagatgtactcagacgtttgctgcactgaatcaagcaccagcgaaaactatgtgcatagtagcgtctcctgctaaggctcaatgaggagttgttggaatctatgtgcacactcagaactatgcctgataatgagaagcaaactgctcgtgcaaacactgtactgggaaaagatgggtcgggaagaacaaaactgcggcagacatcaccgacggtgatgaataagga

SEQ ID NO: 123537 - DNA, 420 bp, Glycine max
  unsure (1)..(420): unsure at all n locations
  Clone ID: PAT_MRT3847_82561C.1
ccaaacccaaaaaaaacctatttatggttttgggaaaattctaaaaaaaaagtggattttgaaaaactttttaaaaatggggggggaaaataaaaccttacctttaaatttagatgatttgatccaggggtttaaggggacttgggccttcgagggggggacccctttaaagggcaaacccttaggggtttgcttaaagcctccagcttttaaaacctttcgtttttggggttcttttttttcttcttctttgggggcttntggccatcttcttttttttttttttccgggcctccgagggggggggcaaaccccggggggggggtttcatccgcccttaaatcttcatccccgccccctaaagaagaacctttgccccccctttttttgttgggcccggttttgagcaccattcttccc

SEQ ID NO: 123538 - DNA, 512 bp, Glycine max
  unsure (1)..(512): unsure at all n locations
  Clone ID: PAT_MRT3847_82562C.1
tgttgacccatctatggatcatttagtaatacagggaaatgagagtgatcgattagaactgcagatgtatgcttctcagtatttccatcaaatctcggagcttctaaggagattaccacgagtgattcttctaatgctgaagacaaatgactgtttacgagcagtcaataattctctgttgcagggatcatctttggagacattttttgtaattggaaaggtttcttcggaggctgtcattgaggcaaagatgttgcaaagcaaatcacttttaacttggctaaacattaaattggataagattttgctggaagtacgactttggggaatgcaggtggccttgtggcttttacaactaagaaaatctttgtcttggtataaccaagcattgtagaagaattaatctgcctcattatttgctacattttattcttttgggaaataagctcatattctttgtcaacgtnnnnnnnnnnnnnnnnnnnnnnnnnnnnnnnnnnnnnnnnnnnnnn

SEQ ID NO: 123539 - DNA, 649 bp, Glycine max
  Clone ID: PAT_MRT3847_82563C.1
ccacgcgtccgctttaaactaattctctaatcagctattatactagcatttctaatcttttcttttactaaaagatatatttagattatctttctaaataattattggatagttttagaatgttataggttctctctcaatatatgaaggtgaagagtgtcattgtgtggtgcctaagaacgattccaaagtctatcttcaaaaagttgcctcctacctctttgttggagtacaagtataaagtaaagtcttatcatcgagtaaaaatgaaaaatttgaacatcatgtaagtgagaaaaaaactcataaatttcaactttaaggttttagattagggtgtgatgtcaagttcacttacatgattactcatgacccattggtgtaaatctccttggtatttatttccctcgattttttaacaattggtatcaaaactttaagattttggattaaagtgtgacgtcaagttcacttatgtgattgtttgtgatccattggtgtgaatctcccgatgtttacccttctcagtttcacaacaattgatattagagtcgatagttcgatttggtaaccgactcaaacgagtaagatgacaacaacgaatccatggatatagagatcccttatcaaaagtcttattgacgagtga

SEQ ID NO: 123540 - DNA, 718 bp, Glycine max
  Clone ID: PAT_MRT3847_82564C.1
cttcagcttctcttttcttcaaaaggcaattgatttttcttcatgatgccgagtgttaagcctgatgcatctgacaaagactcagaaccatttgttgaagttgatccaacaagaagatatggaagatacagtgaactattaggatatggtgctgtgaaaaaggtgtatagggcatttgatcaagaagagggaatagaggtggcatggaaccaagtgaagctgaggaacttcagttatgacccttccatggtggataggctttactctgaagtgaggttgctaagaagcttgaccaacaaaaacatcatttccctttacagtgtttggagggaggagaaacacaacaccttgaacttcatcactgaggtctgcaccagtgggaatctgagggagtacaggaagaagcacaagcatgtgtccatgagggccttgaaaaagtggtccaagcagatcttggaagggctgaattacttgcatttgcatgatccttgtatcatccacagagacctcaactgcagtaatgtgtttgtgaatgggaatactggccaggttaagattggtgacttgggcttggcagcaattgtggggaagaaccactctgcacattcaattcttgggacaccagaattcatggcacctgagttgtatgaagaggactacactgaaatggttgacatatactcattttgaatgtgtgtgctagagatggtgacactag

SEQ ID NO: 123541 - DNA, 332 bp, Glycine max
  unsure (1)..(332): unsure at all n locations
  Clone ID: PAT_MRT3847_82565C.1
gagtaattataacatttattttttcaacctaatgcacaacggccaagccaaaccaaagcgttttacatttatcacataaataaaaagaagaagaaggacaagaagaagaaggagcatggacatgaccatcatggtcatagcagcagcagtgacagtgattagatcttatatgttaagcaggtgtacggtacgatggtagtgaggagccagaatccctcttcctgctttatgatataatacaaataaaatagcgaattccgggnnntnnatgtctgnnncnngctnttttttatttttgtgataaatgtaaaacgctctggtttggctctgcc

SEQ ID NO: 123542 - DNA, 594 bp, Glycine max
  Clone ID: PAT_MRT3847_82566C.1
ggctcgagccactgtgctcatttattcactcacttagaaattaaggtcaagtgatatttgcttcttccttcggttaaatggccggatactgctttacatcaatgagcaatagttaaatctgatccctagcaagccgaagcatcaatccaagattgcagagacaaagaaggacccagaaattgtttgaattaatggcaaattcatcttccggagcttctcaaatgaaatttgttcttgttctttttctcctgtttatttccggattgatggatgtagcatcagagcaaatgccagcagatagcgttcctcagataaagtatgatgtctttgtaaactttaggggcgaggacatccgtcacagttttcttggttatttgactgaggctttttatcaaaagcaaataaatgcctttgtagatgataaacttgagaagggagatgaaatatggacttcacttgatggagcaattcagggatcatcgatttcattgaccatattctccgaaaactatacttcttcacggtggtgtttggatgaacttgtgaaaatacttgagtgtagggagatatacggacaaattgtaatacctgttt

SEQ ID NO: 123543 - DNA, 444 bp, Glycine max
  Clone ID: PAT_MRT3847_82567C.1
ccttcaagtgtgccataagaaaatggaaaaaaactgttgcaatcaaagtgattgattgtttcaccatcaacaatgaggcgctacttgtcaaaattaattcatggcccaattggctttaatccatcaaattcctttccgttgaattgtgagatgggttcctactgtgctgccagaagaactaatcgccaagcttcgttcagtggcaacaatgaatatgccacaagagcttttgcaacaacctcttgtgcttcattggctgaagatcagccaaaggataatcccgtctctgatatggtagtagattcatttggaaggcttcacacttacttgggaatatctctaacaggagggtgcaatttaagaatgcagtattgtatgccagcaagatggtgtggaacctcactctagtccccaacttttaacaaagactgagattctgcgatg

SEQ ID NO: 123544 - DNA, 255 bp, Glycine max
  Clone ID: PAT_MRT3847_82568C.1
gtctcgcgaacattgagagcctacagagtgttgacaacacagcattgtatgaaaaggcgggcacgatccttgagacatactggttggacgaggaagatgagactatccctccataggattcttttcagccatgcttaatgtttggtagctgtgactctcatactgtgccatacagaggattcaactttaattagaagatattcatgctatactggcgagtttcgcatgcggtatccgtatagcactgcatgatga

SEQ ID NO: 123545 - DNA, 309 bp, Glycine max
  Clone ID: PAT_MRT3847_82569C.1
aaaaaaaaaaaaaaaaaaaaaaaaaaaaataaaaaaaaaaaaaaaaaagggagggggaggagaaggaaaaaaagaataaaaaaaacatgcatgaaaaaaaaaaaaaaaaaaaataggggggcgctaaatttaatggactgaccttcgtttcccggccttgtgactgaaaaaacctttgttggggccaaactaaatcaattcgcggtacatcgctttacaaccagctggcttaaaaaccaaggggttcacaccgattaagcttaaaaacagtggcccaccctgaatggggagtgggaaaacccataaggc

SEQ ID NO: 123546 - DNA, 470 bp, Glycine max
  Clone ID: PAT_MRT3847_8256C.1
gaaattctcaacttcctgtgcagatgtattccatctcaatccacagccaccattaagcttgagctacttccattggcagcatacaagttttgatgaggagaaacataacaaaaaaacaagctaagttgcaagaaattatggaaatgctttgttttcctcctattagctcttttgttatactctcatcacctgatatatttttcatatatagaaaatgttaacatgtaatgaatgtgtgatacttaaattcatatccttaaaatttagaaagaaaacaaaaagacaaataagttttaagcaagggacaactatattgacaagctttatattactatactatgtatttttctagtgtgtaaattccttgattagaattagttcatattcatagaatttgaggtggagaagatatatattcaaggcatgcacgtaccttatgagtagcatatggtacatacaaagatatcata

SEQ ID NO: 123547 - DNA, 324 bp, Glycine max
  Clone ID: PAT_MRT3847_82570C.1
ctccagcctaattccgatggatcctattctcgactgggtttatgtgatgtgcgtaatctcattgacagggttgaccttttgatcagttgtatggtttagatcgatttagaaatgtaaaacgcatgagtggatgaaagcatctacaccggtgaaattcctatgccacggggagagcatgacggagcttctacatgtcatgagatactacgatatttatgctttcaatggataataattttgacagactctaagcatctttatagcgttaaaaatgtaaacagtgtggactctcttaggaggacagcattgctttggatgatgtat

SEQ ID NO: 123548 - DNA, 187 bp, Glycine max
  Clone ID: PAT_MRT3847_82571C.1
atcgagccgcttaaacacttaaactccttttagtttaaataatccaaacccaaaaccccaatattttcccaattaattttcatctaagttttccctaggacaatatatgataccatattaagatatctccacatccttaatactatctaataatgggtgttgtacgaacgtggaaaaccaggagggc

SEQ ID NO: 123549 - DNA, 282 bp, Glycine max
  Clone ID: PAT_MRT3847_82572C.1
ggctcgagctcacgaatggttgacattatgttgacgcaggtcacaagattggagtggatgcgggttttttaccaggcgatgttcataagaacattgatgacggtcaaacgaagattacttcttgggctgcagacctttcccgccagactaacgagtatccagagacaggtggaggtgtcatatatgcaatgcgactggctctggatattgatgctgctgctatgctctttcttgcatgtatcggattctgtatggttgtgttttgtttcctactacttgacc

SEQ ID NO: 123550 - DNA, 404 bp, Glycine max
  unsure (1)..(404): unsure at all n locations
  Clone ID: PAT_MRT3847_82573C.1
aattcactagtatttttcctttgttaagccatgtgttttccggcgacccactaatgctgttggtttggttccaacaaatcttattctttgtgcccatttctgtgatatgtctgatttatgcacatcactgtttcagtgtttctgtttctctttttttgctgtgttatgtactgcacttcacagctcacaagctcacattgcatgagtctggtcttattgttccattttgtttttctattaatttccatcaactttgtttctttcccttattgatcccttatacttcttgacttttgccattatattatgctctttagataaatggtgtccgtgtgtgtgtctggagtcggggctatgtctttttttgactattaanttggatagctttttacaattaaaaagga

SEQ ID NO: 123551 - DNA, 269 bp, Glycine max
  Clone ID: PAT_MRT3847_82574C.1
cgtgaacgacacaagaccagcataagggatcgctgtgaattgtgagatgctcattttccgactactcctcaaacgttagttcaaaatcgtctacggcactaactgttctaaggatcaggatgaaaactgcagttatagacctactcgtgatctctgctgtgttctatctgctgaatgctctaatataccatggagcattcctcatgagtagcgccagcatgaacaacctatgccttacgtctgacatcgaacagaatataagcactcta

SEQ ID NO: 123552 - DNA, 859 bp, Glycine max
  Clone ID: PAT_MRT3847_82575C.1
tcgtgctgccctgggccggccccgtcttcaatccttcgctctggccttgtctcatcctataaatcagagcctgtaagcaaaaccaagtttcacaaacttaagattcatctccttgtcctacaaaacatggttccaaccccccaactcaagtatgttcttctcctcttttattgtacttttgcctttaacttgttatccactcctgcctgtgccctcaacataggagctgaaaccactggagtcgctgtctctgtgagcaaagagtgcagtagacaatgcgagtcaagtttctgctcagttcctccattattgagatatggcaagtactgtggacttttgtatagtggatgccctggggaaagaccttgtgatggccttgacgcttgttgtatgaagcatgatcaatgtgtgtcagccaaaaacaatgactacctaagccaagagtgcagtcaaacattcataaactgtatgaataactttaagaactcgagggctcctacattcaaaggaaacacgtgcgatgcggatgatgttattgaagttatacatgttgtgatggaagctgctttactggctggaagagttctccacaagccatagagagtaatgttgtctgccactcaagtctcaagaaagaaaatgattcttcttcctattgttttgagtaattctcttaccaaattaatcaaactccaatgctttatttattcacatcaatgcactcttttaccacactcttattattacatcatgtctcacgcttgattattaaaaaagaagactaatctaaaacaagcataaggcataaaccatttataaagagtcttcaaaacaatattgaaaagagtgttttggtact

SEQ ID NO: 123553 - DNA, 733 bp, Glycine max
  Clone ID: PAT_MRT3847_82576C.1
gacaaacttaagattcatctccttgtcctacggaacatgggtccaaccccccaactcaagtatgttcttctcctcttttattgtacttttgcctttaacttgttatccactcctgcctgtgccctcaacataggagctgaaaccactggagtcgctgtctctgtgagcaaagagtgcagtagacaatgcgagtcaagtttctgctcaggtacatgtctaattctactattatttttgaagatttagctgactggattaaggtttaatttgtttaccatggcatgggggctaatgacagttcctccattattgagatatggcaagtactgtggacttttgtatagtggatgccctggggaaagaccttgtgatggccttgacgcttgttgtatgaagcatgatcaatgtgtgtcagccaaaaacaatgactacctaagccaagagtgcagtcaaacattcataaactgtatgaataactttaagaactcgagggctcctacattcaaaggaaacacgtgcgatgcggatgatgttattgaagttatacatgttgtgatggaagctgctttactggctggaagagtcctccacaagccatagagagtaatgttgtctgccactcaagtctcaagaaagaaaatgattcttcttcctaatggtttgagtaattctcttaccaaattaatcaaactccaatgctttatttattcacatcaatgcactcttttacctt

SEQ ID NO: 123554 - DNA, 413 bp, Glycine max
  Clone ID: PAT_MRT3847_82577C.1
ggctgatgaggttataatgagaggaggcgcggcttcagacacggagagtaaggcgccaccaagctttagggatccaggccgtagaaccagattgtcatcaagacctccgattacttctgcggattgtgccttgtcgcacttgggagccggctcttgacggactcttttgctaaagatcgtgactgctaggtgctattggcaatgtctgacgctcatacaccttaatggcgaagtggagggactactctgatcgcatggaagaggatcttgcttgcgaatgtatcgaggagagtgcaggcgatcctctcttgggcatggagagagatggatcctgtgagacacttggagggagaaaaaaacggcttatacttggaaatgctggcttccctgcttcatgtacagaaaaaggccaa

SEQ ID NO: 123555 - DNA, 211 bp, Glycine max
  Clone ID: PAT_MRT3847_82578C.1
gtcgtagcttgatcctctagagcgccgcttttttttttttttttttttttttttttttgctaagatgagcttaatatattgaggcaattgcaaaccgtcttcaaaaagttgaagattcacaagagcattatttatagcatagtagctcattacaaccatatgacagatccgtttattaaagggaaataatgacacgtatgtttaaatccat

SEQ ID NO: 123556 - DNA, 193 bp, Glycine max
  Clone ID: PAT_MRT3847_82579C.1
agataaaaatagagaaacaaagggtccagaaatttgtgtgttaatccatcaaccaatatatagtgcgatcaacatggctgtccttattttagtcgttgcaatcatttctgaaacaggttaatgccaaacgttactataagttccctcaccgaatgaataccggatatggtgctcgtactccggtggtgaaatt

SEQ ID NO: 123557 - DNA, 559 bp, Glycine max
  Clone ID: PAT_MRT3847_8257C.1
caacatggttcacattatgctggggctggggcagcaggggcagcagcagctttttcctccttgatccgattttttttagggggccccatgagggcggccttttcagcaggggtttggaagcgcccttgaccaacctgggatgaggggccgataaacttagggtggatcttttccaaagcaaccctttgggggggggggaccagggcctttttaggggggataacccccttttggggaccaacaacccagcccttgatcataagggagccatggtttccctccccatggggggggaacccccccaggggagtaagggtcttttgggccaaatggtccccagtgggggcattgtttttaacaaccttgccatccttgatgggaatgccctggccaatacgggaaatctttttgtccatttcaattcggggggggaaacccttttgaccagccctggaaaaagggaaaagaaccctggttggaagccccgccccaatacacgcgacctttcgaaaacccttgggggttttccggggaaggtttttggggggccaacgggggg

SEQ ID NO: 123558 - DNA, 486 bp, Glycine max
  Clone ID: PAT_MRT3847_82580C.1
ggctcgagctagttctaggatcgtgcgaccacctacgaaaggcgctgttgtgcagagaccccgaacccgtgctctgaccgccgtgcatgatgccatgctgtaggatgtggtgtgtcctgcgcagatagtgggcacacggggcacatatataatagagggctcacaaatattgagagtgttcttgtgccccaaggagcgcaccaccactgtgtacacgctggagacactttctggggagtatatagagcgcactgtgaaagatgtggtatatgagtgtccactctcagaagcctgagatgctgctcggggtacagtggtatatagtgtttgggagatatttctgtgagaaatacacatagtgtgaaacactatccacaatattgacacctggagtattatatgatgcgcctttacctcggatatatatagtggtcctgtgttaatatagaacgctggctttatatgtggcgcaaaaaaaaaaaaaca

SEQ ID NO: 123559 - DNA, 373 bp, Glycine max
  Clone ID: PAT_MRT3847_82581C.1
ggcaaacaagagcaagattagctggaagtgttcaacttcactgatgcaggaggagttgccgtatcaatttacatcactgacgagtccatacatgcctatgatgactcttctgtggccactgcttatgaaaagaaatctccattggatcttaggaccaaaaacactattttgaacaaatatgatggcaggttcaaagactattttccacgaggtgtatgaacctggctgtaaaacacagatttgactcttgctgcatatggtctgagcaccgccttatagataacatggcagaatactctcttaatagggggagagggtcttcttgcgcttgcgagatttatgatggtaatcctcagagcgatttcttaactca

SEQ ID NO: 123560 - DNA, 1154 bp, Glycine max
  Clone ID: PAT_MRT3847_82582C.1
tacggctgcgagaagacgacagaaggggaagagagtagcattcctattgctaattcctagtgtatactactccacagtacacagcacccttttagtactagccaccattcaactttctctcttcccacactcccttcactttttacaccttcctttcttactctgctcatcttcttggccatcctaggtagttagtagtttttggaggatgaggttgttgtgtttgtgtttaacgttgttgctgtttctggctagtgtggcaatggcagaagaagattcagatcataataagcactccctaaaagccacgtcacacgcgcagatccagtgcacaatgtgttcctcttgtaacaacccttgcaaccaagttccatctccgccaccaccttcaccaccaccaccatctccttccacaaacaactgtcctccaccaccctctcctccttcctccggcggcggcggcggaggagctccgtactactactccccgcctccaccctctcaatatacctactcctcaccacctcctcccgcatccaccggcggcggtggtggcggaggaatctactactaccctcctcccagcaacggaaactacccgagaccaccaccgccgaacccgattgtgccgtatttcccgttctactactacagccctccgccgcccgggtccaccgccgctcctccgccctccacggcctcctcgcttctatgtgcacttgctttctcatcttttctactgttgttgctttgatagtaaatgcatgaaaccaagaaaaagaaggaaaatagtaggaataagggcgcagatttgcagatctagagattccgagggaaatgagagttgagagtgagagtgaggtaatagaagtgctcgtgaatttcccaatctgccctgaacatgtgaagtaaagcaccacaccacacgcactatatcctcctcttaattattatgttctctttctgaatatctagtgccaaggtagattgatctgcaatttgttaacaatttttattttatgtactactagtaagttttatttcgttagtatagaaataaaataaattacaaagatttatgtcaaagtactccagcatagtagtagtatatagtatttcatggttaatgaagttgatcgaatatttaatttgct

SEQ ID NO: 123561 - DNA, 270 bp, Glycine max
  unsure (1)..(270): unsure at all n locations
  Clone ID: PAT_MRT3847_82583C.1
gttngangctcannagccngaaactatncgtgtgttgtngttggtgtgttcaccattagnnagatgtcctggcngagatcatggtctncctcnatggatgaattctgcctttggtggtaattggaagacaaagcntattccantgatgccttctatttnaggancacaagccaaggttganggagttgctanaggaatatgananngtttncaccctaagaatccaattggccagggtcatcngnanctcagncnagnnanntanctggt

SEQ ID NO: 123562 - DNA, 233 bp, Glycine max
  unsure (1)..(233): unsure at all n locations
  Clone ID: PAT_MRT3847_82584C.1
aaaaaaaaaaaaaaaaaaaaaaaaaaaaacaacaataaataaaaaaaataaaaaaaaaaacaaaaagggggggaaanngggcggccgggggggggttccatattaaagtccaagttaacccacgcgaccatgctattatagggtctataaagaaaaccctaaggtcaaccaactacaacggcctttaacaacaaaaccattgggaaaaccaatttaatacccaagaaaaacat

SEQ ID NO: 123563 - DNA, 389 bp, Glycine max
  Clone ID: PAT_MRT3847_82585C.1
aggtgttcacgcaccaaacccaacacacacctctctgtctctctctctctctcttgggctggtgttctatttctcattctttcgccagagaatgctgaactgactctgcggctcggtacggttttatttttttctgtttatggatccggtcgcgatgaagcacgaggggtccttcacgcacaatgcgagcggtaatactgcgccagttagcttggcggacacctggctgagatcccgccgactactagtggccgttgcggattggggctcataaacccgcagttccgtcacggaccaggagggcagtttgacgattccaccaccgggccgagccacggactcgcacccagtaacagcaaatagcggcgcgactctccggaggactattc

SEQ ID NO: 123564 - DNA, 359 bp, Glycine max
  Clone ID: PAT_MRT3847_82586C.1
cacagagcatacttccctatttgctccctacttctattccgtgcaactaaaattctatgcccagaagttattgcaaaggattataatcccccactgtacaagcctcccactgagaaaccaccagcctataagcccccagtcgagaagcctcctgtttacaaacctacagttgacaaccccccaattgctaagcccccactacagaaaccaccaatgtacaagcccccagttgagaaacccccaatatataagccccccgttgcggaaccaccagtgtacaaccccccggttgaaaaaccaccagtttacatgcccccagttgaaaaacccccaggtacaagcccccagttgaaaaacca

SEQ ID NO: 123565 - DNA, 128 bp, Glycine max
  Clone ID: PAT_MRT3847_82587C.1
caattgactgcggtcctgagataggtgtggaccccattttgcctcatgatttgcatcactctggtgtctgtgggaccatctcatactggagccttgatctggcttacaagggaccctagtactaggtt

SEQ ID NO: 123566 - DNA, 491 bp, Glycine max
  Clone ID: PAT_MRT3847_82588C.1
actctagaataactggaatcaagaagtaatccaattacttgcttcggaaggaggtgcacgggctaagggaaaagccaatgccccggatacgaccggaatttacttggactacttccaaggtttaacataacgacttcgacttccaatccttaaaaaagaaagaagggcagactgcctacttcagctacaatcaaaacaaccttcacccacaaagaaaagcacttacttaccaagccaggaagaaagaaaatcttgactgctggcattcattccaagtcttggaaatcgcccgggtttagtcattgctcttcattcgcctagttgtccctgaagggaatgtgtaagcgaagcgtccccaccccttgcctttgactcccttcccctatctattgagctaccttttgttcaattggatactcctactctgttgaagcctgccatggaagggaaagctttttaaatagacagcataaaggcattgatgagctaaa

SEQ ID NO: 123567 - DNA, 378 bp, Glycine max
  Clone ID: PAT_MRT3847_82589C.1
aagagaaagaccgtggggttcagggggcataggaaacaggagaacacttggcagctttcgtgtggttactttagaggaaacactgattgatgcaaattgtaaacctgcacacgcaccacaggactctaattaaggcatgccattattgaagaacaaaaacactagaagacaaggtaaatagcttaatctcttttgaagtacacggcttggccccaatattgttgaccgccagggtcaaaaaaacttgccagtcatatcattggtaatgcaatgatggacactgaaattatcgaagccgggttggagaacactctgttgcctgaccagaacacacttactggctggctggccatcatcggaatccaaactttgcccttt

SEQ ID NO: 123568 - DNA, 1051 bp, Glycine max
  Clone ID: PAT_MRT3847_8258C.1
gtgagttatctttacggatatttttgtggaaacctgtaatatgtgggttgaatttcccctccctatcagcgccccaaccactgggaaggcttaaaagttaaaattcatacgctccgccccaaaacgatcttctcacttgatcatactctccccctgcttgtgtcggttaaaacattggactcctgtatcacaaatccaactgccaacagctccagcccctgatgcccacaagctgtttgaacaaaaactcgtaggactgtcgtattctcctttcgacccaactcaaacttctgcatacatacctctgcttcttacactccctaattctgataattctggttgaacatcacaaaaaattatagtaattatcagtgcttcatccgcattcaagaactccttcggtcgcattgcaatttcgcatcaccgtcgcagtgtcgattaatcaagtaatttgtaattgaagtaacgcagtcttctttctgtttctctcgacccacttcaccacaaggttcttgaatacccattgagggtgctgaaggggaagttattgaaatggcaagctacctgtggagaaaatatgcagattatttgtacacaaagtgggaaaaaacctttctttgggacatggtggaaccttacagaaggcccaaatcctttaccccattggtcactatttacattgctgctttctactctggagtcattggtgctgccatcactgaacaactctacaaggaaaagtactgggaagagcaccctggaaaagcagtgcctctcatgagaccgaagttttatgggggtccttggagggtcatgggcggtaatgaacccccatctaaatgaaaggctctggaggcagcatgtttcatacttaattccaattcacttaatgttttttatgattaattgattctgtttggtgtcaacaacattttactaccgcatacatttttatgggcaaaaaccctttattatatcagagagtgggattttctcttggctcgagactttttgtaattatgttctcaatatcacttgttggttggtaatt

SEQ ID NO: 123569 - DNA, 452 bp, Glycine max
  Clone ID: PAT_MRT3847_82590C.1
gttaattctctgtctgatagatttgtattttgagtgatatttgggtacgtgtaggagtgaaccttcctttaggaaaaaaatgagtgttagagatgtcatgttaactagtgatatgagatgaattgtaagatggtatcaaagcctatcataatgatagttgttgggctcattgtgctatccaccatcagtaaatgtctagtcttgcaaactttatgctcaagatgttctgaccctgcatgaggggtgatatgaccaaaatagagaatagaagttggtggcaatcctcactctatgaactaatttttagagttgagttaagcccaaactcaaattctaagagagtattgtgttgtggtggggttaatcaaattcttgctcagttatttgaagctttggcttttgccttgtgagattattgacttggaggaagaggagggtgtcttgtattgtga

SEQ ID NO: 123570 - DNA, 342 bp, Glycine max
  Clone ID: PAT_MRT3847_82591C.1
gaacggagaatactagcgatctccaattaattccttggtcgacgatctacaatctcactaggccgcggtcgcccttttttttttttttttttttcattttggaactaagattactctgaccatggaccaatgtgtacacaatccaatgttaaagcataagcgcctatatccatttctgccagaaacttcaaaaggttcatactatcgacgttactcctttacaaaccaacacaactcagataccggggggccacactgctatgtacattggccggaattcattatacagatgattactattaatacgcatgaaggaataacactgatacacaggttataccc

SEQ ID NO: 123571 - DNA, 411 bp, Glycine max
  Clone ID: PAT_MRT3847_82592C.1
ctccacgcgttcgatggcttttaaacgcattctgaaggagctcaaggatttgcagaaggaggctaccacgtcatgctcccaagtacagaagctgttgacatgttggactcggcgagcctctttttaccgtgagctgctgatagcccatatgcaagtgttgctttcttagtcccaacaaaatatccttctgactatcacataaagccaccaaaggcagctttttggactaaggtgaaacacccaaacgtcaacagcatgggcacttatgggtcgacattctgaaggaacactgaaacccagctctaaccattttcaaggtgcttgcagaaataggctcattggggacagatgggatgcgtgccgatccacttgtacctgagatcgcacacatcttcaaaaccgacagggcca

SEQ ID NO: 123572 - DNA, 273 bp, Glycine max
  unsure (1)..(273): unsure at all n locations
  Clone ID: PAT_MRT3847_82593C.1
gaaaatattcttaaagtaaagnnagtaacgnantcaaaaaancttggaatttntctgaantcnatcccgtnatcgcgtnttcntgaactcagaaccaaaacccgggcttcgttngagtnnctanggagaatccgtnttcgcatattcngagtctagggtttgnggattcgacggcggcggcgatagcgcangcggcagggcagacagtggtggtgngagactacgtggtggggaagcnaatcngcgccgggtngntctccgtggtgtngcacg

SEQ ID NO: 123573 - DNA, 794 bp, Glycine max
  Clone ID: PAT_MRT3847_82594C.1
cgaattcgacctcgttacccggggatcctctagagtcgacctgcagtcgactctttaaagtcgatcctttctcgagtgcttggaagaattcactcttatcaagtctgggagaaaatccatgactattttcacaaacaaacacgagcaagagctcatcaattgctgactgaactacacgtgacagtgcttgcagacgagctgatacgtgaattctcaaaatcaaggctatttctgattctctagcctctgttggaagtccgatcttgcctcaggagcacattgatgcgatcctcgaaggtcttcctcgagattatcactccgtgatttctgttatcgaaagcaagtttgaacctcttccggctgaagaggttgaagcgttgctcttagctcatgaagctcgtcttcaaaagcatgctttctctgactcactgtcaatcaactacacgcaggctaatcctagtttttcgtctgcacatggatctgatggctacaatgtggcaaacaaagcatcgcaaactaattctgaaaatttttcatctaactctcacagtggttttggtcacggaggtaacttcaatcgtggcaatcaacattttgctaattttcaatgtcaagtttgtttgaagtacggtcacaccgtttctcattctcactatcgctatgaccaatactatcagccaagctcgtctctcactctgcacgatcccttgaaccctaattccaattctcagaattattcatctcagcagtctaattccaattccactggacagacctatggtaacactcgtcct

SEQ ID NO: 123574 - DNA, 1021 bp, Glycine max
  Clone ID: PAT_MRT3847_82595C.1
accggccgaaaaaacagaacatagtgacagagtgttccagagagtttgttaaagaactgtgaagaagagggtaactgcaaacaaagcaagcaaaacaaaagacgcagtgatggagaggatgaagagggtgcttctgctgcttctggccttcactgttcttctcatgttgccagaagcttctgctacaaagtttactgttggaaacaaccagttttggaaccccaatattaactacactgagtgggctaaaggcaaacatttctaccttggtgactggctctattttgtgtacgataggaaccaagcgagcgtgttggaagtgaacaagacagattatgaaacatgtaactctgatcatccactcacaaattggactaggggagctggaagagacgtggttccattgaatgtaacaaaaacttactacattatcagtggccgagggttctgcttcagcggcatgaagatagcagttcatgttgaaaagctgccacctccaccaaaagctgcccctgtaaagtccgcggcaccgacccttttttcacaagaccgcattcttctcatgcctgttgtttttgccattggagcagcatgggatgcattcattcatttctggtagtgatattattttacacaccaccattgcacaacaccaatggatagtgttcatgttgtgttactctttttcttttttctcaaaggcaattgttgcttgcatggtgatattagtagttgacctcaaatgggtcaaaggatgatgtttcaagttaggtagtgtttgtgtttgattttcaaaatgtgttgtatttctgtatgttaatgatcagaaatatgtcaaactggtttaaattaatttaatttgttggagaattcaaatgcgggagttgcgggaatgtggtggtatcatgcttttggactagtaggaccttgtccatgtgcgtgtagtatcaatgcattttacttttctccaattttcgtgcatcttagtcccaaatttttatatattaaaaaggttatacta

SEQ ID NO: 123575 - DNA, 166 bp, Glycine max
  Clone ID: PAT_MRT3847_82596C.1
cacaacaccatagcctttctctcgctggcccgaacgggagtgtttaccaaccttggcaagcgagctttcgtaaccttatagaacacctttctgcgttacttctttttattcgatattctgtaagccccaaacaagttaaacgattaaacccttacccattttaggc

SEQ ID NO: 123576 - DNA, 317 bp, Glycine max
  Clone ID: PAT_MRT3847_82597C.1
ctttggtgttgggttttttttttttttttatcacaatggacatatagtattaagtggacaagtgaagaagttgagttcatgaaataagcagtatacaatatagcaatactgtaataaaaggaccaggcctttcaaattaatactgggcacaaacttctcacttggtcctacatctgcatcttttaaaagctagggtttccaccaccaatcttaaatacttggcttcaagtacaggggaaatgctatcttttgaccaagaaaacgaacagcctgaaaccagtatggaatccagatgctacggattgcataggtgacac

SEQ ID NO: 123577 - DNA, 519 bp, Glycine max
  Clone ID: PAT_MRT3847_82598C.1
gcgctcgagaagcctcatgttcctttagaatctttctttctctatagggatcggaaaaacgcatgacaataagtccttaaagcttggtgtgacatggctggggagataatatatatcatgattatgctattcaaccttataatgcagggggattatatatatgcgcttccactattcgatattctgcagaaactcctccatttgagcggcattaagatgacatatattgtgagcttgcagagttatgatactgatgaactggagaagccatattgtaatcttctactaagggcggcatctatatggtgatgaaagacatggaccgggatagaactggacttgctgactcgcctctgatgagatactcggatacccataattagagctgcatgagacaactgctgactgcgcttcactattgtgatggaaatcatggactgcatcgagatagcaaaggctcaaattttcagattgaccatgaaggaaatcttatgcttgcaccacttggactggcacgat

SEQ ID NO: 123578 - DNA, 468 bp, Glycine max
  Clone ID: PAT_MRT3847_82599C.1
caacctttcccatggcctgacgtttggagacgatatcggtcagaatatcggtcagaatcacaattcttctgctgccgcagtttacgcagctcgcgaggcgcagagcatgaaccaaaaaccgactgtcggttctcctgaatggcaccaagtcagaaaaaataaccataaagaaggcacgtgctcaggtctatccgcgtccagtatatactaacgtcgtcccagtggaacgtcgccgccgtgaggcaatcaacgagggtatcaaccagatcgctcgcctcgtacctaattgcgacaaaaacaaaggcgcgatcttgcaacgtgccattgagtacatcaaccaactgcatgaggaaaagaggcagatgagcgaacgatgggagcagagcaatatgacgacaagtcacgctatcaacgaaatcagtgcgcaaaactcaaagttaaaggtcgaggtcaaccgccccggtgata

SEQ ID NO: 123579 - DNA, 900 bp, Glycine max
  Clone ID: PAT_MRT3847_8259C.1
ccacgcgtccgataaaatggaggttcaatttgccctcccatttcactaacgcacacatcacatcataccagagactccatctccctctcgcacgcgacgagggagtcccgcttcggaatctcaccccctctttctgctaattcgcaagatggttgctcagaaattcgttgtcgacttgaacaagccccttgtattccaggttgggtatcttggggaagcctacgatgattgggttcacgatcctatcgtaagcaaagaaggtcctcggtttttccaaagcggtttcctcgagatctggaacttggtgaagctgatatgcaccccttcagttgctcctgcggtgtttggaggtattttgttgggctatgtgatgtatgattgcacccattactacttacaccatggtcaaccaaagtctgatgtgcccaaaagtctcaagaaatatcacttgaatcatcactttcggatccaggataaaggctttgggatcacttcatcactatgggataaagtttttggaacacttcctcctaaaatggatgccaaaaatatattatgcaggcccacatctttcctgcaaccatttgtgatgaaatagagaagctttgctgccattttatctggggtagcacccaggatcaatgtaaagtgcatctgatatgtgggaactctatgctcgctgaaaggaaatggaggacttggctttagaactcagaaatctcaactgtagctatgtcctgaatctgggatggaatattattcattaactagataatctctaggttcgagtcttgcgagccaaatatggatttggctgccaacctgtcccagtcattcgaaatgaaactgaagcctctcatacttggcgtgggatcgttatgacatggagtcatattgaag

SEQ ID NO: 123580 - DNA, 805 bp, Glycine max
  Clone ID: PAT_MRT3847_825C.1
acccggggatcctctagagtcgacctgcagcagctagcctaagttcagttgctcttgcccttacctatcaatcaatcagttatagtcaatgaaatgagtctttaattgatacaagcagcaacttccatgcatatataacagtgagatgacaagttttgaatgctcgcaattgacctataactgtagcacctgtgtcatgtagactggaattgaaatgactgaatttagtatacaaattactttttgatacctacaccaccttgctgttcttaaaaggaaaaaaaggtgcctaatgaaacaatacttatattcaaatgacagcccttagaagatttaaagaacaagatgccatgtagttttaaaatataatcttttactccttactcaagtaatccaataaaaataatgtatagaagctatgacctttccaaacaaggagcatccaaaataatttgatttgggcaggtaatatttatttgacttgcatttggagcaaaacttgagtctttggtgaatcttggatttgttgttagatagtggatcagattttctttatcaagtttacagatttcaccacgataaggagagtaaggttctataacagcctgaacgctattctttttagtatttggttatagcaaaaatgcttggttttaaaggaacatttctgttctaagattaaggcgtgtttatatgacatgaaagttaaagttttgaaagccttacgtggtgtttagcacatgctgagattctaaattttaggtgtagagaaaggagagaagactagaactttgaaattgatatt

SEQ ID NO: 123581 - DNA, 415 bp, Glycine max
  Clone ID: PAT_MRT3847_82600C.1
ggttcttgatgctcttttatgtgaatatgaaaaatccattcaagctccagagaagtggcaaaaacttgctgtcttcttacaacaaagttttgaaggcccggtactagacctaaccaggagactgataaataaagttgaatctgacaagagttctctcagtttaaactatcgattgactgaagataagattgccctgcttaataagagactggaaaccagtgaaagtgaaaagtctgagtatattaaacgctatgaggatgccatcaatgataagaagcaactaactgatgaatatatgaatcgcattactgaactgagggctagctgtcgctcattggatgagagatattctagcttatcaaaaacattggattctaccaagcaagatccatggattggaaagaaatatgaacag

SEQ ID NO: 123582 - DNA, 1745 bp, Glycine max
  Clone ID: PAT_MRT3847_82601C.1
tgcaagtagataataacaaagataaacaaaaagatactaatggtgatgctgatgtctctgatacatcctcagattctgaagatgaagataacgggccttcaaaggaggagtgcatcattcaatttaaggagatgcttaaggagcgaggagtggcaccattctcaaagtgggagaaagaattgccaaagatagtatttgatccacgctttaaggccattccaagttattctgctaggagatccttgtttgagcattatgttaaaactcgtgcagaagaagaacgcaaagaaaaacgtgctgcacagaaggctgcaattgaaggatttaagcggttactggatgaagcctcagaggatattaattacaatattgattttcaaacttttcggaagaaatggggaaacgatccacggtttgaggcattggaccgcaaggaacaagagcacctattgaatgaaagagagcagtgacgccagtctcacattccgtgaatcaattctcaaagctagtagttccgccatgtttataggctatcccaagttcttctgcttgcttcctttgaagaaagctgttgaagaaaagtctcaagcaatgcgtgcagctgcaacaacctgctttaagtcaatgcttaaagagcgaggagatatgtcttttaactcccgttggtccagggtcaaagaaaatttaagggatgacccaagatataaatgtgtgaggcatgaggatagggaagttttgttcaatgagtatatatctgaactgaaagctgctgaacatgcagcagaaagagagaccaaagctaaaagggaggagcaggacaagctcagggaaagagaacgggagctgcgcaaaagaaaggaaagagaagaacaggaaatggaaagggtgcgactaaaaattcgaagaaaggacgcagttacttcatttcaagctttacttgtggagacaatcaaagaccctctggtatcatggacggaatctaagcctaaattagaaaaggatgctcaaagacgtgcaactaatcctgatcttgatccattggacacggaaaagctctttcgggaacatgtcaagatgcttcaggaacgttgtgcgcacgagtttagagttctcttagctgaagtattgacttctgatgctgcatctcaagaaactgacgatggaaaaacagtgcttaattcttggtctacagctaaacgtcttttaaaatctgatccaagatataacaaagttccaagaaaagaaagagaagcattgtggcgccgctatgctgaggatatgctgcggcggcaaaaggcatctcatgattccagggaagagaaacatacagatgctgaaggtagaaattatctagaatcttccaaacatccattggaatctgggagatcgtacgagcgaagataattctttttgaaattcttgtcataacagttatctcttctctcctatgccagagattaggtttctttagtttgaagccctgacattagaacataattatattaccttttttaagttcttaatactgtgtttagtacattactctcattcctcagaccgcatttgtatactaataacattcttgagagcagaagtatcattgagggcagtgccccatatcctttttcaattctcgttcttaatactgtttagtacattactcttattcctctgaccgcatttgtatactaataacattcttgagagcagaagtatcattgagggcagtgccccatatccttttt

SEQ ID NO: 123583 - DNA, 807 bp, Glycine max
  Clone ID: PAT_MRT3847_82602C.1
ggccatcccaagttattctgctaggagatccttgtttgagcattatgttaaaactcgtgcagaagaagaacgtaaagaaaaacgtgctgcactgaaggcagcaattgaaggatttaagcggttactggatgaagcctcagaagatattaattacaatactgattatcaaactttccggaagaaatggagaaatgatccacggtttgaggcattggaccgcaaggaacaagagcacctattgaatgaaagagaaatgatttctattgataatccttgaaagcaacatgagtcagcaggtagtaggctaatgacagactctcggattcgctgtggagtgcttcctttgaagaaagctgctgaagaaaaggctcaagcaatgcgtgcagctgctgctgccagttttaagtcaatgcttaaagagcgaggagatatatcttttaactcccgttggtccagggtcaaagaaaatttaagggatgacccaagatataaatgtgtgaggcatgaggatagggaagttttgttcaatgagtatatatctgaactgaaagctgctgaacatgcagcagaaagagagaccaaagctaaaagggaggagcaggacaagctcagggaaagagaacgggagctgcgcaaaagaaaggaaagagaagaacaggaaatggaaagggtgcgactaaaaattcgaagaagggacgcagttactttatttcaagctttacttgtggagacaatcaaagaccctctggtatcatggacggaatctaagcctaaattagaaaaggatgctcaaagacgtgcaactaa

SEQ ID NO: 123584 - DNA, 441 bp, Glycine max
  Clone ID: PAT_MRT3847_82603C.1
agaacaatcataagtaaatggagttgaagcaatctgggctctagatgaaagtttaaggacaaatccgagcaatgctatccatcacaactaatgctgatacatacatcatgctatactaacaagcttgattaccaagaccgagcaacgtacagtgcctcttatgacaattgagtaggacagggggataaattatccatctgttggacattaaagtgagcatcagtacgatcgactttgcaacaccctgataacaggtaaggcaaaagtagactctgatgttgaaaccatacatgagcagctacaggtgtggctacggcatccgggtcaattctgagtgatgaccacccattacctgcaaaatctgctaccacaaactttttgaagaatctgataacgccttacacaggaaagttgagcttcgtgcagttacataccgataat

SEQ ID NO: 123585 - DNA, 368 bp, Glycine max
  Clone ID: PAT_MRT3847_82604C.1
aatcaattcaaacaaaccatctttaacaacagaaaatccgaaaggaagaaatggttgttttttttgttggtgagagagagggataaataaatagagagaaagcgtggattttggttcgtccactcgcacacactcactccactctccgcagcgtctttccccacacccaaagttcaaagttggaatctttcgagcgaatttagacgtgggtatgactccttaggtgttgttgttgaacaaatagttttgggtgatgacgatgatgatggagttgggtggacccagagtgatcggggattacatagtgggtcctcgaatcgggtcgggttcgttcgcggtggtgtggcgtgcaaggaatcgaagttcgg

SEQ ID NO: 123586 - DNA, 707 bp, Glycine max
  Clone ID: PAT_MRT3847_82605C.1
agatctcagctccagaaatcaaggattttctttgaatcatggattttagctaaataaatcataaatcttcataaatggatcaagttgctcctcctccgattctcatgcaccgcaagcgcgatctctcctacgccgtcgtttcgcctgctcccaacccgagctggagctgggactgggacagcgtgcgtttcgccggcaaaccaccgccaccactctcctccccaaacgacgacgtcgtttttgaggagagtgttgcgccgcctctgcagttaaacctcgggggaaggacgaacaacagcaacagcaacaagagagttaggtcagggtcccccggaacgtcgtcgtatccgatgtgccaggtggacaactgcagagaggatctgtcgaaggcgaaggactatcaccggagacacaaggtgtgtgaggctcatagcaaggcctccaaagcgcttctcgcgaatcaaatgcaaagattctgccagcagtgtagcaggtttcatcctctctcggagtttgatgaggggaagcggagctgccgccggagactcgccggacacaaccggcgccggcggaagacgcagcccgaggatgttacctcggcgactcccgcgccagccgccgccgcgaatttggaaatcttcgacttgttgactgccatagctggagcttcgcagggaaaatttgaggaaaaaaggtcacaagtaccg

SEQ ID NO: 123587 - DNA, 254 bp, Glycine max
  Clone ID: PAT_MRT3847_82606C.1
cgcgtccagctgactaggaatgcggcctgcgcgtagttattctccttctgcgtactagattagtacttgatgactagaacctggcgcagaccttactaactttcttccactatgaatctccgaactgatgagggtcatctcatcacaaggcgctctaccctaatcttatgcagttcgctgtgcggaggccaggtacacagaatggtttcactgcaggggaatcgctataattcgagccggttccatttgtccag

SEQ ID NO: 123588 - DNA, 594 bp, Glycine max
  Clone ID: PAT_MRT3847_82607C.1
aattataatatatttttatattttttattatatgaactattaaatagtcaagtcactcaagctaggcttgttaattaaataggtataatccctatctcaagctcaattgatttactacatgagacaaaccaaacccaagcctttttactcagtttacccacaatccaacaactttgacactttagattaatgggggagatgagtatataaggctgatcaaagaaacaactataagcatggaggatggaaaacaatgtcaatgtttgtcatcttcaatgctaaatctttgggcaaatatagtgttcctaaacactctgatgcgaagaccatagaaataccaaagaagacaatttctttgaaccattttcatgctttttggagtctaagaaaatcattaccatttttgcttcttccattagttcttcccccagctttttcaacaataacacattctttggcatagacttccacataagcatctgctgctgggtgctaggatgagtgaaagccaaagaagattcagtcactttttctctggtacaagaaaatccatctgttcgaactaggaacatctcagctttctttcttgattgc

SEQ ID NO: 123589 - DNA, 881 bp, Glycine max
  Clone ID: PAT_MRT3847_82608C.1
cggtccggaattcccgggtcgacccacgcgtccgtacaagcactttgggctttgtagttgcagactttcatttcatttgatcatttccttctccgtctccgtctggagaggactgagtatcactgtatcagtgtgagtgagcctcccataaacctaaaaccctaaatcacactaccatgagctggagaaccctagcttccacttcaagacacactttcaagagactcaatgcaatcctacgatccccttccaccaccatcccttcttcacgcgcctcctcctcactcttcctccacgtgccgttctccaccaccaccctacattccctgccacaacccaccaacgccctcatcgaccctaaactcctcgctccgcaaaacgacgccgtcaacaacaacgacgacgaaaccacgaacgagttcttatctcgattcgtgtggataatgcggaagaaggtgaaggaagcgtaccctgactccgacaagcccaccgtcgacggcatgctcgtcgccatcgtcgagatggtcgtctcggagatggaaaagggtaacatcggaacgacgtcgtcgttgttttgttctgctgatttcagcgaggatttgtggagaacggtgtgggaggtgagcagtctggtgctggaggacatgaacaaggagataaaaaaagagaaaatgaagagcttcttgcagtgcgaggaggttaaggagatgtgtagattcgccggagaagtcggcattcggggcgatttgctcagggagcttaagttcaagtgggcacgtgagaagatggaggaacatgaattctatgagggtttggagagattgagagaagaggcacgaagtgagggcaatggaattggtgttattactgagaagaaggag

SEQ ID NO: 123590 - DNA, 227 bp, Glycine max
  Clone ID: PAT_MRT3847_82609C.1
cagattagtaccacaaaaatggagaccaagaataactgaatatcgtacagctcaaaataacgatttaaccaaatgcaagtcatctgagcaaagccaattaattctttacaaagatctacaagtacacgcattagagagaaaaatttgcagacaatatagataaggtgtattcacctataattttatcaataacgccggtaggaaagactcctatatatagggataca

SEQ ID NO: 123591 - DNA, 433 bp, Glycine max
  Clone ID: PAT_MRT3847_8260C.1
ggttaattcaagggcccattattaggggggtttatgggccagttccattttttaaccaagaaccttaccccaggtccaagaccaccagaaggtcaatttccttcctttacctccaaaaaaaataccctacctggtttattaaaccaatggtggacccaagaaaaccacttcccaattccttcccttttttttttttaaaatggtaaacctaaaccccaattaaaaacctccatggatggaaaattttaataacattctttcaaacctttcctttcgggcatcaatcttcttctggtccgcctaacctttggctggtccaccttccttcttggggggggcaaaaccagcaaatttgactgtagcagcaaaaaacccattaccagccgctgcctgttcctgataatttcctctggtggggggggtggcaagcact

SEQ ID NO: 123592 - DNA, 1988 bp, Glycine max
  Clone ID: PAT_MRT3847_82610C.1
aattcccgggctcgacccacgcgtccgtacggccacgcgtaaagaccacagacgtttcgtccggcccttgtcccggtctctcggtcgctttttctctatcttcatcacacacacttcaatctttttcgcttttgtctttctttgtcctttgattgctgccattaattaattaattaatattctccctccctcttcacatcaagaagttagaagaagtcatgcggtgtcagcttgtgaagaagaaatgtgagaaggatcttggtttacacctgacctgacagttctagtagtagagtgcaacagctacaatctaatctaatggggtccgagcaaaatcgatttcctctgcacgaaaggcgaaagagatggggaggatgttggggtgcattttcttgttttaattcacagaaaggtgggaagcgcattgtacctgcatctcgcattcctgacagtagtgggccagcctctcagccaaatggacctcaagtgattgggttgaccaatcaagccacaggactagctccttctctcttagccccaccttcttcaccagcatccttcacacattctgcccttccttccactgcacaatcacctagttgtttcttatccttatctgctaactcacctggtggtccttcatctacaatgtatgccacaggaccatatgctcatgaaatgcagctggtgtctcctccagtcttttcaaatttcactactgaaccatctactgcacctctcactcctccacctgagttggctcatttaacgactccctcttccccagatgtaccttttgctcattttctctcatcttcagtggatctcaaaaacagtgacaagggtaactacatcactgcaaatgatcttcaagctacatattcactctaccctggaagtcctgccagtagccttatatctccaatatcaaggaactcgggtgactgtttatcatcttcttttcctgaacgagagttccgtccacagtgggattcatcactatctcccgagaatggaaagtatcagagaactgggtctgggagggtgtcagggcatgacacaaatggtgtcactatggcatcacaagatacaaatttcttttgccctgctacctatgcacaattctatttggaccaaaatcctccatttcctcataatggtgggagattaagtgtttcaaaagattcagatgttcaatctaatggcggaaatggacatcagagtaggcatgctagaagtcctaagcaagatgtggaagaaatagaagcttaccgagcatcctttggtttcagcgcagatgagattatatctaccagtcaatatgtggaaatttctgatgtaatggaggactcatttaccatgatgccatttgcttctgacaagtcaacaatggaagaaagcatagagccttcattaatgaaaggattcaaagctcaggagacgcaggtggcattgcagagtctgagaagtcttagatcagatccaggtccagtaggcaaggaagcacacaatcaggcccctatatgtccaggatgtgaagatcatacatcacaagggcattgtagcaacaactctggattaagtacaccagagaaacgtactctcgtagatgatgaggatatattctcaaaaatggaatcttccagaatctgcaggaaatatcagatggggttatcatgctctgatgctgaggttgactataggagaggaagaagcttacgagaaggaaagggaatgtgatttatgacactaagaattaatcagttgagaacagattgtatgttatctgtgtattaatttgtagctttgtttaaaaaaaagaaaagaaaaagaaactctttaacttggggttgtctaataaatggaatgacctaacttagatctaaccgatggtgtttgaccagatcttactgatcaatgattgtagtctcgttcttcaagcgagttcagattaatgtttgaagtgaatgaagtttgattttaaacaa

SEQ ID NO: 123593 - DNA, 158 bp, Glycine max
  Clone ID: PAT_MRT3847_82611C.1
ttcaactacctttttcttttttcctttacaaccgttgactacatgaagggaagggctttcatagtggtcgcgcttgcatacaaaacatataatatttggcattacaacacattattgatccttgaatcacacttattgtttttgaagatcatgacaaa

SEQ ID NO: 123594 - DNA, 699 bp, Glycine max
  Clone ID: PAT_MRT3847_82612C.1
gtcataatatggaacagaatggacttttattcaagataactatttgcttgaactgtatgtaagactttaattttacaatatgtacataccagtatcattttgctgaatttgagattctgtcctttgcaagtcaatttcttcaactcaaatgctcatttcttattacaagttaatggtagtgatctttctttatttatggtgaacttgtccagtgattatttgtgttgctggcatttgggttgagtgttagtttaattatttggacatataatatgatcattatggtgaaccatgaaatttggtttcatacaggtgagcataacattgattgcaactgggttcaagcgtcaagaggagagccaagggagggggctgacccagtctaccagtgcaggaaactcaagtggtacattcatgcgccaagaaaactactattaataatgatgatcgatgatcaactgttgattttggatctccctccagcttctatttttcttttagctgacataacaatggtgacttttgcccgtgtatttatagtttaaaaaaatcattaggtcattgcaaagacaaaaaatattgctagaaatgtctttaagcaaattcaacacttctcgaaccatctcaaatcttatttgtgataattgtgaacattaactgatttttttactcaaataatatatctaaaaaattatttcc

SEQ ID NO: 123595 - DNA, 308 bp, Glycine max
  Clone ID: PAT_MRT3847_82613C.1
tttcttcttcctctctcttcgttctctctctctctctcttattcctttctctccgaatccacgtcctagatccgttgttctcttcccacagttctcactgaatcaggatcctaattaggttgtactcattgcacaaaaaatttctacgccgagaaattctaagccttgcatattatcattggattccaagttgttttcgattccctgatatttctccgacaactacctctgcattgcattgctgttctacttatacgccggttccaacacaccacacgctcggaaattgattcgattttgctaccaag

SEQ ID NO: 123596 - DNA, 116 bp, Glycine max
  unsure (1)..(116): unsure at all n locations
  Clone ID: PAT_MRT3847_82614C.1
gacagtgncntgaaccacgtngtaaggnacaggtggaggattttncatcttccagatttcgaggttgtggataaaggggttgangttcaanananggaagnagnngaggcgaggna

SEQ ID NO: 123597 - DNA, 445 bp, Glycine max
  unsure (1)..(445): unsure at all n locations
  Clone ID: PAT_MRT3847_82615C.1
tgcaaatctcaacccaggccacagtactgcaactcatctagagaaatagaacaagtcaccattcatcaccaaccttaagtgtgatagaaaagtgatctagatattgatcaggaagaaaaaaatggcatcggagaaagaggttgaaactgtaatagttgggaactacgaggaaatggaaagcgaagggaagcctagggatgcaaaatccaggttattaagtttgttgtggcatggtggttctgtttatgatgcttggtttaactgtgcttccaaccaggtggctcaagttctgctaacgctgccatactcattttcccagctgggaatgctttatggcactctttttcaactcttctacggcttgctgggtggctggactgcttaccttattagcgcactctacgttgaatacagaaccagaanagagagagagaaatttaatttc

SEQ ID NO: 123598 - DNA, 467 bp, Glycine max
  Clone ID: PAT_MRT3847_82616C.1
acactaactaatgtatgccaatggttatatctctgtaagtgaaacaaccattatagaatggttgctactataactttaaattgatgagtgaggtaatagtgtaacattgtagcaatgaagtattctaagattattgtcaaaaaaaaaaaaaaaaaaaaaaaaaaaaaaaaaaaaaaaaaaaaaaaataaaataaaaaaaaaataaaaaaaaaaaaaaaaaaaggggataaataaaaaataataaaatataaaagggcggcccctttaaagaacccaagtttacgtccccggggttgggaacttaaaattttttttttggggccccaaaattaaattctcgggccggctttttaaaaacgttggatgggaaaaaccctggggttcccaaaattaatagcctttgaaaaaatcccctttttgacaggtgggtttattacaaaaaggccccccccgattccccttccaaa

SEQ ID NO: 123599 - DNA, 163 bp, Glycine max
  Clone ID: PAT_MRT3847_82617C.1
tgatcacacccgcacccaatcatatacctaggcgcggtttttaaaaagaggggggggtttcaaaaccacatgcaagaaacggggctaatgcccacgctcatgctaacacaactcaaaacctcactaacaatgaacagacgggcttctatcgcactatcgcaac

SEQ ID NO: 123600 - DNA, 705 bp, Glycine max
  Clone ID: PAT_MRT3847_82618C.1
aaaacatgtgggtaaggagttatatcaaatttcttgtttcttacatttcctaattctaaagtttaagtgcctctaaaacaaatggcttatgaacatatatgacgcatgtagccaccggtgtgaatatgcaaatgttccctctcaacaatggaggagacagaggaccgggatatcatactcttggcaatcctactgtgagttgcctgaatttttaggaagtacttgtaaatgtgttgattaaggaggctatatgcgctctgataagggcccttggaaggatgcaaaaattatgaggatggttcaaaatggtgatcacaaatgttcaaaaaaaaaaagtgtgtcacaaggtgaggaagagaaagaaaattctaaggaacacaagacttccaaattggaggcaaatcataccccctagctttctccagttgttgtagaggtattttatctggaggcatgtgaatttggaagtatctttgaaggtcttattcctgaagatattaatatttatgcaaccacaacttccaatgcagaagaaagtagttggggaacatattgccctggggagtatcctagtcctcccccagaatattcaacttgcttgggtaatctgtacagtgttgcttggatggaagacaagtatgtgcataataaagaatcatagtccgatcataaatgagattagtgtgaatatgtgatgatacttat

SEQ ID NO: 123601 - DNA, 159 bp, Glycine max
  Clone ID: PAT_MRT3847_82619C.1
tgttgctctgaggcggtgcgcgactcttctgttatctgaatatgtctctgatgcgtggtcactgtggctgatgcagctcctgcaagtgcggcaacggatgcagtggctgaaggacgtaccgatacttgaactgcactgagtcaaccaccaccgagacct

SEQ ID NO: 123602 - DNA, 1153 bp, Glycine max
  Clone ID: PAT_MRT3847_8261C.1
ggctcgaggttttctattataagacagggtgttaacggctagaagccaaggaatcagtaacataaaatggaggttcaatttgccctcccatttcactaacgcacacatcacatcataccagagactccatctccctctcgcacgcgacgagggagtcccgcttcggaatctcaccccctctttctgctaattcgcaagatggttgctcagaaattcgttgtcgacttgaacaagccccttgtgttccaggttgggcatcttggggaagcctatgatgagtgggttcacgatcctatcgtaagcaaggaaggccctcggtttttccaaaatggttttctcgagttgttcacgcgcaccgcgtggtgggtgattccaaccgtttgggtgccggttgcaagttggttcatttccaactccgtaaaatcaggcctcccttctcttgatgtagctctgctcgtctttcttggcatcttcgtttggactttggccgaatacacattgcaccgtttcctcttccatgtcaaaaccaagagctactggggaaataccttgcattatcttctccatggctgccaccacaagcaccccatggatagctatagacttgttttcccccctggagctgcagctatattattcatgccgatctggaacttagtgaagctcatggcgaccccttcaactgctcctgctttgtttggcggtggtttattgggttatgtaatgtatgattgcacccattattacttgcaccatggtcagccaaagactgaagtgccccgaaatctcaagaagtaccacttgaatcatcactttcggatccaggataaaggctttgggatcacttcatcactatgggataaagtttttggaacacttcctcctaaaatggatgccaaaagtatgtaaattactgtcaagggtagcatatgttcgttggttaaaataatagcaagttcaggaattcctgcttttatttatctaatttatttgacctccccaatcattgatgttttctggggtgttagcgtgccatcattcgtcaattttgtggtgccaaagttcgacaattaaacattctgtaaaaattgatttcttgtatcagattgatttatgatggaaagctcaccttgtgcatactcctttccgctgt

SEQ ID NO: 123603 - DNA, 344 bp, Glycine max
  Clone ID: PAT_MRT3847_82620C.1
gacatatcagttactttttgttactcatttttattattcggtggggcccaatccatttggattctagagtatcttctattttgtgcctcttgctctggaaataaataagattattaaataaaggaatgggtggatcttctattttcttcttgtacactattttaaggattaactaaacttattcttaactttctgtattgtgtaaagcatattgaccttttgatattataaatgggccttatttagaaaataaataaaaaaaaagggccggcctccactaatgagctctgttcacctcgaattaatttccgaccctgtcctttaagccttccaacttttcctat

SEQ ID NO: 123604 - DNA, 261 bp, Glycine max
  Clone ID: PAT_MRT3847_82621C.1
cacccctctgggggggcgggaaatgcacagacactggtgcattgtaaaaatatattgacattgatagcccatgccgagtggaaaaaaaatggccaggggttaccagaacgggttacaacacatcacttttgtagtgtggcttccaacacatatcaccagtggagctaagactaagtctggggtgactatgatggatggggacgcaaaatgaaaggagaaaacagtgtaagttggggtaacccctacagaaaaccggggcca

SEQ ID NO: 123605 - DNA, 307 bp, Glycine max
  unsure (1)..(307): unsure at all n locations
  Clone ID: PAT_MRT3847_82622C.1
tnnaaacgtttttttatttttgtncaaaggttgattattaattcaattgttatctcatttctattgcctcgattttaataacaaaaaaaaaagtagtgagctatatatgaacgatgaacaacaccgccataaagcaagagaatgagatgtacaaaactgtgacccaaaataatatacatgtgggcggggcgttctaaaggctccaggtttatgaacccttgcttggccaaccatagttcttctttaggggccccaaattctaatcaactagcccacgattaaaaaaggccctgaatggaaaaacctt

SEQ ID NO: 123606 - DNA, 326 bp, Glycine max
  Clone ID: PAT_MRT3847_82623C.1
acttatcattatcatgttttgggttcactatattctggaatgtctccttccattcctcaaaattttatacaccacccttctaatattaattattacatacaaacattttctccttcttattaaatttttaaccttcttacaattatatatgtactatctccttaaaatcaaaacataccttgaattcctatcacttcttaattaatcacctcattcatatttttcaattctctatttacaacttacccatatacattatctctaatttttaccataaaaatcccaatatttattctctatataatacctttcaatacatttaattt

SEQ ID NO: 123607 - DNA, 416 bp, Glycine max
  unsure (1)..(416): unsure at all n locations
  Clone ID: PAT_MRT3847_82624C.1
ttctaatccctaaggggctcttcccgatttcgcattcgtccgattctctcgttctcgttccgcagatgaagacaaaatttatctctacgcacgattcaagaatcgcttgtttcactctcacacttaatgcgcaattactcgccaccgccagcaccaagggtactctgattcatattttcaagacaaatcatggctcctttcttcgggaagtgtattttttttcgtgtttttctctttttgcctcaaaattagtttatagtttcttagtataattttttctgctttgatgctttagtttacagtgtggtcatttcaagaattttggttctctggtgtaaatttgttgggtgacacatttanctgagaagggatgcgaaattgcgaatgctattgacagtgctgagatctatagttgg

SEQ ID NO: 123608 - DNA, 624 bp, Glycine max
  Clone ID: PAT_MRT3847_82625C.1
ttccggggattgcgtccggtttgaataaacgacccatcatcttctttatcaccctctttctccaaggttgtgcaatcctcgccggattttgttgaggagtttggcaccttcgccaacgaagtagtgattttcacgatcgacgaacattgctctggcattgctagggctttcttggtcgttctctcgcataattttcttctaatttcgtcctctaacaccaccctcgctgtcgcctaaaggaacactgctgccatcgccgaagaggaaccactagttcctggcgtcaccgaagacaacctctctgatgactctcaagcatctcagatgccgatcagaaacagagatgcggatttgggtttcatgtttttcagatctgattgtgtagtggatctggttttgattttttgatagatttggttgtgtggctcaaagcttcaaagatgaagctcagatctggttgtagatttggttgtttggcatgaagctccatcgcttcaaaggtggaactgccaggaaaattgagtcgagagggacaacagtggatgagaaaaaaaatgtttattaaattgagttgcagttgaattttgtttgttttcattcatgttttgattattaattttgtgt

SEQ ID NO: 123609 - DNA, 574 bp, Glycine max
  unsure (1)..(574): unsure at all n locations
  Clone ID: PAT_MRT3847_82626C.1
cagaacaagttggatatatgatacagtaattttatttgaattccagaaaggatagaaagaaaaatttcaacagatagatgattagtacattaatattattgatggcggcatggatcagaagtggtttattgaaagcataggggaagtgcgaagaagttgataagcagagggagaacgcttaacacaggcacagctgccatgagtttcatcagaatccatttccatcaagaccttgtagaagacatcaacgtggcagggaagggccaaagggccttggctgttgtaaccatactcagattcagcttcttcgagcaacatcttgaacaaggggtggtttgcgtactcggttttgatgannnacctttgcatttggggtccaacatacaccgagaagcaaccttcgggggccacgatagtactgtttttgttcttgttcttgttttccgcccggttacggtttggccatgatttgcttctcatggtattagtattagtattgagggaattagaacttgcctccttgcggcttcttcctatggacttgcatcgctcccatgttttggttatcagccca

SEQ ID NO: 123610 - DNA, 182 bp, Glycine max
  unsure (1)..(182): unsure at all n locations
  Clone ID: PAT_MRT3847_82627C.1
cttcttcgacgntatcttcttcggggggtgtttgtgagactgatttaggtctcaccttaaaatgtcttgctgccgaggcaactgtggttgctgaagcgcctgctagtgcagcaacggctgttgaggctggaaaatgtacccagacttgagctacatcgcatcaaccaccaccgagacctttt

SEQ ID NO: 123611 - DNA, 594 bp, Glycine max
  unsure (1)..(594): unsure at all n locations
  Clone ID: PAT_MRT3847_82628C.1
gttgtactttgcgttttctattagccctcctcttctctctttttttttttcacttcatcaaataaaattcattcacctaaaccctatggtcgacggagccaaagccaaaggcaacgcaaccttctcctctggcggcaattcaccacttctctgatgccatcgccttggcctctaccagccatgtcctctattccaatcgatctgccgcatacacttctctcaaaaactacatcgagaagaagggaatatataagaagagcggcggagctaaaggagtaagcatagtagacgagaaaggagaggaagagaatcaaaagaaagtaagcaagcaggaaaggggaacaagcagttgttgaggcctggcaccggtcccaagccaattctcggttagaacatcaccattcactgcactggtttcgaatattgagaaagggcagaagtacaaagtangtcttctatgcccaagcagatggtgcaattaatctagacgtatcattatgcggatcgcagacaggtgaaaagttggcttcaaatggagagatgcctccaggatctgggagaatggcctggtctggcgcacgcgatattctcatt

SEQ ID NO: 123612 - DNA, 361 bp, Glycine max
  Clone ID: PAT_MRT3847_82629C.1
gaggagggaaaaattggtccaaatattttataatgggaattatagcaggcacatttccatatacccacatttcgatctctcactatgggtacaaagaggccttcacaaaccaaataatttaacaaaaaaagggggggctgggagggttcaacaccaatccttgttttcaagggcaaccaaatcaaaaaaaggtgggaaaacccatgccacccatgccaccagccataggggggggatctttattatcggtgggaagttcaaacacaacagctttagttggtggcataaaaaacgaaacactgggtggataaaccaagggtggcctaatcaccttcaaggggtctatgattccagctttaac

SEQ ID NO: 123613 - DNA, 1422 bp, Glycine max
  unsure (1)..(1422): unsure at all n locations
  Clone ID: PAT_MRT3847_8262C.1
ggatgatgatgcgttggcagtggtggaaaccaaagacgggaaatcggtaacgttgtctataatgagacagggtgttaacggctagaaacgaaggaaggagtaacataaaatggaggccgcacgacccacggatggggcgggtacgctttgggtgcttcctctctctccggttagggaaagatacgcactgtttcaatttgccctcccatttcactaacgcacacatcacatcatatcagagactccatctccctctcgcacgcgacgagggagtcccgcttcggaatctcaccccctctttctgctaattcgcaagatggttgctcagaaattcgttgttgatttgaacaagccccttgtattccaggttgggcatcttggggaagcctatgatgattgggttcacgatcctatcgtaagcaaggaaggtcctcggtttttccaaagtggtttcctcgagttgttcacacgcactgcatggtgggtgattccaaccggttgggtgccggtttcaagttggttcatttccaactctgtgaaatcaggcctccatactccttgatgtagctctgctcgtctttctcttcatctttagatcggagtcttgctgggtacaccccttgacagattttctctatcgctttcacaccaagcactccatgggggatacaatacgtgtttttcttcatggtgccacacctatattcttcatgccgttctggaacatgggtgaacctcatggcgaccactgcaactgctcctgctttgtttggaggtgttgtattggtgttttgcatctctaattttgcccattatggtttttgccgttattttgctgggctatgtgttgtatgaatgctcccattgctacttacactatggtcaaccaaagtctgatgtgcccaaaagtctcaagaaatatcacttgaatcatcattatcggctccagaactatggctttgggatcacatcaccactgtgggataaagtttttggaacggttcctcctcctcaatcaaagggggatgccaaacgtagataagttactgtcaaggttgcatttgttcattggttaagcatagttcattcaggagcttcaaacgagatatgttgataattcattattcatgtcttgattgtctaattattttgctccccaattgatgtttctgagggttaacgtgccaccatcttgtgtcaaacatcctgtaaaatttgatacatttatcaaatttattgtataaaacttgcctccctgtgcacagttcttttatttatgttgtaacttggctttccgcaggaatccttgtagcatcggatgccttcgtgtaggttaacttctatcttcaaagaaatcaagatattcaattaccttaacaaaaaaaaaaaaaaaaaaaaaaaaaanaannnnnnnnnnnnnnn

SEQ ID NO: 123614 - DNA, 298 bp, Glycine max
  unsure (1)..(298): unsure at all n locations
  Clone ID: PAT_MRT3847_82630C.1
ggcaaaggnattctacccgncggntcgatggggaattgcncttcaaggcgtcntcgtaagggctaatccggcttcacganggtcaccaaacgggcacgtgcctttgggggggngaggcccccttactgctggtnngcaaacggacggcgggcncacgcgttcgttntagcccggattctgacttagaggcgttcagtcataatccaacgcacggtagcttcgcgccactggtttncaaccaagcgcgatgaccaattgtgcgatcaacggttctcctcgtactaggttgaattactat

SEQ ID NO: 123615 - DNA, 294 bp, Glycine max
  Clone ID: PAT_MRT3847_82631C.1
tccgagacttaagccgggatttgggtatagggtattcgcgtggcataaggaagacgtgggtcaacgatcgattgggaacaaggtttcgtgaagtgaacgacaatgattccatctgtatccttaagaagcttgtggcagcttagactgtcacatgatccttcaagatccacatctagaagtggttcaccatctacattgaacacattactctcaatgattactagatccatgacggtctgggtcttgaactctactacaactatacacatatatggtgtgattaatgcgtaatat

SEQ ID NO: 123616 - DNA, 2326 bp, Glycine max
  Clone ID: PAT_MRT3847_82632C.1
gggtgggaaaaaaataaaaaaggcaggggggagctgaggcgccgacgacgggattctcgtactatcggcgacaatgtacacgtgtgcggtgaactataaacgacgtcaggtggcgctccaagcagtggggtttgaagaaagtcgtagaatggcctaaacaaccacttggccattacattacatgtcgggataatgaatcacgatcagagtacgaccaccggagttttctccttcgccattgtaattcgacacacgcaatctcatcccattttttctttttccttctcccgatatcgcgtagccttacattagaataatgcgcccgtccactaattttggaatcctatggtttctcattccacatgccgaatcgatggtgctagctgcacttgtatttcagattttctccatttaattagcttggatatctagattactttttgggtaaatgcacgcctctgctttactggcctgtaaggtcatgcccgcatattacaaaggctgacgtagataaggctggtttccattttcctgaatgctgaatgattaattttaatggtagcgataatgagcctgttgtgcttctttgatactctaattattttaaaagattggcttcatagttaaatgttcctatataaactttattgataaggcgtgcctttgtatatttgatgagaatgtggtctgttctggtgatgttagttttcttgtgcaactcacgtatcatgtatgtcagtaaatgacattggatgtatcatattttattgatcagttcagctatatatttgaagagaaaaatagcgcaagggaggctgaggcgcggacgacggggttccatattatcggcgacaatggacacgtgtgcggtgaactctataaacgatgtcgcgtggcagttcacgcagtgtcgtgtgaagaaagaactaaaatggcctaaacaaccacgtggccgttacatgtttgaacaataaaaattttccccttcaaatttgtacttctacacacgcaataaatccgcaatctcataccaattttccttttcttcttcctctccccatttgcgtatcctttcattagaatatccctcccttcaaatatttttgaaatcctagggtttcacattccggatcccaatccgcggttctagctgcacttgtatttcagattttctcaatttaatcagattattaggtatctcgattttttttttgggggttacgatgccgccatttttgtcgacctcgaaggccctttgctccttagcatcgcgcaaaagcggtggtagtcaattgattaggtctagcaagagcagtgggaagcacgatggatgcagatgcatcactacagccattaccggcggccatcacaatcatccttccgtctctcgcatcggcttttcctctctcatcggaggatcgtgcaatagcaataatcattattataattataatgttgttcaatcaagacggtttcttggatgtggagatggtgaagaaggtattctatccagaacttacgaggagaggcgcgttttggggtactctacagagcaattatttgaagttgtttctgctgttgacttctatcatggttttgtcccatggtgtcaaaggtcggacatacttagacactatccagacggatcatttgatgctgagttggagattggatttaaattcctcgttgaaagttatgtttctcatgttgaattggacaaaccaaagcgtataaagacaactgtgtcgcagagtaccctgtttgagcatttgataaacatatgggagtttaaccctggccctgttccaggaagttgcgatctttatttcttggtggattttaagtttcagtctccactttacagacagattgcatcggtgttctttaaggaggtagcctctaggatggttggttcatttactgagcgttgccgtttgatatatggaccggaagtgcgggtccttgaaaactcgtatggaaaaagggcataaagttctgcaccagtttcttgccttgaagaacataatagttgaggtcaatttatagtctctgcatcaattgggcgtatttttattgtttggcagctcaatgctaaatgattgatcatttctctttctaatccctagtgatttttgtaatttacatgtagatgaattctacaaaatactgcgaacaatctcgaagtttttggacctattttcagagaataccaaataattaatggtaaaagaatgagtcacattcaaagaaacctcaatacatttaaaagtaaaaataataaaatacttgccgcaaaaaccgctgttcatgatgtaaatatgacaaa

SEQ ID NO: 123617 - DNA, 293 bp, Glycine max
  Clone ID: PAT_MRT3847_82633C.1
tggggagagagagagagatatttaaggatctggtgccccttcttaattcttgtgatgggaccaattctttaatgagcctgagagagatggcgcaatactaaccatcaccataatttattggtattatttatggatgagtgtaatgtatgtatgaaaacaaaaatacttgcatctctcttgtgtctcaccgaagactatgctgatcttaatctgtgcgacatatgcgatcagttccatgtaactgaacacatcaacctcgatctttttctgagaatatttaaggcccacaatct

SEQ ID NO: 123618 - DNA, 111 bp, Glycine max
  Clone ID: PAT_MRT3847_82634C.1
cgcgtccggagggggctcacactctagaatgggcatgcactgttcttcatacggtggcggtacgcaagcttcttatgatggggatattgctgctggtatggctagctaagg

SEQ ID NO: 123619 - DNA, 373 bp, Glycine max
  unsure (1)..(373): unsure at all n locations
  Clone ID: PAT_MRT3847_82635C.1
gggataacaacatcatacaaagcgttgagttcaaaaacttaagcgcattccttgggtgttgcgttcttcctcaaaaccaaacatgtgaaacacatgcgggaactgagactgcgctcacaacactatctgcgccgggggggacatctatggggttattgtgaagactgagaagagttacatcnagagtgtggtgatgggtgtgccaacatctgagcatgagtggaagcgcgagtgtggggctaactgcgcttacgcgggctgcgcctgtgcgcattaaagagtatgtgtgaaaatgtgattgccatgtgtgttcggacacaaatatccaaataatgtgatcttcatatgaataaagtgtgtgcgcgggtctcct

SEQ ID NO: 123620 - DNA, 271 bp, Glycine max
  Clone ID: PAT_MRT3847_82636C.1
attcacgggctgacgcacgcgtcaatacggatgcaaaaaaacaacaaaaggggagtctcatatctgactcacatcgtcatccattttgctcctttcaatcaataccaacaccttctttgctctcatgctcatctataccttcaacgtttcatgtctaactttaaccttcactgatttcgtgctccattctgtatgtaaccctcatgacaatggtcgtatacattagaacatgtctgacataaaaccatttattgtaaaaccgaacatccct

SEQ ID NO: 123621 - DNA, 323 bp, Glycine max
  Clone ID: PAT_MRT3847_82637C.1
ggtggtgttctttgattatttttattggaggttgaaacaaaaataatatcgaaagggcgggcgacaaatgaagagcccggaggaacacacaaaaaaacagaaccggaagcggatagagaaaaaaaaaaaatgaaaaaggaaaccgagaggggccaggaaaatacatgaggcaaacagggcagagtaggaaaaaaaaaaaccaggaaacaccaggaaaacaaaatacaaggcccacacccacgggcagaaagagggggtacaaaaagcgagggccaaaaggaaatttacccggggcacagacacccgcagaagaagcctgaaaa

SEQ ID NO: 123622 - DNA, 264 bp, Glycine max
  unsure (1)..(264): unsure at all n locations
  Clone ID: PAT_MRT3847_82638C.1
cactggcaaganacatgatgttgttaatgatgcaaagttgagccttttgtggcaagaagtgatcataatcctaaagagttgaagtcatgggcaaagagaactgggtttgtgtctgattactctggggaagctgggactagtgctagtgagaattttgatggtgttgatgatcagagagaaggagggtcccctccaaagatagagattgatctggtgctgggattggcgaggcctaattgagacaatgagattaaaccagtcttt

SEQ ID NO: 123623 - DNA, 248 bp, Glycine max
  Clone ID: PAT_MRT3847_82639C.1
cacgttcggtctttgttctgtccacgcgttcgtgcaccaaagatggactctcctttgaatctgcctcaaaagtcacatcttacttggaattaagaatttcatgagtgacctcctacgactttaagaacgatgtttaaaggtatagagaatcaatttttgtgctgaccatcgactccatgaatgatgcttattaggactctctctatattcaatgagtgctcgcctattacacctaggactatgtgtaa

SEQ ID NO: 123624 - DNA, 460 bp, Glycine max
  Clone ID: PAT_MRT3847_8263C.1
agactcggctcgaggtcggagcaacttgcttgcactatgccgcttattacggacatactaactgccttacggccattctttctgctgctcattccacacctcgttgcagagacttggggaggggcatgatttgccgacataagacatggaaaccgagccacccctatgcatcttgcagctcgccatagatgggcggactgtctgcatgcccttatagacaatggggctcttggacgtgcttcaactggtggatacggataccctgccagcacgccacttcatatggctgaccgaggagcgaccattgatctgagtcccggccgggttggaatcaaaagcatcaccaccactttatcattgctttgcatcagaaatattccctgaattgcggccggcaaatccttccaaaagagccccatgccgacaagctcttgaagctgctgctcccttcactgaaatt

SEQ ID NO: 123625 - DNA, 660 bp, Glycine max
  unsure (1)..(660): unsure at all n locations
  Clone ID: PAT_MRT3847_82640C.1
cgtaagctcggaattcggctcgagcagaaatttcactaaaacccgtgcatgttattttgcttcattaatattaagagttctttagttttaggtttcagttatggcttccaaccaagaaataacagtgccttgcagatattgggtggacaatgaacgaaagcgtgtagttatggcggaagcaagtggacactttgtagatgttctctttagtttcctaacccttccattgggaactatcatccggcttgggaacacatttgggcaaccaatagagattggttgcattaacaatctattcaagagtgtggaagctctgaacccagatgttttctggaacgacatctgcaagcgaatgttgctttctccgcgcaacccgttagaattctcttaccagagactaaaactgaaggtggatgatacgcagcccacaaagtatttcgtgtgtcacatatattcaaagggcagtgatttctcgctgagtacctttgatgaggtaaagtgccactgtgggaacttgatgaaaagacaactagatatgctggtagagcctgctggtggcaatggtgtttttgttaaaggggatgccatgttcttgatctttgatgacttgacagtgctccgtagctctcccagtgtctnctttaaccaccactccaactt

SEQ ID NO: 123626 - DNA, 556 bp, Glycine max
  unsure (1)..(556): unsure at all n locations
  Clone ID: PAT_MRT3847_82641C.1
ccgcggagtccaataaaatataaatatanntgcacttgaccacacaacaacatacaatcgcctcaggttttcagctaacctcttatcaagttttgttcattactgactactgtgttctccaactgggtctgttttgttttcatcaatcaaaattcagaagctcggttctctcacttttctgtacaaaagccatagaaaggtatgttcccttcaactccccctcccccttctctttctattcttttgtaaggaatggtttcaaggaaaatcagcagttttgaagattttttattttgttttgttcgagggtctcaaagatacatggtgttcagcactagtttcatcaagtttctcactttcttttagttttgtatttttttttcttttccctttataggtttaggttcctttttttgtttttttgaagattctaaggcttaaatgaaggggggtttcattctttgataagggtaggaaaggggaaggactgaagtgtaaagttttaatttatatttgaaggaaactccgaaaatcagatagaaactattgacctgcg

SEQ ID NO: 123627 - DNA, 470 bp, Glycine max
  Clone ID: PAT_MRT3847_82642C.1
cttttactattatttactctcaagtagctagatgagtagctacaagtgagttattgagcaaagccagctgccagtttttggtttgatttcttttcttaggattggattttctcatgtatacatatatagccaaagtctgttactgttgctaattctgcctcttcctgtctcaatcactgttctgaaaactggtcagaccagaacactggtttacaacgggttaatggaaaatgcttaatataatgttattttgatttgttttccataaaaacatgaaagatgaacctaaagttattatggttaatgagcattgttgtgtattgttgaaacttagattttggtttgaacttttgtgtgtactttgaatattaagaatctatagcattatgttttatttttaagtttataaatttatattatgttttcatattattttatgcattattgaattactattattttattaatgc

SEQ ID NO: 123628 - DNA, 289 bp, Glycine max
  Clone ID: PAT_MRT3847_82643C.1
ctggggaaagaaaggccccaaaccccaaaaaaatttgcctttagaacccccggggaaaccaacaggccaagggacctgggttttaaaaaaaatcgtaccaccaaaccccccaaccgaaaaaaaattatattggaaggctcaaatttaaaggccgcccaaaaaacaaaaaaattaatggcgggttcccccgaaggacccaccaaataagagaggcccaaaccggggagggggtaaccaaccaaaaacatttccgaggacccccaaaacccgggggggggccccaatgaaa

SEQ ID NO: 123629 - DNA, 1027 bp, Glycine max
  Clone ID: PAT_MRT3847_82644C.1
ggcgccccttctttctggtggtgtacgttgttgttgccgctagcatccatggcgattgaaacgctcgtgctgggcgctggtcaagaagttggcaagagctgcgtggtggtaaccatcaacgccaagcgaatcatgttcgattgcggaatgcacatgggctacttggatcatcgtcgttaccctgatttcacccgcatctcccccagtagagatctcaactctgccctctcttgcatcatcatcactcactttcacttggatcacgttggtgctttagcttacttcactgaagttttggggtataacggaccggtttacatgacgtacccgacaaaagctttggctcctttaatgttggaagactatcggaaagtgatggttgatcgccggggggaggaagagctattctcttctgatcaaattgctgagtgcatgaagaaagttattgctgttgatctgaggcagactgtacaagtagagaaagacctgcagatacgtgcctattatgcaggacatgttattggagctgcaatgttctatgcaaaagtgggagacgcagaaatggtttatacaggagactataatatgacaccagatagacaccttggagcagctcaaattgatcgactacgacttgaccttcttataactgaatccacatatgcgactacaatacgtgattcaagatatgctcgagagagggaattccttaaagctgttcataaatgtgtatcttgtggaggaaaggtgcttattacaacattggcacttggaagagctcaagagctatgcattttgctggaagactactgggaacgcatgaatttgaaggttcctatctacttctcagcaggtttaacaatccaagctaatgcatattacaagatgcttattcggtggacaaggcagatgattaaagatacatactctaaacataatgctattgattctaagaatgtgcaaaaattgagaaggtgtatgatagatgctcctggaccttgagatcttttcgccactcctgcgatgt

SEQ ID NO: 123630 - DNA, 427 bp, Glycine max
  Clone ID: PAT_MRT3847_82645C.1
cggctcgagttctttggcaacacacccaaatgcaataatattcccattaggttcctcagcacaagccttttatgggcaccagcctcagcaaaacaacccagttttccataataacatacctaacagaacggtgacccactgctcagtggacccattagatacttctttgtgccaaaatcttgccatgcagttatctccgctagatgtgtttaatgaaggtggctctcagtttccattagcattcttagaggatgatctccacaccattgttcagatggggtttggccaagctgctaacaggaaaacaccaatacaatcctcgagtttcaacggttcaaataatgtaccacagatgaaagtagagctctgatcaacaaggactcacctttcattacgcctgaattgaagcccagaagattaggaagac

SEQ ID NO: 123631 - DNA, 392 bp, Glycine max
  Clone ID: PAT_MRT3847_82646C.1
cgaccgatgagcctctctgctctctctgtctaacaagatgatcaccaacatcaataccaagacagtcagtgtccttgagccagacatgcacaggaacactgcttcacgtcttagggtcatcagggcccgttcgtgcatcagcagcgggatacctgccactgccaggattgcaagttccgtttcatataacaatcctgttaaggtttgggtggtttatttggaaggctcactggagaccgagccagttctttaccattctctggatttcccgctatccgggcgttacacattcccccttcattgcctgattatgctgcgcccaggaaaaaccatcattactacactcccaaatggactcaaactgtactccgaaacatcaccgactcccactg

SEQ ID NO: 123632 - DNA, 360 bp, Glycine max
  Clone ID: PAT_MRT3847_82647C.1
aaaaacaggggaaaatgttccccaaaaaaaattttcccctttggtcggggtgaaaatttttaaaaacaaaacaaaaaacgtgccgggttaaccaattttgccccctttgtcccttcgttaaaaatgaccaacattttttttttaaatacaacctcgggggaatgggcttaagggtttttaaaaccaaaaaattttttttttttaacccgaaatgcctttttttaaccccttttaaactcacataaataccccgaaaaaccgggggatgattaaaatttgtagctgttttgccattttttttgggactgtttggatgggtggcttttcggaccacccaaagattttttccgaggatttttt

SEQ ID NO: 123633 - DNA, 310 bp, Glycine max
  Clone ID: PAT_MRT3847_82648C.1
cgcaggtgttgaaatcggtgatcaccctatgcatattgaagatacacagctcccgataccctttttctatagagaagaccttcatccacgcatgacagtgattgcacatatcagcacgcctgcttgtcaacaaccatggggtgtgggtacatggttgaaggagcttaaagactctactagagaaagatatagctttgaagagctatgcatcaagacagacgccattgcgggagaagagaagttgtgtgcactcatcgtgagcacagtaatcggttgcgccattataaagctgggaaagcacattcaagtt

SEQ ID NO: 123634 - DNA, 447 bp, Glycine max
  Clone ID: PAT_MRT3847_82649C.1
aatatgaaagattcaatatgaattatgcatcaatcaatcattagtacaattccaatttgtaatccaataaacattactatccccttctaaagtacttttcccaatttctggacacgtgtaacaatttgatcaccctgactaacttagtttgcaagtctgtcataactattcttcaagagtcctataatacaattgaatccattcctttaattactagaatataacattaatatataacttcacataaatagagctgcatatagaagttcattccaagtatcaggtactcctggtaggcaccaatgactgcagtcattacccgtatgatccaagccaccataggcagaagggggggcatcttttcttagttgtgaaagaagtgttatgtcaagtagataaacttgattcttcatgttctttaacactttgttcactatgtttgctgca

SEQ ID NO: 123635 - DNA, 584 bp, Glycine max
  Clone ID: PAT_MRT3847_8264C.1
gtggaaaccaaagacgggaaatcggtaacgttttctataatgagacagggtgttaacggctagaaaggaaggaaggagtaacataaaatggaggttcaatttgccctcccattccactaacacacatcacatctccctctcgcacgcgacgagggagctccgcttcggaatctcactccctctttctgctaattgacaagatggttgctcagaaattcgttgttgatttgaacaagccccttgtgttccaggttgggcatcttggggaagcctatgatgagtgggttcacgatcctatcgtaagcaaggaaggccctcggtttttccaaaatggttttctcgagttgttcacgcgcaccgcgtggtgggtgattccaaccgtttgggtgccggttgcaagttggttcatttccaactccgtaaaatcaggcctcccttctcttgatgtagctctgctcgtctttcttggcatcttcgtttggactttggtcgaatacacattgcgccgtttcctcttccatgtcgaaaccaagagctactgcggaacataacttgtattaaacttctcactggctgccacccac

SEQ ID NO: 123636 - DNA, 1026 bp, Glycine max
  Clone ID: PAT_MRT3847_82650C.1
agcaaaggacccagaatttgcccaaaaactgcataatgttctagtagagagtggtgccttacctcctcctgatcttttttcagatataaatccccaagataggggtgtagataaagtaaatgaaaacattgttgattctgttcaagctgacaactctctcataccctcacatggggtgggctctgccagtgatactaagttatgtcaatcagctgactggttagcggaacagcaaaaagaattgcataggaatgttgaattttacaatttttcacagggtagtaatacaaggaatgggtttgtaaatgtttatgatagagataatgacatagagcaatctaacacaatcaatgttgttttggcttctatccattcacataagatatgtaaagaaaagcgtcctgaatcttccttgcccaaggcagctctttcctgcaaaatgcataatggggttgactgtttctgtgaagatgaagaaaatggctttagaaacaatgttgaagcttctttaaataacagtgaattacggaaagattcagccattctaataaatgagatgggggtcaatggagattgttatgatggtagaaacaaggaagttaacccagttcttggcgaaagctcagaatgggaaattcaatgggaggatcttgatattggtgagcgtgttgttattggttcttatggtgaagtttatcgtgctgattgcaatggcactgaagttgctgtaaagaagtttctggaccaagatttctctggtgatgcgctagctcagttcaaatctgaagttgagatcatgataaggctgcggcatcctaatgtcgtgctcttcatgggagctattactcgctccccacatttctctatcttgacagagtttcttccaagaggcagtttatataggctattgcatcgtcccaatcttcgacttgatgagaagaaacggttgcgcatggctctagatgtggctaagggaatgaattacttgcacacgagccattctcccattgtccaccgagatttaaa

SEQ ID NO: 123637 - DNA, 127 bp, Glycine max
  Clone ID: PAT_MRT3847_82651C.1
atcaattatctaaggcctgatgtgaagagaggcaattttacaccagaggaagaggaaaccataataaggctacacaaggccttaggaaacaagtggtcaaagattgcatcaggtttgcctggtagga

SEQ ID NO: 123638 - DNA, 249 bp, Glycine max
  unsure (1)..(249): unsure at all n locations
  Clone ID: PAT_MRT3847_82652C.1
aaacaataaaaattaacttacctttaatttttttttaaggaaaaattctttacattaatttttggtttccattgattatgttaacattaacaagtccttattcctaatttgcaatttagtgttttcttagaagngaaatctggttcagctggcttttgaggtaacagaagtagtagtctctgttgcattctattgtgtctgctattttctctcaaatttcgagtgcattggcagcaaattaccttgatg

SEQ ID NO: 123639 - DNA, 255 bp, Glycine max
  Clone ID: PAT_MRT3847_82653C.1
ttttggtttttctctatctcttttgtcttttcatgtatgtactttaaggggtggtcatttattattttccatagcaattattgcaaggtagtaatgtatcttaataagtgtatagacgtggtgtattacaagtcagcctaaataatctagagagatcgtgatatccagccaggcacactcatttgggcctttacattccattaatttatatcctcatagatgggtgagaactataaagccagaaggatatatgat

SEQ ID NO: 123640 - DNA, 776 bp, Glycine max
  unsure (1)..(776): unsure at all n locations
  Clone ID: PAT_MRT3847_82654C.1
ccttggccgcatagtcacatcagatattgaaaccaaaccagaacgaaaaacctcgccgtcgacacgatgcggagcctcaggatgagaaacttgttgtcccgtgtcaaaaagaaaaccatcaaaaacagaaacagaagttgcatttccattacaaaagagttaccacatctagtggaacaagaagaagaagaagaagaagttaatgaagaaggtttcaacatcaaaagctctgccccatcacacactcacggtgttcaacccttggggaatctctatctgaacacaagttccaccaactccagagacactggcttaggtaatcttcacaccctttcggatgagcttgttctcgacattctcgggtttttggattctacttccttaggggttttagcctctgtgagcaagtctttctatgtgttcaccaaccatgaacccctttggaggaatctcgtgttggagaatcttctcggtgggtttcagtacaaagggtcttggaaatccacttatgtttctgcttgttacccttcatttgataacttcgctgttgctcttgggggtttcaaagttagagacttttactcggattatctcttccagagttggctctgtgctaacctcgaaatgaagcctgagtggttggagagggataatgtggttcggaagagaggaatttcggtcgaggagtttgtgttgaattttgaagagcctaataagccggtgctgttggaagggtgtattgataattggngtgctttgaggaattgngataggga

SEQ ID NO: 123641 - DNA, 478 bp, Glycine max
  Clone ID: PAT_MRT3847_82655C.1
gaaacttcacactttacccaagggcaaccagcaaaccgagaaaaatgatctggctagccatgtcattgtactcatctttgtgggctttgcttagctttttttttctgtcagaataccgttatagaatggcaaaatggctcacggacacaagattaaaagaagggaatttaggttttagcatctgaattttgaaagactcatttaaggccaagggagttacaattttcaatccacaatgaataatggctcagttatgtttgtatacttggaaagggtgacaattttttcacaaaaaccgggctgtcatactcatctcattttcaattggccagatattaaaaagaaaacaatgctagaaaaacgtcattacataccattattttaattgctacaataaattaacataaattacgagtaggcgtcccataatttgagccttaaattcctgatcaaatgtttcatttttctgaaataaatt

SEQ ID NO: 123642 - DNA, 608 bp, Glycine max
  Clone ID: PAT_MRT3847_82656C.1
cccgcgtcgacccacgcgtccggctgttgtatatcactactatggttgaatggctcatgcacatgttgctgttacgccgctttgttggggggcttgcttgggtcaccggcatcgatgccctttataaagccttctcactctacggagacatcgctgaatctaaggttctgagcgaccgtgagactggaaggtccacaggattaagatttgtgaccttcgcctcatagcaggcactgaaagatgcgatcgcaggactgaacggccggcaccttgacggtcgtctcatcacatggcacacgaagctcaggacccgcgccagtcgtggtggtggtggcggcggtggtttctggaagtggtgcgcggatacaacgcgggatctcggtggatctttgtgctggtgccggcggtgatggctacgttgggggccgtgttggtggttgcaaccgaatggtgggtgtggtggtggtggataccgggcttgtagggactgcggttgctgtggtgatggtggttgttgctgctctctcggtgtgttaggacttggagcccatggacgctggctacctaggccattgaccgctgtggttgcgggttatgctgttggtgga

SEQ ID NO: 123643 - DNA, 592 bp, Glycine max
  Clone ID: PAT_MRT3847_82657C.1
cgagaacaagagaatgggttgggggcaatagtagaaagaaagaagagacaggaggacaagttggtgattgggacttaaagagagggacagtttcgttcgggttgtggttggccgcggtgcgcagccaatcccatcgcgtcgccaccctttctttcatttttcatcattccaatccaaatccttccttccttccttccttccatgccaaaaccaaaaccctaatcaataatcttctacagaataacaatgatcccctcaaatccctaatccctaatcccaatgccattgaagaaagaagcaatgatttcgaatccagaattgatccactacgcgtgcattgctcgatcggagacgatcctggggcagcaccagagcgagaaggagcctaacatggaggccttagcagcccaatgcgtggcccaagcccctcccaaccacaccctcttctcccacaccgtccataaccgcacctacaccttcctcatcgaccctcccttcgtcttcttcgccatctgccaccactctctgctgaaataccaaaccctacctttactacactgagtaaaatactacttacggcggaccctaccac

SEQ ID NO: 123644 - DNA, 484 bp, Glycine max
  Clone ID: PAT_MRT3847_82658C.1
tcttttttttttttttttttcctttttttttttatttatattcttttttttggggttggttttttttttttttctaaaaaacctatggaacaccccccaacccttttgaaatcggggactcgcaaacctccctatctctggtggcttttaaactttgaaaccataaggttgggcccctgtcataaagaccctttccccatgttgcttaaaagaaccttttttcctcccacttaaaatttgggcccgaaggcccaaaaaattttaaacaggaagatttcgggggatttaatttgttccccaattcgaattgtgggaaaaaacttttccccacgggtaaaatttcacaagtttttaaaagcatcccccccccctttgttcccagggggatccccattgtgcctaacaagggggggcgggacaaatttttctaaaggaggggggaagagcccccctttctattttatacccggcttttttcccccct

SEQ ID NO: 123645 - DNA, 1255 bp, Glycine max
  Clone ID: PAT_MRT3847_82659C.1
atcaggttcaaaagcatataagagatggggttagaagggaaggaaacgccgtcgtttatgagggattttctcgataagtgtggtggctgcgccgttattgacggtggttttgccactgaacttgaaaggcatggggcggacctcaatgacgaactctggagtgccaaatgccttattagctccccacatcttgtccgaaggatctgcagtttcacacgagtgatcaaaggaatgggaaaaaaatgttcacctagattacctcgatgcaggagcaaacataatattaacagcatcttatcaggccactattcaaggttttgaggccaaagggttctctagagaagaaggtgaaactatgcttagaagaagtgtggagattgcacgtgaggcacgagaaatttattatgataggtgcaccaaagattcttctgactttatgagagatgaaagatataggaaacgtcccattttaattgcagcttctgtgggaagctatggagcgtatttggctgatggctctgaatatgttggggactatggtgatgcagttactgtccagacactgaaagattttcacagggaaagagtaaagattcttgttgaggctggtgctgacttaatagcctttgaaacaattccaaataagctggaggcacaggcttatgctgaacttctcgaggaagaaggcatagaaactcctgcgtggttttcttttagttgtaaggatgaaagcaatgtggttagtggtgactctatctttgaatgcgcttcaatagctgattcatgcagacaagttgttgcggttggagttaattgtactgctcctagatttattcatggattgatttcatttatcaagaaggcaacaagtaaaccagtacttgtatatcccaacagtggggagacttatatcgctgagagcaaccaatgggtgaaatcaagtggggcagcagagcatgattttgtctcctacataggcaagtggcgtgatgctggggcttccctttttggtggctgctgcaggactactcctaatactataagaggcatagcagaggcaacatatgggaaacttaaagacaaatgtatataactgttgaagtgtgtttttatctgtaatggaagaaactataataatctgaatgaaatggctaactttttgccggaggagcaagtgatctatcatttctaataaaaaaaaaaaaaaaaaaaacacgtgcaatcaaaaaaaaaaaaaaaaaaaaaaaaaaaaaaa

SEQ ID NO: 123646 - DNA, 270 bp, Glycine max
  unsure (1)..(270): unsure at all n locations
  Clone ID: PAT_MRT3847_8265C.1
ccggaccggaaaccccgggactgacccacgcgaccgttcactaccgaacgcccacgcgnccgaagacccggggggtgagaatgcaccgccgaaggggaaacacccacacccccacaaaaagacgcaaagacgagagaagcgcgcgcaacccccaaacagcaacaagaacgagaaaacacaccgacccaaggcacggcggaaccagaggacccaagaacacaaacgggggcacgcaaaaacacagcaccacaaaaggggcacccaaaaaca

SEQ ID NO: 123647 - DNA, 476 bp, Glycine max
  Clone ID: PAT_MRT3847_82660C.1
cacgcgtccggctccttcatccaactctgatgttttgtccagattgtttgaaattgtatttggcatactagagaaggttggtgatgctgagcaaaagcgaaagaaaggcatatttggggctaaaggtggcgataaagactctatcatccgaagcaatctacaatatgctgccttaagtgctctgagaagactccctctggatcctggaaatccagcatttctgcattatgctgtacaagggatttcatttgctgatccagttgctgtgaggcatgcactggaaattgtttctgagatagctacaatggatccttatgctgttgcaatggccttaggaaagcatgtgcagcctggaggggctttacaagatgttctccacttgcatgatgttctcgctagaagttctctagcgaagttttggttggacaataatcaggggctaggagctttagaaggagaaaaccagatatttagat

SEQ ID NO: 123648 - DNA, 397 bp, Glycine max
  unsure (1)..(397): unsure at all n locations
  Clone ID: PAT_MRT3847_82661C.1
ctgacccttactctcagtccttctacattactacattttgtcgcacaaccaatccaccgtacaacttccagaacgacgagggacaaatcatcgatctctacatccccaagaactgttccgacacgaacaggctcatcaccgctaacgatcatgctgccgtccacatcaacatcgggcatttggatgagagcggagtttacaccgaccagatcactaccttcgccctttgcggcttcatccgtgctcanggtgatgctgatggtgctctggaccgtctttggcagaaaaagaaagtagaagctcgccagcagtaaaaagtagctgtagggcgttttgcagtggaagatctggttttagtttcaacatatgttactttgacctctactagttactctat

SEQ ID NO: 123649 - DNA, 307 bp, Glycine max
  Clone ID: PAT_MRT3847_82662C.1
cactcgcgcagccatggctattctctcattcactgcccttaaggaacgcgctggcctagagggtgccgctggtaaagtcttatctccacactcaacaatgtttgacatcaaggcttcacttaaagacattcaagaactctatgagtccactcccgctagcgcagtgctgtctcacgactccatgctcatataagtgggatctggtgagcactacggggctctggctctcgtatcgaacaaatgctccttgacccttcaaccgaagatcgagctcgagatcaacgacagttgctgctacatccacaaa

SEQ ID NO: 123650 - DNA, 786 bp, Glycine max
  unsure (1)..(786): unsure at all n locations
  Clone ID: PAT_MRT3847_82663C.1
gaattcgagctctgtacccggggatcctctagagtcgacctgcagttttttctatgtactgcgtagggcctctcggctccgttcagcttcctgctctcataagcaagcaactggatggccctcaacagccacaagtgccatgagtctcctgtctcctctcttggaaggcgaacttctgcccaccctttctttgaaccttgtcaatgatcgaacttaaagatatgaactgagtgccatttgatgagtaactgagaacaagggagagggatatggaaaggatgaagtaatgaaagacgaagtcattgctagtagtaaggacttgtcacgatccattggttcatataaaatccatgtcctaggtgtatcaaaaaacattcttttcgctaagcgtatataataaaatagagtgaaaggtccaccccgaaagggggtactaactaacagctgagtcctctccgaaccgcaggagatagttgcccatcatacggctcaccaacttcacttgcctctatgggagactcgctccgggcaggttcggattacaatacacggctctacgaaggaaggggttggtgggttaggaacgttttcaatatgattctttttccgtatttgttcgatgagaaatgcaagacgaaaaaggaacccatcttttcgactgggaaatgcgagtctgttttgtccactttctccatccctctctatcaaaatgatcccacaaaaaggaaggcgagcttgntatatcttcgtgttcgatctctgccccgctcgttgtcacctatgttg

SEQ ID NO: 123651 - DNA, 339 bp, Glycine max
  Clone ID: PAT_MRT3847_82664C.1
cacgtttgatctcaataatcattgcgtggaggaggcgctgctccttcaagccgtagttgccacattcgcccttcagggaagtggacgcacatgctgacgagcagtgtccgtggcggaggctttgagattcagaaacttgagtttggagacgacggttcaggagagtagaggaaggttggtgactgacaatggctttttgtggcggtgatcggtgctaactggccgcagatgacgatggagggagctacaggaaagggactaagactaaaaagagtagagctatggtgtggaaggtgtgtaataaaaatgtatgtcttagattaatctaatggctattaa

SEQ ID NO: 123652 - DNA, 293 bp, Glycine max
  Clone ID: PAT_MRT3847_82665C.1
aaaaaggaaaacaagtttttgttttatgggccgggaccttatggccaaaaaaaaggtaaaaacggggggccaaaaaagggaaaaagacaaaagcaatcgctttccattaaaaaaaagcaaatctgggggacaaaaaaatagcataattaaaaggggggggcctccccccaattgagatatacaaacaaatttaagggggccatcacccgggggggacttggggatttccggatttactaggcaagccttaaggaggaaaattcaaaagtggggggggggggggggggaatttc

SEQ ID NO: 123653 - DNA, 762 bp, Glycine max
  unsure (1)..(762): unsure at all n locations
  Clone ID: PAT_MRT3847_82666C.1
gttcatttttcttctaattttccaaaaccactaagaatttaatagatttcctttccgcattagacgagctatacttttganaacgtaaaatgacgtcagttttcactaattggtgtcattaatatagtaatatttttttttctgcgtcattaatataatattaaatatcgttaaaaattgacagcacaataatgtgttaatttcattgtgaatataattttacaaatattataataagtttattttaacattaaaattgctctaataacaaatgaaggcgtattttcaatattctcttaccacccaaatagcagtcacatttgtgacacttttcatttctctaaaactttcttattgtcacgttacataaccaatcatagaattccatgtttggatatgaaaaaaaaatgctctaacacatgttacttttgaattaaagtggaggaaagtcgttgatctaaacacactcttgtcttgctttttttttttttttaacgattatatttaaagttttgactctcagataaaatcttaaggtatttttgtaaactgtaacttttgaattaactatgaaaatagtaatttttagtgaagcttagtgacaattaaaatttatgtctcttctccaaaacctgtagggaatctaagtccaaacttaaaattaatatatggccccatctaagccacacttgtagactttttctcatatggattatattgcaggtcgactctagaggatccccgggtaccgagctcgaattc

SEQ ID NO: 123654 - DNA, 459 bp, Glycine max
  Clone ID: PAT_MRT3847_82667C.1
acggcgcgagaagacaacaaaaagaggtcattttcttgacaattttttttttttaaaaatttttttctaaaaagagggttttccaatgatgaacgcgcgttaaaatcaggcatccagcgactgattaacttccctattcatttttcgctatctctctttatagaaagaacgcgtttaacacagcccaaaccataagttgctcacaaatatgccacttacattgaatggcctaaccctagaaatgtttaaattccaataactaaggttttaatttctacataaagtcatatacgctaatttttacatgccattaatcatgtaacagtagccatccctaagagttcacctactactacaatgctaagactctacaagagacaaccttcagagatgcattttcttatcaagaggcttttgatgaatgaactctcagatactgattaatctttttctcaaatg

SEQ ID NO: 123655 - DNA, 158 bp, Glycine max
  Clone ID: PAT_MRT3847_82668C.1
catagttactgagccaacgcgttgtgaggccacaagtatctaacacccaggtatgcttttggaactcagagttgagtggttacctgactacagctctaattggttaaccaatcaaaatccttttttttcaatactctctctcgttctctctgacactc

SEQ ID NO: 123656 - DNA, 337 bp, Glycine max
  Clone ID: PAT_MRT3847_82669C.1
cctactatttacagcggcgaaccaccagcgcggcgattaacgggcaaaagccccgacagaaggcaattttagagcaagagttgatctgcagcgcactcatcgtattaaaggaaggataaaaatggtggacacaggcggcattcctgagaatacaagactatcattggcctgtgctatgaataggtctcctagggggcgtgccagttctgatatattacaccatcctgttctaccactgcgaattatggaatcatgcttgcacaaaagcaatgcctatgccattgaagccaaatcccgcgtcggaaccatggagtttggaattcttgaagcgaaccgg

SEQ ID NO: 123657 - DNA, 271 bp, Glycine max
  Clone ID: PAT_MRT3847_8266C.1
cccacgcgtccgtcaacacatcctttcacgtttatggccaactcgactttaacggtaacgggcatactatatttaaacattgtcaactaattcaatcaccataccgtctatctactctgcatgaataacacaaagaaaattgaagcatcctaatacttagttctaaagaataccgatttagcaagagaagataaatcatgtggtgataactgacttttcaaacaagatgcataaatcagtgttggttgcagtttataaactattctaccac

SEQ ID NO: 123658 - DNA, 270 bp, Glycine max
  unsure (1)..(270): unsure at all n locations
  Clone ID: PAT_MRT3847_82670C.1
aatgatgacacaccgggcggacgcgcgggcggacgcgggggaaagaaaaagaaaggcgcccgagccacaccgacaccagaacaganganggagcaaaggaacaacggagggcgagagagagagggaggaaacacggcaacggcgcaggcgacggcgccgagggaggaacagacgcagaaagagaaacggagcggcaaccaaaacaccgaacgcagacgcacgcgacaacaccgagggcgaacacaaacgaagaaccagaaagcaaaccaa

SEQ ID NO: 123659 - DNA, 271 bp, Glycine max
  Clone ID: PAT_MRT3847_82671C.1
ggctcgagaaaacggcaacaccactttagatcctcgctttagtcgatttgaaacatcctcggcctccgcccgtggccattggaacctgtcgtccataaatccagcttcaacgtctttaacgaagaagacgtatcggctccatgggtacgcaaccgttagaagcgcttgctctgcttcttctacatattcaacatgcttctcgatcggacctattacgattccgtgcatcctcgctctgcgcccatggtaactgcaggtgcctgacacggtt

SEQ ID NO: 123660 - DNA, 438 bp, Glycine max
  Clone ID: PAT_MRT3847_82672C.1
agagagagagagagagagagagagagagagagagagagagagagagagagggtacctccctccctcctcagcctgtcccgcaaataccaatagcgacaccccctctctcaccccctatcccgtcattgtcactggcggttcaagcttcccgccagtgtcaatggcggtatccacgtccagaagtgaccccccctaatttattttaaaagaaaccctcttccgtaaatagttttcaaaagtaacccccttctgtaaatttgccctctgtatctcatctcatcggccaacagaccagccgctttttccgtcttctccaagtccgctgagtcgccatcgccgcccaacccgaaacgccatcacccagtctgctacgaacagagaaccacagtctacattcctgtcatcatgactcactcttgttcatgttatattaattac

SEQ ID NO: 123661 - DNA, 263 bp, Glycine max
  Clone ID: PAT_MRT3847_82673C.1
gccatttgggagttaggttctgaacagtcagcgtccagcgagtgatctttcttcgtatcaacacctgaaattgcatcagctgcttcttcagcttgagaaatggcacaagaaacctttctattcacatctgaatctgtaaacgaaggtcaccccgacaagctgtgtgaccagatctctgatgcactgctcgatgcgtgccttgaacagggacctgacagcaaggttgcctgtgagacatgcaccatgaccaacatggtcatggt

SEQ ID NO: 123662 - DNA, 867 bp, Glycine max
  unsure (1)..(867): unsure at all n locations
  Clone ID: PAT_MRT3847_82674C.1
gtcgatcacaccaatccttgcgccttcttcctaacctccaatagtcacccttcacaattctctcgtaacaacagcaacatcaatggctactaccaccgccaacaaagacgaaaccattagcaccattgcatcttcttcttctccagtcttcatatccacagagaccttatgcaccatcctcacccatcacactctgatgaaccacttccaatctactctccccaaagcctcaaccattctccaaaccccaattcgccaacaccactctctctctccttcctcctccctcctcctcatgccctcttggtcctcttcctcttctctcccttacatcggcgtcaaactcgtcacccatttccctcaaaactcttctctcaacttacccggcgtgcagggaagctatgtcctcttcagttcaaccaccggtcaaaccctagcttccatggactccaccgaactcaccctttacagaacctcgtgcgtctcaggcttggcttctaaatacttagcgagacatgacagcgaggttcttgttatggttggtgctggttccttggcaccgcacctgatcaaagcccatctttcagccatacccagtttgagaaaggtcatcatctggaacagaacagtggaaaaggcgacaactttggccaacaaacttagccaaagtggggaatttggtggagtgaggtttgagggttgtgggtgtttggacgaggttgtcggatttggggacattgtgagttgcgccacgaattccgagacaccccttgtgaagggggagaagttgaagggtggngctcatttggatttggtgggntcccttcaagaattcaatgatggagtgtgatgatgaggccataagga

SEQ ID NO: 123663 - DNA, 368 bp, Glycine max
  Clone ID: PAT_MRT3847_82675C.1
gcctttcctaatggagtgctgtgagcgcacggagaacgacaagaagggcgggcacttggctgagcgcatagccgacggccgcctcatccttcgtgagtctgcccagtgcgctgatgaagatgagaaggagttccagaacattactaagcatcgatacttcaacacaaacaatctatggatccgtctggacaagctccaggaagagctcaagcagcagggaggtgtcattcgtctgccgatgatcaagaactcgaagaccgtggaccccaaggactcaagctcgaccccggtgttccagctggagaccgctatgggtgctgccattgagtgcttcgacggggctggtgctgtttgtgtaccacgcaccc

SEQ ID NO: 123664 - DNA, 344 bp, Glycine max
  Clone ID: PAT_MRT3847_82676C.1
cccggggaacaaaagtttcttaagttaaaaaattccctttggggaaacgtcacaaaaataaattttaaactccccttaaaaacccggccctttaaaatttttcccccccccaaaagcgctttaaaaaaatttttttaaccaaaatgaaggggaccctaaaaaaccccaaaattgggtccccgcaaaaactctccccaaaaagtctacccggggtattcttcaacccctttttttttaataaaaactgggcctgggaaaattttgaaaccaaaccccccccggtgggggttctttttcaaacaaatggtttttgggaaaaaaaggggtcccccccttttttttta

SEQ ID NO: 123665 - DNA, 376 bp, Glycine max
  Clone ID: PAT_MRT3847_82677C.1
gctcgtctttgaagtttctaagatgactctcctacattaaatgtacagtcttttttcatagcatttggaaattggctgatgacaccatcaatttgggcttttccccacaagctggtgcagtttggagagattcaggaaaaagttggttgaaattttcacaagagaatttcttacgcttgtcaactaggtgcgcccgcacgactctgttggtgatggggcccatattgtatgctatgggcatgatagtcaggtctacaataccaggtgatttgtcatggtgttaagtgacaaccataaacaatatgtgtgcattgggctaatcctggatttaggttctcgcttttgggcaccattctagccatttacagaaactgtt

SEQ ID NO: 123666 - DNA, 251 bp, Glycine max
  unsure (1)..(251): unsure at all n locations
  Clone ID: PAT_MRT3847_82678C.1
ccggcccggaaaccctgggtcgacaacacgcgcgtccaacaccgnacaaaacngaaggaaaaggggggacactgaaaagagttagccgggaaaaccacgcatggacaaatccaaaggattgaggggcaaaggcagaagccaaagacggaaaacacaaacaaagcggaagaaaccaagatgccggaagcaaaggaagacagggaaacgcaacaatgagaccacaaggcgagccagaagaacaagcccaaagg

SEQ ID NO: 123667 - DNA, 309 bp, Glycine max
  Clone ID: PAT_MRT3847_82679C.1
gttattacatggcctggagtcgcgagactataagatacggatctgtatacaaacagaactctggtggaaaggaattccacccactaatgaatgggatataccatcttcagctagccacgtagcagagggaacgtccacttttgcctggtttttgagactgctcgtccaaagctgattaaaccagaagaaaattcactgtctcctccagcaggaaaccaagaacatcctttgggtacaattcgaaggcagttcaatgtcattgatatggctccccctgaacccggggggaatgccaagaaagaggctgaa

SEQ ID NO: 123668 - DNA, 285 bp, Glycine max
  Clone ID: PAT_MRT3847_8267C.1
cacgaagccattgccacgagccttctctccaagcgctggaagccgttgtggcattccgtccccgccttcgacctcgacgatgaaccgtttctccaaaacgacaaaccctactcctccttcttgacgttcgcctacgtcgccattctctctcgcaacccctcccactccatcacgcacttccacctcaactccagcgtgtgccgaaaccaaaacgacctcctccatttcaacatatggctaattgccatcgttgttcagcttgatgtcaaacacctccaaatcgag

SEQ ID NO: 123669 - DNA, 871 bp, Glycine max
  Clone ID: PAT_MRT3847_82680C.1
aaactttcccaatagccgcctctgataattcattgctaatttgctatcaatccaactttacatattatcatccattttgatttcatcgataggaaactgggaaactgggttttctctcttttttgcagataagcatcaataggacactagataatggattggtactatgggaacggcgttaatgattatctggttcccagagatcaggatttattggacaggcatccttcaccggactattggtcaaactggggaataagtgcaactgaagggattctgtacctgaaggtctgccttgggttgacgttgaaaacctagacaaatccattaacatttcacctgaaaaccaatggagcagtacacctggtatattgcagaaagagatgccagcttcaaagtctgtttctagcaactcagaatcaaaggattgcctggatatagaggcaccactggccaaggtcttggactcatttgagcagtgtagcagagatgatggcatgtgtgagcagtcatcatcacttgaggaattcatactgaaggatcttgagatggtaattggacaggtgaagtgactaagaactcaaatccctggcatctgattaactgcaataattttttttccttattctttttgtttcacatggcaagttcaccgagaggacccgtatttgcttccgagatgctctgtaccgtcttgctagaaacactgaagaacaacctgtaatgctggaccagaatgaagatcttaacatacagaaggcaataccacatacagatcacaatgaaacaatgaggtctcaggacaagaaaccaatggaatcagaaaccaacaatattgacagaataattgcaaatctcatgttcaagagca

SEQ ID NO: 123670 - DNA, 139 bp, Glycine max
  Clone ID: PAT_MRT3847_82681C.1
caaacgcgtttgtgtttgaacaagaggggcacgtggaggccccactagcccgggaaatgctataatgcagggggatagatagagccttaaaggcaatgctttaatcgaacagtgcacgccttacaactttgcatgatga

SEQ ID NO: 123671 - DNA, 591 bp, Glycine max
  unsure (1)..(591): unsure at all n locations
  Clone ID: PAT_MRT3847_82682C.1
ccacgcgtccgcggacgcgtgggcggacgcgtgggtgccaatctaatggagactcttttttctgtcagaatcacgtgttattggaaagaagaatggaccctgatgtcattgaatcagaggcaaagctctcagctgatgataagagcagtgagactgtgatttctcggatcaataggatcaatagtggaaaaggagcttcgcgcaagtttccgtccatgacaacttggctcattggctgggagcaagaagatacttatgcagctcttgctgttttctgtgctgctgtgtcagttgtcgttgcctataactgctacaaacaattgagataagagaaatcaactttggcagcatttattaagtggtttagataccttaagcctttactatatctggatattagcttcatgtctgatattaagtgcagttcttccttggaccagtccttactgaacttgcagggaaacgattgaggantgtgtgtgctttagtgcttgcagagtattattggctgaggcacttgtaatatgccagttagcttatttttgtacatataagaaaccttanccacagaatattcaaatttaatatttt

SEQ ID NO: 123672 - DNA, 356 bp, Glycine max
  unsure (1)..(356): unsure at all n locations
  Clone ID: PAT_MRT3847_82683C.1
tcaaaacacaaacgcggtttccttcctaacattattttccccgattttttaccgggagtcttacaccacacatttctcattacttaactaaaaaaatttccttaccattttcaaaagcatttatacttttcttttatnnccttaacaaatcccttttcatcttttcctttcaattctaaattctttaacaataacctctcatctcataatataatactctacaaaacaaaacaactctaaatcttaaaacaatatggntcacataatantttattgntaatcaaaagttaaatatatacctttaataatattttacgctcatattttctgagatccaatttcacaccccacaccct

SEQ ID NO: 123673 - DNA, 822 bp, Glycine max
  unsure (1)..(822): unsure at all n locations
  Clone ID: PAT_MRT3847_82684C.1
cggtccggaattcccggngtcgacccacgcgtccggtggtgatggctttgttggtgatggtgaagaagaagaggggtggtggaagaaaggggttggaggaggaggaggaagatgggtttgtgcctgtgttgaatttgaaggtgttttcttacaaggagcttcagttggcgacgcgcgggttttcggagaaggttgggcatggagggtttgggactgtgtttcaaggggagttgagtgatgcttcggttgtggcggtgaagaggttggagaggccggggggtggggagaaggagttcagggctgaggtgtccacaattgggaacattcagcatgtgaatcttgtgaggctgagagggttttgctctgagaattctcataggcttttggtttatgagtatatgcagaacggtgcccttaatgtttatttgagaaaggaagggccttgtttgagttgggatgttaggtttagggttgctgttgggactgctaaggggattgcttatttacatgaggagtgtaggtgttgcatcatacattgtgatatcaagcccgagaacattcttttggatggggatttcactgccaaggtttcggatttcgggctggcaaagctcatcgggagagacttcagcagggtgttggtgaccatgagggggacgtgggggtatgttgcgccagagtggatttccggagtggcgattaccaccaaggcggatgtttacagctatggaatgacgttgctggagctaattggcggtcggaggaatgtggaggcgcctctgtctgctggaggaggaggaggtggtggagagagtggtgata

SEQ ID NO: 123674 - DNA, 347 bp, Glycine max
  Clone ID: PAT_MRT3847_82685C.1
ctctgtctcttacttctggtgttgttgttgtttttcatttggggtgagataaaggctacagtaacaacagcggctttggcaaagaagttttcggagaaattaagaggaagatagaagttcttttattttgattttattaaaatggtgtttatgttttttttgtctgattttttgtggtttttttggatgcttcgttgttattttttccttaaactcatatttctgatattgttcagagttttatgggataatctacgaggttatgtgtttgatcaaatgtcaatatgatatttttgggttatgtgtttgatcaaatgtcaagatgatatttttggatcatttcatta

SEQ ID NO: 123675 - DNA, 492 bp, Glycine max
  Clone ID: PAT_MRT3847_82687C.1
acggctgcgagaagacgacagaagggcactttgcatttaaaccacctaaatcttagtgataaaaatttaattctcaatatgcatgcatcttatcttttggtttagaactctacaattctctccctcaagccaaaagagaaatatccttcaatcaattcaaaagtgaacaaactctctctccaacgaaagtatctccacacttttacaacattagaaaacttcactttcttattcagtttgctatcatggttcctcttcaaggcctgtccatccaactagcaaagattacctttatttttttgtcctcaaactatcaagtgtctctccttatacaccttgcatccccactttgaacctgcatatttgtacccttgtgatgtcatctccccccatttcgaacctttgtgtgttcttagccatagttctgatactattattgggtaatcaacactcccataaataaaattactcacaaccacaaaggatcgtgag

SEQ ID NO: 123676 - DNA, 260 bp, Glycine max
  Clone ID: PAT_MRT3847_82688C.1
tgaagcttggatcttctctcgcattgtggaatctatttggtggcagtctttgactccacatatgcagcttgctgatgcaaagatcactcataaggattcagcaaaaaactatacaaatatgtctagttcatgcgatcaagagtggggaaatttatcactagatatttggaagaatgcttttagagaagcctgtgaaaggctttgccctatccgagctggagggcacgagtgtggctgtttgtctgtgctacctaaattgt

SEQ ID NO: 123677 - DNA, 518 bp, Glycine max
  Clone ID: PAT_MRT3847_82689C.1
ccgctctgccgatccactgtcgccgcgtctgaatccgacctcgcgatggttttccggtcgtcgtccgtcgctggcagcgacagcttccggctggagatagggaacattagtagccgccgcgaaggagatatcaccgccgttgccggagaaacgcgcggaaggtcatattccgttggcgcgttcgagtatctcattgacgaggaagctgaggttgaggtcgaggttgcgttcggtttagctgaccggagaatcgtttccggcgagaaaaacgacggtgctccggtggtggctccggcggattcctagctggtgaggtagggcgtggtggtggaagtagaaatggtaatggctggttgaaggattacgttgatcgtctttcgaatacggtgtcgtttcggagttctggaagcttcttcactgggagcagtcgccgaagcgacgtcgttttgggaggagattacgatgtagaagcgagccgtttcggggacgaaatcggtgaaatgttccgatggctctca

SEQ ID NO: 123678 - DNA, 294 bp, Glycine max
  Clone ID: PAT_MRT3847_8268C.1
aaaaagaaaaagacatcataattaagaattaaacaaattatgtaataatttagagaaaggaaaaaaaaacactaaagaggagaaacggtgattacgagagcacaattacaaattacaggctttcggttttcttttttactttgttgcttttttaccctctcatttattgatcctcttgctgcctagatggctgactcactggctaactggctcagtgggtggattgatttattccgctgtgacaagttgaaccaaacactccagtattatttaccacccacccacagcctcaac

SEQ ID NO: 123679 - DNA, 218 bp, Glycine max
  Clone ID: PAT_MRT3847_82690C.1
aatacgaatatcatattgctgaaaaaagcaccctgaacacatgtcacagcaaaaccaaaggccactgcgggcgttgccgtccacgtcagattgaaggcgcatctctggggcttgggcgagcgatcaacacgacgatgtgtatacgagcgacaccggtatggtggccaagacgcttacggatggcctaagtcctcaccatgccaccggctgttgggagc

SEQ ID NO: 123680 - DNA, 619 bp, Glycine max
  Clone ID: PAT_MRT3847_82691C.1
cttgttttggagttttgaggggtgagggtcttgggattttcagaagccctccccctcttctatgcaatttctaggttcccccactttgggagattttgtagaaaaatataatctaattactcattgaccctcaacccctttcctgattacatgtctctcaaaccattgctcattttctctcatcactcttgtttggcttcaaagaaaattatcactgagaaaatcttcacctctcttatcccaacatatgatttggatgaatccatagcatagcagccaacccgtatttcctttgttttatcaagatcatatacaacccatagtagtgatgtgtctattatttatgtgcccccaccatcacattgtggtcgggattaatgaagctgcagcgagtttctctacttcatttctttgttgttcaggtttactaatcaatgtctttgctccatcaggtatgatgtttagtttaaaattctcattttccaaacaagaaattgaacattgcaaaattagttagttatgcttggaattcagcaatagtaccattttttttttatgaaatagagaattatatgggtttagctcctgaatatttttattttgtttggtctatggtatt

SEQ ID NO: 123681 - DNA, 468 bp, Glycine max
  unsure (1)..(468): unsure at all n locations
  Clone ID: PAT_MRT3847_82692C.1
gaaactctatctctatcttgtttttgatagattatatatttagtgttggctatcagaggaagttgtttaggttgagagccctcccccgtcaaccgnataaaggtatctggggaatgatttactttaggttcagaacaattgaaggtcgaaatccaggtttaaaagggaaaaaaaaagggatattctagttttaacttctttcatctaggaagtgtagatgcctcttggtatgttggattttctcaagaacagnggcaaagaatctcacagctaagcaagggtattggacttggctctgcctctgacccagngaatggaattaactcaagttgattgcactccaattctggtaggagaggttggactttggatctcctcacatgtgctattgggtgcggtaattcatgaacaactgaacacttgctcttgcaattagagcaactattcaatggcccttttccttgttgc

SEQ ID NO: 123682 - DNA, 1767 bp, Glycine max
  Clone ID: PAT_MRT3847_82693C.1
ctaacagttgctgcgatggaagccatgaaatatcatttgagacgtggctggttcaactgaggtgatggctttgaatttgccttctcccgcccaagtgaagcccttatttttctcttcaaataactccacaaaacttccaggtagcttttctttgaagagaaaagatagtgacacaacagtagagagacgagtttattgctctgccgctgctcaatcaccaccaccagcatggccaggaacagctattcccgagccttctgatttcaagacatgggatgggcaaaaacctatttctgtcttaggatctacgggttcaattggaactcagacactgagtatagtggctgagttcccagaaagatttaaagttgtgagccttgctgctggctctaatattactcttcttgctgaccagattaaaacatttaagcctgaagttgttggtcttagaaatgagtctttaattgatgaactcaaagaggctttggctgatgtggatcacaaacccgaaatcatccctggagagcaaggagtcattgaggccgctcgtcaccctgatgccaccactgtagttacaggcatagttggttgtgcaggattaaagccaacagttgcagcaattgaagcagggaaagacatagcattggccaacaaagagacaatgattgcgggagccccttttgttcttcctcttgctcacaaacataacataaaaattcttcccgctgattcggaacattctgcaatttttcagtctatccaggggttgccaaagggtgcacttaggaaaatccttttaactggatcaggaggtgctttcagagaatggcctgctgaaaagatgaaagatattaagcttgctgatgcattaaagcatcccatatggagtttggggagaaaaataactattgactctgctacccttttcaataagggtctagaagtaattgaagcacattacttgtttggagcaagctatgacgatattgagattgttattcatcctcaatctatcatacattccttggttgaaacgcaggattcatctgttattgcacagttggggatacctgacatgcgcttaccgctcctttatacattatcttggccagaaagaatctattgctctgaagtaacttggcctcgtcttgatcttagcaagtatggttctctaacattttatgcaccggatgacaagaagtttccatcggtgaatctttgctatgctgcgggacgtgctggaggcaccatgacaggagttcttagtgcagcaaatgagaaagctgtagaaatgtttgttgaagaaaagattagttatctggatatattcaaggttgtggaactaacttgtcaggaacatcaaaaggaattagtagcatctccgtcactcgaagaaattattcactatgaccaatgggctcgacaatatgctgctagtctgcaaaaagcttcaagtgtttgaatcccatatttctgacatattttagaagttggggctgtggtggattgttggcaactgctagcatattttgtaaatgtatttgttggttcatcaatcttgtaaaatgtaaaggggtagctatataaagtatatgtactcctaaaagggtttcaataaaagttctagcttcagaataccatgttttgagatgctaatgcaacctaggcagtacttttgtaatgctataattttcctaattgtgtggttaagtgattaattcaagatgcaaaggaaataaaatttaaaattatgttattcaaaaaaaa

SEQ ID NO: 123683 - DNA, 738 bp, Glycine max
  Clone ID: PAT_MRT3847_82694C.1
gagagaactagtctcgagttttttttttttgggtttaaagagcaaatgatcactttatctattcagaagcttacaactgtattaaaaaaatgtttacaaatgttatcaatcatgatgaagggaattgacatattctttagctagttcgaacagtgccttatggcaacgaccaacctatcataatagctccagtaacttctttacaaccttgttatccttcaaaattaaaaaaaataagaatcacattaatattcgagctctcctgccaagggatgccaattaccactaacaaataccatgcgcgttaaagataggattcggtagttaagcactttcctgcaaaaatggcaaactaagaaaatattgagatttggggtgatgtagatctcaagttgacaaaatcaattgtacacctactactatatggtgtagatcatgaaaatctacatgttagatggtatacaatatactcaagcaaagtaggtcatgaggtaacagatctgaaccaaaaaagtaaatattcaagtgatataaagcaatacattttgcattcagatttcaccaaggcagtaaagataagtaggatgaaaggctttgcttttgaagtaatgtagcatgaaacagagatataatgtaaaatttataagctacagataaaggatttaacatagatagaaaagctgcgagttaacccactaaggggaactgcggaagacaattagattttgggaagcagac

SEQ ID NO: 123684 - DNA, 365 bp, Glycine max
  Clone ID: PAT_MRT3847_82695C.1
tatctttcatcttttcagcaggccattctctgaaagcacctcctgatccagttaaaagatattaagcttgctgatgcattaaagcatcccatatggagtttggggagaaaaataactattgactctgctacccttttcaataagggtctagaagtaattgaagcacattacttgtttggagcaagctataacaatctcaatatcgtcatagcttgctccaaacaagtaatgacgatattgagattgttattcatcctcaatctatcatacattccttggttgaaacgcaggattcatctgttattgcacagttggggatacctgacatgcgcttaccgctcctttatacattatcttggccagaa

SEQ ID NO: 123685 - DNA, 962 bp, Glycine max
  Clone ID: PAT_MRT3847_82696C.1
gaaaccgattcttcatctcaggcttctatgagcagaagaggaagtgttaatcaggggtcacttgagtttaatggtaaggatgataaattggattccagatctcataatcaacttgccaggttttcttcaatggaatccttgaaacaagtggacagcagatcttcaaagaaaaacaaaaaattggaattcaacagtagccgtgtctcacctgctccaaatggtggttcacagtggggagcaatgaatatttctaaatcttttaatcctgtttttggatcatcgaagaaattttttttcagcttctgttcctgggtctagaattgtttcccgggcaacatccccaatatctagacgacctagtccaccccgttcaactactccaaccccaacactggggggactttcatcgccaaagatagttgtggatgatgctaagagaatcaatgataacctcagtcaggaggttgttaaattaagatcacaggtggaaaacctgactcggaaagcccagcttcaagaagttgagttggaaagaacaactaaacagttaaaagaagcaatagcaattgcaagcgaagaaactgccaaatgcaaagcagcaaaggaagtgatcaagtcactcactgcccagtggaaggacatggctgagaggctacctgtaggagcatctaggaatgccagatcaccaccctctcttgcttcctttggcttaaatcctggttccaatgaccttactaatgcttcctttgatcgattgaatattcaagcaacaagcccagaatcagacttaaatggatccactaaccagttactttcaaatggatcaagcaccatcaccaaccggagtgcaggtcacattaaacacagtcaatcagatgcaactagcagaaatgggagcaaaacaaaggataatgagactgaatgggttgagcaagatgaacctggtgtatatattactctta

SEQ ID NO: 123686 - DNA, 244 bp, Glycine max
  Clone ID: PAT_MRT3847_82697C.1
cagagcgactgaacgcggaaaaaaccggaggaaccgaaagaggaaaagaaacaaagattcctggggaggagaagaaggaagacagggcgccaggaacacaggcggaaagagcgccggacaaagagagcagccgaccacaaagaaagggcgggaagaggaaaagcactcgaggaagaaacaggaagaatgcgaagatgagggaagaaaccaagaggcacgggaggaaagggaggtcaaaagaaca

SEQ ID NO: 123687 - DNA, 165 bp, Glycine max
  Clone ID: PAT_MRT3847_82698C.1
ttttaatttttccattcaaatcgcatattcccaaagaggaaacctccatgaaagaattaaagggggacaacaggaaaaaactcagttaaatttatctaaaggaaaattgcttgtcccttataatttcaccaatgccggaaactttatatgtttgacctttgttct

SEQ ID NO: 123688 - DNA, 518 bp, Glycine max
  Clone ID: PAT_MRT3847_82699C.1
tttttttaatgattcaacccaaagtaattatgacaataaacggtattttctcaaccgagaggggacagacaaatgtatccaagttatgaaagccagaaatatcattcaaccaataaaagataatacacgatttaatgattcaacccaaagcaagaatcatgacaataaacggtaccatcgatgtagagcaaaaaaaatggtaccattgatgcatatagcattgcgtcacgctttgacagagcagacaacgcaacttaaatcgcagtcgctattgtagagcattgatttgcggcaactactttgatttggagaaaatttaccaactacctcccaggtctttgctccatcaccccccgtttcacacataattttcctcgtgaaattccttttccttcccgtaatcctgttagttttttgacaaagcataataacagatagagccggacaatagtctgcttcaactagtatagctatttttgtacaacttccaacataatttggctggaaaaatttgcttc

SEQ ID NO: 123689 - DNA, 368 bp, Glycine max
  Clone ID: PAT_MRT3847_8269C.1
aaaggagcaaggtttgatcccaccatatactttccacggaatattaaacaacgggttggcttcaaatatatctaaccaaattttaaacggaggggggggggggcaaatattaattaaaaaaaaaggggggatcatcaaacaaaaattcctatttaaaaacaaattccagggggttatcggaaaaaaaaaatcaaaagcattggtgcttttaatcaagggcgatggtgagaaaacccacagatccctccctgagaaaaactggggagagggcaagagcttttctcctgggggtgactgcaaaactcatgaaagggtatgccgcccaagagcttcaagccaatggcacacacacaaaaaccatttttacc

SEQ ID NO: 123690 - DNA, 326 bp, Glycine max
  Clone ID: PAT_MRT3847_826C.1
aaagcttcctttgccatttccatgaatagaatagagaattcttaggcatatgaacatttagcccatctctgccactgactctgctccacagcattcaattataacaaagaccattttttttttttggttttggaaaataggcagagtcatagagagataaaggggctgcttaaattttcagccttttggagaaagagacattactcacatactcactcaccaccgagatccatttttttgcgaagaaagttgaagaaaaaaatggaaacaatgttgcctccgaaccaagcagaggaagcaatagtcacaacaagccttaacgagac

SEQ ID NO: 123691 - DNA, 276 bp, Glycine max
  Clone ID: PAT_MRT3847_82700C.1
cttatgtctcacacaaaacactagtcccttcctttttacttgtctctttctcttcgcaacaacgggcagatcttccacaagactgtgactggcaaaaacataaccctataggtccatagtctcgacaccatcgacaacgtcaatgccacaatccaggacaaggaaaggatcccttctgaccaacacagggtgatttttgctggtaagcagcttgaaaatggtcgcactcttgctgattataacattcaaaaggaatcaacactctacttggtcttg

SEQ ID NO: 123692 - DNA, 294 bp, Glycine max
  unsure (1)..(294): unsure at all n locations
  Clone ID: PAT_MRT3847_82701C.1
tagggatatgtagnagttagaangttaggaaaaagtggtagtgaggataaaaatttatttggtgatggtgaatantagaaaatttttgttatgactgaatgtatnttgttattgaagttgtattattagggttgtgttttgatntggaagttgggatactagtttggaagatgaagtgttttttgaagattatagtgggaagggttgagatgtgattggtggaacaaaattgtgtattttttatttttaattaaaaatgatgtggatgttatggaaatttaggttgatttgatg

SEQ ID NO: 123693 - DNA, 553 bp, Glycine max
  Clone ID: PAT_MRT3847_82702C.1
aaacattataattcatagaattggggtttgggcctaactcaacccttaaaaatcagcttgtaaggtgagggatgtcccccacttatatactttaattgagtcatatcactagccgatgtgggatctccaaccataatcattgaattggtcttcgtcttgataatggtgtaatggaactcaccttggtcttgttaggctgggagagttgatgcccagcagaatttgaatccttgctactcccttcccaagttcctcaggtcaagacctatagttgtaattgagaaaaatgatatcagctaaccacaaaatagttctcttctatttgggtgttttgcttctgctatctatattcatacttgccaatgaatttgcagttctacgatttgagtattattaaattctgtttattttgtttctgttggagtctctgactttgttaaaaggattggatttgtatcatctattggatatctatggtatatttcatgataattggattttttattgttgctctgaatgtctaactattacattgaactagctaacattatgt

SEQ ID NO: 123694 - DNA, 289 bp, Glycine max
  Clone ID: PAT_MRT3847_82703C.1
ctttttccgcccagcacacacactctgtgaaacacactccaacgttgtttctccacggtgactcattccctaactatatccttggccaacgcgttgtcgttcatcttcgagggctggagcgaggtttgcgtctcggacggcctacatatactaatgaggcgggacctagcaaactcggtcaaggacctctagattgcgatcgatcgcgagctctccaacctactttcagtccaccgcgccgccgttcttcgagccggcgaatctctttccgccgtccaaggagatcaac

SEQ ID NO: 123695 - DNA, 222 bp, Glycine max
  unsure (1)..(222): unsure at all n locations
  Clone ID: PAT_MRT3847_82704C.1
cgttctcccncnccaaaggaggcgttttaaaggttttttgcccccccccccaacccaaaggccaaaaaattctttcaccaaaaaaccgggggccaggggaaccttgcttttgttggggcggggccaattaaaactccaacctttgcgtggttttaatccaaaacctctttatagaagtgaattatatttaaccttctatttgaccaaaggatttaccatacc

SEQ ID NO: 123696 - DNA, 436 bp, Glycine max
  Clone ID: PAT_MRT3847_82705C.1
aacccaaaatttttaaggggatcccacttattaaagggaaaaaaaaggacaaaaatgtttaggggaaaaaaacaaattgggaacccaaaaaaaatccccctaaagaaaaaaaggggaaactggcccattcccaggctaaaaaaggacccctttaaaggccccaagaaaatggccccactttgacgggtttttggggaacaaaaaaactgttttaaataaaaccccattttttcccttaaagcccacaaaaaacccgttattctttggccctaaaaaacccccaaacacaaaaaaaggggaacccattggaaaaaaggaaaaaaccttaaaatttccaaacttcctaaccccatttttaaccaaaaaaaactttccaaaataagtttccctttttttttttggagaaaaagcaccaaagtttttcccgagcggggaa

SEQ ID NO: 123697 - DNA, 313 bp, Glycine max
  Clone ID: PAT_MRT3847_82706C.1
cgggagcgtttttgaaatatacgagtcatagaacgtatgtgttatacaaagagtgccccttgctccttaaaaactgtgatccgccgccgtaacatgtaaccacatctaggctacttgatgatcagcacggaaattatctcaccacctttgacttgctgtgacatataaaattgcgaagagactcacctactattatcacgaagagaaggaaaagtgaatcacctctgaacactatgtcttacacactaccgtgggacttaagtgattatatcactctttgccatagatcacatcaactttggccaatggacat

SEQ ID NO: 123698 - DNA, 446 bp, Glycine max
  Clone ID: PAT_MRT3847_82707C.1
acccacgcgtacgcatactctctttctgtctcttatacaatttttttcatacactcatcaaattatacactaacgttgttcttacattgcacacacacaacacaactattaacaatttgacatcatcaaaaatgagttcaactatccacactaaaacttgtaccgtaacagcaattgctggattggttgaggcctcgaaagatcatgctatctgcatgtgaaacatcgtcctcagatcatcacaacaccaatctatacataatacgatgtctttgtcttaaaccaacaaacttttttcttaaccatcttctatcgctttagccaaattgaaagatcaaaaacctaataagtcttaaaagtcttttataaccgcttatattataaatcttttaatccaactaatcaatgattcatatattttcaattttcaatttcctttttttctt

SEQ ID NO: 123699 - DNA, 561 bp, Glycine max
  Clone ID: PAT_MRT3847_82708C.1
actcttctcatacgactgactccctcaagtctctattctaccacctccatcggctctatgtataactagggtgctattgcttgcttttggagatgtctctgatctcagatatactcaaacataacctctccaacccccccgagagggtgagcgaagagcactgattgcatctaagtgatcagagaatgatactgagaagccaagtgaggactacatcccccgatcaccgtagctgcaactactccagcgttcaccaccagccactattagcctctcacgcacagcccgacgtcctggatgtacatacattggcatcgaatatcacaccctctctacagtctccgcgatccattcctcatcgccatagcgtactccccgctatctgtgctgcctacatatcctgttgcaaaatctatccccactatccagacgacgctgctgccaaaggtatcagacatcccgatgcgtcgtcgctgacctgccatgtgtatccgcattacacacaaaaatacaccttgtggcaaacaaatatcccatgaacacttagactctctgtctgtg

SEQ ID NO: 123700 - DNA, 397 bp, Glycine max
  unsure (1)..(397): unsure at all n locations
  Clone ID: PAT_MRT3847_82709C.1
acttttgaaatttagataacaaagattcactttcgcttcagcttttcttatactaaacttggtgttgttttgttggttggtggcaaggacagagggagctggaacatgcgacaaagcagattgcaaatctggtatgcttgtgcaactatacatactcgacgctgttaattggttgagaacacaattctgccttatttgttctcactcagttgctgtgaattttgattttgtgagtcagtaaaaatgttgatattcataacttagttgcattgtttcaggaaaaggagcgtgtcaagttaaagaaagaaagagacaagaaagaagatcagctcaaatccatatcttccaggaatgaagaaganaatgcttgtactaagttttcaaagtcaaagagtat

SEQ ID NO: 123701 - DNA, 228 bp, Glycine max
  Clone ID: PAT_MRT3847_8270C.1
gcacgaggggatttcctcttggggattggtgttacctctactacctcctagtgagaataaacccgccattcttctgcctcctcttctactgatcccgaccttcgaaaatccatatcaagaacaatactacctcgatcgccagccagccaaccaaacaaccccactaaccataaacttacgcaattctaaataaatagaaataattaatttctaaaataatccaatcca

SEQ ID NO: 123702 - DNA, 175 bp, Glycine max
  Clone ID: PAT_MRT3847_82710C.1
tttttgatcaagccacaagcatgcaaaaaatgagtgtagatagaagttatgaacacattagggaatgaaatatttggagagtgccagtgttataccacactccaatggctactcacttatactatatttcccccatatatatatatattctccacctatactctgtacgggggtg

SEQ ID NO: 123703 - DNA, 381 bp, Glycine max
  Clone ID: PAT_MRT3847_82711C.1
actcgagccgaatcggctcgaggaacgatgtataactttggctccaaagaggactcctcccccaatcgaaaataaaccactcgggcacaggtgtctacgacgtgaaaatcaacatattggcaatgaagatttgatagtttttcgtcgcaaattagatatcatgaaacgacatgagtttgtgtgggagccttacacaacaaatgttatgtcactgttgcccccaatttgtttagttggagatgtaacgtggtgtgcggtggtgccactaatttgttttcaagttattgagtgacaccaacctgatagagtgttgagacaatttgggatgcaacaaccaatttcattgtgtcattcgcaaccctctaatattcatggcatttc

SEQ ID NO: 123704 - DNA, 305 bp, Glycine max
  Clone ID: PAT_MRT3847_82712C.1
ggaagctgctgatgatcaagagcatacttcataaagtcattctcatgcgtgtattgaagaatgactttatgaagcatgctcaagatgaggaagctgctgacgatcaagaggagacaggatggaaatacattcatggtgatgttttccggattacaaagcacaagtgtttcttttcagcaccccttggttctggtactcagttattcacacttacaatcttcatttttatgcttgcactggttggtgcgttttatccatatgaccgaggcgctttatttactgcactggcggtcatatatgctctc

SEQ ID NO: 123705 - DNA, 453 bp, Glycine max
  Clone ID: PAT_MRT3847_82713C.1
atcaggaaaagaaatgcaagaggcaagaaccctaccggttatgtttagttggagaatgtttcgctctctgcactgcgagcatcatactataacaatttaggaatgtatattccatcaattttgccgtgaacacaaacccgaatggccatttatatcgtgatgaaaaaaatgaatttccatgagaattagtcagcaacagtcttaattgatagttaacatgtaacgtagaattacttgttaacactgtcccaaggcaaaggacacaagtttccagctcctcctgtctccctcttcctccctttaatatgtactttactgctgctttactttagaagcacatacaacaaaggataagtgaataacgtggtttaattaaaaactctgtgtttgttcaagacggaaataattatactgctttgtgcttacagcaatacaattttgtatatttattgt

SEQ ID NO: 123706 - DNA, 552 bp, Glycine max
  unsure (1)..(552): unsure at all n locations
  Clone ID: PAT_MRT3847_82714C.1
ggctcgagtaaggaaaatgattctgaggactggcttgacatagttgcaacagtagcgtggcaggctgctaactttgtgagaccagataccagcaaaggtggcagtatggatccaggtgattatgtgaaggtcaaatgtgtggcatctggaagcccaagtgagagcacccttgtcaaaggagtagtttgcacaaaaaatattaagcacaagcgcatgacctctcaatacagaaagcctagactactccttttaggtggagctctggaatatcagaaagttccaaatcaattggcttcttttgatacattgttacagcaggaaaatgatcatctgaagatgattatttcgaaaattgaggctcttcgaccaaatgttttgctggtagaaaaaagtgtagcttcatgtgcgcaggaatatttgctggcaaaggaaatcttcttggtgttgaaatgttaaaggcctttgctggagcgtatagctcggtgcactggcgctcttggcactccataagtggattggttatctaaagcacgattggngcactgtgagttg

SEQ ID NO: 123707 - DNA, 198 bp, Glycine max
  Clone ID: PAT_MRT3847_82715C.1
tttttggcataagatattcatttgtttttgtgcatatgtattccttaagggcaatggactgactagtaacaatgaagattcaaccaataatcaagctctaagaggactaacttctatacattataaattatatagcccaggaggcaaattgattgcataccctccacatgtccacaatggtttggaagagtgatacca

SEQ ID NO: 123708 - DNA, 421 bp, Glycine max
  unsure (1)..(421): unsure at all n locations
  Clone ID: PAT_MRT3847_82716C.1
gggggggtnaatagtaaaaattcttccgtttccctccccctttttttatttttttttttttttttttcatttttaaaatttcttttttggggaaaaaacaactaaaagagattttcccatttttttggtcaaattaaacacccttttgtttaccttggccacttggggctgttggcggttcccctttcccccaaggggattttttggcccaaaaccccccccccttttgtttataaaaacactcgggagtgggtttttttccaaaatctttattttcccccccccggttgaaggaaaaccctgtttggaaatctccgcccacattttaggggggaaaatttggcaaaaaccttggggccccttatttttaaccgggtttggttttaaaccctgggcaccctttaaagggtttgaaaggggc

SEQ ID NO: 123709 - DNA, 2208 bp, Glycine max
  Clone ID: PAT_MRT3847_82717C.1
aatctctctccctcctcctaaagtaaactttgtgcaaccgaatctcaactaccattaccatattgagtgctcaaatggataaaaccttgctagtcatttggtcctgttttttcatttggtcctgtttttcaccttctgatgttgttgttccgttttcttgctgcttgggtttgaacaattcacctcagttgagttgctgcatatcttagtagtctttgtctctactccaagataatttgacaacactctcctcaccccaaagccgcgacgatggggtttgatgttgttgttgttgttgatgttgatgttgtggaggaaaggagttctctcccctcttgcaggacttattagtggcaccgccgcaggtgaaaagctaggtgtgccaactgatgctttgtgtggagtagtgcctgagacagacactgagagtggacgtgtaaccttcttttgctgagaaaccacgttaactgtagtggtaggaaccaatgcaaacctctctgaatgttttgtcaagtcatccacatatagcaaatcatcaatgcgggccacaatgttaaaagccatgctctccaaaactcttgagtagctctctagcacggattttccaacatccttgttgcactggatcttgctggtatcaagggtagtttgacttaagcctgggaaccgctgcttcaaggaaactagaatgttctcagctctatctgctagtagttctctcttatctccgtcaaccatgaagtccttgactatttcccatgatgattttgtggtagaacggttggggtttggtgaggacctagagtgagctcttcggcgccatacataaattgctgcttccacacggtttgcaatctctagtgcaacatgttcagaggatatgtctaagcaatcaagaaggcactccggggagaattgatctgatgttatgtaacggtaaacaaaatcccccaagcaagttcttccattcttaggaagaacttccaaatatgactcaggaacttccatttcagccaaagcaatgctgttgatagccatggctgcttttagtatttggtttgcacattctcgagagtgattcaactgttttcttgagtcttcaccgagtcctgcagggggaacacgaggtacgggaagccaccacttctcttcttgccgctgaattgttttccgaaaagaggccgaaccatctgcatctggggctacaattccttggtctacataccaaaactctgtagcagtgaaactgtctaaaattccgagaagcatgttgtcaagtttgcgaagagctggaagattggtaaaaatatctgccctaggcctgcaagtcattacctcgagcttactcccatcaggatatgtttgccaagaaggcatcaactcgacaatgtaatcactaacactaacaagccattccatctctctctgccacatttctttcttctcagaaggtaagggttctagtctccataattgcccaaatacagttgcgcacagattagtaatggcattagagatggccaaagcagtgcaaaccccttttccagaacctgacatatcttcaccaagcaacaattttgcaaacctctccttcatcatgtcaacttctgacaacttcaaagcaatactggtaaactttttgtcttccaagtgggatttatgtttgttttctttttcatcagaattagagcgcttggagattgtggccttgagaataggccaaccaagaggagcaggtgaagaagacccttttgtcttagcttcttcagcagaaactgaggagctggatccacagaaactggtttcactggaagaatctgtggtgagacaagacaaaacaaccccatctcttttcttttgagaattttcgttcttcttagataaagcatccatctttgaggaaaagaaagtgttttgggttcgaaaaggcaaatggggcagtcaccactcgcgcagataagaagatactgggaacgtgggttcagacataacggtaagacaagtgtgtgaggatatatgaagggaccgctaaggttgtttcatggaaagaaaagacgatgtaaggatgaagacgtgtggctttttccgaaaaggattgtgagattctgcaatgcagtgcatacaaccacaaatttgatttctagttttgaaggtattattaccaaaatactaacgtctctcttctggctttcgctctcagagtattcg

SEQ ID NO: 123710 - DNA, 456 bp, Glycine max
  Clone ID: PAT_MRT3847_82718C.1
ctcacgcgtactcccaccctttcgtttggatgaacgggacactctaaatcactacgctaggtgcccacatacattgtatagccaatcccacgagtgccgcgacttcacattggatgacctattcctaattcaaggtatacatggaaacatcaccgacttgcacttgacgtatctgcgtcgctatgatacatacgtggcgacaacatgagcactcggacagatcattccttactgggacactgaaaatgtcactctcgaagtgatgtcaaaattcatgataaaatacgaacccagcgcactgagggttaaggttcttgtcagcattggaaacaactactaacaattgcctttcatcattggctcgcactcgaacagcgaagcatgggtctgcgaggtcactgctgacctgaatagcatcatgaagacctacaacctctatggcatcgatgtcagcta

SEQ ID NO: 123711 - DNA, 264 bp, Glycine max
  Clone ID: PAT_MRT3847_82719C.1
aggcgttagtacactacagaaagacatcctaagaaaagcaagctaactacagctggtggaaccaatacgtccaatgtggcttcttctgctactgctgactaccaaaccaacgcaacaccattgcgatctgaatatactatctgctcaaataatttggtaaacacataatttttaccacttgatactaataattcgagaaagccttaaaatacgatttttcggatatcatctcattccatggtttctcaaaagaatgaccccaaa

SEQ ID NO: 123712 - DNA, 1779 bp, Glycine max
  Clone ID: PAT_MRT3847_8271C.1
gtcaactactatatgtatcatggaggaacaaactctgacagaccatgctctgtgtttagcacaacccgttattacgatgaggcacctattgacgaatacggtgtgaccacagaaccgagatggagtctcctgatggacgtgcacacagctttgctcctttacaagagggctatccttggcggcgttaccagtgtccaaaagttgaaccattttcacgaggttagaacctttgagagggttggaaccaacatgtgtgctgctttcatcactaacaaccacaccatggagccagccaccattaacttcagaggcacaaactactttttgcctccacattccatcagcatcctccccgattgcaagaccgtggtcttcaacacccaacagattgtttcacagcacaattcaaggaactacgagaggtcacccgcagccaacaatttccactgggagatgttcaatgaggccattccaacggccaagaaaatgccaatcaacctcccagttcccgcagagctttacagcttgcttaaggacaccaccgactatgcttggtacaccaccagcttcgagttgagtcaagaagacatgtcaatgaagcccggggtacttccagtacttcgtgttatgagtctcggacattcaatggttgcattcgtaaacggagacatcgttggaactgctcatggtacccatgaagaaaaatcttttgagttccagacacctgtattgctcagggttggaaccaactatatttccttgttgtctagcactgttggactacccgacagcggagcttacatggaacataggtacgcaggacccaagtccatattcggctcgggtctcaacagggggacactagatcttactcgcaatgggtggggtcatcgggttggtctgaaaggtgagggcaagaaagttttcagcgaggaaggatcaacaagtgtaaagtggaaaccacttggtgcagttccgagggctctgagctggtacaggacaagatttggcaccccagagggaacaggccctgttgccataaggatgagtggtatggcgaagggaatggtgtgggtcaacggtaacaacattggtcgctactggatgagttacctctctccacttggaaagcctactcaatcagagtaccacatcccaagatctttcctgaacccacaagacaatttgcttgtgatttttgaagaggaggccagagttccagcacaggttgagatcctaaatgtgaacagagacacaatctgcagcgtagttggagagagggaccctgcgaacgtgaattcatgggtgtctaggaggggcaatttccatcctgtagtgaaatcagttggagcagcagcttcgatggcgtgtgcaactgggaaaaggatagtggcagtggagttcgcaagctttggaaaccccagtggttattgcggagactttgcaatgggaagctgcaatgctgctgccagcaagcaaatcgtggagcgagaatgcttagggcaagaagcttgcacgcttgcattggaccgtgcggtgttcaacaacaatggcgtggatgcttgcccagatttggtgaagcaacttgcagtccaagtgaggtgtgcttaggtcttgtttcgtggtttaacttggccaagtagaagagtccaggagctcaacatgtcattggatttttgtaccatcatacttcaattcaatgcctacatccttttaaatcaatatatcaaaattacagcgtttattttaaaaaaaaagaaaaaaaaaaaaggggcggcc

SEQ ID NO: 123713 - DNA, 447 bp, Glycine max
  Clone ID: PAT_MRT3847_82720C.1
cccactcgtgctttcacgagtacgcccacgcgttcggacaagtgaacgtcttaagattctcgagatgagaatgagcgcaaggcacattctatatcatgggaaaatgtcactctatctaggggatagcaaacatatgtacgggtgcatgccgtaacttagctattctacattgaagggaggatagactttgctgtacagcattttggaaactgtgttgtgattgtgcactgacgactctacctgtaatgggcttgcaaagagtttatggatagtatgctggatctgaggaatatatgtaacaacaacttggtctatgcaaactggcagttgcagaatggtttaagaggcccacagtgtagggaccttaatagagcgtaagttcacatgaattcgcgtataatatatgatggccttgcccactagctattgttatatctgtaaaggtta

SEQ ID NO: 123714 - DNA, 205 bp, Glycine max
  Clone ID: PAT_MRT3847_82721C.1
ctctttttttttggtaattctggtataaacatatacagattatagttacgacgatgcaacacaagaactgtgccgccaatgaaaaccgaaaggagctactcactctacacggagcgcatgaatgttgagaaacaaacttataccaaccatgatctatctatccacccaccgcgctatgccacacactcagcttgtaatccacttg

SEQ ID NO: 123715 - DNA, 411 bp, Glycine max
  Clone ID: PAT_MRT3847_82722C.1
cttcctttcccattcttcatcttcttctctctgaaccgtactcaaactcactttcccacttatttatacaatgtcggcttacaaagaccaggatccccgtcttcatggcatcaaaactaagattcgtgtcgtccccaatttccccaaatccggttcctttttctccctttcccttttaatcttctgttttctttaatgttttgtttttagactaagaaaccaacccgcgaggctttgaattcatgttttgtttgacttccgtttccaatttccagaaagtcttcttcggaggtttctttttctttttttttcattttcactttagcttggtagctaatgttttttattttattttttgcaacggcaggtcttatgttcctagacattactactctattgcttgatccaaag

SEQ ID NO: 123716 - DNA, 458 bp, Glycine max
  Clone ID: PAT_MRT3847_82723C.1
gtgaaaaaaagggtttgggaagagaagaggctcaagagagagaaaatggaggacgcagacgcatacgcagtagggatgaatccgtgggagcaacactcgggtgttatcaagctgcctcgctatgactacaactctccctcttctcttctcttctcttctcttctccgtaactcccattccgattttctcatcacttgtactatcagttcagtaaactcactgacttctcttcattctcattcttcttcttccaaccttccttttcattttttcaattcctctttccatagcgctacaaaagaagcaatctctatccttcataagtttgttgcttatgactcttcaaacaaccctaaagaagaaggcactagttctaagaaaaggaagttatgcacacaagatactgctgacgaatgtttcgaccacaaggatactgagtctgcttctgctaactctgc

SEQ ID NO: 123717 - DNA, 281 bp, Glycine max
  Clone ID: PAT_MRT3847_82724C.1
acggctgcggagacgacagaagggttaccccatatttttgttagaattaataaaaaaaccggataaaggtgtatgatgaactttattgaaaataaattttgaaaagattgaggacactggcatttctaatttagacatattggtaaattcacataattcctttggtagcatgaagggaactgggaaccgtttttttacaaaaattaactggggccagggcaggacctacttgacaccttaggggtggttaatattaaatactaagatatttttagatcaat

SEQ ID NO: 123718 - DNA, 1531 bp, Glycine max
  unsure (1)..(1531): unsure at all n locations
  Clone ID: PAT_MRT3847_82725C.1
gatcatgagtcctttagcaaaagtggcacagatcaaaaacgaggcctgactgaacgttttgaattgtttgttaataagcatgaactttgcaatgcatatactgaattgaatgaccctgtagtccagcgccaaagatttgcagaacaactcaaggatcgccaatcaggtgatgatgaagcaatggccttcgatgaaacattttgtacggctctagagtatggtttgccccctactggtggttggggtttgggaattgatcgtttgaccatgttactgacagactcacagaatattaaggaggttttttttttccctgccatgaaacctcaagactgagccttcagtcaaagctatgtttaaatctcagcagtaaaatcatacacttcaacaggaacatgagaaaggcaagatgattaacatgggatctcaattttgatttatgtacttgattaggagacttgccatcgactggtcatgcattatccacatttgttgatctatttcttaagggcggttgggagggacgttattctagattttttttgttgttgtgatcgcattgaatgtgatgtcatataccagcttttttttattacatactttgagatttgagacaacagaatggctagatttgttatcaactaacgtccatattgatgaagctcaaaattagtctctagttccccagataagaatgagtgagttagccggntctnnttnttttttaggaaattgatctatctatgggaaggtacgaacaagagcttactctccaggctccagttaatagattgttgttgcctggttgctatttgcctgggaaacgttctattgttcgaagccatgacagatcttcacacagaagcaagcgaggaagagtgtataagcaagggcaacatgaattttaatggctctgcgtccgctagtgatgttaaaccctaagttgttcgtcctcacacactcccaagcaatggaagttccttcggaagcgccgtctaccggcatcgccgccgaaaccataagcaaaaatgcgctgaagcgcgaactcaagaacaaacagaaagaagaagaaaggaaacgcaaggaggaggacaaggccaaaaaggcagctgaaatgcagaaggctaaggataacaaatctgcacctgctgatgaagatgatatggacccaactcaataccttgagaataggctaaagtatcttgcagttcaaaaggcagaggggaataacccctatcctcacaaattctttgtcactatgtctcttgatcaatacatcaaggaatatggaggtttaagcaacgggcagcacctcgaggatgtctctgtgtctatggctggccgaatcatgcacaagcgcacctctggttctaaactcgtcttttatgacctgcacagtggtggcttcaaggtccaggttatggctgatgcgagtaaatcagacttggatgaggctgaattttccaaattccattctaatgtgaagcgtggggacataagttggtatcaactgggtttccaggcaaaagta

SEQ ID NO: 123719 - DNA, 962 bp, Glycine max
  Clone ID: PAT_MRT3847_82726C.1
gagagtgactcagcaaaaccctaggtgttctcacactctcgttccgtctttctccaacaatggaagttccttcggaagcgccgtcgtctaccggcaccggtgaaaccataagcaaaaatgcgctgaagcgggaactcaagaacaaacagagagaagaagatcgcaagcgcaaggaggaggagaaggccaaaaaggcagctgaaaagcttgaaatgcagaaggataaggataacaaatctgcacctgctgatgaagatgatatggaccctactcaataccttgagaataggctaaagtatcttgcagttcaaaaggcagaagggaataacccttatcctcacaaatatacttttactccacctcagttacaacaaacacgcgttggcaattggactgagtcagttaaaccctagttgttgtcctcacactctcccaagcaatggaagttccttcggaagcgccgtctaccggcatcgccgccgaaaccataagcaaaaatgcgctgaagcgcgaactcaagaacaaacagaaagaagaagaaaggaaacgcaaggaggaggacaaggccaaaaaggcagctgaaatgcataaggctaaggataacaaatctgcacctgctgatgaagatgatatggacccaactgtgatagcaccacttttgtcatttcagtggaattcttgatgaattgctattaattatttatttatttttctgttgtaatttttggggtgatctcaatttcattgcagcaataccttgagaataggctaaagtatcttgcagttcataaggcagaggggaataacccctatcctcacaaattctttgtcactatgtctcttgatcaatacatcaaggaatatggaggtttaagctacgggcagcaccttgaggatgtctctgtgtctatggctggccgaatcatgcacaagcgcacctatggttctaaaactcgctttta

SEQ ID NO: 123720 - DNA, 1877 bp, Glycine max
  Clone ID: PAT_MRT3847_82727C.1
gggagaggcgtccgcactccgatttcgttcctcgtccaacacagcaaaaccctaatttccaactccgatttcgtttctcctccgaaaacaccctaatttccccttcgctcttccccatgaccaccgcgtagtttgcttcccccactccgaaaatgtcgctccagggaagcgaccgccgcgatgcaccatcttcgggcagcgccggcggaaacggcgccgtggcggcggcagcggcgagcctgaggctgcggctgaaccctaacaaggagcacaagcccgacgggtacgaggacatgcaattggatttcagccctaacattttcagctcgctggagaggtacctgcctccgagcatgctcaacgtgccgcgtgacgagaaggccaatttcatgcgcgagattctcctcaagtatctgcccctcggggaacgcaacagagctcaaaagcatagagaatatagagagaggataatagcaaattatcagcctctacatcgggagttgtactctgtggatcctgctacattctttgtccccacatttctgagagcaattaatgataatacggaacaaagtattagaagtatagtgtctgagccctctccaggcatttttatatttgacatatttcagacccacttttgtgagttattgctatctgagattgaaaattttgagaagtgggtgaatgaaactaaatttcggatcatgcgtccgaatacaatgaataaatttggtgctgtacttgatgactttggacttgaaacaatgcttgacaagcttatggaaggttttatccgtcctttatctagagtcttctttgcagaagttggcgggtcaaccctggattctcatcatggttttgttgcagaatatggtaaagatagagatgttgacttgggtttccatgtggatgactcacaagtaaccttaaatgtttgtttgggtaagcaattttctggaggggaattgttttttcggggcatacgatgtgagaaacatgtaaatactggaactcattcagaggagatctttgattattctcatgtccttggacgagctgtccttcatcgtggtcgtcatcgccatggagctagagctacaacatctggtaatcgggtcaacctacttctatggtgcagaagttctgtctttagagagatgaaaaggtatcaaaaagatttctccaactggtgtggcgagtgcaatcgtgagaaaaaggaaaggcagcgctccacagttgctgctaccaaattggatttgttcaggaggcaaggtgaatccactgcataatctgttttgctcagtggatgattgtaaaatgtacctgcaatcatttgtcaatacaaataagctatgattcctgatccaggtgtatgtacaaggtgctctattgagatagttttcttcaagtaagctttggatttttcgttaaaaactgtgctgtttgttcgatgcctatttattgtatttgaataaggggggagctggttgtgttatgtaagctggtttaatgctcagacatttatttttttggcataaaaccgcggaatcatgtcatgaaatgtaggtttagactgtaattaatgtatgctgaaatcttaggttcattgactattgtagcatattgtttcctttccaatatgtaagtactgcattttccgttcttttaaaaaaataatgtttgagggtgagctggttgtgttatgtaagctggtttaatgctcagacatttatttttttggcataaacccccggaatcatgtcatgaaatgtaggtttagactgtaattaatgtatgctggaatcttaggttcattgactattgtagcatatagtttcctttccaatatgtaagtgctgcattttccgttcttt

SEQ ID NO: 123721 - DNA, 322 bp, Glycine max
  Clone ID: PAT_MRT3847_82728C.1
gctttctattcctttcattgtttcttttctcttcgttctgaaatttcgtttctctctccaacgctacagggtcggaggctaaaacccaaatggaatccataaggaagggggtcgtcaaccacaacctccgaactgttggtaaaatttctcaatcccccacttaattcgttctttggggtttcctcattcatgggtattggattttgttaatttcgatctttttgcggtttttgcgatttttatttggatcagggtgtctgtggctcagtggtatttcgggttcaatcgcttacaattggtctcgacccaatatgaaaactag

SEQ ID NO: 123722 - DNA, 325 bp, Glycine max
  unsure (1)..(325): unsure at all n locations
  Clone ID: PAT_MRT3847_82729C.1
cgcggcgcggagccccagagcaggccgccgtccacaccccncaaataaaacggcacgcacaacccacggcaagcggggaagagtaagaaaaacaacccccgcaacaaccacccgaccagagggggcccacaaaacaggagccaaaaggggagcaagaggcgcaaaccacccaagacaacacaaacgacgcgcccccggaagagcggagagaaagccaggggaagacgaaaccccgagaacaaaggacaagaaagcacaccgccgcagaaccacaaacaccacaaagaaagtgggcaccagcgcagaaacaacgggccgacacacg

SEQ ID NO: 123723 - DNA, 303 bp, Glycine max
  Clone ID: PAT_MRT3847_8272C.1
agatgtccttttttcccttatgcttattaccaaaccaaatggcagccaaaaaaagccgtggaattcccaaaggcgaacacccgatggatggttagagattcctcttacagggggagccggggggcattgcatactaagacgaaaaaaaaaaccccggggggggggggcccgtggaaaaatttaatgcggccaaaaaacgcgggggggtagccacggctagaggtggccaccatgcctgggcaactgtttggacaacggagccccggccaagacctgggggggggggaacccaaccgggtgaag

SEQ ID NO: 123724 - DNA, 567 bp, Glycine max
  Clone ID: PAT_MRT3847_82730C.1
cccacgcgtccgcccacgcgtccgcaacaatgcaatacagcttcagtgggtttttgactctccagcaaatggttgattcgttcataatattaatagcgcagcagtctgacttcaatttcaatgctgaaaatctagagcttcctcttccaggcttctatgacaataatttctcattgaaaaatccttggactcagtttaaccctgcacgcatacgaatagctccatttcccactcgagagtacactgatgatcagttccagtcaatcataaagagagtcatgggaatattgtacttattggggtttctctatccaatttctcgcctaatcagttattctgtgtatgagaaggaacagaagattaaagaaggactctatatgatgggcctgaacgatggtatatttcacctttcttggtttatcacatatgctttgcagtttgcaatttcttctgggatccttacagcttgcacaatggataatttattcaagtatagtgataagacactggtgtttgcatactgtttcgattttgggcttaatgcaatcatgctctcattctttatat

SEQ ID NO: 123725 - DNA, 232 bp, Glycine max
  Clone ID: PAT_MRT3847_82731C.1
cttggactgagcattgatgaatatgctggtgaagcaaatgctgaaatgcctcctcttgaggacgctgatgcacatgcttatggtagcatgatggaagaagttgattacatctgacttaagtgcctgtttcctgtttagaattggtgaatggagaaacagtccttttacaatgttggaagtcttttgaaatttcgaaattttggaacgtatgtgacctaggtgccgtatgtac

SEQ ID NO: 123726 - DNA, 1674 bp, Glycine max
  Clone ID: PAT_MRT3847_82732C.1
accacctctctgttctgattcctcttctttctctctctgttctctgcccgccccatatcttctccttctttcccaagctgcccaatttcagttttcttcctttcctccaccattcgtcgcctcttctccagtttcttcaatttggctcatagttttgaacatggtatttgccttttgagtgcaaacttggaagattggtttgaaaaatatatataaaaatcaatgacttggaaaagcaggggagacctgcttcctaaaagtgtcatgtctcagaaatggatgatttttctctgtattggatgcttctgtgctgggatgtttttcaccaacaggatgtggactattcctgaacctaaaggacttgcacggacaacagctatggaggctgaaaaatgaatttgtaattggtcatagtgccacatcagggggtatcttagacagagctattgaagcagaagataggaagcatggagatttcctgagactggatcatgttgaaggataccttgaattgtcagcaaagacaaagacatactttgccactgctgttaacttatgggatgctgacttctatatcaaagttgatgacgatgttcatgtaaatatagcgacactgggacaaactctactgagacatcgatcaaaaccgcgggtgtacataggatgcatgaaatctgggcctgttctttctcaaaaaggggtaaggtaccatgaaccagatactggaaatttggagaggccggaaacaagtacttccgccacgccactggacagttgtatgccatttcaaaagatctggctacatatatttcaaataacaagcactacggctgcgagaagacgacagaaggggtctcactaggttcttggtttattggacttgatgtgaatcacatagatgatcgaagactctgctgtggtacaccaccagattgtgaatggaaagcacaagcaggcaacgtttgtgttgcttcatttgattggacgtgcagtggaatttgcaggtctgctgaaaggatcaaagaggttcacaagagatgtggggaaggtgagaaagccttgtggaatgcctctttctaagtggcatggcagctaggaggacttcttcctaactcaggaggaaataaccacagcaatgaaactaggctgcaagaattttctttttccttttctttttgcatagttttggtaaagtatagagaattttcattttacacgagaggagaaggaaagaggggaggggaggaaaaaaaaaaagaaacaaagagaaaaaaggactttccccatggctcttctgcattttaataaaggagattgaccatggtagctgccagaatagtaggaagcatgggatagtcccaccccaccaattctttgatgcttgaaggggcactctatgtgttaatagttccatatacctatcaagctcctaataaatgtagatatagacttttttttatacaatgtagacatagacttggttggttgttgcttcttttcctttcatttacatccgagctttccatttggctaagctgagattcctagtcatattatacatttggcacggtatagaatatgtaattgcataagagcaaattcactaagctaggtgactgccccctttttttttgtcttattagttatatatatctaataaactccaaccattag

SEQ ID NO: 123727 - DNA, 526 bp, Glycine max
  Clone ID: PAT_MRT3847_82733C.1
aaatcaattcgttaattgcttgaaaattaaatatatacataaactctgaatacagtcaaagtttctgtaaattcgacactcgatcttacaatttttaaagtactacttgaacgaattgatagacttgccaaagagtgaacatcacgttttcttccaactccattggcttttctccttctccgaccggttccaataacttatccacaaaagatatggaagatccttcaacatagcctttagaagttcctcaatctttttcgtactcctatggaggagatcctcctctttaggtgttgagatagtgtcggctttttcataaaccctggcagagctaaccattttttttgtttccctcttaagtgtcacctttatgcttcacctatgagtatttcccttgaccatgaaatcatatacatgacaccaattgagacaccaagacaatatacccgcagcccctaacatataggtctccagggcctaaatatatatttattttccaatctgtacgtggggttgagataaaaac

SEQ ID NO: 123728 - DNA, 360 bp, Glycine max
  Clone ID: PAT_MRT3847_82734C.1
ggggaagcttttttttttttttttttttttttttttttttttttttttttttttgggagctaccaaatttagtatataattattggaaagtttatagcgaaaatgaaactcaatataaacggagacccatagcctatacctagggtttcctcccactagggggattacggggagacattaaaaacgcagtagccatggcaataaaaagggggtttttttttttctaaaaaacacccttctgatactggggctaaaaaaaagttcctccaaaataataaaaagcctttcctttaaaaaccgttttaggatcatcggattaaaaatactctttttaaacgttctttgaaacaactggggggg

SEQ ID NO: 123729 - DNA, 772 bp, Glycine max
  Clone ID: PAT_MRT3847_82735C.1
cattatcatctgatgaagaaagtgaagaggataaggaactagatcaggggcataaagtcaaactaaagaatgtttcttgggccatgacaacattagctttgaagcgaactacaggtctaagcaaagaattagatcccgatgcaagttctattacaattgatgtgagtggcaagttcggctctttgtgcaaaggtgttgatgagaatgacacaaattgttggacttctcctagtggtgaaggatttatgattagaggaaagaactatctaaaagataattctaaggtaattggaggtgaccctcttctcaagctcatagcagttgattggttaaaagtcgacaaatctatagacagaattgcactacaccatagaagtttggttcagtctgaagcagggaaaaatctcccatttgtcttcgtactcaatctacaggttccagctaaaccaaactacagcttggtcctatattatgcatctgacagacctgtaaataaagattctttattggctaagtttttggatggaaatgacatgtttcgggactcaagattcaaattaattccaagcatagttgagggatattggatggtcaagcgagctgtaggaacaaaagcttgcctactagggaaagctgtcacttgtaaatactttaaacaagataatttttttgagatagatgtagatattggatcatcctctgtagcaaggagtgtcattggccttgttctaggatatgtcacaagcctagttgttgaccttgcaattttgat

SEQ ID NO: 123730 - DNA, 454 bp, Glycine max
  Clone ID: PAT_MRT3847_82736C.1
cctaaagtccatggctggctttcccaccaccaagaccaacaatgacattacctgcattgttagcaaccgtggaaaactgcaatgcatgcacgtgtggccaccacttggcaagaagaaggctgagactctttgctacctgacagaccttgatgatgcacaattggcaaatgaagtacaatacctacttaggaaaggatggattccttgctgggaattagagtcggagcacggatgcatgtaccgcgagcacaacatgtcaccaggatactactatggactctactgaaccatgtggaagctgactatgttaggatgcactgatgcttatcatgtgttgaatgagcttcaagaggctaacactgcataccccagcggctacatacgtatcataggattcgacagcgtacgccaactgctgtgtatcagctatatcatctacaagcgttcacgcttc

SEQ ID NO: 123731 - DNA, 216 bp, Glycine max
  Clone ID: PAT_MRT3847_82737C.1
aaagaaagctctctcagagtagagtttgagatcatgaatcagcaaatggatgagctaaaagaaaagttagagaaggtggaagctgataaagctgaactagagatagctttgatgaaaagtgaagggtgtatggaggagtcacagcttcagttgagggaggcacaagagaaattggaggagttgcaaagagaggtagaaaatgcctacaaatcaaag

SEQ ID NO: 123732 - DNA, 253 bp, Glycine max
  Clone ID: PAT_MRT3847_82738C.1
ccaaatgataaaggggcttgggcctggtacgtacgtgctgctcggaacggttgctattttaatgtccattgccactttaatccagttagtcttccactctccctatctttaatacaaaaaaaaacgctgggttggctgtgaccatgcaacgtaccttgtgattcgttaagcgcacggccccggcacactgtaataagtgcctgtaaaacaatgagcacactcaaagccccctcctaaaatctgcaatctgcct

SEQ ID NO: 123733 - DNA, 147 bp, Glycine max
  Clone ID: PAT_MRT3847_82739C.1
ggaaaaaacaagggaaacttgggaactatggatgaacaccaacgggaacaatatacaaacagaaggggaagaatcaaaaggggcatcacaatgggggttggaaggggaattcccgggatattataaggaaccatgggaaattaatta

SEQ ID NO: 123734 - DNA, 269 bp, Glycine max
  Clone ID: PAT_MRT3847_8273C.1
attcggctcgagctgatatataaaatgctggattgtttacgtgaaattcagtggaataagaataattaaacatttggataatattaaataatgtagtagactatgaaaagcatctagttccaccaaaaggcgagaacattgaactgattcggaacggaagtccaccaacccccacgtgaaataacttactcaccaactgctgtattgaaaatataagttatagatccgctggagtttggcccggtggaaacgtgctaggttcacaactc

SEQ ID NO: 123735 - DNA, 336 bp, Glycine max
  Clone ID: PAT_MRT3847_82740C.1
acgggggggcgcccttttttttttggtgctttttaaaatcgtccaattctaggactaaataccagtctctaactcatgcattctatggactcaatacattaaatacatccaaatgccagacaaggattgtgttatcacatgagacgaagaaaaaatctagacacagagagtactatgaagcaaacactcaaactttgacgggaaactggctgaaaattgcacacgaaggctgggaggatgctggtgggctcatcactagagatgcacaattgcacacatgggcactaccatggcaatacaagtccgtaagagacgttacctacatcacgcgcccac

SEQ ID NO: 123736 - DNA, 1575 bp, Glycine max
  Clone ID: PAT_MRT3847_82741C.1
cttcccgtgtctttgtttttcgcacattgaaatcgcataatttggattcaaaatacgcggttcagcgcaggaatgaacgaacaatttatgatgagaagaagagattagagaggtggatattcattaattcgtgtttgtgaatttgaatttgacactggattgaatggagtctcagagtcagagagatcgcagggcagatgctcttggagaccttcgagtccttcccgacgaaatcctctgctctattttggaacgtctcactccccgagatgctgctcgcgtctcttgcgttagcagtgtgatgtacatactgtgcaatgaagatccactgtggatgagtctatgcctaaaaggagcatctggtttccttcaatacaaaggctcttggaagaaaactgccctgcataatgagaatctgctagacaaatacaaagagtacagtcaaggacctttacattttgacgggttcaactctttatttttgtacaggagattataccgctgccataccacattggatgcattttatgcagatactggaaatgtgaaaagaataaaagacatcccgctgaaggacttttataatgagtatgatgcaaagaaaccggttatgctcactggattggctgatacatggcctgccaggcataaatggacaactgatcagctgttgctaaactatggagatgtagcatttaaaatttctcaaaggagttcccggaagatctccatgaagttaaaggattatgtctcttatatgaaagttcagcatgatgaagatcccttgtatatttttgatgaaaagtttggtgaagctgtacctagcttattgaaggattattgtgtgcctcatctttttcaagaagacttctttgatatcttagatacagaaaaacgaccatcctataggtggctcataattggaccagagagatctggtgcctcttggcatgttgatccagctcttaccagtgcatggaatactcttctttgtggccgtaaaagatgggcattatatcctccaggaaaagtgcctttgggtgtgacagtgcatgtcaatgaagaagatggtgatgtcaatgttgagactccatcatcacttcagtggtggctagacttttatcctcttcttgctgatgaagacaagccaattgagtgtacacaactacctggagaaacaatttatgttccaagtggatggtggcactgtgtgctaaatttggaaacaactattgctgtcacgcagaattttgtgaattccaacaactttgaatatgtatgtttggatatggcacctggttattgtcataaaggagtttgccgtgttgggttacttgctcttgatgaagttagttatgaaaatgtcagacagaatgtgtcatgtaatgaaacggactcaagttactctgctttgtcaaggaaagagaaaagagccaaaactcagaaagatgtagatgatctatattacaaaagagccatggatggtgtatctagaaactacaatttatggaaagatggattttcctatgatataagttcttatccatgtttttggatagagacagagaccataca

SEQ ID NO: 123737 - DNA, 772 bp, Glycine max
  Clone ID: PAT_MRT3847_82742C.1
gctaaccagagacgcccagtctcccgatgaatccaagacaaatgaaaaactttatacggtttgtgacgtggctctgtgtgttataaatagtaaaagtgctttgtgcaatgcagactcaccaaaggacccagtcctcccaatgaagttctttacacagcctgaaaaggacttctgtaatgacaaaagctatatttcagaagagacaagagttcttctgttaacaggaaagccaaagcctactggagtattaggtacagtgaacaagcctttatcagcaacgggaaggaagccttatgttagaagcgccggcacagagactggaagcaatattaacgccaattcagagctgagtccttcagccggaagtcgttcaagggaacagagttcagaggcatcagaaactggagttagtgaaaatgaggagaatcctgtgagaataatttctgtcacacctgtaaagaatattgatactgtaaagaataaggaaattaattctgatcagtctacccaaggcaacatcagcagtgacagaggaaagaaaagaattgtaaccagcagctggtgcagagaatatccaaaagccagacgagaaagtagatgagtcaggaccgcctgccccttccaaaccccggagaggacgtcgccccaaatctgaatctcagggcaatgcaaccaaaaacgatgatctaaataaacctgttagcaagggaaggaaaagagctgcaggcagccaggaagagtctggaggcagggaatgccaaagcgcccaagc

SEQ ID NO: 123738 - DNA, 387 bp, Glycine max
  Clone ID: PAT_MRT3847_82743C.1
cggaccaaaccgcgttatgttcttaggcccattctctggcgagccctcgtgctaccttactggcgagttcccaattgactacagatgggacactgctgggctttctgccgatgcataagccttagttagaaaccttgagcttgaagtgatccactctaaatgggccatgcttagggccttgggctctgtcttacactaactattgtacagcaacggggtcaagaatgtagaatctgtgtggtatacagccgggtcccgaatctataatcatggtgagctggactatttgggcgacttaagccttgtacacgccctgagcattctcgtcatctgggccacccaagatatcctcatgggtgctgcagacgattatctaatagctggtgg

SEQ ID NO: 123739 - DNA, 334 bp, Glycine max
  Clone ID: PAT_MRT3847_82744C.1
ggctcgagcgctaatgcacgcttttttcttttggcaccagagatcctggcacaacctgggtccggggtaagaataacacctttataactcactccagacatttgaactagggaggcggcatcctactgatgcaagaatgtaaaataattccctgattccaataatatatatccaacaacggatctgaaagcctacaaaaacaatcgcctaaggttgtacagttattaaacgggataaacgaacgagaaccaacctgtagccattaaatttaatgtttaactgccaagccgcaagaaggtctatttccaactcgagaagaacttatggacccatg

SEQ ID NO: 123740 - DNA, 490 bp, Glycine max
  unsure (1)..(490): unsure at all n locations
  Clone ID: PAT_MRT3847_82745C.1
cactcattgcacatggtgttgcgctggatctaaggtgacaacatcttacatactagcccacagatgcaaaaggacactcatcaaccagatatctgagactcttacagtcctcaagaagccgcgtccgcataggngctagttggcgcgggggggagaatttcattcttaacgccaaaaggatcatccattccagctaatggaaaaagctcaattttttcanagaaactcaattttcttacctttctccaggggctgtgcgaatcctttcggctgaatgctgggggggcggttggtaactgcagnnctaaatcaagcagtggggggtaaaccaccacntccactacnactggaaaatttacaacgacagcntctgaagggaattgacttacaggatagaaacacattcaaaaaattggnaaccaagaatccattggaaaatttccattaaaggaattcttggtgtgttaagccaaaacaagcttaatcatca

SEQ ID NO: 123741 - DNA, 175 bp, Glycine max
  unsure (1)..(175): unsure at all n locations
  Clone ID: PAT_MRT3847_82746C.1
gaaagnnngnnancgcangcacgcgtacgtnagctcgggaattcgngctcgagcgnnactccatcggtganctctngcagctngcanacaggggtgccntttctctcancctctccncanncacagnacnnnangaaaatcaagncttctcacancctnncacnannnnagaaaa

SEQ ID NO: 123742 - DNA, 519 bp, Glycine max
  Clone ID: PAT_MRT3847_82747C.1
gtacccccgcggggccccgccggaattccccgggcgagcctcacgcgcgcctattggcccccaatcgccggacacaaaaacccacccgaaaatgttccatttggccgccatcgttgcgctagcggcgctcgcactgcccctggcatcttcagacaagttcagaccatgcctcgagggctacgcacaatacggcaaatactgctacaaggcattcacaaacccggacaaaagcctgccatggtcagacgctaacaaaatgtgcaagactgaaggtgccgaactcgcgtcagtgcacagcgaaacggagcgcgaatttgtgaacatgctcgtccttagggaggcgaacaaaatggaattcaactgcaaacagccgggccgcgccttcttttggtttggcctgaagctgaaatggagcgaaaagaagctggaggatgcaagttggacggacggaaagccggtggactacttgagcccgaccgagtggggcgcgtacaaacggtcgttgacgatggacaacgc

SEQ ID NO: 123743 - DNA, 2458 bp, Glycine max
  Clone ID: PAT_MRT3847_82748C.1
ccggtccggattcccgggccgacgcgtccgaacgagtagagtgagtgggttttcgatctcaatacttgctctctcctctcttcccattagggtttcttcctcaacccgatcccccatggccgacgaatctcaatattcggctaaccccgacagcacccctacccctccctccctcaagcggaagtacaacgacgaccgccctactggattctccgacggccccgacccggcggcgccgccacccccctcctacaacagcgtccctcccccttcctccgccgcctccgacttcgagctcgccaaacagcgcgcccaagaagtcgccgctcgcctcctcagcggcgccgctcccctcgaccccaccaaacgccccaagcacgacaacaacggctcttccttcgactccatcgatgtgaagggtccatactcggtgccgtcgatttcgccgtccgcggtgtcatactcgtaccaggtcggtggtgcgagcaagaagattgatattcccaatgggagggttggtgttatcattggaaagggtggtgagaccatcaagtaccttcagctgcagtctggtgccaaaattcaagtcactcgtgatatggacgctgatccgaattcggctactaggactgttgagcttatgggttctcctgatgctattgccactgctgagaagcttatcaacgaagttcttgccgaggctgaaactggaggttctggcattattgctcgactcaaagatccctaataacaaggttggtcttgtaattggtagagctcgagaaacaattaagtacatgaaaggttcaactgggacaagaattgaggaatatgcaagcttcaactggagcaagaattcaggtgattcctcttcatcttccaccaggtgacacatctactgaaagaacattaaaaattgaagggacccctgaacaaattgagtctgcaaaacaaatggttaaccaagtctgtctggtggttattctcagcaaggttaccaagctcggccaccgactagctgggctcaccctgatgctcctacgcgactagctggggtccccctgctgcacctatgcaacaatctggttatggctatggtaaatcatgcagcaagcaacatccaccccagtataacatgcctcagcaaccatatgcaggctatcctccccagtcatccggtggatattcccccaccaactgggatcagtccactgccccacagcagcagtctgcccatgccgggtatgattactatagtcaacagcagcagcagcaaaatcctgcacctccatccgatgggactgcttacaattacagccaaccaccttcctctggttataaccaaccggggcagggctatgctcaggatggctatggtggatatcatgcgccacctcaatcagggtatggtcagccaccatcatatgatcagcagcaaggttatagctcagctgctagctatggtagcaacccagccccagagggccacactgccaattacggatcccaaggggattcaacccaagctccacctgcccagcctccaagtcaaggttatgggactggccaacaacctagcccaaatgctgccaactatgcaccacaagctcaaccaggttatggggtgcccccaacctcccagccggctacttatggcagtcaacctccagcacagtctggttatggatctggctatggaccccctcagacccaaaagcctagtggcacacctcctgtgtatggacaatcccaatcacctaacacagcagggggatatggtcaatctggtcatttgcaatctggatatcctccttcccagcctccaccttcgggaggatatgcccaaccagaatcaggttctcaaaaagctccaccatctggttatggtggtgcagtgcagccagggtatggtcccccgtcatatggtggtgccccagcaggtggtcaacctggttatggccaggctcctccatcgtacagcaacagttcttatggtgctgctggttacgctcagcctccagtatattccagcgatggtaatgtaggtgggactactcgtggagcctatgatggagcacctgcacagcctgttcaacaggctgctaaaacgtctcctcagttgatatagtataggttgtcaaatttggatctttctgaattgtctgttttaattttattgtagtagtgacgcatttacatagctttgcagtgttgagatggatgcattatatacactttattctgttgtcttaaattacgaattcctttgtatgcgtgttactattccgagaaaattaaagcatgagttggaataccaactaaagtcaaaaaaaagaaaaaggtgcctacaatttttgttttatctgcaacattctattttgtgcgaaggtgaacggttctatgcttgggcgagcggtcgttaggtattgattgatattaactttataaatttgttttt

SEQ ID NO: 123744 - DNA, 467 bp, Glycine max
  Clone ID: PAT_MRT3847_82749C.1
ggagaaacaataaagaatatgcaagcttcaactggagcaagaattcaggtgattcctcttcatcttccacctggtgacacatctaccgaaagaacattaaaaattgaagggacccctgaacaaattgagtctgccaaacaaatggttaatcaagtcatcagtggcgagaatcgtcagagaaatccatctatgtctggtggttattctcagcaaggttaccaagctaggccaccgactagctggggtccccctgctgctccaatgcaacaatctggttatggctatgtgcagccaggagcatactctggtccaccccagtataacgtgcctcagcaaccatatgcaggctatcctccccagtcatctggtggatattccgccgccaactgggatcagtccactgccccacagcagcagtctgcccatgccgggtatgattactatagtcaacagcagcagcagcaaaa

SEQ ID NO: 123745 - DNA, 948 bp, Glycine max
  Clone ID: PAT_MRT3847_8274C.1
tttcacttcgtctgctataaacgccaatgcctcacttgctgaacaacttatgggctgttcgttggactgcgatcctggtctttcttgtgaattggtgacaaaatatatttcacccatgtcaacctgtccaagccattacgtaggtgttatcttggacgaaccttcatctacaccatatacaggatacatcaatgatgttcccaggttcatctggaattttctggctgacagaacttctatcccaagggagaataatagttcagattgtcaacatggttgcaatggtagagatgaagtatgcatcaaagcagagactgatggcaagggagtttgtgttctctctacaacgaggtatgttccggcttattcaacacggctaaaatttgaatcaggagtgtggaatgttttgccccctaattcctctgacaaaatgggggttgtggaccctgtctggacagagagcaactggaatacgataggtatgcgggtctacatagtacaaaatgcggcttatgatcgtcttgttctgtttgggggcatcactctgacagtctttgcatatcttgcgatagcaaccgcaagagcctttttcaacaaagcaatgaagagggattgacatttaacttccagaatctaactggtaaattttgtgaaactagtaaattataatggggattagggtcatttgataggcaaattaaccgtttttgaagagtttccaaggatgtgcagtatttggggccgcattcttgtgttcattaattctatttcagaaatttctctatgacacgatcatttttgtcacttgtaggcaagtgtaaggaaatataatgaaaatagttcaaattagcttgtgctgtaaatgcctagttagtgactacatgatttttatttggttaatggttttaatttattagttgccaatgagtcatcatatggtttaactgg

SEQ ID NO: 123746 - DNA, 145 bp, Glycine max
  Clone ID: PAT_MRT3847_82750C.1
tatcggtgctccaatttacatagaatgtggggcagaaacacaacataatgtgaaggctgtgaatgaagcgaacatgaaggtaggggtgcagcccccaaagcagaagaaaaagagaagaaaggtacaaaaagcctgtagcattttg

SEQ ID NO: 123747 - DNA, 262 bp, Glycine max
  Clone ID: PAT_MRT3847_82751C.1
accggacaacatcgttctaacgctttgcttcttcgttaccctcttcacataccttctgtctactagttcccagtataaccatatttgcctaccaagtgaactccataacaatgactcagggaagtacacggcaagcaacccaaggcttagctacaagccgataatgcaaatcctgacccaccgccacgactatacctctagcgcgctcagcaggtccaccaggattggtgacgtcaccggctcctgcgttaaattcatacag

SEQ ID NO: 123748 - DNA, 2698 bp, Glycine max
  Clone ID: PAT_MRT3847_82752C.1
ggtatatcactatcaggtacatggtttagtctagagtgaatcatatccaagattttatgagaaagctcacttttcaattaaaagaattcctttaatggccaagtaaagcatactagtatttccacatatggcatattggacagatgtatctgtcaacactgttgagctgctactaagtttactatggagcaggtggaacatttgctctttattccttgctctgccgacatgcaaaacatcagaaccattcctaaccagcatcgaactgatgaagagctaacgacatatagtcggtctaccttccatgaaaagtcatttgctgcaaaaaccaaaagatggttagaggaaaaacaatctgcgaaaaaagccattcttattcttgtccttgttggcacctgcatggttattggagatgggattcttaccccggctatatctgttttatcagctgttggtggcatcaaggtaaatcaggctcggatgagtagtggtgtagtagtgctggttgctgtggtaatattagttgggttcttcagcatgcaacattatggcacagataaagttagttggctctttgctccaattgtccttctttggtttcttctaattggaggcataggaatatttaacatctggaaatatggaagcagtgttctaaaagctttttctccattgtatatatatcgctatctacaacgagaaggcaaagaaggatggacttcccttggtgggatcatgctcagcataactgggacagaagctctttttgctgacctagcacattttccagtctcttctgtacagattgcatttactctgctagtgtttccttgccttcttttagcctactctggacaggctgcttaccttatgcataacttggaccattcaaaagatgcgttttatcgttctattccagacaaaatatactggccagtatttgttgttgcaacattagcagctatagttgcaagccaggccacaatatccgcaaccttttcaattattaagcaagccaatgctcatggctgtttcccgagaataaaagttgtacatacatcaaagaagttccttggccagatatatattccagatatcaattggatccttatgattctatgcattgctgttactgctgggtttaaaaatcaaagtcagattggaaatgcatatggtactgcagttgtgctagtcatgctggttacaacattgcttatgattttgatcatgatacttgtgtggcgctgccattggattctcgtcgtagtgttcaccggcttatcattgattgtggaatgcacatacttctcttcagtactcttcaaagttgatcaaggtggatgggttccccttgcaattgctggagcatttcttattattatgtctgtttggcattacggcacagtgaaacgctacgagtttgaaatgcatagtaaggtctcaatggcatggattctcgggcttggaccgagtttaggacttgttcgtgtcccgggaatagggttagtatacacagagcttgcaagtggagtaccccacatcttttcacatttcatcacaaacctaccagccatccattctgttgttgtttttgtatgtgtgaagtatctccctgtctacactgtcccagaagacgaaagattccttgtaaagagaattggacccaagaacttccacatgtttcgttgcgtggcgcgatatggatacaaagatctgcacaagaaagatgaggattttgagaaaaagcttttccacaacctctttgtgtttgtcaagctagagtccatgatggaagggtgctcagattcagatgactacagcttatatgatgagcagactgagaggtcaacacaaggcctattgaacaataacacaaacacagctgcattgaatatggatccaacagtttcatcagtggattcaattgtatcagtctcatctccattgcacattaatgctactattcaatcctctggtcatgttagcagccacaccgaggtcgatgaagttgagttcttaaacaactgcagggatgctggggtggttcacattctaggaaacacagttgtcagggcaaggagggattcaagattccacaagaaaatagctgttgattatatatatgcatttctgaggaagatatgcagggaaaatagtgtgatcttcaatgttcctcatgagagtctattaaatgttggtcaggttttctatgtatagcctctactcctcttcggtaatttttgcgtgaacattgggtttataggcacattcaatcaaaagcatgttaaaatagttaataataataaaatatgtattgaaatctattgttaatattgttttaatattattcaaaagcttttgattgattgagtttataaacatcttgatcacactaattgttccacttgagcccaagataagtaagatttatcatttgtgacagtcattttgtgtacagttgagcttagcgtagcatatgaacaactccttatggtgtgcagtgtgtactatccaaagggaatgtcttcagaagaatgactttgggtaatttctgttgaatcctgaaattcattattcatttgatgttccaaatgcatcaaaatgttgttcaaaaggaaaaaaaaaaaaacccccccaaaaaaaaagggcggccgcccacaaattaacgagctggcccggccgttaattccggtccggg

SEQ ID NO: 123749 - DNA, 561 bp, Glycine max
  Clone ID: PAT_MRT3847_82753C.1
aggacgacagaaggggatagtaatcattctacttcttgtattcctccaataagcgaattctcagatttgtatgcatggagaaaacaacaacgcacattgtagtaattcccagtgcaggattcagccacttcgttcccattatccacttctcaaaacaactcgttgagcttcacccagaaattcacgtagcatgcatcattcccatactagggtctctcccaagtgccgcaaaacccattctccaaacccttccacaaaacataaacaccattttccttccaccggtgaaccctaatgagctaccacaaggtgttcccgtagttctccaaattctgctcgcaatggctcactccatgccctccatccaccacaccctcaagttcataacttcaaagactccccacgtggcaatggtggttgatacttttcgcctatgaagcactagattttgctcaagagttcaacatgttatcctacgtttacttgccttgcgggctacgacactctcacacacttgtattttcgcacgtggacgaggaacatcggtgagtatcgagactg

SEQ ID NO: 123750 - DNA, 343 bp, Glycine max
  Clone ID: PAT_MRT3847_82754C.1
agaaaaagcgtctcttaataacccatcagaaatgcatgcctttgattcctgaatacacaccctgccttcagtggcaacacaccaattccatcttggtgatgacgattgctatttgtttctggttggtggggggatcttaaaaactcgagcttggatgatgcaatgtgagttggatgaaggcagttataggtgtgctacatgtcaaagtgagtgaccctcttggatcttgtacacataaatggcattgttccgcagattcttctataagaagcccgcagatgggcctgtagaaatcactgacagaatatatggctttgattactgctttaccacgggtgttatg

SEQ ID NO: 123751 - DNA, 337 bp, Glycine max
  unsure (1)..(337): unsure at all n locations
  Clone ID: PAT_MRT3847_82755C.1
ccaaagncgcatgnagcatacgtaancncggaattnggntcgagnagntngntacccatgggnaanantgcnctanccaaggtnntnntggtccttnntnntnaanttgatganttgctnaatgttcttgnttggacgcgagtggaccgtacgcaattcncccgangnntgcttncnaaaaagcgtcctnattgtgaangccnngnagttcnncanngcaannngantncatgtnccntcngcnaagtgngnntccnaangccannccatgtannacccagncctnatgttcncnnaacntngtcactggcctannccagcagttcattncnanatc

SEQ ID NO: 123752 - DNA, 650 bp, Glycine max
  unsure (1)..(650): unsure at all n locations
  Clone ID: PAT_MRT3847_82756C.1
ccacgcgtccgaaggtgttttatttgcataatgaggaaagcgatggacggcgtattgaaaaagtaagacggggaggggagggggagttgccgaagcggacttttgaaaattagagagagagagagagagagagaggggatctgttgttggaaggaggtgaagtgatgggggtgtgggatggaatcatgcaagtaactaagttggcgcaggagaagaagacagaccctcttctatggtccatccaggtcagctccgccctcaactccggcggcgtctccctcccttccatcgagctggcccaccgcctggtctcccacatctgcttcgacaatcaccttcccatcacctggaagttcctcgagaaagccatgtccctccgcctcctccctcccttccttgccctctccctcctctcctcccgcgtcctccctcttcgccgcctccacccctccgcctacactctctacatggacctcctcagccgccacgccttctccctcctcatccacttccccaattacccctgcgtcatgtcctccatccatcatcttcttcacttctcccaactctattcctccctcgaccctcatcccggcgtcgntctcgttctctttctcttcactctcgtctctcagcttctcgaagcctcc

SEQ ID NO: 123753 - DNA, 192 bp, Glycine max
  Clone ID: PAT_MRT3847_82757C.1
aaaaaaaaaaaattttaaaaaaaatttaaaaaaaggaaaaaaaatctaaaggttcaaaggttacgaacgtttgaaggcaacgttttagcacttctaacagtgtcaaccataaaaacagttgcattgggggggccgtttacagggtcgcagcctgggtaacccctgactgcacggaagtttgtctgctttgct

SEQ ID NO: 123754 - DNA, 366 bp, Glycine max
  Clone ID: PAT_MRT3847_82758C.1
ccacgcgtccgaaggtaactaacttttgtttggagtttcagcatcagagtatgtacactcagaaagggccagctacatcggctgcggttgtgactctgggggccacggagatgatcgacccaacaatggtggcggaggcatgaacttgtgagtttcagagccaccgtatcaaggggccatgtttgagtgacaccaactgtggctttgtgtgccgaaccgaacgttttactggaggacacttgcgtggctttcgtctcagatgcttctgcaccaaacattgttaattttacaaaattaattaagagtgctttgatagatgatgattgttctttcatctttctactcgtgttgttaaattaaccaact

SEQ ID NO: 123755 - DNA, 267 bp, Glycine max
  Clone ID: PAT_MRT3847_82759C.1
ggctcgaggaacttgcctttttctgatgcagttggaaccttttcctttggtcttctttccttctctgtctctctgcttattgatattgctgttgtgactaaagaacaaggggttgcttcttcccttttgttttcaaaggaagagaattctcaatcttcaattcttcattgggttctctgagacggagacagatttcatgggtcttaacttgaaagaaccactaactgctgtgaacgatgagatgaacattgatagcttgaccaactc

SEQ ID NO: 123756 - DNA, 791 bp, Glycine max
  unsure (1)..(791): unsure at all n locations
  Clone ID: PAT_MRT3847_8275C.1
gaaatcacagaatcctaccaaattcagaatcagagaggaagaaagctgagaagacggaatagaagaagaagaaaataaaaccacacacacactctgcacaccattctcagtatcactagggttttatattattcatccatggcgctaaccgttttctctctcttctttttcttcctctccttcaccttccaccttccctcctgcttctcagggcaatcgagctccatggaatcagtgcctgatcttcagaacactatgtacgcttccatcgacggttatccttgcgtgcgcctgatgaatctctctggaaccatcggttgttcaaatcctggacgagataaggttgtggctccgattgtaagattcgaaaatgttgacagaatagctgagccttctgctgtattggtgtcactggatgagttcccaactctctttactagaatatcggatgactctagctttgctagtaaagttggtggtgtactggttgaaccaagcactgattttcagaagaagttaaagggattttctccagaccaaaaatttccacaagctcaattcgctctttatcataataccagctatgaatggaatccaattggttctggtattatgtggaaatcctacaattttcctgtatttttactcacagaaagtggctcanagactcttcaagagtttgtaacaaagaatgaggacacanagaaaatctatacttctaatgtggctgagtttgacctggtgatgcagacagtgaaatctggaacacatgattcanagtcttgtttaaa

SEQ ID NO: 123757 - DNA, 196 bp, Glycine max
  Clone ID: PAT_MRT3847_82760C.1
attttaacaaaacatactactagcaactttggaataatttaaacaatatatacaaaaaaaattaatattcccatcaaatcattatcctacaaatacaactaattattttcatataacatcacccatcgaacattaaattactatcattaccccacaatttatttatactcattaccttaatctcatcttactccct

SEQ ID NO: 123758 - DNA, 181 bp, Glycine max
  Clone ID: PAT_MRT3847_82761C.1
ctcgagccgaatcagctcgataacgctgttgcagggaacctatgtaacaccaaggctccatcgaaggactaacacataatgcttcacctattgctcgctagagagccttgacgtgacacattactagcttactactatgaccctaatggcatgcatcaccttaaatcccttgtgaatcatt

SEQ ID NO: 123759 - DNA, 357 bp, Glycine max
  Clone ID: PAT_MRT3847_82762C.1
ggaacatgttggaacctgttcgtgtgtaagactctccatgcaaccagctgcagtcataaaactctagacggtatggctgtttttactttggcaaagcacaagaggagtggggggggcctacttgtgatgatatacaagaaggatgattcttatgatggtgaatggcgggtgcatgctagtccaaaagctcgttgcaaataacatgatccttgtgaatcctgaatgtttgtattggccagcgtgtgggccatattcccttagcctggtatgtgccgcttgcgtataatttcctcttcatgtgtactttgaatcacaaccgtggtgctctcttgattatgcattgcttttatctcagcc

SEQ ID NO: 123760 - DNA, 297 bp, Glycine max
  Clone ID: PAT_MRT3847_82763C.1
tgtgattggcaaaattattatttacctgatacgctcaatcctagagaaaagcagttggtggaaatagtgaagcatcatgcctacaaaaatgtgtacgatttgaaattgattgaatagactaagttgagctatttaaatctatctgcatgtctaaaagcaaggcagtctgacactcaagatcaaggtctgcaacatgttaatatctcaactgcacaaggtcaatcagtaacatttccagattatagtcaaccatctatctctccttcatatactgatgaaagaattcattaccaccaa

SEQ ID NO: 123761 - DNA, 394 bp, Glycine max
  Clone ID: PAT_MRT3847_82764C.1
catcactgtatgacgatccatccgtcgattgtgctgccttctttgggggggggggggggaaagaatagattgtagtatctgtaatgcgacgcacaatgagaaaattggctaggaatggagcgaatgcataaaaacgcgttgaaacgattatttagcccggtgtttatagggaatcagaatttacaatgaattgcgatgccccttggaggataaggcaagtaaaagcaagggaatggatgagagattgaaaaaaccatggtacccaaggagtacttttagtaagcaacgataaagaagcgaaaatgggagtcaatatggaaatcgaagattaaaacgggtaaggtacggtaattagtgggcgtaaaaagtaaggggtgagtgaattaggaacgat

SEQ ID NO: 123762 - DNA, 335 bp, Glycine max
  unsure (1)..(335): unsure at all n locations
  Clone ID: PAT_MRT3847_82765C.1
aattcctgggncgacgagctcccatccggcggccgccctnnnnnnnnnnnnngggggggttgaactggaaaagcggccgggccttaccggatgtattagaatattctaccttgagaacaacaacactccatggccctgcctcggcaaaaaaagtcattttttttaaaaaaaatccctcaaatataaatatacatggtatcacaattggaacggctgaaaaacgggaataataaaccaagacctggagcccgagcgatgaatagaaactccaaaaaccattggtactaaattaatacacaaccaaatttagctggggcccagctcaccagggaagg

SEQ ID NO: 123763 - DNA, 675 bp, Glycine max
  Clone ID: PAT_MRT3847_82766C.1
ccacgcgtccgctttaggattttaagattcagaacactgttggctcttgtgatgtcaagttccccactcgacttgagggtcttgcctattcccacggtgcctttctcaagtgtaagtgtgaagtgcataatcatctgtttttcctggtgaatttcctggaaaaatggtcctcacaaattcctgcccttgtaatcagtcctacatatggtcctcttgacgtgggctattctataggatgttgtacatgacttgatgaattttttttctttaactaatattgcttattatttgaaaaatggttatcattgctcaattgttatttgttgttaggaaatcacatcttggtgtttggtatcatattacataattttctttgtttccttgaattgtatacctgattttagtggtgtcaaatattctatactgaaaaactaaattcaataacaggtgtaaactttggaaaaaatggatttaactagtacaaatggaaaaccattcttgatttccatgacagccaaacaaccacaaatcggtttttattaattttcattaagcagaggctgtgttaacccatgatatccattgccaactgcacttttgcagatacttgtatgttctaaaagtgttgggaagtttttatgattataaccggaagaactgagtggggaagtattt

SEQ ID NO: 123764 - DNA, 409 bp, Glycine max
  Clone ID: PAT_MRT3847_82767C.1
gggttcattgcgggatggcagtggaagcattgcatgaacagcacacaggagtgcacctgaagaatatggctctgaagaaccgcactttgggcatcactttcaccgagataagtcccactgatcacgtcaccgggtttcacaagcgcaagagcaagcgaatagaggaagcccagaagcaacatatctgaggctctgctccacagacgcacctctgaccgcaaatcgacgaaattggtaagataccatgttcttaatggaggcctgccatcatctgatcatattgatggggaccaagcagaaaccttcgagcaagtgtaatctattgctgaaacaaagatcatacacaatgatcatctgaaagtcactgttgtcacaagtgagataaaccctgatgacggtagttatccta

SEQ ID NO: 123765 - DNA, 491 bp, Glycine max
  Clone ID: PAT_MRT3847_82768C.1
ggctcttaacaactttcattatcaaacccaacacttaccttttatatgaagtaaaaaaggaaatcaacaacttctcacttaatttggtcattacataattgctagtttagatttgaatttttaacacatcaacttgctatagcatgaatttgatggttctttgtgtatggaaacggacaaaacgtacaaaaaacacaaaaaatgaagtctattattatgtgttcacaaatctgcagttcttcctaacttccccagtgaagaagctttctgagtttgtgatgtttcccattttcaccattgactctgagaattgttggaagaaagccagaggatctgctgcatagttcttcacaatctctctagtttcaattccaaacacacttgagtatatttcttggtctgagttgagaagtccctccccatttagtagtaattggtagaaagaattgccaaagagatttggtgtcatgtagtccattgctgttatgtta

SEQ ID NO: 123766 - DNA, 1112 bp, Glycine max
  Clone ID: PAT_MRT3847_82769C.1
cccgggtacgacccacgcgtccgcgccaacaccaaacgaacaccccctcgtcctatctgaacatgacgacagatcggggaaattgcacgataacaaataccgattccaccaaacacaacacagaaaatgcaaacaccaaactgcgaagccgagaggcgaatccagaggctaaccctacacctaaaccccacggcgttggtcgcggcgaagcagttggagatggcaacgtgcgctcgcgggaagctgagcgtggacacgccgtccttgtctagttacatgcgagggaaacacgtggacattcaggagaaggtgttcgattacttcaacgcgaacccgcgccttcaaactcccgttgagatctccaaggacgagcatcgcgacctctgcatgaagcagttaacgggactcgtcagagaagccgggattcgacccctccgttacgtagtcgacgatcccgctaagtacttcgccattttggaagccgttggaagcgttgacatgtcgctcgggatcaagatgggggtccagtatagtctttggggtggttctgttctcaatttggggaccaagaagcataaggataagtactttgatgggattgataacttggactaccctggttgttttgctatgaccgagcttcaccatggttcaaatgtgcagggcctccaaactgttgccacctttgatataatcacagatgaatttatcattaatacaccaaatgatggtgccatcaaatggtggattggtaatgctgcagtgcacggcaagtttgccactgttttcgctaggttgaaattacctacttatgacaaaaaaggactttctgatatgggtgtccatgctttcatagttccaataagggatatgaagacccatcaaccactttctggaattgagatacatgattgtggtcataaagtcggcctcaatggtgtggataatggagcattgagattccgctcggtaagaatttctcgagacaatcttctaaaccgttttggagatgtctcccgggatggaaagtacacgagtagccttcctacagtaaatagccgttttgcggtacttttaaggaacttgttggtggaagggaggccttgcgtttt

SEQ ID NO: 123767 - DNA, 116 bp, Glycine max
  unsure (1)..(116): unsure at all n locations
  Clone ID: PAT_MRT3847_8276C.1
gaaaaattggaatcttgcctaaatttggaagcgagagtttaatntanncatcagtccaacaaagtttacataccgtacagttaaattctatcttgganactttgacctagttgtag

SEQ ID NO: 123768 - DNA, 294 bp, Glycine max
  Clone ID: PAT_MRT3847_82770C.1
tcctcagagccgccgctttttttgtttttttgtgttttttatttttcaaggactaaattaattgatccatttttatttattttttgtgtaacccaacagatataaaatattttcccacaatgaaaattctataataccaatccctaccttctaacctttacttaatacaacatacacgacgaggggggtatacttaaatttaaaacctactaactttaaaaaacagatatatcttttaaggaccttataaacaccaaaaataaacctacataaaagctacaacctatttgtaaa

SEQ ID NO: 123769 - DNA, 287 bp, Glycine max
  unsure (1)..(287): unsure at all n locations
  Clone ID: PAT_MRT3847_82771C.1
caagaacacaacatnagttactttttctcttcagctctttcttcgcttttctacacttctgctttgggctgaatttgtagataatgctgtgcaaatgtgtggataaacattcttttggtgaatgcaactgtctcggcacaggtgtaaaaaaaaaaaacaaacaaaaaaaaaaataataaaaaaagatacacaaaaaaaaaaaaattactgaaaggacgcataaccatataacaaggtaccaaatcaaagaaacgataccataaacaaaaaagatggcggcaatttta

SEQ ID NO: 123770 - DNA, 730 bp, Glycine max
  Clone ID: PAT_MRT3847_82772C.1
cgaattcgagctcgttacccggggatcctctagagtcgacctgcagaaatttccattgccatatgatcatagcctcctttttcctgcccaaacccttcaaatgtatcatgagaaattactcctgggtttctgccttacaactgtgccacttgatgctcattaggagaaagcgctgtgtgtagtttaagaattttggaagtggagcatgtaatttgtgctaatgtattaactataatttccaagtgaaggacttaaccttagggagttttagatttacaattggatctataaaggagaaactaccggtgactaggatagcaggttaaaaattgaaggggaaataaataaaaactccagaaaaatctaacagccaaattgttgcgtataaattaagggtgagattactagaatcaagtagccataaggacattgggtcacttaactttggaatgtatgtgatgttaatttagatatccctttaacagttttcataaaataaaaaatatcgcacataaaaacttagatcatgaaagatatgttgtgattaccaagtgtaagcttttatcttggcatgcctaaaggttatgtaacaatatgacgaaatatttattgatgtttgggaggttggattcttgttaaatatttaaaatttcaaaaagaattatcaatagtcattgtttcattttcggatctacctgttattgatctccttttttcctttgagtaatct

SEQ ID NO: 123771 - DNA, 229 bp, Glycine max
  Clone ID: PAT_MRT3847_82773C.1
aaaacttggcgagaacaaagatgcaatggatggctgctttagacttgagagagtttctgacgatgaattcaataactatgagcttgtgttctgtccacagcaagctgaggatgacacatgtggcgatatctggattagtatcgatcatgacgatgggaccagccgattgggggtgtctcagaacataccgtcagtggctcacgttcacaaactcgactcagtatcactg

SEQ ID NO: 123772 - DNA, 665 bp, Glycine max
  Clone ID: PAT_MRT3847_82774C.1
gggggcacaaaatgtggaaggaagaatggtaatggatctcaggcttggaaccaggatactggtgccaaggataggcaaagctggagccagggaaatgcagataaggagcgtcctagctggaaccaaggaagtggaagtaatcagagctggagttcagctagtgctggagctaacgataattggaacaacaatgggtctacacagaccgcagaagctagctggaaaaaatctactacaactgaagagaccaccatccaggacagtgggtggaacaagggatttagttcaaacactacttctcggggatggggtcaatcaagtgctgcagacaagggtcaagcatctagttggaaagaatcagcaatagatgatgcagcaggttcttggggcaagaaaaatgacaggggtgacaaaggtggatggtaattgctttcttgaacgtgctagatgggccaaagaagggaattgagttcgggcattttgtaactaatggcaaacctttttttctctttgtaaatccgtataaatctgtgctgagacttaatttttaaaatattctaaacagatctgatggatgactaatcctttctgccgtatgcagtgagcgttacaatgttcttttctgtgattgtatggcttgcagtgctttcctattttgttaaaaa

SEQ ID NO: 123773 - DNA, 393 bp, Glycine max
  Clone ID: PAT_MRT3847_82775C.1
ggggggaaaaagggggctgggtttttaccaaatataaaaaaaggggtggttaaaggttaaaatttccgccccccctaaaaaaaaagtcttcgggtaggtaaatcttatttaactatccttttaatttacaaattcacttttggggacccttaatgttttcatttgggaaaaatcaggggcttgacccaagggttgggggttttgaccccaccgggaagttctaacattttttgagggaaggggccccctggaaaagcccccccacagttttttagggccccaaaaacaacccccttgggttcagggaatgccccccctaaatgcaaaaggggccaaccagctttgaatgccattgctttaaaaaggtccccaagggcttccttttccttatgg

SEQ ID NO: 123774 - DNA, 374 bp, Glycine max
  Clone ID: PAT_MRT3847_82776C.1
tgtcacagtaccgatggctataacagctggagctgctggtgtgggtgtaggctctgcagttaatagacttaatgatgtggttgctatgattgctgaggtcagaagcattgctaattcattgcagacaccatttcagatatccactgcacatgaagtggaaactcaaagacagtaggttatgttgcaagaaacagatgaaggaggtgtaggtagtgaattaaacatgcaaagaatattaagaactgatccaaatatttgtgttcctgtgtggatgctaaattaaaagaaatagtgacctatttggaattttgcttcgttaatgggtggagttgatcagtttagtgaagctatgtattgttcgttggtctttcgcc

SEQ ID NO: 123775 - DNA, 241 bp, Glycine max
  Clone ID: PAT_MRT3847_82777C.1
cgcaccctctaagatggcttcctttgtatccttcctactgctgcttcttgctgcccttatcctcatgcctcaagggcttgctacttgctacaaaccacttacgaagccaatcttgtacaagcctccaatgtacatgccaccagtgtacataccaccggtttataagccagaaccaccggtttaccagccggaaccaccggtttacaagccagcatataagaatccaccatacgaggaacca

SEQ ID NO: 123776 - DNA, 362 bp, Glycine max
  unsure (1)..(362): unsure at all n locations
  Clone ID: PAT_MRT3847_82778C.1
aacggccacagccatagtcgcctgaaaccgattgttgttgcacggaaaacacagagatccgggtcgacccgttgcagatccgatccaaataagaaaagatgaatattttcaggttagccggggacatgacccatttggccagcgtcctcgtccttcttctcaagatccacaccatcaaatcctgcgccggtcggtaccttcctttccaatctcaacattcatcgctcgctctgttttgtttcgttgaggatatgtcgtanattttcattgtaataatgctgacgtgtgtctgccagagctattattgcttagcgctgtggggttgggttgggtgattttgttatgtgttactgtgtttttgt

SEQ ID NO: 123777 - DNA, 643 bp, Glycine max
  Clone ID: PAT_MRT3847_82779C.1
cttctttctaaaacaattctctaaaactatcaactatcatctaatcaactaccaacagtggtatcagagctacgttcggtcatacattgggcgtagttatattacctacctaccattccaaaatcctcccaactacttcaaaaatttcctttgtactattaacccactccaataatatatttttttctaagctatggataacactactcaatcgttaactatttctgtccctatcttcaatggtgaaaattatgatttctggcgtgttaaaatggaaacatatttttcatctcaagatttatgggacatggtagaagaaggcttcaccgttcccacggatacttcagctcttaatgcaactcaagaaaaagagttgaagaaaaataaacaaaaaaattcaaaggcgttgttcaccttgcaacaagcggtgactgatccaattttcccaagaattatgggagctaagactgccaaagaagcgtggaacacattgcaagaggagtttcaaggaagtgttagggtacgtgccgttaaacttcaatctctaagaagagatttgaactattgaggatgaaggaatctgagacaggtaaagaatactattctaaagttaaggaaatgttaatcaatgagaactttgggg

SEQ ID NO: 123778 - DNA, 2408 bp, Glycine max
  Clone ID: PAT_MRT3847_8277C.1
ccacgcgtccgccaatttcagaatcaagagagaggaagaaaggtgagaagaagaagaagaagaagaaaagaaaacccactcacacacactctctgcccctgcacatgcacatgcaccattctcactaatcactagggtttattcatccatccatggagctaaccgttttctctctcttcttcttcttcttcaccttccaccttccctcctgcttctcaggacaatcgagctccatggaatcagtgcctgatcttcagaacactatgtacgcttccatcgacggttatccttgcgtgcgcctgatgaatctctctggcaccatcggttgttcaaatcctggacgagataaggttgtggctccaattttaaggttcgaaaatgttgacaaaatagctgagccttctgctatattggtttcactggatgagtttccaactctctttactagaatatcagatgactctagctttgctagtaaagtccttggtgtactggttgaaccaacgggtgatgtgcagaataagttaaagggattttctccggaccaaaagtttccacaagctcaattcgctctttatcataataccagctaccaatggaattcaattggttctggtattatgtggaaatcctacaagtttcctgtatttttactcacagaaagtggctcaaagactcttcaagagtttgtaacaaagaatgaggacaaaaagaaatcttatacttctaatgtggctgagtttgatctggtgatgcagacagtgaaatctggaacacatgattcagagtcttgtttaaaagaagaaacttgccttcctttaggtggatacagtgtctggtcatctcttcctccgatcaacatttcatccttacaacagtctaagcccattttattgacagtggcatctatggattctgcttcattttttcgggacaaaagccttggtgcagactcccctatttctggtttaattgcattactagcagctgttgatgcactttctcatttggatggtcttggtgaccttagtaaacagcttgtttttgcagttttcactggagaggcatggggttaccttggaagtaggagatttttggtagaacttgacatgcactcagatgctgttcatggccttaatcagacattaattgaaacggtcattgaaattggttctgttggaaagggtctcagtcaaggtgttaaaaacttttttgctcatacaaaaggggattcttctgccacaaatcagacagtggctgccttgaaacgtgcacaggagtcactgatatctgaaaacataaagatagcatctgcaagtgcctcaaatcctgggatacctccatcctctttaatgtcctttttggaaaagaatcctgcaatctctggtgttgtcctagaagattttgactctgtctttgtcaacaagttctaccatagtcatcttgatgatttatcaaatgtaaattcgtcagctgtagttgctgctgcttctctcattgcccgaaccctttacatgctcgctagtgaaactgaagatgtacaaaattcaactttggctgctataaatgttaatgtctcacttgttgaacaacttttgggttgcttgttagactgtgatcctggtctttcttgtgaattggtgaagaaatatatttcacccatgtcaacatgtccaagccattatgtaggtgttatcttggacgaaccttcatctgcaccatatgcaggatacatcaatgacgttcccaggttcatctggaattttctggccgacagaacttctatcccaagggagaataatatctcagattgtcaacatggttgcaatggtagagatgaagtttgtgtcaaagcagagacagatggcaagggagtttgtgttctctctacaacgaggtatgttccagcatattcaacacggctaaaatttgaatcaggagtgtggaatgttttgccccctaattcctctgacaaaatgggggttgtggaccctgtctggacagagagcaactggaatacaataggtatgcgggtctacacagtacaaaatgctgcttatgatcgtcttgttctgtttgggggcatcactctgaccgtctttgcataccttgcaatagcaaccgcaagagcttttttcaacaaagcaatgaagagggattgacattttacttccagaatctgactagtaaattttgtgaaactagtaaattctataggggattagggtcatttgataggcaaaataacagtttctgaagaatttccaaggatgtgcagtatttggggccgcattcttgtgctcattaattctatttcagaaatttctctataacacgatcatttttgtcacttgtaggtaagtgtaaggaaatataatgaaattagttaaaattagcttgtgctataa

SEQ ID NO: 123779 - DNA, 1085 bp, Glycine max
  Clone ID: PAT_MRT3847_82780C.1
agctcatggggctgctcctgcgcggatggagtgtccttctggtgggtcacggtttcgtgcacggggggttgctcgctgctcccgctgtgttgcctctgtcttctgtggccgcgctgtccccgcgggtcttgccgggccctgctggatcctacaactatggaggaaagtcgtttaaggcttcatccggctcttctggtgcaagcttaaatgaatgcaaaagtgttgctcttagggctctcaaagttaatgagtcgacatgtactcatatgaagtgtacttttggtgggatatggaatggtggagggggggatggacagaagaacctttttgttgcctctttcttctttgaccgggctgctgaggctggttttgctgatccaaacttgccagtcgcgatagttcgtcctgcagattttgaggatgcagctaagcaagcatgccaaacaaaacttgagaatgccaaatccacttttcctcgtgttgatgaggggaaccttccctatctttgcatggatcttatataccagtatacactactcgttgatgggtttggtatatatccatggcaagagattacattggtgaagaaagttaaatacgacgatgccctggttgaggcagcatggcccctaggcagcgccattgaagctgtgtcatctgcgtaaaattactgggactatcgcttagatttgtctgaaatctaggggcacatgagtttcatcaccgggattttgtggtgaaatactgtcattcatgatgatcagagattaactttcaggctgaactgagattggatatgggtctgtgattcagaaataatgggagattatagcttcattatttttcatatgtaattaattcacaaacatctaatttgcgattttggaagattcattcgattcattaagggcatctatatatgttctatatatgttgtcttcagagacgaacaaaatggtgatactaacaccatttcatttttgtttctattaatggtttcgttcgtgatcatagttaatctttattacttctcatcttgttgatggcccagacctagcctgtcgcttgcaggagtgtgggttagt

SEQ ID NO: 123780 - DNA, 190 bp, Glycine max
  Clone ID: PAT_MRT3847_82781C.1
gtgaacgttttagtcaaaaggagagaacgcccctcattggttcaagacttaataacatacagaaccaccacagagcttttagatgcatgccatgtggccaaaataggaaccacatacacgggaataggcctactcaatagaggtgtgaggccacaattatgaatttgaaacgcggagttctgccggggca

SEQ ID NO: 123781 - DNA, 613 bp, Glycine max
  Clone ID: PAT_MRT3847_82782C.1
ggggaaccttccatatctttgcagggatcttatataccagtataccctgctcgttgatgggtttggtaggtttaatttcaatgttggaatagctataatgatgtttctacaaagtctgagttatggtgttatcttcctgcactcattgcttcaatttgttggcaggcatatatccatggcaagagattacattggtgaagaaagttaaatacgatgatgccctggttgaggcagcatggcccctaggcagcgccattgaagccgtgtcatctgcgtaaaattactgggatcatcgcttagattatttttcagaaacctaggggcacatgaatttcatcaccaggattttgtggtgaaatactgtcattcatgatgatcagagattaactttcaggctgaattgagattggatatgggtctgtgattcagaaataatgggcgattatagcttttcattattttttgtatgtaattaattcacaacatatctaatttgcgattttggaagattcattcgattcgttatgggcatcttttatgttgtcttcagagacgaacaaaatggtgatacaccatttcatttttgtttctataaatggtttcattagtgatc

SEQ ID NO: 123782 - DNA, 756 bp, Glycine max
  Clone ID: PAT_MRT3847_82783C.1
cttcgggaatatcaacgaaacatcatcgttggtcactttctaccaaaccacaacgctcaaattgttttcttttgctatcactgttaccgaatccctcactttcttcttcatcttcttctcctttgtcacttctcagcaccactcaatctcttcaatttctttcttctactggcaataagcatcagcacactgccacatccagttcccttctgtgtgttcctttcttctactctctccagtccagccaaaacgaagctccttccatcattttcagttttttctgtcaagtgttgtttcttcttctcccaaactcgtccaaacattgctggtaacaagtcccccatgaacttgttgagcagaattgttgggttgggtagcccaagggcagcagaaaacatgaattcaaccactgctcggggaccagatgatgacataccagcaccaggtcaacagtttgcccagtttggtgctggctgcttttggagtgttgagctggccttccagagggcatcagggggtgatcaagacagaagttggttatagccaggggcagttgcataatccaagctatgaggatgtgtgtacggggacaacacaccactcggaggttgtcagggtccaatatgatccccatgtatgtagctatgagaagttgcttgatggtgtctgggctagacatgatcctaccacactgaaatcgcagggaaatgatgtgggacacaatacaaggctgaatatactattacacacctgaac

SEQ ID NO: 123783 - DNA, 1688 bp, Glycine max
  unsure (1)..(1688): unsure at all n locations
  Clone ID: PAT_MRT3847_82784C.1
ggctcgagctctctctcacttgggtacgtatgttgtgttcttcattttccaattgcatgttatctctcatttctcaattcaatttctcccctttccctcttccccttaatctgtgaggaaaagggaattatgggttctctttatttcagttcaatttttccttttagtgttaaaaatattacctttattattattattattattgcgtggagattgattcatgtaatttgttgaagggttgaagatgagaatttgtggagcagctagttccaattggatctaccagtacaaaaaaaggagtaatttgcccttttttcaagaaaaaaaaaagtgagaatggggtgtgaaaattacatgggccatgatttgcaaagatgaatattctaataaatttttgggctcaattcagacaattgtgccaatcccgtccattaaaaaagcaaagaaatacaaatcgaatattaatttgctttctcctttcggtttaaaccttggaggcgaagacattcttaattgacgttcctacccttggcttggtggggtttcggaagaggaacgtgtggggctttatgtcatttgacgcaaacgcgcgagcaataactaacgaatagaagaggatgtagctttatattggagaatatcaacgaaacatcatcttgggtcactttgtaccaaaccacaaagcgcaaattgttttcttttgctgtcactgttgccgaatccctcactttctcactcctcagcaccattcaatctctttcctctactggcaataagcatcagcactctgccacatccagttcccttctgcgtgttcctttcttctactctctccagtccggccaaagcgaagctccttccatcattttcagttttttctgtcaagtgctgtggcttctgctcccaaacttatccaaatattgcgtaatatcgcccatgaacagcgcccggaaatcgtatggttgggtagcccagtgtctgcacaaatactgatatcaataagtgctatgttataaagtatatgacttcgatcatagggattaattttcagtcgcatagcctcataataattctgtanagcttccttataatttccttcatattgagctgacatagggattaattttcagtcgcatagcctcataataattctgtaaagcttccttataatttccttcagattgagctgacatccgttacggtcttatttggttcaaagaatctcagctccagaaccgtacttgagatgaaaatctcgcacggctcctcccttatgtgtaatgataaaaatatatagaataaaaaaagattgcagtattcttattatcaactgaacaggttcacaacacaagtggattcatgtgcaccaaccctgtgttttttgaaattgtgatcaatgcttgcattaatacaaactaaacagtattaaaattgggaaaaagcacacctcaaactaatattctgacggtatattttatccttttatgatattatgtggagtccctttatgttaaaaatgcaataaaaatgttaacagaccttgcttctaacacgaatgaatgcctcttctgcatctccactgaacagatgtgggcttgtggtgtacctatacagggaaaaaattaaattagatttgataacagttagacttgtaacctatctagccagtcaaaaactgcaggcatgca

SEQ ID NO: 123784 - DNA, 449 bp, Glycine max
  Clone ID: PAT_MRT3847_82785C.1
ggctcgaggctcaaccacgatgacgcaacaagattcaaccatgtcactaatctcacttacaactacggttactcttgtcatgcctcacactgtacaatcgtactgcggaatcaaccaccatcatcaatgtgtggcccgaactcaggaaccttacatggtccccaccataccaaaccaccctgctctgctacacattcaccatgaccatcaccaacaaccaccacagcaagcatctctccatcgccatacggctctaccagaaccacatcaaagttagagcaccaccacgcacttgtcccacatgcagtcaacatctccaacatacacctaccaccactgcagactctcaaggtcacagtggtggacactgctgaagaactcgtacacgccgaggacgacacctacactctgtgcatactgcctgtctcataggctagcctcactgaaaa

SEQ ID NO: 123785 - DNA, 767 bp, Glycine max
  Clone ID: PAT_MRT3847_82786C.1
ttttttaatctcacaaaagcaaaaggtaagctgtattagtacaaatccagacaacacaaacctaaactacttcttaagtttatgtaaaaacaaaaaaaaaaactacttaagtaaagagccctgcaccaagtaccacgcgcgcatcatgaatattagaaccctgaaattttttcttcttaacattgtaaacattcatttgacattctccttttttttcttttttctttactcatttcatatcatttattacatttatccattctatttttaatctctctaaatatagatgagattggaatgttcacacatttccctgaattttattttctgtacgtgcaaagatctccaaatcccatgtactctttattttcaatcttttgaatcatgtgtgcaatacctactccacccagtaaaactgcactaacactaagtgtgagtgtaagtatgaaaatgatcacagatgctctccccagtatggcaatagcctttctcaccaaatgctgtccaacaagtgcagcagcagtggctatagctacgaagtaaagagcataaggaacagggaaacgtttgagaaggtaatattccaccactgccatagatgcagagaatgccatcaccaaagtggatgtagcacttgcaacctgaggaggaattccaagtccaaggaaaaggggtcccaagatgaatcctccaccaaggcctagcaaaccagcaatcatgccagcaagtgtgccacaagcgcagaatagaactaactgcaacacaca

SEQ ID NO: 123786 - DNA, 1568 bp, Glycine max
  Clone ID: PAT_MRT3847_82787C.1
gttttattgtacaggtggtgatagtgacggtcgcctttcacctttttcttctgctgggactaacaccaagtacaatggcaatgttacagtgcttcctgctccaacttctcaatctcctcaagagggaggtgtcttgtccaccgcaggtccaacaccacttgtgactcaagctgctgggctgatgcaaagctcaatagctgttactcaacagcctgtccctgtcttccgacctagtggggtgcatatatcccattaccctcctaactacattccttatagtccctatttttcaccattttatgtctcacctccagcaatccatcaatttatgggtaatggtgcatttcctcaacaaccacaggccagcactgtatatcccccacccccagctgttgctcccaccggaatgaaatatcctcttccacaattcaaacctggtgcaaatgcagcaaacccaactcaccttgtaatgccaagtgcctatggtgtatatggctcctctgcagctggttacaatcataattctgcagcagctgcagggaattcaacctccaatgaggatcttggttcctctcagttcaaggaaagcaatgtgtacatcggtggacagcagagcgaaggttcagcagtgtgggtggctgcacctggccgagacattaccagtttgcccactagcacattctacaacctccctcctcagggtcagcatgtgacttttgccccaactcaggctggccatggcaactttgcgggcatgtatcaccctgcacaagcagtgacggcagcaacagttcatccactgcttcaacaatcccagacattggctggagcagttgatatggtaggacctggaggcaatgtttatcagcagcctcagcactcacaaatcaattggccgagcaactactgaggccaggagtcttcctgacagctaaaattagataattgagtcctatctggggaaattttttgagaaatgccaaaatatggttggatttctgaagacaaacaacatggcaattggctacatttgagtgtaagaagatggacaatttgccaatatgatcttctgattgcttggtttgaggacatatgaagggtaggatacctgtaaccgatatgaccattaaagttagacgaggtagaaacatatgcaggccttctcttttttactcctgctattttgtgttaccattaataccttttcatagctccaagcttttccttccctatcttttgttgaggtccttgaactctattaagagtattgttgagtgatgagaaatgtccattctttcttttttagtttgggtttatagggtttggaaggtttaggttggttggtggggaaagcttttctggtgccccttgtcttacctgtaaagtgaattttgatagcaagaaaaatcatttacttaagctgttgtattgctatgggcaaagtaaactgtcgattgttttcagctaacttatattgtttgtcatggtttacagaaaaaaaagttgggttaagacttaggaacacttgtgcaatttattctaatagtagttctgtggaattttctctc

SEQ ID NO: 123787 - DNA, 152 bp, Glycine max
  Clone ID: PAT_MRT3847_82788C.1
ggcaatcccattctcagcgtccatttccaccatcactactattttcgtgtggttgagaagcttcgcgaacgagaacatggaaccctaaaacgtcaaataacgattccatgaccatgtctggtgattgccctctttctcaggattgggaacct

SEQ ID NO: 123788 - DNA, 156 bp, Glycine max
  Clone ID: PAT_MRT3847_82789C.1
ataagggaggaactaacttccaagttgcggtagcggctgccaatgtcgcgactgataaaagttaacacagccacctccttgacccatggcggttgccgacggtgcacttgataagggaataccatccaaggataatgtagcatgggcacccaaaga

SEQ ID NO: 123789 - DNA, 273 bp, Glycine max
  Clone ID: PAT_MRT3847_8278C.1
cctccctggccgaaacggagccggatcaagccggggaatccctaaaccggttggcaaaattccgtttccaagacgggaaccccaattaaccagggggcctttaacttttgccaggccctctcccgaaaagaaaaaaagggccatattacccctgggaataaggagtaaccattttttaacaaagccttgaccaacccttgccttaattcaaagtcggttaattaaacggcaaacaaaccattctttgaagcaaccaaaacggcttcaaaattc

SEQ ID NO: 123790 - DNA, 255 bp, Glycine max
  Clone ID: PAT_MRT3847_82790C.1
aaatcaactaaaatttgtcattggaattggaataatcacaaacatcactcgttgtttgggcgagaccggcaaatatgaccacacttcacaatcagttcttacaaatattggcctaccaaaccaaataggtgggtacatccgaactacatatatatggtgtaattggacacaagcagtgcgtgaatttttcctccacactttaattgtgaaaactatacggatggcatccagccagctatccattgatcattatga

SEQ ID NO: 123791 - DNA, 491 bp, Glycine max
  Clone ID: PAT_MRT3847_82791C.1
ttccgttccaggaaggtttcccgtcatcactgtatgacgtcctccttctttgggggggggggggggggggaaggtggagaatgcagaaggaaactccccatctagtaagataagataagataagagcgaatgagcaatgagtaagagagcagtcggagggagcgtgcgcagatatataaggtacgttagcagaggtggatcgcagggatactaatggtgaatggagggaagatagtagattaatttaatgacgagtaaggggtaggagataagcatatggagtgggaaatgtgcacgtagcgataccacgcgacgtattaccgattagaggtggacgtaagggaggttataatcgcagaacatgtataacgcgtaatattatatagcggtggttttaaggttaggggcaacgacgttaggtgtattttaatgggtgttttacgaaggggggagcacttaagagcccatcttaggggtaatgttagatttta

SEQ ID NO: 123792 - DNA, 725 bp, Glycine max
  unsure (1)..(725): unsure at all n locations
  Clone ID: PAT_MRT3847_82792C.1
caagtgaaaatnnctttcatttagttttctgttttccattttactatcttttttggtctttcatttcatacaagtgaaagcggcacaattaatggcccacagcacaagtaacataaggcgcagcttgcttagaactatacaaaccacaaaaaaaacgaaccatgtatatgtgtgctgtccatagtaaacttaattccctatttgtacacttttgcaccaatgtgagttgcaaatttactcacttgttagttgaagcagaatcagctgcaggtgcagattctgaaacattatcgatatcctgtgtctcagaagactcatcacactcaaactgtaaggtgaaaaaaattaccggtcagaaagtgtaacatagagaagtattgtgcacattgcacataaaattgaataattcctttatgctgttgtgaaatgacccagactccaaaagtactcagctcctatatatgctggtgtttgagcaattacgaaattctagggagtattgctatcattttaacttctcgttatcatttgcaaatatatcggagaacataacaaatattctcccttgcatcaggttcttccaagcagtgacatgtatgaaaacacaatagatcacacgaaaagttaaaatacacacgcagtgtatgaaaacaccaaaggccacacaaaaaaatggacagtattatgcattagagaagacaaaaggcatctttaaaaagagaaag

SEQ ID NO: 123793 - DNA, 248 bp, Glycine max
  Clone ID: PAT_MRT3847_82793C.1
atcagtgccaattttgtttcacccttgtgggagctacttttttgtctcagaagccggagccgtgtgtgtgggtagctcagctgctatgattatggtgattcacggtacgcttgctgctagctctccagctagtggtattgacgaccatctgccatatgcggatcatgtctattgcgggtctgctcctacttcgatgcagtgaaactgcatgcaccagagccttcctgagtcgagctatgcagcgtggc

SEQ ID NO: 123794 - DNA, 150 bp, Glycine max
  Clone ID: PAT_MRT3847_82794C.1
gaaaacagggggtatctaccacttctaaataaactaaatttttggcctagccttactacccaccatctatctataatattcaaactcactctcttcttttatgtggccaagacaacatagaccgcgattctatgtaaacattaaaacttg

SEQ ID NO: 123795 - DNA, 326 bp, Glycine max
  Clone ID: PAT_MRT3847_82795C.1
acgcacacgcgggcgagaacgccaacgggggggccgttcttttgatagatcttaatctaattggatggatgggattgtatgaactggatatattttattaaggcgtaccatacatgaaagaactttgttcttctttaccacaaggtgtttgcaaattttcagtttatgtctgcaaaatcttgtcccatttttgaaaggagactctgctcgctaactctgattatcatgaaatgaagccgtgatccatgattttaaaccactgtcgtaggaatttgcccatacccagcgagtagcgagatgttctttgtatgatctttaaccgtaat

SEQ ID NO: 123796 - DNA, 255 bp, Glycine max
  Clone ID: PAT_MRT3847_82796C.1
aaagatccatggatgatagaagctctgaggttaaaacttgttcttcagttaagcaaagaaggtcaagatttccctcaacatttatagataaggactccatgccaaaaatgtctcttctagctgaagataaaatatgagctcagggaaaggtagatcaccatcacctccagtcaggaggagatcaatatccactgatagagggtctgtcattaaaagcaaggtcaaaagtgacacatcagacaacccattcttaag

SEQ ID NO: 123797 - DNA, 525 bp, Glycine max
  Clone ID: PAT_MRT3847_82797C.1
tctgttctgagaatatctgaaatgctacatttattatctacagagtcctgaatctgtgtatgggttcaatgttgatgtaacatgttagactgattctgccacacttctgattttatgacattaaaaggagtctacacaattttttttatcacaccagaattttttcatgtattgttggttgataggcttgcagtcatgttattaaatattgataatcatctttcgaataatggggttttagtatgttaaggcagcattcaatgtatttgctgagaaaattctgcattggctttctgacatcttaattttttttctgtccgatatttctcccttaccaagaattttggatttgttaacacattgatgatagggattcattttgcttaacgtgcaactaacctccagagtccagacctccccttcccctgaaaaaagggtttcttctactgcaagtagcattttatacttacatattaactgctgtaaaatactaaaattattcgacattcttgttattgttgaatt

SEQ ID NO: 123798 - DNA, 177 bp, Glycine max
  Clone ID: PAT_MRT3847_82798C.1
ggtactgatttggggacaaccaattcatgtgttgccgtgagggtatgcctgtacgccttagttattgatcagtctaatggtgcacgaagatcaccatcggtgggtgctttcaacctgagaggggagctgctgtaggtaccccagcttagcgtcaagctgtaactaacgcacctgaca

SEQ ID NO: 123799 - DNA, 309 bp, Glycine max
  Clone ID: PAT_MRT3847_82799C.1
gctcgagtacggcgggccgggatatgctcctttttagattacgaaaatgaggaatagaaagggttttgaagaagaagcaggtcaattgatcaactcagatttcagggacctaagtctagctgctaatagactcgcccatcatagccatcaaacttggcagagattggctttggagcctcttttttcggattgattactgccattgctgatatttatctgctgactttgaatcgcacaaactcgcacacctcatattctcacagtcctactcattccctacattttcttcatacttgcctccatcccccc

SEQ ID NO: 123800 - DNA, 342 bp, Glycine max
  Clone ID: PAT_MRT3847_8279C.1
atgtttagtatatttaataacatcaactgaaactttataccgattccaatattttattcagcgcgttcatgcaacacgtcctagtaattccaattcactcacttttctcgtgacaggtattagtgttctcatattatgcttgttttaaccacattttgtgaatgtgtttttttccttcctttatattgcatcaaggtcccatttacgccttactgcttatatgtttcagttcttctgttattcatgatactgaactctcaccagatgtccccaaactttctggtaaggtcttgtagtatgtaaagcagacatgcaagtttttttatgaaaattatgacattt

SEQ ID NO: 123801 - DNA, 238 bp, Glycine max
  Clone ID: PAT_MRT3847_827C.1
caaggccagggatcccccattggtcctcccctttcctaaaagaagagaaagtggcctttggcttcttcctttttcaaggctaacttttttctggcctttaatcccgacctttgggaagcaccggtttttttccttaaaaacctgggttcagatacctttttattaggcttaccggaaaagttccgttaataattccaaggattttttttgggccgggaagaattaattaccttttttt

SEQ ID NO: 123802 - DNA, 403 bp, Glycine max
  Clone ID: PAT_MRT3847_82800C.1
taactgcaggcgagaaccgaactaactctggtcccggtttatgttcacatttccagtggggatgttgtagaggaaaagtgcgttttgccgtgaccgtgtggactgaaattgaggatcaaaataactgcggttgggatatctgtggtggcaaatcccaattttgagcccaagataacggtggcgacggataacaaacccgcgatggtgtcctaattcatggggaatgggcaggggctgaataccgtatacagcgaaaatcctacaacggttatttattccaacccgaggctgaagggggatcggaggaataaatctgcgatagaactcatacatgcgttaccgcatgcagaagaagcttgttcttacatgtgacagttggaaaccaaatgccgatgattatacc

SEQ ID NO: 123803 - DNA, 236 bp, Glycine max
  Clone ID: PAT_MRT3847_82801C.1
ccacccgtccgggaattttataagaagactttaagggaatctttagaaccactggcacttcctaacttaactaccgagggggaggtggagtccaaaagtttcctgtccgtcccgggaatggaacctcttaccattgaaaaagtagggacccctaaaccaaaaaacatcccctggtttgttaagcgggtttccatttaaaataatttggatgggaagctgtttccacgttcacctga

SEQ ID NO: 123804 - DNA, 741 bp, Glycine max
  Clone ID: PAT_MRT3847_82802C.1
ttccatatgagctacaaaagaggcgggacaaactatttatattatcctaaaaaaatctgcacttcaatgaaaatctgcttaagccaaaaaatttccaggcttaagtgaattctggagctaacacgttctgccctatgtccgcataagccagaacttccaggcttaagcggattcctcttctgcagcttcttcaaaaaggcactttagcttaggctcaaaattcctggctcaagcacactttggtacaatttccacttcaagctttctcaatccttgctccaagttgcctttcaatccaattcaaattcctacaaaataatccatcaataagcacatgtaacctatcaaaatgataaactaaagagaaaaactacatatttacaaatttataattaaaaaggcacaaacaaagttctaaataagagaaaagatgagataattgcctaaactcacatctctcaactaagtatttttggcaattattaagtgtgttgctgcgttcatttgaattgcagttgcagtgttttttcttccgtctttcttcaaaaacacatattttcccttgcacatctcaaaaaatttcaatcgttcattttccagaatatatggtgcagtacaccatcattcatgcagaagaaggtgatctgcagcagagagaatgaggggaagaagttgggggagagagaagaggaaggaaaagaaggggtaaatcaggaacaattagaaaaaaaaaagaaaaaa

SEQ ID NO: 123805 - DNA, 1471 bp, Glycine max
  Clone ID: PAT_MRT3847_82803C.1
ctcgagccgattcggctaaagaacatctcttgctcttcccactttctctctctaaagaatataatactcaaaattcatccatttttattttatttttcttaaaaaacaaagcgcgtatagtctcacgcgcccgacgatgggttttcccgtagggtacccggagctgctggttccgaaaatgttcctccacgcgctctccctcctcgcgtggctgcgctccctcgtcttcgccctcttccgcctcctccgcatctccgacctcctcgacaccgattccgccgcctctgacctccctccgccgcctccgccacgcgagccgactctctccgccctcctcatccgcgagttcctccccgtggcggcgttccgcgacctggcagccgccgacggggatcctccgccgtcgggctgcgccgtgtgcctgagcgaattctcctcggaagaagaaatccggtgtatggcgaactgcaagcacattttccaccggtggtgcgtggaccgttgggtcgatcacgatcagaagacgtgtccgctctgcagaactccgtttgtgccgcatcacaagctcgaagaatacaatcagcgactgtgggcagcttctggagtttcacagttttactaccaagacgattacacggcttctctctgattttttttttctctttctttttccacttatatatttataattatatagcactatatctttttttcatattattattatggtgggggacttgacagctagtgtagcgaaatgtatatagctaattaaaacaaaaacattgtatcaataaaaaaaatcagaattttttggattggtatatacttttttccaacttttacttctatcattctgtgtactacgtacaaattttcattatgtttttaggtttcataaaatgaaattgtgtcagtttttaacgtggaagtaggttggagtcaatcgatccatacttgcaatgatggttttttataacaattatgtatataattgataattaataaataatataaatgtgatattttttttattaattatgtatctaattgatatgaaatatgatattttttatattgattattcatttaattaatataaaaaaacaatgcacataaattcatatgtcttgaatcctattttgaaaaaagaatatattttaattttatgagaataaaaaatatactaaaatttttacactaataaattttaaatatttttatatttaagaaaaggaaaaacaaattttagttatttaataataaggtggatttggattaagtgtttttaatttgtattgttatgatatgtgatggcaatattcttgttatgttgctagtgatattgggtcttcctaaaccggggcatagaaattagagttattcttttttactagtaatatttatagtgtgaaatagtagtattattttaacgatgcttgttaacttgaaaaattaatgtgtggttgtt

SEQ ID NO: 123806 - DNA, 882 bp, Glycine max
  Clone ID: PAT_MRT3847_82804C.1
ctcgagccgctgttactacttaaccacatattttggtgcatcttttctttttccctcacacaattcatcatggctgaaattgaataccatgcaaaatccaatactaacactcaacccctaaagctctttggcatcaacattagcaagtccccagaagatcaaactcatgaagcaggttcgaattctgagcctttcagttcaagaaagtacgagtgtcagtactgttgcagagaatttgcaaactcacaggcactaggagggcatcaaaacgcgcacaagaaagaaagacagctcttgaaacgtgcccaaatgcaagctgctcgtggttttgtttcttcacagattcacaacacaatcatatcaagcttctcaccacagtctcagccacctttgtcgtggttatgcacaccacatggtggtgcatatcattcaggagctgcctttgtggcttctggaagacgaatctatgttgcagcagctggtgcctccatcactgatggccatggtcaccgccaccctctgccgcagttcggtggcttcaacgggggtgaaggtagtggtggtggtcgtgaacgagggttaggtttggatttgcatcttagcctgtgagttttgtgaatcagttttttcattcaatttagcaccaaatgtgtagcagcttttctattttttttttcttttttctttttatcaccatgttgttggtgtgtctctgctataaagattgaacctgacaagtcactttagtgaatctcttctcggtcatattttttttcttcaggtactcaaacataaaatcttccttaaaagtatcgacttgttaatagcaacctttgtactctgaattgtatgtgaatgtaaattttatttaataagtaaaaa

SEQ ID NO: 123807 - DNA, 289 bp, Glycine max
  Clone ID: PAT_MRT3847_82805C.1
gtcagctgccgatgcttatttctcccttcgctcttctccctccaaactcgaccctccaaaacttaacttcggtacgcttcgcactcctcaccttaatacgctcaaatcacagcgccttcagagtccacacacgataccgttggcgtttacaaccgcaacgtgcaaacgaggccgagctatctcgtggctgccattatctcaaaggaggtgcaaactgatggatgaccatcgctgcaggagggagatcataaagaggagggccaaggggttcaggaactggaacaacatt

SEQ ID NO: 123808 - DNA, 489 bp, Glycine max
  unsure (1)..(489): unsure at all n locations
  Clone ID: PAT_MRT3847_82806C.1
attcaaaacaatgattttatttgacgataaaactagcaaatcctgcggcaaggcacggggtgccaactagtagcatgaataacagaagccgaaagtatattcaatacaagaatacatgtagatggattgccacattggctagaaattcaaccattaatgtctagatgggagcaggccttacgaagagcgacttgataatctccgtgagaattgtgccaaatgtgtaggcatccttcctgtcatcatagaagagtgccatagaaacgcgtttggttcacaactcgctgcactatgggcagcagtgtacgatgctcaaggcgactctggntnggtggntctccattcgncttnnaccagggantcaatctttgcaaaggcgacatcgcttgtgaccccattctcattcatgtaacactttacagagctcgcagcatctcccttggtctttccacgcttaaatcccgcaatatcattcattaaacgtccaat

SEQ ID NO: 123809 - DNA, 234 bp, Glycine max
  Clone ID: PAT_MRT3847_82807C.1
tcgagatcaccgcgcaaagccgggacaccgaccagatcaaggagatcactgatggcccacaagaaactggtcaatcagagcgggttgttgcttacagtgttactcatcacgcgtgttggctcatacgagtccgagcaggaagccctgcgcgactacatcaagacggcctgaccgccgtcactcgccggctttgggcgccgcgccctcgggcggcggcgccagcgcgtggatcgt

SEQ ID NO: 123810 - DNA, 736 bp, Glycine max
  unsure (1)..(736): unsure at all n locations
  Clone ID: PAT_MRT3847_82808C.1
gaaaagaaaagacaattattattcccaacagtcccctcagttattcaagtcctcactacccttaaaataggaatttcttattgaaaaagaaaaaagaaaacagaaatgggacgtattccatgttgtgagaaggacaacgtgaaaagaggacagtggacacctgaggaagataacaagctctcctcctacattgctcaacacggcactcgcaactggcgtctcattcccaagaatgctggtaagtccctccccactctatattgatatcattcatatcaatgccaaaaaaaacaagcttttattcttgattttgcttatgaaataggcctccagagatgtggaaagagctgcagattaaggtggactaattaccttcgtcctgatctcaaacatggccaattctcggattcggaagagcaaaccattgtgaagcttcactcagtttttggtaacaggtacattgaatattagccatacattgaaattattgttctgttgattcttttaaataaatgttttactttaatgggtgtttagatggtcactgatagcagcccagctgccaggacgcactgacaatgatgtcaaaaaccactggaacaccaagctgaagaagaaactgtcaggcatgggtatagaccctgtcacccacaagccattntcccatctaatggctgaanatgctacaacattggcacccccacaagcagctcaccttgctgaagcggcccttggc

SEQ ID NO: 123811 - DNA, 315 bp, Glycine max
  unsure (1)..(315): unsure at all n locations
  Clone ID: PAT_MRT3847_82809C.1
tctttatttccatgtaacaggtgttcaccatggggggaggtatggcaatgtgaggctcaggaatctgtttctgtatatagcaactagaacttctttaaggccatagaatttcaacttctgtcatggtgatagtttgttctatgttgatttatgctcaagctagtaatacctggtgacttattgtagaagtttagtcgagctttttaactggttgcttcttgagatgaattcgacatattgtgattgcacctgacagatggcagggaacttcagattcgcaatggaccatttnaaaaaaaaaatataatgacaaat

SEQ ID NO: 123812 - DNA, 174 bp, Glycine max
  unsure (1)..(174): unsure at all n locations
  Clone ID: PAT_MRT3847_8280C.1
ttgttgtctcttaacctacgcagcatcgctatactcttattcatggctttgcccaatcagcaaaccgtggataccctagtttaaactcgttatcgtcgggatggtggacaggaaagacaacctttgtgaaaaggncatctaccgtagaattnagaagaaattgaaacggggggg

SEQ ID NO: 123813 - DNA, 1624 bp, Glycine max
  Clone ID: PAT_MRT3847_82810C.1
tacggctgcgagaagacgacagaagggggacggtcagaataaatctgggaagcgaaagaggaatcagaaccgtggaatgtgagaagccccagggcaccagcgccgagaaaaccctaattcgctcgcagtcacccaaggtcaagcccgccgagaaaaccctagttcgcttgcagtcacacaagaggccaatcctattcatagctcgagatgggtgaagaagtgaaggtagttgttccagaatcagtgttgaagaagcgcaagagggaggaggaatgggcgttggccaagaagcaagaactcgatgctgccaagaagaagagagccgagagccgcaaactcatctacaacagagctaagcagtacgctaaggagtacgatcaccaggagaaggaattgattcggttgaaacgcgaggccaagctgaaaggtggtttctatgtggatccagaggctaagctgttgtttattattcgcattcgtggtattaatgccatggaccccaaatcaaggaagatcctgcagttgttgcgattgagacagattttcaatggtgtatttctcaaagttaacaaagccacagtgaacatgctgcacagagttgagccgtatgtgacttatggatacccaaatctcaagagtgtgagagaacttatttacaagagagggtatggaaagctaatgaagcagaggactgctctaactgacaactctatcattgagcaggctctgggcaagtatggaatcatatccactgaagatctgatccatgagatcatcactgttggacctcactttaaggaggctaacaacttcctttggccatttaagctcaaggctcctttgggtggcttaaagaagaagagaaaccattatgttgagggaggtgatgctggaaaccgggagaattacatcaatgagctaatcaggagaatgaattgagctgtagcactgttcaatcatttgattagttgaatcaatcttttcttgttggctttttagatcaatatcagactattttcgtatctgaaattttgagaatagcacatttcttctgactttgataaatctttttgctaaggttgaatgtttttcgttttataagtatgagtggtatattttattaaaaaatattgcttattattcatatgcgtagctttctgttctgcaatttttggtatgaaaccatgttgattttgaatttgttctcgtctcattctgaaattattttggtgttttacaaggcctttttgcgcaagtcaacgattagtagaaattttgagggttgaaaaaaaaaaaaaaaaaaaaaaaaaaaaaaaaaaaaaaaaaaaaaaaaaaaaaaaaaaaaaaaaaaaaaaaaaaaaaaaaaaaaaaaaaaaaaaaaaaaaaaaaaaaaaaaaaggggccgcccaaaagggggggccctttttaaggtacccagttttccaaccccgggctggcaatattaaaccctttttatggggccccctagttcaatttcccggcccgttttttaccaaaaacccctggggaaaccccttggggtcccccacttaaaccccctggtagaaaatccccttttccccggggggggtaccgccaaaagggcccttccaaatggcttttc

SEQ ID NO: 123814 - DNA, 150 bp, Glycine max
  Clone ID: PAT_MRT3847_82811C.1
gggcccccaacgaaacaaaccccaaacgctaagcagtttcggcaagattcaccagtggctttctccaaagcattgatcctcgccgtcgtaatgtcagtgttcgtctccgtcatctacgcctctgaagctccggcttctaaccctacctct

SEQ ID NO: 123815 - DNA, 274 bp, Glycine max
  Clone ID: PAT_MRT3847_82812C.1
aatcataaatttcaaacaaaactgatcaaggcaatacaacaaagagatcgtgacaacaacggtgcacaggcaattattagaaacatactcttggacaaggagattaatgctagagttagttctcaaaccagcagcattctaaaccacacatatatgcatgcaggtttcttgtcagatcaaagttgatggtgaacacggttcttttgcttgtcgatgaaaatacgagctttcttgtcaatattgggcgaagtaccccccaagtcctttgtcgtaa

SEQ ID NO: 123816 - DNA, 260 bp, Glycine max
  unsure (1)..(260): unsure at all n locations
  Clone ID: PAT_MRT3847_82813C.1
aganaagaaaganattgaaganacccagcagaccgacaaggacagatggaagggtcttgcctatgatatctcagacgaccaacangacatcacaagacganagggtttggttgactcccttttccaagctccacaggatgctggaactcantatgctgtcatgagctcctaccggtaccntagcatggacttcgcagtactnggtcaancaacatggatggatttacattgtccagcttgtatgganaacnntngttcac

SEQ ID NO: 123817 - DNA, 453 bp, Glycine max
  Clone ID: PAT_MRT3847_82814C.1
ctgtcgtcctttttttaaagaaacagcatgaaaccataacagaaagcagatggcctcgcataataggaatgagattgaagaaaataaagaaatggaattgaacatgaatgcctactgcataatgaaaagctggagggaataaaccataactggtacaaaaccccttcacattattggagatgaatgagataatataacacatcacacatcaatgctatctccagagagtcctcgataaagaagatgttcgtattcgacataaatgcgacgggtatttggaattgaattcaacaccatactctacatgaccgatctgaaacggcccaacaagaaactaggtgataggctatcgctgtgggtgcaggatcagctattgaacccgagtggagcatcagcactactcacattgagatgtgaagccaagccctgattctggagtagtcccttacacat

SEQ ID NO: 123818 - DNA, 280 bp, Glycine max
  Clone ID: PAT_MRT3847_82815C.1
tcttacaacaagtatcccatttttctcaatctcaacttctgatcatctaaatatttttccttcgttaggctcttttcaaattcgcgatttatcaaataaaaccaaacataatcccccctacatatactctcataataaaatttattctttttaaacacatacatttactttaattttttcaatacaattattaaatataacaaacccttcatcaactttttacacaaattaattaattatacaataatacctttatcattatcatttcaactactaacaa

SEQ ID NO: 123819 - DNA, 184 bp, Glycine max
  Clone ID: PAT_MRT3847_82816C.1
taaaaagatgcagaaacgtggtgctactgtatggattgaaaacactggtaggtctgttggaagctatggtaatggaatccgaatgaaactactatacatttggaaaatcattgatgctattcactacggggggctcctgactgcatagtacaataagactgaaattattgggcttgagattgcc

SEQ ID NO: 123820 - DNA, 1423 bp, Glycine max
  Clone ID: PAT_MRT3847_82817C.1
ccacgcgtccggtttggtgtggtcactcacatctccacctactgcgtttcaggagtcgacaacctttgaatttctcatttctcatccactaacttctttctcaatccctctttttcttttttatgttttaaactcttttaaaagcttcttccctctttgccgaattttccataaaccacattctcgttggttctctttcaatggagtctaagcttttaagagccaccaccatctcagtcccttcaacaccctcatgcgctttccatcgcacaactcgcaaggcttcgatttccttcaaccccacctcggatttcgccccaaaaagcaatctttctctccaggcacatgcggcttccatcgagtcagtgccaacaaagaaaagaattgatgagagtgacaacctgacccttgatcatataagacgttctttagttcgtcaagaggatagcataatcttcagtctcatcgagcgagcacaatactgttacaatgaagatacatatgaccctgatgccttctccatggatggatttcatggctcattggttgagtacatggtcggggaaactgagaggcttcatgccaaggtgggtaggtacaagagccctgatgagcatccattctttccagatggcctacccgaaccagtgttaccacctttgcagtaccctcaggtgttgcaccctattgctgattcaattaatataaatgaaaaagtatggagtttatacttcagagttcttatcccacaaatagtcaaacaaggggatgatggtaactctggatccagtgctgtttgtgatgtaatatgcttgcaggctctctcaaagagaattcattatggaaaatatgtagctgaggcaaaataccaagctagtccagattcatataaagatgccattatagcacaggacaaggacaagttgatggaattgctaacatatcctgaagttgaagaggcaattaagaggagagttgacatgaagaccaagacttatgggcaagaactggttgtaactacgaaggaacatcgaactgaacctgtctacaaaataaatccaagcttggttgctgatctatacagtgattggatcatgccattgacaaaggaagttcaagttgcctatctgttgagaaggttggattgaacataacaaaaagtaccttttcaattacagtgtttatagggtatttatcttttctaggaaatgatacttgcaatgggtaatttctcttgaattcatgactataaactttagcttttgtaattaacatatgaggaagctcatattgggttcttatataataattaatggcatcttttatgttgttccaaaaaaaaaaaaaataataatacaaaaaaaagcggccgaaaaaaaaaaaaaaaaaaaaaaaaaaaaaaaaaaaaaaaaaaaaaaaaaaa

SEQ ID NO: 123821 - DNA, 359 bp, Glycine max
  Clone ID: PAT_MRT3847_82818C.1
gtaggattcgtcaacgtgctgcttaaaccaatgtttggtgttttacgacacattctgattttggcgggggcaaaaaactttgaaaacccaatttccccttttactaaaccccacaattgaaatggaatttaaagggcttgtttcccatcccctttaaaaaaggcccccatcctcccttccatgtaaaaccggggcctttaaccccgggggcttgtccgttcatttgggaaaaaatttatcccatttttttttcccgccgccccaagggcattggtaaacctcggcgtgggcccaaagggaacattttttttaattttggccgggcaaaaaagaaaccccctttttaaaaggggcccgtg

SEQ ID NO: 123822 - DNA, 1055 bp, Glycine max
  Clone ID: PAT_MRT3847_82819C.1
cctcgagccgaatcggctcgagacagaagggggtttttaactgaatagtgaatgggtagtttctctcgttacggttggagagaaatgaaggcgctaggcgttgttggtggtagtggtgccccagtgccagtggtatgttctagtgttaggaaccaccggtttcgcgtttccttctcttcttctccgtcatcgggacccaaaacggtggaacaagtgggaattgctgctccgaaatctgaatacaagcccggtgtgtttgatgacttgtttcttaatttgttccgcaacaaattggtacaggaggtgggttgggactcggagaaacctggatatgatggactaattgtagttgccaatcgtctaatgatgaacttcaataccaataccgataccgtggaaagagcatctcggacatagggttctctgaattttttatttatttaattgatccttttaaagctcgtacttcacatacgaatactctagacttcaccgatgggaccttcaacagtaacgggactgacttgtcgatggctcatcggcccctgcaaactcaattctgtagacctaccagatggaatctcatgcagtagtggggtgtatgtggaaagatgcaagtatctggaggaaagcaagtgtgttggtatttgcaccaacacctgtaaatttccgacacagagcttctttaaggatcatatgggggttccactacttatggagccgaactttggcgattacagctgtcagttcaaatttggagttcttccgccactggatgatacgatcgtgaaggagccttgcttggaagcatgtccaaatgcttcccaacgacgaacggttgccagaaatattgatataactgcgtgcccaaagacatgaatatatttttcttgggcttggggttttaacagtatttttgtagactttcaagtttgcaaagcctcttgaaaattttggtcccaacctgtacttgaagatggaactccatagcgataactcatctttgaccgagctcagatgaatttattattaatacaattcatccttttttaagc

SEQ ID NO: 123823 - DNA, 402 bp, Glycine max
  Clone ID: PAT_MRT3847_8281C.1
gccgtcctttttttttttttttaatgaactgactcacgaaaattgggaaaaatgtttgttagagtatacacaactgaagcaacacaacccaccaccattcgctgggcatgaacttccattgctcccttcggttttacacattaaaatacttatcccgcccaccagcaagggacatattgcagaaggttacgcaggagggacctgcataatcattatccgtactggaatggaatgtaggttcccaccgaacaaggggaactcatcctcattagcttcaggggaaaagtcaagtttttccggcttatggaactggagcatgtcatctttaaacattagagcttcccctcttggggtagcagcaaatctttgatcaaggattgttctccccagggttaaaattac

SEQ ID NO: 123824 - DNA, 508 bp, Glycine max
  Clone ID: PAT_MRT3847_82820C.1
cgcctcttcttccaaatgttcttccgaaagccatcaccaactccgccactccactctctatcatctctaccctccacagcaattagcttctcaaaaactaaagacccccacaacaacaaattaaggtacaccatattttcatgtctcttccttgcttcatggctccttattctccaccgcttcaacttcacaatattagcaccctccaccaccacaaccacacccacatgcgacggatcaaaaccgttattctacatctacaaccttccctcgcgcttcaacctaggactcctcgaacgttgtcaaagcctcaacatatacaccaacatgtgccctcatgtcgctaacaacggccttggccaaccactctccaccccagattggtactccacgcaccaattcatagccgagatgatcgtgcacgcgcgcctggagaaccacccgtgccgcacgtgggatccctacacggctgttttgttctacgtgcccttctacggcggcctctacg

SEQ ID NO: 123825 - DNA, 387 bp, Glycine max
  Clone ID: PAT_MRT3847_82821C.1
atttctctgttgtgcgactgcaagaagagagatggacactttcgatggctatcgacgagttcggaaggcctttcataatcctgaaggaacaggagcaaaaaaccaaacttcgaggtttggacgctcaaaaagccaacatttccgccggcaaagccgcccttcgcatcctccgaacctccttaggccccaaagccttgaccaagatgctccaaagccccaccggcaacttacctatcacgaacgacggtgccacaatccttgaccaaatggccgtgaacaaccaaatcccaaaactgatggtaaagctctcgcggagtcaggactacgaaatcggagacagacccaccggtgtgatactcatggccggcgcgcttataaagaaggccg

SEQ ID NO: 123826 - DNA, 452 bp, Glycine max
  unsure (1)..(452): unsure at all n locations
  Clone ID: PAT_MRT3847_82822C.1
aaaggaaagagcgggggttggaagtgttacatacactcacactccccgcggcaacaaatgacgtaggcagaggccgttccctgtctatacactgaaggggcgtccatgtatacgtgcatcagaagaaaaccagacttttgggtgncttcggggaaaaccntctttggggggggggatccaatctcactggcttgcgtgcttggaggagtccgcgggggaggttggtactcccgggaaaagaaggagatgccggggggcgcaggggaacgcgacaagttggctgcggatgagagacagccgtccatggatgcggtggatggctgtggtgggcgagtgaccatcggggatgcgggtaccagagctggcctcaacttgactcaggtccgggacgctgtagcagctcttgccggggacgcggatggcttttgagagggttctggggaaggtgacga

SEQ ID NO: 123827 - DNA, 468 bp, Glycine max
  Clone ID: PAT_MRT3847_82823C.1
cgattctcttttttattcctttctcactctctttcattctttatcttcgcataccttgatggttctcgccaattctgatgatgggtgtactcactgtgagttcaccgagactgagatatctcccgcgcgcatctgcgaacccacccaactagctcaccaggcctggaatggaacttgtcaatagtttcgcaatgacaaatatgtacaacattgaatctaggaccgacctacctgttccttaatgaactgtattgcttgagggatgacgctggtgtctatgggtcagccgtcaccggtgcttgttttgctagatcttgagcgcatccaatgcggctagaacggacgaggatcgactacgtctttactgtgtttacgtgactcgatgctcctgtatacgatttgggtccttcgcgggtgaggagatctatgccctactcaagatgctgcttacgatggattaacttgacg

SEQ ID NO: 123828 - DNA, 504 bp, Glycine max
  Clone ID: PAT_MRT3847_82824C.1
ctagcaactagcaagtgctcttctcaaaaaagcaaaaacataaagaaatggctgtcactttctctctcctgcccgccctgcccggctgccaacttccacacttgcagcctgcccggccggcccgttgttgaaaaactctctctttcacatgcagtcttccactgcctctctcttccaccacctacagcccctttggactgattttcataactgggtttgtgtttgtgtttgtttttttttaactgaattatctatgtacttgtgttgatccttttgttgtgattcaaaacagcgatgttgttgttcttttagttttgttgatcatgatcatgatgatgggattctagagtcttcaattattggaagtgaggttgcttcaagtgtttttttttattggattttttttcttctttttttttatcctaaagtctgaaacttgtgggaattttgaacatgaaaagttctttgtaagagttttgtgggaagatgggttttaagaataat

SEQ ID NO: 123829 - DNA, 1514 bp, Glycine max
  Clone ID: PAT_MRT3847_82825C.1
acggctgcgagaagactacagaaggggtgttgcagaagacacaaaagaagtcacaaaatgtatcgcgttcttcaccgcgctttctgcaccgccaccgagcccgccaccaccgccaccgtcaccgtttccatcaagtccatttcggaggatctgtacaaggaagtgaagctaaagaatgtggtggagaagttcaagaaagcctcggacatcgaccgcttccgcaaaaaaaccggcatctacgaagacaccgtccgccgcctcgccggcgcccgacgcttccggtggatccgcgacatcctcgagcaccagaagcagtactccgacatctccaacgagggcttctccgcgcgcctcatctccctgtacggcaagtccggcatgaccaagcacgcgcgcaaggtgttcgacgaaatgccgcagcgaaactgcagccgcaccgtgctctccctcaacgcactcctcgctgcgtacctccactcccgcaaatacgacatcgtccgagagcttttcagggacctcccaacgcagctctcaatcaagcccgatttggtgacctacaacaccatcatcaaggcgttttgcgaaaagggttcgtttgattccgcattatcagtgtttcaagagattgaggagaagggtttgagccctgattccatcacgttcaacactttgcttgatgggttgtattcaaagggtcgttttgaggagggtgagaaagtgtgggagcaaatgggtgtgaagaatgttgctcctggtgtgaggagttactgctccaagttggtggggttggctgaggtgaagaaaatgggtgaagcagttgtgctttttagggaaatggagaagttgggtgtgaagcctgacctcttctgcatcaatgctgtgatcaaaggtttcgtgaatgagggtaatttggatgaggctaagaagtggtttggtgagattgcaaagtttgagtatgaccctgataggaatacttactctatcattgttccattcctctgtgagaagggtgatttcaagactgccattgatatgtgcaaggagattttcaacaaccggtgccgtgttgatgcaacgttgctgcagggcgtggtggataagctggcgagtgagggcatggatacagaggcgaaggagattgtggagatagggaaaaccaataggtattgtcgctataggctagatttgccagcagagaagtagaattatgttagtacttagtcgcattttattgttgttcttgcaatttaaatggtttttttttcacaatgatggttgggaaattgccaacaatggattttgtttggcattgtgagcttagtaattgtttggttcaaaatggcttatgcagtctgattgcactagctccttttgctggttagatagtacccttaaactgctcccctgcatgaaatttcttgttatgtgaatttgcatttagcagttttaatatggaatgcatacctgcatgcacatatgaacttatatgtgaatgttttggagtttggtctccc

SEQ ID NO: 123830 - DNA, 194 bp, Glycine max
  Clone ID: PAT_MRT3847_82826C.1
ccaattttgagtataaatgaggtcaggactccattctttaagtacatcgtggtttctctttatcaactgggaagattagatgtttagtgaattcaccagtgttagcttggcactttacatgaggtatttatgtgatattgggtgagtttgtttaaatttaaataaaataactttaaaataaaaaaaaaaaaaaa

SEQ ID NO: 123831 - DNA, 572 bp, Glycine max
  Clone ID: PAT_MRT3847_82827C.1
cccacgcgtccgccacgcgttcgtttcaattcaaaatcagatatggaagaacccgtcatggaaccacaacccctccgctgctgcctctgggaacactgccagacccaggcttcagaagtatgcgctccgatctgtcaataaatcgaaggaagacaagtcagaaactcccaattgctccaatcctacttctgaaaccaagagggggagaagtgtaggtgcttcaagtgtaagtaaaagtgtgagtgttcttgatttttctggcaaggacaagtctggtagtgccaagccaccaagaaggctctcaattcctgccaaaacaccagccacttcaagacccaagctgggtggcaacattatcccaatcactgagactacaactgggaggaatgcttttggtcaaggcagaagcaaaacaccaatttctgacatttccaagacatctacccgaaccaagttaaatctcctaacttcggcttcgtattggttaaaccagatcaaactctctgaatctgccgccaagcactcaatttcgcttggtttcttcaaactagctttggaggcaggatgtgagc

SEQ ID NO: 123832 - DNA, 253 bp, Glycine max
  Clone ID: PAT_MRT3847_82828C.1
tgagaagaagaagatggagatgtatcagatctggagcaggagaatagcgttgggagcgttcgcgtttgttctgctttttctatcggacatagtagacgacttctttgtgctccctgaagatatcttcaagaaggaagttggccaggacataggagctctcgttgagttctatgctccttggcgtggacactgcaaaatgcttgttccagattatgaaaagcttggctgcatcttcaaaaagccaaatcttgtt

SEQ ID NO: 123833 - DNA, 436 bp, Glycine max
  Clone ID: PAT_MRT3847_82829C.1
gccacgcgtacggtgaagcctatgacgatatgtcacgcattgaacttgcccaagaggtcgggatagaacgcgtaaggggtgtggcaatacctaaggggaagaaacgggcgggagccacacaaattccacacactgctagggggagaaaccatatccttcaactttactgactggcagaacctattggaatggatatattatccgaagggggtgacgacgaaaaactgaaactaccttcgggtgctaaactaattcactgctaaacctgtttcaaatttgaataccataacttatctcttgctgttcgcctaaaattaacagctttccaatcatttccttgagatattgctgaaattcaatgacgcgcattattatgaaatggtaaggaatcggatattgtacttctgcagactgcagcgttcttattgaataattt

SEQ ID NO: 123834 - DNA, 495 bp, Glycine max
  unsure (1)..(495): unsure at all n locations
  Clone ID: PAT_MRT3847_8282C.1
cgcgtncgtangcttggagtctgtggagcggccgccctttttttcttttttttggttgntnnttttttnttcccttttggggcctntntttggttcttcntgggggtgggttantcngtgtgtggggttnttgtggnngatntcntntncntggttngnccngagaacttcgctcnnttccntcttnggtngcggttgcttggacgcatccccacatttgcctccgcgcgggggtggtngtcctcttttctctttggggggcggggaggggtggggtttccngtttggtcttagtnttgttggtctgcttttgcctcgntgnnggtggccgttctccgntgtctantcttcnntgtnttntcaccgtccccnctggcnngagccngganncnnttttggcnnccccnngggcttcngcttctttttcnnggcnnnggngccgtcgcctggggtgggccttccccccccgcccgggtcccgctggggggcgtgtgg

SEQ ID NO: 123835 - DNA, 276 bp, Glycine max
  Clone ID: PAT_MRT3847_82830C.1
cgtcccaactccctttttaggccaccgcattgtatatcccgacacacacacgctttgaatagagccctttggggtgggggagacttaaaggcagtttgtggtttggggaagtaagagttaacataagccattttaattccctgggaagtgggagagtgggtctcccattttccccaagcaccctttttggtaattgtgttctgtgggttggaaggaggtgaagggggacctgggagcgagctgttggtgggtgggaatagggatttggccccgagt

SEQ ID NO: 123836 - DNA, 492 bp, Glycine max
  Clone ID: PAT_MRT3847_82831C.1
gtggttcagaatctgacgggctcacctgcgcacgaccgcatctcaacgccgcctcccattcagccacccaagcccccgagctctcgccttcagaggattcgccctcctcccctgcctcaaattactaaccgcccacccccgctccttaaccccaccaccctcccccgccctcaacaactccctaacgccgttaccttcaacaacaacttctccgttttttcgagaccccccgcgccgttatctcctctgccgccgttccccaccgtccacgcccccgctgagtcacctatctccgcctacatgcgcgatctgcagaccctcgtcgatgcaaacgccaagcacttttcaggcttttctcccttgcctgcaccgcctctggttcaacctcaacctcaacctcaacctcagcctcaacctcagcctcagcctcagcaagaacaacagccaccggaacagcagcaaggggtggttccgtcgcaagcgccgtcgtcg

SEQ ID NO: 123837 - DNA, 199 bp, Glycine max
  Clone ID: PAT_MRT3847_82832C.1
cgggggagttcagtgtggcatagaggatcaatccactatgctataggataattatctcactttagtgttatcaatcgcggagacacacagttaccccgcgcagccgtaccagtaccacttagtaccgacgcgagcggtacccactaccatcattcgtccttagcaccctgcgtgttagccgcagaatcagtcgccggtg

SEQ ID NO: 123838 - DNA, 369 bp, Glycine max
  Clone ID: PAT_MRT3847_82833C.1
gacgcgtacccgaggctcacaaggatccggtcctgcccgcacgagcggaggagccagcagcagctgctgcaacggtcgatgatgttggaggagatgtacaagtacaagagacgcttcttcaacaacgttggcgccgttgagaacctcgtgtctagatgatgatcgatcatcatgcaatgcaaattaatgaatctacgtgtttcataacatcatgtgctaatttcctttttttctgaaatactgcatgctctctttatcttatttggactctcccaccaatacgagtgctttttatttatttatttatttacctattatgctgaatttgtaatgttagtcacgtaaaagtttctcgtggggaaactaaaa

SEQ ID NO: 123839 - DNA, 821 bp, Glycine max
  unsure (1)..(821): unsure at all n locations
  Clone ID: PAT_MRT3847_82834C.1
tttcagaaaactcactctgtagtcctcactcctttggtttctcatttcgtagagtcgtagcggcagctccgccgtcggtccaccgcctcctcctcctcgcgccgccgcacttcggtgacgacggaagacacgtcgaattggtcctccgtggaatagtcctcgtttccccgtttggaataatttccatcacttttcgttgctttcgttttgttcgaggttgggaggagaaaatgaagcaagtagtaggaatggtggtttccaataagatgcagaaatcagttgtggtggcagtggatagacttttctatcacaaagtctatgatcgttatgtcaagcgcacctctaaattcatggctcacgatgagaacaacctctgtaacattggtgacaaagttcgactggatccttctaggcctttgagcaagcataaacattgggttgttgctgaaattcttaagaaggcacagatatacgttccaccctccacccctgtgtctgttaatgtcaactccagctctgtagcaccagcttcataaatttgttcaagggtctgaatgtatgaacttaattctcattttgaatgcatcccatcaggattgttttctgttaggtatttatattattccccatactcgtggaaaaggttacactgttatggacatgttttctgttttcggcatcacatgtttctacagatttcctgtatccttttggatattatttttaaacctattcttactttactcgtttcatatgatataaaataaggttttgtatagctgataatttgatgctgtaaaatcagtctgctgantnnacaa

SEQ ID NO: 123840 - DNA, 474 bp, Glycine max
  Clone ID: PAT_MRT3847_82835C.1
ggatgtcattctgatatatctgcttcatagttttagaaagcatttcaaatttctcatcgggcataaaacagcaatcccagcaataaatttgaaactatgggaatggggatttagcattcaaaatttcaaatctataagtatatacatcccctcttcaacccacttgactgtacaaaagcatttccacgagcaaattcaaccagaggaaacactcaacttgcactgcaaccatggcaaccttttctcacccttgagagagatgaaaatctcacgggcccaccagttgttctcaaacaaatccaaagcaagaaagtagagccgttcattaaccccttgcaactcatccaacaccttaatgcacttgcttatggaaaacctggcctcattcttcaaaattgcattggcccttatctttgaagcaacagcaatctccagcatggggtccaccaaggggtcccccttagccttttgggt

SEQ ID NO: 123841 - DNA, 500 bp, Glycine max
  Clone ID: PAT_MRT3847_82836C.1
caacccatcccggctaaaacaaaaatttatggccaacaagcagcatcacaggcccaaaaacaaataaaagttcatttaaagggatttttgcaaaataaaatattaatgcccccggcaccgggaataataaaaaaaccctaaaaaataacccccgcccaccctattatctaccccggaaaaaggttccccagaaaaaaaaaccaagggggggtttcccctacacccccaaattttattttttatcaaaaaaaaaagcaaacttttttttggttagcaagaaaaaaagttccctgccacaaaaaaaacaaaaaaaccacccggggtctgttaaaaattcaaaaacccgccctgaatctgaaatctccggacaacaaacagaacattggggggccctttcgggttcaacggatagggcacaccctgggcaccccacaaaatgcccacgggaaaggaaaacaaaacgttttctcctaataaaacatataacacaaattggccca

SEQ ID NO: 123842 - DNA, 548 bp, Glycine max
  Clone ID: PAT_MRT3847_82837C.1
cttaaccttgtttaaccatattttacttgttattatttactaattttttttacttgttttgatcaatttacaggttcttaatcgtgcaatggactttcgttcttcctgtgaaaccaattcactgaatttaccgcaaattccgttaattcctcatcaacttcttccctctgggtcaagacgagattgtattagacttcgaggtttaccttatgaagctcaagttgaacagattcttgaatttcttggtgaatatgccaataacattgtcttccgtggagttcacatggtttataatgctcagggtcaaccttctggtgaagcattcatccaaatggactccgaacaatcggcagctcaagccgcaactcaacgtcaccataaatacatgagttttggtaaaaagcaaaggtacattgaagtctttcaatgttcaattgatgacatgaatttagttttaaccggaggtgttccacttcaacggcatttacaaactacagggacaatattaccttcaccataccgtgcttatccataccttggcggtggcc

SEQ ID NO: 123843 - DNA, 374 bp, Glycine max
  Clone ID: PAT_MRT3847_82838C.1
atccatcttgctggattctccacccattatgcaagataaaaactaaaatgggtaattataaagttctaatttttttttttccaatcttaccccagacaaaagttctatcgtcaatagtgcacaacctctttttttgtctgccggtgacatattatattgctctaggccggtccactaaccgtgccattcgtgtgccaaaatatatataaaacatttttctatgtctttgattatcgctagaaaaatattcttaatgagtaaatacgaatcaaaaggctttttgttggacttgacaacaggacagatccagtggacaactttccttagcactcattttctccttttgccttaaaaatccattctttggggtccct

SEQ ID NO: 123844 - DNA, 653 bp, Glycine max
  Clone ID: PAT_MRT3847_82839C.1
tggttcgcaaatccgccgggcttagatgagaggtgataacgaggaagaatctctacatacatatctctctcattgttttttgtttgagtgaattaagtgtaacctttcttctagcatcatctactcattctcaattctcaaacatgcttacccttccacccccacctcctccccgactcctagccacgaggcaaaccaaacaagtctctcctgaccagattgtcatgtcaaaacaaccaatcaaacaagattctcaagaatcagatgtaccaaattatgttacaacaaagtcaattaggccgccgccaccgccaccaccaatactaaggcaacctccatttcaaaggactaatccaatcatatggtttgctgcagtgttgtgcctcatattcagccttctactcatcttctttggagttataactttgatcatcttcctaggaatcaagccaagaaacccctactttgacatccccaatgcaaacctcaatgcagtgtacttcgacttaccagaatacttcaatggtgacttcaccctcgttgcaaacatcaccaaccccaacaagaagattgatgtgaagtttgaatcttttgatgtcgagcttttcttctcagacaggatcatatcaacacagtccattgaacccttttac

SEQ ID NO: 123845 - DNA, 544 bp, Glycine max
  Clone ID: PAT_MRT3847_8283C.1
aaaaaaagagcagcatcaagccgagctaacaaactgtaattaaagagatgatttggggggcaaaccttagggaagggtcaggagcgttattatcattgggaacctcaaaaggggtttctggcatagggggaataaatcctatccaaaaaagcaatttcctaacggggaccaactggggacaaaatccctttatatcgagctactgccctttgagctgccaaccaaaaaggaaggtctacatttgggacttgggcctcacctatttgctcatttgaagcaggggcattataaaggagggatttctgaaatactgacaattcctttaaccaaagcctcaatctttctggccaattttggacttcatggttctgactgggattttcgaaaagctcacttatccaggggccaagttttgttagggggtctgatataacaaaaaagggtcttcaaaaaaacttaaactggaaggaatccagtttttcaacaattaaaaggcccttctgctttttagttgcgtagccccccctaaatattatgggattaa

SEQ ID NO: 123846 - DNA, 114 bp, Glycine max
  Clone ID: PAT_MRT3847_82840C.1
atttctggaccgtctcagtcatcgactcagtgccatgtatgcaccccccttcagccgccgtcgccgtctaccatcgtcggaattatctgctgcgatgaaatggacgggcgtcgt

SEQ ID NO: 123847 - DNA, 286 bp, Glycine max
  Clone ID: PAT_MRT3847_82841C.1
ggctcgagctcacacgtgacgggtggccatttggtagctctgtctgttgagaataaggaggggtatctgattctacttgcaacatattgactccaaatacagatagactggaccatgccgtcaaaggctgaactaagtggaggtaaacaatgccgagaatcgcaattgttgtatgaagagtgccaattagctctgaacctcgccatgacagacatattggctgacttcttcgtgactcataagattgaccgtgcctataattaattgcagacatacatattgttta

SEQ ID NO: 123848 - DNA, 529 bp, Glycine max
  Clone ID: PAT_MRT3847_82842C.1
ccacgcgtccgataattttttgtcaaaataattctataatattataatttaataataagtgatctcataaatttaacatgattaatttatcatatttttatatatttaaggattaaatttgtattttttattttttaaaaattaatttgtcaccgtattacacctacaaataaatttgactatttattttaaatataaattaggagtttaatttttattttgttaagaaaaaatgagaaaaaacctccatgatatgagctgattggatattaagactaatttaactgtagacatcattaagcatgatttcagaatgaagtgaagaactaatgatgagtgtaattttgtaaacattactccaagatgcatatgctccatgtgcatttacctttaccattttctcttgcatattgagcttcaacttggcatacccctccctgacctaggcaaatcaccattcaccatgaaggaagaacgcccccatgtgcaatgcacatgcacatcacttcatgctccatttaaagggggg

SEQ ID NO: 123849 - DNA, 248 bp, Glycine max
  Clone ID: PAT_MRT3847_82843C.1
gagggacaccaaccgtttatgatttgttcacgaccgcgaaccctcacgaaaggatcacatcgtctaataaaatacagcggttgagtccacaccttcgacacttgaagggcggggcatattatatgcaccgaaattaatccctcgttcactcctaatgcgaagtatacaacaaaattgcttaagcggaagcataggattccatatcatctatgagtcccttttggacaatgggaagtacggatttacat

SEQ ID NO: 123850 - DNA, 825 bp, Glycine max
  Clone ID: PAT_MRT3847_82844C.1
caagaatcaacttattgataaattcaggaggtaaaactccatgaagccttaatcaaacaagtagcatctctagtctgatctctgtccaaatgaaaatgaagatagagcaggggggaaatctttcacattatcctttcaagtttgatatgaattacacatcactgctcaatactttttccatctttaattaacttgagtccatacagcataaattcaagtactgataatacatcccatccagaaatgtaatcaccaccataacttgataaatacatcccatctctaattgagataagctagtttttgtaacaaattctcataaaagctataaatagcaatcctttgtctccaaattgtagacataatgcttcaacggtcatcctacagcagccactttatcatatcagatctcaataataagatcctgaaccaccaccacccatataactgctaccaccacccacaccccttccagaatacactgatgaatatgagctgccaccaacatcacttccacgagaaatgtaatcaccaccataacttgatgaatacatgccaccaacatcaccactaccaaaagaacctcctccataactcatgccctgccgactgctatacatcccatgtgaatcttgactagaaatagaacttctgctgccaccaccatatcccacactagatcttccaagtctatcaccataagcatctccatactgcgaagcactatcaccatagtcatagtctagacgagctcttgattggcgagcaccagtatcagcatatcgtggaggaagatcatctatagcagcataaggacgttttgag

SEQ ID NO: 123851 - DNA, 338 bp, Glycine max
  Clone ID: PAT_MRT3847_82845C.1
agttaaaccaatgattgggtggtggatcaaatagcgggggcggtctcatctgtgaaaagccatttttttttcaacaatgtctttgttatttgatccaatatcgcttctatagattggaacagatttgataaaatttgataactctcaaatagagtattacaacggaaaaatccattagataatgaacaattgattctaacccatcttttgcaattaattaacaattcaaaatgcttttcttgcctacatctgataaaccagtgtttatatataaattgtagaagatttgtttgtgaagtaataagttcccttgtcatttctttatttttgaaaaattg

SEQ ID NO: 123852 - DNA, 3456 bp, Glycine max
  Clone ID: PAT_MRT3847_82846C.1
ggtccatgtcagtgaaggtcaaccaattgagtacaaattattgaattgcaatatggaaatctatgaagttaactagctaaggaaagatatcaatgcatctttagcattgtcttgtagtccccctcagcacaaaaacctcaatagtatcaaatcattccagcaacaaattttaccagtgcattatgctttttactatcttaggaagacaccaagccaaataaatcccatgaaactaactatttgactttattaattgctgaagtagtgctcttattactactatctcaacaaagggctaatgagttcacctttgttctgatcatatcactgtaaaacaaaaaagtaattcatccaaagtaactaaacatctctttagagattcaaaataaagaatcaacttattgataaattcaggaggtaaaactccatgaagccttaatcaaacaagtagcatctctagtctgatctctgtccaaatgaaaatgaagatagagcagtgggaaatctttcacattatccgtccaagtatgatattaattacacatcactgctcaatactttttccgtctttaattaacttgagtccatacagcataaattcaagtactgataatacatcccatccagaaatgtaagcaccaccagaaatgtaagcaccaccagaaatgtaagctagattttgtgataatttccaaaaaacaaactataaatagcaatcctttgtctccaaattgtaggcatcatgcttcaacagtcatcctacagcagccactttatcatatcagatctcaataataagatcctgatccgccaccacccatataactgctaccaccacccacaccccttccagaatacattgatgaatatgagctgccaccaacatcacttccacgagaaatgtaatcaccaccataacttgatgaatacatgccaccaacatcaccactaccaaaagaacctcctccataactcatgccctgccgactgctatacaacccatgtgaatcttgactggaaatagaacttctgctgccaccaccatatcccatactagatcttccaagtctatcaccataagcatctccatactgtgaagcactaccgccatagtcatagtccagtcgagctcttgattggcgagcaccagtatcagcatatcgtggaggaacatcatctatagcagcataagaacgttttgagccagacagagcatcataatctcggggacgtccttcacggtaacttagatggggaggaggaggaggaggaggagccctctcaaatctctggtagccatagccatcatccacatagcttctccttggtgcagtcccacgagatgtgcttctagggagctcggtgtagccaggaccacgagcaggataatccctgtaagatgttcgtctttcagaagcaacccttgagccataatctactctaattctgggaggttagttggtatattctcacgccgaccataatctctcttcatgctaaagctttttgcattgccagagcaactggtcctataagatcttttagatggacctctcctaggcactattttaacatgtaccttctctagtctcctctctgttcagatgaaaatgatgatagagcagtggggaaatctttcacattttccgtccaagtatggcatatcttgcacgtatagagatcaatactagttccatctctcattaacttgcgactaactagcataactccaagtactgataatacttcccttccagaaatgtaagaaccaccataaattgataaatccatcccaacgctaattgggataagtgtgtttttgtaccaagttctcacaactgctataaatagcaatcctttgcctcctaatctcagacgtaatgcctcaccggtcaaccttcagcagccactttaccagaaaaaatatcattatacaactaccacgtcgaaaaccaacaaaccacctcctccatcgagcaacaggcatttcctgacacaccgatcaatagggcttactattttcatcacttccacgagaaatgttatcaccaccataacttgatgaatacatgccacaacatcccactaccaaaagaacctcctccataactcatgccctgccgactgctatatatcccatgtgaatcttgactagaatttggccgccccctccacctcccactccagttcttccttctcgtgcccctcatcctgcgccttcccgcggtccacgatcaccattgccctagtctccaccagctcttgatcggcgagcaccagtatcagcatatcgtggagcaagatcatctatagcagcataaggacgttttgagccagacagagcatcataatctcgagcaccttatttcacggtctcagaaaatccctgaaggaggcggcgtccgatcggtgtcaattctcttgataaaacgcaatatcaatcaactatcccctccgactagcccgatgaagctgatgtagggcactcggagaagccagtaccctcgtgtatatcctccgctgaagaaggtcgtttgtcagtcgccaccctgcaaccatcatgttcagaaatactgatcatccagaaaccggaaccagtgctccataataggcaatccttttgcaaagtatttgctatacaaggtaatataattatccagtaagaaaatacagaacatcaggaaaccggaaacagttgattcgagtatgggtatcctattagcataatgttggcagtagactgtgctaaaagttcttgttgtttatttttagtccttttccagttgggcgtggaagtaattgggagcattttgtgggagctcaaggttgttcatcacttcgcttccattgagcccagtacctactatattcatcttttctcccctgccatcgcgtttcttccacagcctccggagccatttgattcatgtcaatagccttatcctcaataaccacagcggactcgttctcttcaacagcaggaatctctttttccaccaccaccttctgctgttcctcctcagcagcaacaacaaccacgggttgttgtttctcttcaaccttcactgtctcctccgcagtttcatgctgctgttggttctgtgcagccttcggggttcccctgccacctctgccacccctcttcgaggcgctcgacgcggaccctcgcttcgccgtcttcggaggcattttcgaaacgaaaccctagattgtagggaacactgaattgaaccgctggttttgcgagattaagggttccaaggaaaaacctaacgaggaaatcgaaataggaagtgaaagagaagaaaacactgaatgatcaaagaaaagggtaattggggatcgaaaagggatgacaaaaccctacagaacgagaatcgaaacaaaacgaaaccccacgaaggaggcagaaagaaattaaagagcgagatgatgagagatgctagcgcacacatt

SEQ ID NO: 123853 - DNA, 390 bp, Glycine max
  Clone ID: PAT_MRT3847_82847C.1
aaaattctgaagacaaaaccgctcaggaattattcacaagggaacatgaaggattgcgcagaaaagcagaagattggatgaaacgcactgctgagttctgtatacttatttcaactgtcattgctacagcagtgttctctgctgcgattaacataccaggtggcatcgatgatcaaacgaaaaaaccaaattacttggacaaaacatcgttcctggtgtttgcaatatcagatggaattgcattcatctcatctgcaacttcaatattaatcttcttgtcaattctcatctcgcgttatgcggagtatgattttcacaagtcactgcccttcaagttaatatgtggattggtaactctgttcatctccataacatgcatgatggtagcct

SEQ ID NO: 123854 - DNA, 346 bp, Glycine max
  Clone ID: PAT_MRT3847_82848C.1
cacacgcgtgagcagatgtcagatgacgacagaagggaattcttaggatctaggggatgctttgtgtgttatatctatatgcttagtcccactattatggctgtttccaataaaccctgtcttatgcttacagatgtggctctacaccgactgttatcagtgctgctcgttactttatgtaggattctgcttataatattccttctttcatcaaacttaacaccaatttgtactcatgatatcattgacaatgctctttcataccatcatgacatgaaccttgaaaagtcccgtgatctcccacagcataataacttatcacttatattggaaaggctcaatggat

SEQ ID NO: 123855 - DNA, 625 bp, Glycine max
  unsure (1)..(625): unsure at all n locations
  Clone ID: PAT_MRT3847_82849C.1
ccacgcgtccgcaaaacgccaacaccataaccaaaacgcacactcacacagagagaaaactctttctccttcttctgtagttgttttcttctcttccagatcttcggcgcagaagaacctcctgaaattcgatcgcttcattcattcacgttttgctttcttcagattttcgtcaatattagagattctacgttcgcacgattatgaagatgatgctatagcagcagcagtagaattcgttattgcaaaagaagaagaaaatggacgatagaggtagctcattcgttgctgttaggagaattcctcaaggagaaacctgccatccaaattctgaggttgtggcagggtcagctgcatggctaggtcgaggtctgtcttgtgtctgtgtacaaagaagagatagtgatgtttctaacactttcgatttaaccctagcccaggaggaatgcttgcagaggatacagagacgtatagatgttccatatgatagttctataattgagcaccaggatgcccttagggctntgtggaatgctgcgtttcctgaagaagaaactcatggcttgatatctgagcaatggaggaaatgggctggcagggaaagatccatcaacagattttaggg

SEQ ID NO: 123856 - DNA, 533 bp, Glycine max
  Clone ID: PAT_MRT3847_8284C.1
cttttctctggaggttattttctttccttagttcttggagcaggtgatactaggatggacgtccatattgtgaggactagctacgtaaataaaacctctatccattacctagattaaagtaaggccatctctgatgctaattatggcccatccactgccacacttggctcggctggacagtaatcataaggtgaactcagcttggatgatcgtaaaaacattacagtggtcccattccatgagaaaccatggagctatctaacgaaggactaactgttcttgaggagcactggcatcactccgggacaccccctccttcatgcgccaaaagaccataactgacaatttgggagagccaagcccacatcatacccatcactcttgaggcggcggacaagtcataacttgcaggtgaaagtccacactttggggttactacccagctctagttcgcttaccattccgtggatgaccttaagggtgaagtaatataccacagtcgggtccctcattcagacatgccgaggaataaa

SEQ ID NO: 123857 - DNA, 175 bp, Glycine max
  unsure (1)..(175): unsure at all n locations
  Clone ID: PAT_MRT3847_82850C.1
tccaccttggttctctttgaccctggcctcttgcgaagcgtgttctgccttttgttctgttgcttgcngtgtgcttctgtcggatctaccctcttccgcactactctggtttgtagggttgaatttgactcggttgcatctcggtcagtcgcttcactgactgttccggtcctgg

SEQ ID NO: 123858 - DNA, 2108 bp, Glycine max
  Clone ID: PAT_MRT3847_82851C.1
gtaagctcggaattcggctcgagtctctttctaaatcttaacaaaacgccaacaccgtaacaaccaaaacgcatacacactctcaaaaactctttctccttcttctataaactgtaactgttttcttctctcccagatcttcggcgcagaaaaaggttctcgaatttcatcgcttcctcctttcgcgatgatgctatagtagaagaagaagacaaagagagaaaaaaaaatggacgatagaggtagctcattcatcactgttaggagaattccccacggagaaacctgccattcaaattctgcaaaatcccaaaataacgccaacaccataaccaaaacgcacactcacacagagagagaactctttctccttcttctgtagaggttttcttcttttccagatcttcgtcgcagaagaacctcctgaaattcgatcgattcattcattcacgttttgctttcttcagattttcttcaatatttgaaattctattttcgctcgattattaagttgatgctatagcagcagcacctgagttataattcgttattgcaaatcacgaataaaatagctattctaggtcgcccttccattctagttttgcgaagtccttaagcatgaacataacatcgaaattgaattttggtccttgaacggtatcattctttacacggccgtttgcattcgggaatctgtggacagttactttatagtagtgtattctacatttctgatttaaggtgcgccgaaaaggagtggatacagaagataaagagacgtatataggtttcagtggatagttctttacttgagctcgaggatgcccttacggccttgtcaaatgcagctgaggttgtggtagggtcagccgcatggcttgggggaggtctgtcttgtgtctgtgtacaaagaagagatagtgatgcatctaacacttttgatttaactctagcccaggaggagtgcttgcagagaatacagagtcgcatagatgttccatatgatagttctatcattgagcaccaggatgcctaagggctcaattcaaggcatgtttcctgaaggaaaacctcatcgtttgagttacctgcacttccaggacataggctcgctagggaaagatccataaacagttgccaagcagtggaaaaacgtctcattagacaatctgtactaactttccccggaaagcttttgttagtttgtggaatgctgcatttcctgaagaagaacttcatggcttgatatctgagcagtggaaggaaatgggttggcaagggaaagatccatcaacagattttaggggtggtggttttatatcattggagaattttctcttctttgctaggaatttcccgaaatccttccaggatcttttacgcaagcaagaaggagatcgatcagtgtgggaatacccatttgcagttgctggtgttaacatcacatacatgctgatacaaatgcttgatcttgaagcagtcaagccacgcaatctggttggagcaacttttctaaaatttcttgcagaaaatgagtcagcttttgatcttctctattgcataactttcaagctaatggatcatcaatggctttctatgcatgcctcatacatggattttaatgcagtgatgaaagaaacacgacgccagctagagaaagaacttctcgttgaagacatagcccagcttgaagatttaccctcatacaaattactttcccgatagtaacagtcccaaaatcctgactgggaccgattaaaccagtgaaagcattggtttaagagtcaactagcgagaagcctgtgccgatacacgggctcatactctaattttgctatcattactgaagaaacaacaaagatatagatatatgcatttaacacttgtgagctttaagccttatacttgatgtcacaaggtttgagatggatgcagcagttaagcttttagtctagttgaaagatgattttgttggcctgacatgctgccaggaggctgaaatgtaaatttgcttggtattgggtattaatgatttgtggtttgccactttaccaatatatttccttgtggtgttataactggcaaaagaaaaaaaaatacccaaaatg

SEQ ID NO: 123859 - DNA, 299 bp, Glycine max
  Clone ID: PAT_MRT3847_82852C.1
taacatacactaataccgactacagtaagagtaaaaagaatcattgtattaacaaaaaagtattaattgtaaaatttgtgtaaatattaaaaatttatgcgcaaacaattaatatatttatcaacgtagaaaaattaacatttaaattttttggttaattttttataatggtacgtaagtgaaaattttcaaataatacttagaatgttgaaaataaaattatcaaaatagttactagctagttatattatgtatattcatcaatacttgaatgaacttcatcagttcaacaagtattc

SEQ ID NO: 123860 - DNA, 186 bp, Glycine max
  Clone ID: PAT_MRT3847_82853C.1
aaaggggaaaaaattattcttttatttcatgagttctgatatattatttctaggttgaatatggggggataacccaaaattaaacccacttttaaccaaatatgcctttaaatggctgaatttaatacactttttggtttcttttaagccggccaaaaagtattaaattaacccttcttaaaaagg

SEQ ID NO: 123861 - DNA, 327 bp, Glycine max
  unsure (1)..(327): unsure at all n locations
  Clone ID: PAT_MRT3847_82854C.1
gcacncgtgacgtaagctcgngaattcgggntngagngctaaacaaagatgcgcnnaggtctaatgcttatnnntngttcgtgagttnttccantactntttatnncnnacnttnnatgcctcncacgtagcagcnaaggcncccagtagtngagggngtatcatnttccttnntnttcgcaaaacatgccnnnagcnttgagtccattgtnagggagacntctcaagnaagntgttcaaggatgacnatggccangctcctgncttantccgngntttcttgccatgnntgttttgnntcanggatgtgagggatcaatgcngctn

SEQ ID NO: 123862 - DNA, 265 bp, Glycine max
  Clone ID: PAT_MRT3847_82855C.1
atagaatcatgaatatatactgatatgggtatgaaacgaaaggattaatactctatacataagatgaaacgatacagcctagatccctcatgaaagagatacagtcttataaaactatcattaaacattccaataagaaaacaggggccctatgaacaaaaaaattgtgtgggagcaatgcgcgaactccatttttacctattgccaataccattcgacctagatggtctatcatctggaatttcttactaatcattacaaacat

SEQ ID NO: 123863 - DNA, 815 bp, Glycine max
  unsure (1)..(815): unsure at all n locations
  Clone ID: PAT_MRT3847_82856C.1
atcaaactgaaatgaacatctcatcgctaacgaagatcacattatatgatttcatgaggaaaacatggataattttagtgaggatgaggatcaacagttttttgatcacatcaatcaccaaagcgatgatgagggtgttggcgaaccaacgacacctccgttggaatatcacaaacctaggtatccagtagacttgaaccttgaccacctaccacactacattgatcgacaccatttcattcagcaacaacataatgtacaaccaccaactggtgcactcaaggttggcatggccttcgatgaaaaagcacaatgtattcgagtagttaaagaatacaacatcagaaatcattttgattgcagaataatttactctgaccagagaaggctacacttcgtatgcaaattacatgaaaatggttgtacatggagcttgggcgcatgcaattcaaagaggcataaaaaatggattatcaagagtatcagaggtcatcacacttgtctcgtgccgatgcttacacaagatcatcgccaactcgacaaacacgtcatagcacagatcatccaaccaattgtcaaaacaaacccaactgtctccatcaagacattgattgcagagattaaaacgttcatgaattataccccatcctacaagaagacatggttagcaaagcaaaaagcattggagatgattcatggaaactgggaagaatcatatgccaaactgccaaaacttttcggagctttgcaatcttgtgttcccgggactgtggtcgctgctcaaacagaatccttgtatgangggggagaaatag

SEQ ID NO: 123864 - DNA, 551 bp, Glycine max
  unsure (1)..(551): unsure at all n locations
  Clone ID: PAT_MRT3847_82857C.1
gttcgtgagagaataagcagtaaggactctccttagtaattacaatcacactctaattaagtaaacttcactataaatactttccataaactacttctaatttatacataaactaattttaataagaaatggtttaacttcttcaaaaactaatctaaactcgtaaaaaaagccatttttttctttgaaaataaaagattacacaagcaagtgctaggtgcatagatgcacctttgacagtggtgcatattagatcaatcaaacacacaggccaagtttaaaatagaatgaaataaaaaatgttttttaaaaattgagtttttaagaagccagatttgcttcttaaaaaactaatctgtttttttttattaaaaaaaaaaaacaaatacagtttgaactttgaacagagatactaaaaggcaggaaactgcttattttattaaaaaaaaatcttgacaaacaaatttaaacacccaatatctcanaatattaaaaggaaaatttagaatcattcaatctctattactaaatcatccaatctctattactat

SEQ ID NO: 123865 - DNA, 2514 bp, Glycine max
  Clone ID: PAT_MRT3847_82858C.1
atggtggggaacgaaatgctaggcagtatatctggaggacaaaggaagcgggtaactacaggggagatgctggttggaccaacaaatgctctattcgtggatgaaatatccactgtcttagacagctccacaacttttcaaattgtgaggtctctcaggcaatatgttcacattcttaatggaactgcagttatctctctagtccaaccagcaccaaagacttatgaactttttgatgatattatttttataactgagggtcaaattgtctaccaaggactccgtgaatatgttcttgaaccttttgaatctgtgggttttaaatgtcgtgagagaaaaggtgttgctgactttcttcaagaagcaacttcaagaaaggatcaagagcagtattgggcgcacagagatgaaccacacaggtttgtaactgttactcaatttgctgaggcatttcagtcattccattttgggaggataattagagaagagcttgcaactccatttgacaagtccaagaaccacccagctccattaaccactaaaaggtatggtcttatgatcctggcaatatttaccatgacagtctttctgcgaactgagatgcatcgggattccttggatgatggaggtgtttatgctggtgcactatttttcgcagtaatagtgcatacgtttaatggattggctgagatgtcaatgaaaattgtaaagcttcgtattttctacaagcaacgagaccttctattctatccttcgtgggcatacgccattccctcatggatccttaagatccctattgcatttatagaagctactgtttgggtatttctcacctactatgtaattggatttgatccaaatgttgggaggttgttaaagcagtaccttatgctattactgataaaccaaatggcttctgcattattccgagttattgcagcacttggtaggaacttagtggtggctagcacatgtgggtactttgcacttgttgtcctttttgcattgggtggattcgttctgtcaataacatttggcaagccacagacaataataattgaagaatcagagggggatatgccaaatgggagagcccgagaagatgaattaacacgcttagaaaattcggaaataactattgaagttgtgagttctagccgcgaaaagaaaagaggaatggttcttccttttgaaccatattgtatcacatttgatcaaatagtatactctgttgatatgccacagattacggtcaataataaagggagtgttagtggtgcatttagccttggtgttctcacagcattgatgggtgtaagtggtgctggtaaaactacattgttggatgttttagctggaaggaaaactggtgggaatattgagggaaacataaaagtttctggctaccccaaaaggcaagaaacatttgctcgtatttctggttattgtgagcagaacgatatccattctccccatgttaccgtctatgagtccctggtctactctgcatggcttcgtttaccagcacaagttgaatccaacactagaaagaacccattgaagaactcactggttggtttgcctgtgaatggtatcttgacagaacaacgcaaaaggctaacaatagcagttgaattagtggctaatccatccataattttcatggatgagcctacttctgggttagatgcgagagctgctgcaattgttatgagaactgttaggaacacagttgacacaggaagaacagttgtttgcaccatccatcaaccaagcattgatatatttgaagcttttgatgagttattcttaatgaagcatggaggacaagaaatgtatgttgtgccattgggacctcattctagtcaattggtcaagtattttgagagcattgaaggggttagtaaaatcaaagattgttacaacccggcaacttggatgttggaagtcacaacttccgcccaagaacttaccttaggtgttgattttcatgagatatacaaaaattctgagctatgcaggagaaataagttacttatagcaaaactgggaaaccccattcctggttcagaaggatcttcattttcctactcaatacgctcagtcacttttggtccaatgcttggcttgcttatggaaacaacattggtcctattggcgcaatccgctatacactgctgtgagatttcttgcaactattgtggtagccttgatgtttggaacaatgttctggggcctcggaggcaaataagcattcctgtgtggtggaggtggttttatcggatatgtcccgtggcttggaccatatacgggttggttgcctcacagtttggagatataaccaatgtgatgaaatcagaaaatgagtcagtgcaagagttcataagaagttattttggtttcaagcatgacttcataggagtttgtgcaattatggtttctgggtttgtagtgttgtttcttcttatttttgctgtctcaatcaagcccttcttcaacttccaaaggcgatag

SEQ ID NO: 123866 - DNA, 419 bp, Glycine max
  Clone ID: PAT_MRT3847_82859C.1
cctctagctgatcttaaggcgcctttttttttttttgacccatatcattatattaattcgataaaggatttggagaagaaaagacaatattttaaaagaacttttgttgatattaatcctagaatgaggaccatcaaaatctacaaatggacagaggaatatctcatgagaagatgaggatccactacaaattaaccttaagtaaattttccttcccactgaacttaggggttaacactacaaacactgtatactcaaatgtttacattttggtccaaagaatggatcacaaggaatttactggcataatggggtagagccaacttctaaagcttatttggatacatgcactatggctggagttgcataaaagtaaacaccttagttttgctgagactgttacaggtactaccccatgg

SEQ ID NO: 123867 - DNA, 391 bp, Glycine max
  Clone ID: PAT_MRT3847_8285C.1
gtcaactgcaaatgtcctgaggcctttcacaaagcctacttgcctggttcatgcacatgtcaagcagtgtagtgcctgcactgcattaaactcttgtaaccctcctagtatagagtggcatatcaatgatcagcatattgtccgtgcgactaattgacgctataatcggggaatgactaataaccgcgcgcacaggtggactctttattgccttcgcgctatagaatctccacgtggcctcaaggactcagcagtcagggatctgtccatgcctagtgtcgctgcaagatacaaaaagattcgcctagtctttcactgccctaacaaagcggctgataaatgcttgtaaaaatgtagaaggattcttggttatgagggcatggcattctgc

SEQ ID NO: 123868 - DNA, 338 bp, Glycine max
  Clone ID: PAT_MRT3847_82860C.1
gccccctcctttgccttaggaaaggtttgacaatttttttagatctacagggccggggtttttgaaactttatgtttttaaaaaaaatttttttttgggagcttaaatgccaaacaaagtgaattttcattttaattttggggaaaaaatggttggggaaatttaaatttgttggttaaaggtcgcaacaatttgggaaaatgggaaaaggcactaaataataatttttaaaagaggcttgtttttggtgacaatgttaaactttttaagggactttttagttgaggaaacttttcgggagctttttgcgaggaaactttctctaatactttgggggg

SEQ ID NO: 123869 - DNA, 208 bp, Glycine max
  Clone ID: PAT_MRT3847_82861C.1
tcggcgaaagactttaggtttggaattgggaattaggggtggtcgcgtcaccaaaattaaccaaggtggggttaaaccttcctttggggaaaaagggtccccttaaatgcaacggcctttgacccattggggaccctaaaaaacctgggggcggttaaaacggccccaaaacccgacaggatccgtttccaaaatgggtccccctttt

SEQ ID NO: 123870 - DNA, 399 bp, Glycine max
  Clone ID: PAT_MRT3847_82862C.1
ccacgcgtccgctacgatccgctctctcttttcacgggcaacaacgccgaataataagaagattgtggctgcgactattatttgaacacctctgaaacaccagcactgatctctgatgcatggcggctgtctgatctctgttttcgcagtactgactctgattgctgatgcgttaaggtgttccgcctcataagcgagtcggtgttgctccatcatcaccatgggtagaatcacgactctgtgatcttttacttctacccagataactcaaagggccttgttctttgtcattcatgccgtcaagtgctcaactgacaacatcctcatcgtattcatcattcctacaagtgcacagacaaacaacatttgagggtgagtatgctaaactgggggaaaggg

SEQ ID NO: 123871 - DNA, 358 bp, Glycine max
  Clone ID: PAT_MRT3847_82863C.1
gaacaccaaaagggacctactacttcaacaccaactccggtcacttgtgtgcattgatccatggctggattcattaatatcgtactttcgggaatagtgtagctaataggaagaatgaagcggtgcttatgcacaactggcgatcttttgccgtggggatcctctcgtggataatggtaacaacaactttttggcaactacagttcgagcatatgctcccccttatggcgttgattacccaaccggactacccactggccgcttgtgtaaaggctacatcattcctgacttcgattagtcaatcacttgaggccgaatacacattttcttacttagatcccctcctcgacggcgaaag

SEQ ID NO: 123872 - DNA, 291 bp, Glycine max
  Clone ID: PAT_MRT3847_82864C.1
aaagaataagaaaatgtataatattaatgttcaatgacatatatatttgcacattctattggataattcaaaaactagcaacatagtgtaatagataacacattaataaacaaccaacttcggtgtatctctcatcagcaaaagagctaattctgtcacctcttaatttgctttcttctctaactactatagtttccaaaggtcaaactagtactatgtatataagaacactagtattaattagttaatgattcacaaccggaaacttaattgctttttacatacaaactc

SEQ ID NO: 123873 - DNA, 537 bp, Glycine max
  unsure (1)..(537): unsure at all n locations
  Clone ID: PAT_MRT3847_82865C.1
cttgggaactgaataactgctaggtccttttggagttgctaaaatagttgtttatgttgtttcacctcctttgcagccgcctttctgtggtggaaaccgtgacaaaattcagcagaagatagttaaagacaagattaagctgccagcatttttgtcaagtgaagcacattcactgttgaaaggggtaatcagtagtccacaaagaagatatttccattgattgttctggaacagttcatctaaatctcatgattatttggcacataataagctctagataacttttccgttttaaaatactattgtcaatagaggcatgcctatgagatgtttaattgccctaccttgaagggtcttagaataattagtgtttctttggagcatgatcactaatgcacatgttatgagctttttcttcattgactgttaaaggattgattnttttttttttttatcatatcaaagatgaatcatcttttcttgaatgctgccaaaattcatattttttttttacaagagaggcaattcttgattgca

SEQ ID NO: 123874 - DNA, 349 bp, Glycine max
  unsure (1)..(349): unsure at all n locations
  Clone ID: PAT_MRT3847_82866C.1
ggacgcctgcggtaccggtccgaattcccggtcgaccccgcgtccgcacgaagtgcaatagcaattccgctactacaaaaaaccttttcctattccctttctctttcctgaacccaacacaacaacacaacacaggataaataaataaattaaaaactagctaaattcctctctctctctctttctcttcgaggggttgggtttcntcttcctccctttgggagaanaagaagagcccaccgcttgcggaccgcccgttccgtgcatttttttgaagggggcccgctgtccatgttttgggggccggggggggggcccccagggggggggggggataaccccccccaaa

SEQ ID NO: 123875 - DNA, 499 bp, Glycine max
  Clone ID: PAT_MRT3847_82867C.1
attaaaactgattgagcatcgtaaattcttcacttttaatattggctgcacaaaaacttaaataatattaatttaacaattatttactaaaaaaatagatttttttttataaatttctatataatttaatcccaaaatatattcataattaactattatggaaatcatttcaatcttgatcaaccttagaagagaccaggtaaattgtcccaagagtagcatccttggttttcatcatggcttgcggtgttggagagaggaaacaatgaagttatgggtttgatatcaagtacaaaattgtcatctgtcttgccactaccagacgattggacattggacacttctgtggcactgttattgtgccactcatgaccatgcatactggaagatggaaccactgtaagcaatgatgacacctcctcattcatgaatttactgaaggccggtgcctctttctttggttttggttcaaaagttgaaaaaggccatttaagagagc

SEQ ID NO: 123876 - DNA, 390 bp, Glycine max
  Clone ID: PAT_MRT3847_82868C.1
tgccaccaacaatttttcgttgaataataagattggacaaggtggttttggacctgtatataagggagaattagtggataggcgacaaattgctgtcaagagactatcaactagctccggacaaggaataaatgagttcacaacagaagtaaaactgattgcaaagcttcaacaccgaaatcttgtaaagctccttggctgttgctttcaagaacaagaaaaattactaatatatgaatacatggttaatggcagcctagacaccttcatttttgatcaagtgaaaggtaaattactggattggccccggcgcttccacgtaatatttggaattgctagaggacttttgtatctccatcaagattcccgattacgattattcatagagat

SEQ ID NO: 123877 - DNA, 340 bp, Glycine max
  Clone ID: PAT_MRT3847_82869C.1
ttataaaaaaaaatattggttttttttggtgtgatatccttgtttgtttaaaaaccaattgaccaacttgcatttgctccatccgggggaaaaaaaaaaaaaaaaacttaggggggcactattattgactgtggcccagggaaatttcttgagtccaggaatgagaacgggccccatgcttggttttcaccaaattatgcatgggaacaaattcggcgacccaaacaacctttgggaacggggccgcgagacttgaaactctacgggggggtccccttaattttgtggggcagaggctccattgatcttgacactctctgggggaaatgatgcaaatacc

SEQ ID NO: 123878 - DNA, 213 bp, Glycine max
  Clone ID: PAT_MRT3847_8286C.1
ataattttgatgtttatcttacaattcatatgccaatttgccaacttggtatgatccatatttgctagtgagagtttcacctgagtataaaagttatcctggtgtattttatttttgtagtagtgtcagaagaaacaattaaactttgattaaaccatgttctttttcgatcaatatggagaaaacattcaattcaaccaatccttttttctt

SEQ ID NO: 123879 - DNA, 426 bp, Glycine max
  unsure (1)..(426): unsure at all n locations
  Clone ID: PAT_MRT3847_82870C.1
aatggaacaacatagaattttgtcaccctgtttgtgtgccaaacactaccatatattttttttacagtaataaggtttgagttcattaaaactattgcgttggtttgaggatatgtgcttattggttttgtttggtttcctctgaattgaagatctgctgtggttggaaaatgaccctaatgcaacactcaggcaaaaagaatgcattgatggattccttggctcttatgtcttcattgattggatgaaaaataatcagataaaacaagagctaatgcatcacattagcctttacattgcctgtggaaggggagcccatatagcttcagaagtgttgtttgaataattaaggggtgttatggaataactgaaagagcgttaagtgttagtataagtaattgagaattggaataattgacagcnnat

SEQ ID NO: 123880 - DNA, 206 bp, Glycine max
  unsure (1)..(206): unsure at all n locations
  Clone ID: PAT_MRT3847_82871C.1
ccntaaatncacgnnacacacgcanggacntcggnacgagnggcanganatatgancattngcacgnccacggcanangaaggtgcntcannncatatacaatccagcnanccggnaacatnacgcaagaacggcnanancgtcatcgaaggaagncacngnnaggtncnnggcagtttcnacntaccananncnggnaanatcgg

SEQ ID NO: 123881 - DNA, 477 bp, Glycine max
  Clone ID: PAT_MRT3847_82872C.1
cgaaaaactgttttggtttgatttcatttccgaatacttaattcaccactgtgagtctgtaactgttctgttcatccctattggattttcagccacattcttcttattcccgaatatacacccaaattccactttcctatcctagggtcaccatcaccatgagagccaaattgctcgtgttcccattacgtggcaggaactggtgcttctccagaaccatcgatcattctcttctctccgcttcccatgattcctctcaatcatccccttcaaccctcaaaggcttatggaccaacatcaacgtccgtgataaaccccttaacgccaaagccgagctctttgtcgattacatcgccaacaagatgaatagcgtttggattggcttggagaaagcgccggaggggtccttcaagaataagattcatgggttattttttggtttttggtttgttgttcagtggtgaagttgtttatttc

SEQ ID NO: 123882 - DNA, 351 bp, Glycine max
  Clone ID: PAT_MRT3847_82873C.1
aaggcaaacacaatttggttacctttttttttttttttcggggaagttgtaagtgcaaatttttggcccggttaataatgggggatagtcagttttcgttttttttaacaacattaagcctttttggaaggctggttcaaatggaccttgctttgacggttgtcggttttggccaaacgtttttgggaattaaagctgcaaagggagtggtcattgttcccgaaaagaaatggccatttttatgggtggatgaagcatcagtccagaaaattcagtttttaccaccaattttaggtgtcgattttaggggcatgggtcctgattttcaggtttgggttcggaaaagcagga

SEQ ID NO: 123883 - DNA, 227 bp, Glycine max
  Clone ID: PAT_MRT3847_82874C.1
gccacacattctttcaatcctccgaagaatgcacagaccataaggaacctagtttaaataacacctgaacaaattgaaactgtcaactgaagacttgcaaaaaaaggatacacatctgaaaataacattcatgatcatactgaagacatttatagatctatcgacatgccaacattactcagactattaccatttccttattcaggcatgctgtaatgtcatacatt

SEQ ID NO: 123884 - DNA, 974 bp, Glycine max
  Clone ID: PAT_MRT3847_82875C.1
aattcggctcgagcgaagatcatcctcgtttatctccagtttcttctttagagtctgagaaaaaggttaccaaaagaagctttgacaattggatgagctgtcacctgaaagagagaggcttgtggatgattgtgctcaaacagaccctatgcctatggacagttccgagtctgatgcagatgtccaggagcatttaggaaaggattttagtgcgctggcagatatgtattggcctgattccttgggacctttggatttggaaataccatcatcaactaaataccatagcgaagatctaatttttagtgatagtcttagtggactgaatcgcttgatagccagcagcctggatgcattccagaattgctccttttttgggtttgacaagaaggaagcaccatcaacagttgaggctcgagaatctgccactctttcagattttaaaattggaagtggcatctgagactcgtcatgattggatcttggtaatggttttccatttctggcacgaacacaattggagtttgttaagatttaacattttttcttatactgactggaggtgtgcatgctaaagaattggattgagccacttccaactcttcctgtatatgtttctctaatctgcgtctctttccttttgtacaaaaaaaaatgatcatggaaggatcagtctcctgtagaaatattccttttttaggtgaacatatatcttttttattctctgcttctggatgttgtattttaagaagaccgtcttgcaactccgtggcatggacttgttttctaagctaatggactccaccccctgctctctttctatcacgctaattctacaacggactcgagccctttctgtcgtgcccctctcttgggtttgacctctaggaagcaccttcaacagttgaggctcgagaatctgccactctttcagattttaaaattggaagtggcatctgagactcgtcatgatt

SEQ ID NO: 123885 - DNA, 372 bp, Glycine max
  Clone ID: PAT_MRT3847_82876C.1
gcgtaccatccttccctatagagagtcttctaaaacctagacgcattaatggatataattgtacacggagtacacctggtatgaaatctctataactcccgacggacctatgtgagactattcttgaaaacactgcggtgatccaaagagtgacgataacaagcctgttaaaagagaactgtgaatgtcccaacacgtaaatgtacaccaggccctccagatatatcaacaacactctgtgtattggcagagaagatagcctgatatatatcacgagcgtgtctagaatctacggatgtctttcggacgcctgaagatagcgggatgggttcttggagtggcactctcgtcttctttccacattcctatcgt

SEQ ID NO: 123886 - DNA, 236 bp, Glycine max
  Clone ID: PAT_MRT3847_82877C.1
ggccgccctcgtccttttttttttttttcggcaaaaagatatattcttattggggaggggcgaaaaatcatctagtgccaccaaaacacacaacatgttttcccaaacaaagacaatggctatgctacaatttatggttctggtgtatcaccaaacgaatgcattcctatttttacccaattattctgctttatgactctgttcacggcttagctttctctaactaagggcaaacc

SEQ ID NO: 123887 - DNA, 371 bp, Glycine max
  unsure (1)..(371): unsure at all n locations
  Clone ID: PAT_MRT3847_82878C.1
ttagtgataagcaagtaactcaagagatccactgaagttgttctgtgcgctcttatctttccaatatgtcaaccatgattgcctagcatagcactcataatccacttctgatgccctctgttcttctagcatgcataggtagaacctctgtacctgccactaaatagcagagntcctgtatctcccggggttggngaggggagtgtgaanccangnnacatgcatccaatatataaatatcccgnncggggggggggngggggggggcaatattttttatggtccgctncatgangaaaganacgggcatatcattcaaagattagttggggaagcaggtnattctggacatgagattgctaggggataag

SEQ ID NO: 123888 - DNA, 782 bp, Glycine max
  unsure (1)..(782): unsure at all n locations
  Clone ID: PAT_MRT3847_82879C.1
gaattcgagctcggtacccggggatcctctagagtcgacctgcaggtaagtaaaaccagtaacaactcaacccataaagtaaaatttattgaagcaaattattcatgtaaaattttgaaaaatgaaaattctattgattacatagaatgatataaagctttttgcaataatgtagaaagagcttcaatccctttggtattttcttttctagcccatgaatatgggaaatccaatcaagattcaataatgatctagtatggccaattaatttgacacaattttatcaaagttagatttaatatcatatatatcattaactcggagatacaatgtaatttatttttactttattaaaaaagaaccctctttttagtctcaaattcctaaaatgtgttatcaactaaatatagttgaaataatctattttagtctggtctggaaccagattatggccatccaactaaatgtatctcaagtacctctggtacttttctcatatatatgaatataattatatttgctgataaaaaaaaacaaaaaaaatagttgaaataatctagtcataatgaacaaagtgtttcaactaaattgggactcacaatttcagatatgtgcataattcatagaaatatcaagtaattctagactgatttactgaaacacaactactaaaacatttttcaaattcaatgaaatttggcttgaatcattntcatagtattcactaattttacatctgaaaaaaaacttacttaagctggtcaggtgaaaagacatgactg

SEQ ID NO: 123889 - DNA, 407 bp, Glycine max
  Clone ID: PAT_MRT3847_8287C.1
cccaccaccccgtttggttaattgggggccaacaaaaaagggaaaaaaattgggggggaaaaaaaacaggggaaaaaaaataacccccccctttggggtttaaaactgggtccccttttttaaaaatcccttgggaatttttttttttcaacccaagttttcttttttttaaaaaccattttttattgggtttttaaggacttggaaaaaggctttccggggaggaaggagggaaaaaacggaaggggggctttgggtttgaaaaggggcacttaaggaccgggtcctctcacgggggggaagggtcccccttgggacacctggggccaccctcaaaccgggttttggacatcccaggggacccaggattttttaggggacaactaaagcgggggaagggcatattt

SEQ ID NO: 123890 - DNA, 374 bp, Glycine max
  Clone ID: PAT_MRT3847_82880C.1
cgagcttcggctggatccacgggcttcgcttctcgggcgtcgacctcgaccgcttccccaacctgaaggcgtggtgggagcgcatcaacgagcggcctgcggtacaagctggtctggccattccttccaagcctggcattggcaacgatggatacctgcagaagctgagcgaggacaaggagttcgctgcgaaagagaaggagatcgccgaccagattcagaaggccaaagaacagtatggttacaagtactcctcgccgtgagcgatggacgttcggatgagggatgccgagctggcgtcaacgtgacgcccggcagcggcttcttggtggaagcataataaagctcacaataatttatagaaatttatcttc

SEQ ID NO: 123891 - DNA, 306 bp, Glycine max
  Clone ID: PAT_MRT3847_82881C.1
atactaaaaaactcctgaccaacatttatccgtgaggattaaacaaagaagattactaggaatgaacaaatccgccgaacaacacacacccgcacatataacaaatacggcagaacatactcttcgcgaaattaaaacgagacgaaatcacattgaacatggagagcgatcacaaggccaggaatacaaggacgattctattctatgggcacacaaattgggcgcggcgggtaaatactgaactgtacaaacacaacaactaattctcatggataattcaatcaccgagagctcgactcagccagc

SEQ ID NO: 123892 - DNA, 140 bp, Glycine max
  Clone ID: PAT_MRT3847_82882C.1
catctatatcgatcgaactgtccaaggtcctgtcacaggtgtgcaaacatcatcacgagcaggagtgtatctacctatccagcctagcagcaacaaaacagctagttcatttgagtaacccgcaacattagccaagtacg

SEQ ID NO: 123893 - DNA, 514 bp, Glycine max
  Clone ID: PAT_MRT3847_82883C.1
tctcgagccgctcgagccgctcgagcggctcgagaggatagctaatcttgtcttataaactagtaaaataaacgttacaaaagattatttgtcaaaagaaaaaaataaaaaaagcaatgctataaagataaaagaaaaacactcttgtaaggtaagtttattttaaaataagtaagaacttttattttatcataaattttggtgaatttaagtcatggtatacgttaaactaatttgaaatttacaattttttatttatttactcacattaaaaatgaattttctttaattgtctgtttggatgagcggcaaaagaaaaagttgtctatttgaatgaaactatgaaaatagagacgagagaaaatagaaatagtgataaaaaaaattatttagttgaagagtaaaaaaaaaagttgaaaactgatcacaagacagttttttctggcctgacattcgaaacacaaacacacacttagttactagaaagacatcatagattttaccaagttagaaa

SEQ ID NO: 123894 - DNA, 633 bp, Glycine max
  unsure (1)..(633): unsure at all n locations
  Clone ID: PAT_MRT3847_82884C.1
ggctcgaggaatagtctaatatttattttcctcttccaaatactttgaatgaggccactatgggaacaacgatactctttgctatgcatgctaggttgaacttcatctgccatgtaaattcatatttgaacaaagctaaatactaaatagtgttaacaagggttattttggttctcttttctggccaagtgagatcacttttacttctggaatacattcaaaaatcaaaatcatagtggtgatctgaggatgcaaaagtttctgtttatgactaaagcacacaattgcataggtctatttcaacttttagttaaaactttttgcagattgaaataattctcaatctgtttattcatgagactcacagtatataaagtactaaacttttcagtgtattatatatagattggttatttattctaactgaaaatgtcttctacttttttctcagcaaagtcatcttagaaggttcaacaagattttatcagtgagcacttgtttactatctctcaagactgaaatttngtatgagctgagtgaataaaaggagaactatgtcattggttatatctacagagttggctgatacatcatatgggaatgccagctctaacactaaaggaactgatgttc

SEQ ID NO: 123895 - DNA, 660 bp, Glycine max
  unsure (1)..(660): unsure at all n locations
  Clone ID: PAT_MRT3847_82885C.1
ccacgcgtccggaaatccttgcagccgatagtactttcatccatccatcaattctccgtttactagaaattctctctacttccgtgtctctctctccccacaataaagaaacaatttcttttatatcttctttaccttgttcgtctgtagtgcacggataattagaatagaataatattcctaattagttaagtttggttgcttagttgatgaaaaaaggaggtagctttatattcaccgcccccctcgggacagattggttattgtttgacatggacggagagagaagcagaatggtgaaggaaaggaggggatctgatatttccttttcgcgttgaattccgaattccaaatagctctttatcctgaaagagagaaagcaagttaaaagcaagcagggtagctactactagggtattgctttgttgatttttgtttgtgtttgtaaaaagctttgttttgattgttttgccaacccatcctccacccttgaaaatgtgaatttgtctatattgaaagtgttcttatcttatttcgccacacactaattttcgttttcttccctctccaagtgttaaggttcacacacattccgntctttttttcttctcttccattaaagcaagcaagtacccccccgcagaaaggggaacccctccc

SEQ ID NO: 123896 - DNA, 472 bp, Glycine max
  Clone ID: PAT_MRT3847_82886C.1
agcataccttgggctactcgtccatcagcattctaatcatgttagcggctataaacatccctttttcctcggagcctaaagccgcgcgctctgtaacaatcgacaaacatgggctgaatcggctatgttcgtcgtgctatgagattacgaggtgatctaccgacgatctgaggattccgaaactgcgttgattgctacagtaccgtgcctcgaatacgcccatcggcgggaagccttgacacataagttgaagaatcacaatgaacatgatgtccgagcatgaggctccgatattacacgaggcgccatcagagtgatggtctgagccacggagcacaaaatcgggcattgttcactgcgacatgaaaatgaagaacatcctcgtattccgtgacggaggcatcaaaattgctgatttctgactagaaagggaggcagtgcataaacaggataagagtgaatgcagggggac

SEQ ID NO: 123897 - DNA, 289 bp, Glycine max
  unsure (1)..(289): unsure at all n locations
  Clone ID: PAT_MRT3847_82887C.1
ggaagccttggctgctggtgctgatgttagtatgattggacagtttggtgtggggttnctaatctgganancctgttngcngaaaaggcnatnntnacctcccaagcacaatnatgatgancagtacntttggnagtccccaagctggaggtncattcactgcnacnagggatactcctggtgaggtcttgnnnggggtactaagatcattctcnttccncaaggaggatcncnaanannncctgaaggaccnccggtngaagnnttgaataagnaacnatccgaagtc

SEQ ID NO: 123898 - DNA, 287 bp, Glycine max
  Clone ID: PAT_MRT3847_82888C.1
catatagattgattcttgattgagacaattaatatatcttacatacaatcaggacaaagctcagacggggacaaattcaacttaaatcgactgttgatgatttctgaaactactaaagggtctatgttgtatcttaaaacgcttcaaattaaaaaagaactcatgaacatcacatactaccggaaccatttttcactctgagatattggcaaatgaaatacccaaggtgactagcttagcaagctttgatatgcaggacactgctcatgttgctggcatgattaatg

SEQ ID NO: 123899 - DNA, 491 bp, Glycine max
  Clone ID: PAT_MRT3847_82889C.1
tttttttttttttttttttttttttttttttttttttggtttattttttttttaattttggtttttttttttttatttttttttttttttttattattttatttttgaaggagggtttttaacctggaaaaacagaaaattttaaaggcacatggtttaaaaaaaaagaacacaaaacaaacaaaaaagagggcattaaaaaaaaaaaaagtcccaccagaaacagcttggggtttgtaaaaaaatcggtaggtcttgggggaaaaaaaaatggcaatgcattgcccaaaaaaaaaatgtgggtccaggggggaaccgcaattcgggggcgccggccccaaaaaggaacattaaaaagaactaaaaaaagggctgcccgaaggccaccccaatgtgggggaagaccaaaaagaggtgggaatcgttgacccccaaagggggccccccaaaaagaggaaaaaaaccggggaaaaagtcgaaaatggtggccc

SEQ ID NO: 123900 - DNA, 273 bp, Glycine max
  Clone ID: PAT_MRT3847_8288C.1
ttttttgaattatctcaaatatattcatatatattcgatttttactgtgtctattgaactaatagatgaaccgcactaaccagccaaagcaggtaataatgtgcgacaaaatagccccgggttaaccaacacagttttctccctaaaaaaaaaacaaaaacaaattcctcttttttataaaggggagggggggacgggataatccccccccgggttaaaggggcgcccctccttatttacaccctatgggggtgaatcccccccccgttgctt

SEQ ID NO: 123901 - DNA, 226 bp, Glycine max
  Clone ID: PAT_MRT3847_82890C.1
tctcacgcttccgctggcgctctcgtcggcgcactcttgggagcacactctccggagaacactccgaggccctaaaagactacctcaaggactaaccggggtccttattgtgcgttggggtgcacgagcagtaccaaaggggctaccacgagggcacacacgaaatcacggcaccaattttgtcaccactctcgacttctttaacgacctcaagatggtgctcatg

SEQ ID NO: 123902 - DNA, 250 bp, Glycine max
  Clone ID: PAT_MRT3847_82891C.1
gattccagtatgaaagttgcagttcgtatttgatgaagatagtggagcctatcatgaaaagctatatgaacgaaatccatgtggatagttatgaactctctgtaactgaatccaaacttgcttggttcacacacatagttgctccaattctcagaacaaaacagatttctggttctagtggagaatcgcatgagatacttgatgcggagatttcagcatgtgttctgcagttgattaatatttgtgacag

SEQ ID NO: 123903 - DNA, 549 bp, Glycine max
  unsure (1)..(549): unsure at all n locations
  Clone ID: PAT_MRT3847_82892C.1
aaaagaaaacaaatgtgggattgccacacaacgatgaatncggaatggcctctacatgttaaacgctatatataaatcagaaagccctatatcataactaaaaagaaagggcaaatgtataagcccttaatctcatataatttatattctaagatacgaccctctnnatccacataaacttaaattagttatacactcaagccccgaagcccctctggttttcaaggtggcctcnnncaccagtgtaatatgcaacgctattgtaacccttggnnattttgggatagtgatgnnngttgctgattagaagagaaactcacatgtctccattttgatttttcgccagaatagtttgatatgtagaagatctcactggcataatagcccagcatcgggatngncctattgtnngttagcgctcaataacatagaacgcctcctggcgtagatattggcccgcaantctaaataccttggcnttacaggcgtagtcatatgtnntggcctgcaacttgagcattcagaaacctccatgctttcgctacacac

SEQ ID NO: 123904 - DNA, 544 bp, Glycine max
  Clone ID: PAT_MRT3847_82893C.1
aaaacaatgagtattctcatcgaaagaaataacgctattgacataccgcgttattgtaacgagcctaatccacgggcagaacgtttattatcccatccaccaaacattatatgagagcttatcctataaagaagcatcaaataagctttatacagatcattggatgaatgcaactctcatttggaccccttcctccatcttgaggccggctccaattacaccaaaaggagcttgattttcacactctgatggcccagcaccaccccctcccatgtgaggaccagcaccagcttggtacatattgtcaatgataggaatgcgaatgctcctcaattcgctccatttgggcctcaaatgcatctgctcctgcgagctggtcgctagctaaccactggatggcttgctccatagcgacctctatcttcttatcgccagtgagatcaagtttctcacctgttgtgccatacctcacaccgttcctcactgttgatacatagttttccaaagcattctagggctgaaccttctttttgtgctcttgatc

SEQ ID NO: 123905 - DNA, 293 bp, Glycine max
  Clone ID: PAT_MRT3847_82894C.1
gccactcttcgattcctagatgatctaacatgaatatctctattccgcataccgggaactatatcgttggggcgtgagtgactttggttgacagaggggaaggacctgctatcaaaaataaataggggaactacttactattgagtcggcccgtggcatcccaactgttgcgaaatgattgatcaagctgaagggaacagaactactcaatagtaggtgggttacaccgtttcataaccgtacatctgggatgacgacaaaaacctgggccctatcaactccaactacacttt

SEQ ID NO: 123906 - DNA, 464 bp, Glycine max
  Clone ID: PAT_MRT3847_82895C.1
aacctttgggctgatttatgtgcttgtttatgtgcttgcatggtcgtgagagatgatagaacggggttgtacgggccgccaagccccggttcgcggttaccgtaacacgtagagtgagcctcttgacgtgaagaagtgtagagaggaggataatttctaaatatctgccctttctgcatatgatagcgagaagaagaagagaaagagaaagagaaagaagaaaactgaggaactaaatgagtagttttaggccgaggcacgtttcaaacttccagcagatctggccactttaaccgccgtataaaaggaaaacgtcgaaattattatagagaacctcaatttaatttttaagaaaaaaaaaaaaaaaaaaaaaaaaaaaaaagtggttgtctcagaggacttaagtccatgcatgtgcgtacgtgatgctacagtctcctcacagcgctattcaaacctaacct

SEQ ID NO: 123907 - DNA, 535 bp, Glycine max
  Clone ID: PAT_MRT3847_82896C.1
ctctgcctgaggctctgagccagggagcacaccacaaacggaaccaaatccctttgagcattcagcaggaggagccacgagctgtgggaaacgtacgcgggcatgcccacaacggagcgcggccgggggattctgatctccggggaggccaagtccacctccttggtttaccccaagggagaatggggggccatgaggaacctccaaacccccctaaccgggtccgggaccggggacaacgcttaccccgcaacggggggggccttttcccccacggggaaggggggggcctcggccaagccttcgggttcgtgaaggaccggggcccgccaaacgacttcggtttgaagaagggggttagaggcctcttcggtcgcattgacgaactttagtgggcccccgaggggctcaaaaatggtgcctgcggggaaagcaaagggaagtccctcgtccgcgcctttatgggggagtcggggactaatgggtgggaattcgatgggcactcacggcggggtttgaggtgtgcgtataaacc

SEQ ID NO: 123908 - DNA, 516 bp, Glycine max
  Clone ID: PAT_MRT3847_82897C.1
cggccccccgtacacctccccatctttcatttaaggtataaatagcttatcagggaacttcatatacatcttgaaaaatatcagtttttggtttggttctttatacccccataagaatgctagtggagctagaagtttctatttctggacttttttaagatcgcaggaatagttatcaactttatttttcatattgacacaaattccctttcttgaatggaaatcactataatatgccagggggaaaatcttctgatttgtgtactactattactgcaaacctaaggggcctctgtgggaatcactctcagctagaatgcagtggcaacaggggctgaacccttgcatggaaggtctgaaatttaccacttccacaacgtatctggagcagggactaacagctggatagttcacttttaaggaagaagatggagcaacaacgttactacttgccttccccgtctggacactcgattaggttcatctgacactatggttacatcactttcctttttt

SEQ ID NO: 123909 - DNA, 114 bp, Glycine max
  Clone ID: PAT_MRT3847_82898C.1
aaaaaacccttgaccccagacacaacatacacacagatggggcccgaagcaacaatgcaaatcaaacatccaagaagcgcacatccaccataagagagagctcaacaaccacta

SEQ ID NO: 123910 - DNA, 366 bp, Glycine max
  Clone ID: PAT_MRT3847_82899C.1
taccacgcgcccggcgcgtactgtcattggcgggattactactcaaattgggcacaatcggagatggcgagaagatagcggccaaaatccgcgagtgtgccggctcggaggtgttggaaatgcgcggcaatacgcttggtgtgggtgcgaccgctccgatcgccgaagcattggagtgccagagcaactcgaagagagccctttggagtgacatgttcaccgggcgactcaaagaagagattcccaggacattgaaaactttgtgcgacgcaatgattctgaggggagcgaggctgaccgagcttgacctgagtgacaatgccattggtcctatggctgtgccggggataaaagaatttcttgctg

SEQ ID NO: 123911 - DNA, 752 bp, Glycine max
  Clone ID: PAT_MRT3847_8289C.1
ctcgagccgaatcggctcgagattgaaatatcaaacggatgcgtggaagccattgcaatgaatgcttgcaaggagcaactagtttctggtttatctaaattagactgtgatggtaaatctgaagagctaaaggaggattgtgttgcatggtgggttgaagatctctcggttttgcgaatagattacttccaaagagttatttgtgccatgggaagaatgggggtgagatcggacagcattattgcatcactgatgcattatgctcaatcatcattaaagggcattggaaagtgtcaattttggaatccatcaaggacaaactcaagtccaactagtgtagaaaaggaccagaggataattgtggaaactctagtaagtctcatgccaacagacaaaggctcttccattccattgacatttttgtttggcatgttaaagatggctatcatgttgggtgccactatcccctgtaggcttgagcttgaaaggaggatcgcgttacggttggaaatggtcttactagattatctgtttatactcatcttttcatatgtgttgtcaccttattttatgttgtcaccagtttcattttttctgtatttttatccttttattgtttttaattttattatttttatttttaatttctttcactcttctgtgtaatttttatattttattattatataatttatactcttttttttatattttcttattcttattatacttttttcttttatattattttt

SEQ ID NO: 123912 - DNA, 295 bp, Glycine max
  Clone ID: PAT_MRT3847_828C.1
ggattaatcgcgagggccgcccgggcccacaagagcgggtggattttaacaagccgacccggagcctccaaacaccccaggtgaggaggtcaaggggggaagacggaccgaataagacaaaagaaagacggggaggaacagtcaaaacagccgggggggaggacaagaagacgccgacggcagacatgagcagaacccagaaaaggggcaacaagcaaggagccaaatggggggccgagccccaacaggagaacggactggagaaaaacgaacagcacagggaaaaccccaacag

SEQ ID NO: 123913 - DNA, 443 bp, Glycine max
  Clone ID: PAT_MRT3847_82900C.1
cggtctcgtgggcctcagactcagggtttccactttccgctcacatggaaaatcaaagagatccggtatttattttttcattttaatcctttgactcttcggattctccgatgatttcatttcacttttgcctccatttgataatcgttgcccgcaattaaccgaccctctgtaacgcaagatcgcatgcatcttacctgttttactgatttggttttcagctacttccacgtccttcaaagttcttactttaactcttgtttttgtgaattgcaggtgtagaaatctcgtttctcagtcatcttaatctcaatggaatctattgtgagtttgtttctacatactctcccccttctattttatcccaccatcaaattttaccacttttaatatgactttatgaagccttaaaattttttaaaatacgcttttatgttttattc

SEQ ID NO: 123914 - DNA, 258 bp, Glycine max
  Clone ID: PAT_MRT3847_82901C.1
tggggggcaccatctacaggagcctggggcttgggtttgtccaccacaaaggcctgagtggacaacaccgtttcaggaactgaagcaaccatctgcaaagaacacctaattgccttggcaggggctagaactccagcctacactaaatcctcatacctgtctggcaaggaagtgttaccgacctcccattcaccactttttattgtctacacggatcttaggcttctattcctgcctgttgagcaatcaatgctgcag

SEQ ID NO: 123915 - DNA, 127 bp, Glycine max
  Clone ID: PAT_MRT3847_82902C.1
gtgtgaaatcgtgacacctatgcactgaagaacaagtaccgaaaccttctctataagacgacttcatcagcaaacatgaagtacatcagaagctcctgcatcgacatggggtggtaatggtaaggaa

SEQ ID NO: 123916 - DNA, 893 bp, Glycine max
  Clone ID: PAT_MRT3847_82903C.1
tacggctgcgaagacgacagaagggacaagtcaatttctaatataatgtagaagcttcattgttgagttttgagtcattaaatttacaaataaatgaattgtgtgtataaaatggaaaaaaaataatcattaaggatctgtttgtttgctttaatttgataacattagatgtttttgatgaagtttgtgaagtgtgtaaatgggtgcagatgggctgctatagcttcctaccttccacaaaggacagacaatgacataaagaactattggaatacccatttgaagaagaagctgaagaagatgcaaagtgggggtgatgatgatgataataatggtgacaaattaaactcttgttattcacaaaataagggtcaatgggaaagaagactttaaacagatatccacatggccaaacaagccttgtgggaggcccgctcccgcgacaaaccaacccaaattttcccagagaccaaattaccctccacttcttcacaccaccaccccacaacaacaacaacaccaaaccaaacaacatccttgtatgcatcaagcacagaaaacatagccagattgttggagaattggatgaagaaatccccaaacatcacgaccacgaccgcaacaacacccgtcaccatttttttcagcgttaccaccatggtaataaccacagggtctagttctagtgagggaacacaaagcacaatcacatgcacacaggagtatgcccttgactccttgtggagcttcaactctgaacgctcttctcaatctgaagaaaacaccaacttgggtgagagcaagccacagtaccaagagccctcagagacacaagtccctctcatgttgctggagattggctctttgatgatgctgcacctcaatgcaatgaa

SEQ ID NO: 123917 - DNA, 659 bp, Glycine max
  unsure (1)..(659): unsure at all n locations
  Clone ID: PAT_MRT3847_82904C.1
ccttccaccccacttccctttcttatcttcttatgacactttgagagttcaagttttctttttccccaaacccaaagattttaggttacagaaaatggcattggaactcatggggttcccaaaactagacgaacaaaaggccattcaagaggccgcatcagaaggcctcaaaggcatggagcacttgatccgaactctctcccaccaaccctctcacttaaacaccgaactcaccgatgttactgtttccaagtttaagaaactcatttcgctcctaaaccgaaccggccatgcccgattcagacgggccccggttcagtactcatctccacccgcacctgttcacaacgctaacacttccacctcatcaattcaactccttctccgccgcaaaaccctaatattcccgcgccggcgcagtttccttctcctgcgccggtggccgttcaccacgcgccggtgacgctcgatttcacgaagccgcacaacgcgcttctgagctccaacgcgaaatctgttgagctcgagttctcgaaggagaccttcagcgtttcatcgaactcgtccttcatgtcctccgcgatcaccggcgatggcagcgtctccaacgggaggatcttcctcgcgccgccggngacctccgcccgaaaacctccagc

SEQ ID NO: 123918 - DNA, 304 bp, Glycine max
  Clone ID: PAT_MRT3847_82905C.1
gaataatagtcccttttctgaaattctcctaactctctctctctctcaacaatggctcctacttttgttcctaagttggtttctgctgcagcattgttgtttaactccacgatggctcaatctccaacttcctcccccgccttaacacccaccaacacgccggttggcactccacctaagagggcgttgtccccgttccctgttcctgctgccgttccaaccgtcgtcctctccctccggggtccacctaccttcttctccttcggaacccccaatttgcagctgctactcccaaacatccctc

SEQ ID NO: 123919 - DNA, 539 bp, Glycine max
  Clone ID: PAT_MRT3847_82906C.1
cccacgcgtccgggtcatcagatttatatcattaccaattccatggcatggtgcttcaacttcctattctgcggccttttgaagttgctttcttgtttggcaaggtgtggcgattcctgttatgataacagaagagatttctactctatgattggctgctgcgactctatgaagattttttatgcatattacttgttttacatagtgggacagtttctagcctctaatctaaaggttggataactctgcaccaacgcgttctaccaagggggatataggaaaactcaaaagagtcagttttttttttttcctatttctgataaatgttttttgagctgacattacgatttacatttttgtttcttgtataaaattcccaggcttggaaaaggattgtaatctgtttggtcagtatttttttttttttttgatccagtgtcagggagagatcttgttggtccgttggatgagtggctgtgtttttcctcccttccacattttcaaaaatgtaatttgatgtcttctgtataaaaacaaaa

SEQ ID NO: 123920 - DNA, 255 bp, Glycine max
  Clone ID: PAT_MRT3847_82907C.1
tggtacctctagacggccgcttttttttttttttttttttttttttttttggaaggcccccctacatggttttcttagacgtctagtgctacctttattccgtcccacttgccggggccttcctggcggccagcttcacggatcttgggccctcggttccggactgaccgcccccccgggccgggggggtgttcttgatgatccctcccggctatttcgggttgccgttgccctctgcgtgggttcagtgccttt
